United States Patent Application Publication US 2005/0228172 A9 - sequence listing, part 17

SEQ ID NO: 56444 - DNA, 1768 bp, Homo sapiens
aaatcatactcagttttagccccttatttcagtcgtttaccaagaggtcctcatgaggcttttgcttagtagtatttttagatgagtaaaaagccagtttttcaggttagagttaatatatactattaacttgaactgatagcattgttacccactagataactatgacagaaatcctaatacaagtggaaatcattttctgataccacatttaattagttttaaatatatttcaaaaggattttttggaagtgaaatgaatatacccaggggccagggactagactgcacagaatccaagaccccctcagttctaggataaataatggcaaccggcctttagccagtcttcctaccctgtcttgtcctcctctaatcctttttttccaacatggtgaacagagagagctttctgaaacatagaaccmatcaaatcatccccctgctttcagactttcaatggctggcttctcattcccataggatgaagtctacttagcataacttatgatgttctttatgagctattccatgcataccccaacagcctcctcttttaccttatctccaccattatttttactctaacttcaacccaggaaacacttttcctaagtctttaaatatgccacgctctccttttcttgaacctttgcacaggctctaacatctgccttgctaatatccttcctttttcttcatttggttcatctcggttaaggttgttatatcctcccaaattactttgctcagcccccaagactggatcttcatttgtcctctaacaacaacccattaacttcttttcttgaaattaattagctttcaccctttgtgtaataggctgaataatggttcccaaagatatccaggcattaatttctggaacctgcgaatgttacccttgcatggcaaaagagacgttgcagatataattaaattaaggaccttgaggtgagaagattaaactggattatccaagtgggtcctaaatgcaatcataagcattcatataggagaaagagagaggatatttgacacatagaagaaggcaatgtgaccattgaaacaaaatccaatgctgctgactttaaagacaaatgaggaggtccacaagccaagcaatgcaagcatttcagctctagaagctggaaaagtcaaggaaacatactccccactagatcctacagagggagcttgaccctgcctatacattgattttgcccagtgaaactaatcttggacttttgacctccagaactgtgagaaaattaatgagtgtgttgtaaaccactaagtttgtgatgatttgttacaataaccaaaggaaactagttactgtaacaaatcatcacccaaaacacttatgacccagtcatttgggttccatgaggagagattttccttgaacacttctggcctcttgccccacccgtatccctttgagcttggtgtatgggtagatgctattccctgccataacaccctttacttacccctctccctgacagcatccctgcctcattacctggatcatcagctttgtgagcacagggttcacctttgtcttactcattttggcatccttaactttttgcctggggcatgacattataatgaattgtatgaaattcaacatattagactactatgacttgaatgtgtcctccaaagttcatatgttgaaaacttaattccaaatgcaaaaagtgttgagagttgtgtgatagttaatactgagtatgatcttgattgaaggatgcaatat

SEQ ID NO: 56445 - DNA, 1768 bp, Homo sapiens
aaatcatactcagttttagccccttatttcagtcgtttaccaagaggtcctcatgaggcttttgcttagtagtatttttagatgagtaaaaagccagtttttcaggttagagttaatatatactattaacttgaactgatagcattgttacccactagataactatgacagaaatcctaatacaagtggaaatcattttctgataccacatttaattagttttaaatatatttcaaaaggattttttggaagtgaaatgaatatacccaggggccagggactagactgcacagaatccaagaccccctcagttctaggataaataatggcaaccggcctttagccagtcttcctaccctgtcttgtcctcctctaatcctttttttccaacatggtgaacagagagagctttctgaaacatagaacccatcaaatcatccccctgctttcagactttcaatggctggcttctcattcccataggatgaagtctacttagcataacttatgatgttctttatgagctattccatgcataccccaacagcctcctcttttaccttatctccaccattatttttactctaacttcaacccaggaaacacttttcctaagtctttaaatatgccacgctctccttttcttgaacctttgcacaggctctaacatctgccttgctaatatccttcctttttcttcatttggttcatctcggttaaggttgttatatcctcccaaattactttgctcagcccccaagactggatcttcatttgtcctctaacaacaacccattaacttcttttcttgaaattaattagctttcaccctttgtgtaataggctgaataatggttcccaaagatatccaggcattaatttctggaacctgcgaatgttacccttgcatggcaaaagagacgttgcagatataattaaattaaggaccttgaggtgagaagattaaactggattatccaagtgggtcctaaatgcaatcataagcattcatataggagaaagagagaggatatttgacacatagaagaaggcaatgtgaccattgaaacaaaatccaatgctgctgactttaaagacaaatgaggaggtccacaagccaagcaatgcaagcatttcagctctagaagctggaaaagtcaaggaaacatactccccactagatcctacagagggagcttgaccctgcctatacattgattttgcccagtgaaactaatcttggacttttgacctccagaactgtgagaaaattaatgagtgtgttgtaaaccactaagtttgtgatgatttgttacaataaccaaaggaaactagttactgtaacaaatcatcacccaaaacacttatgacccagtcatttgggttccatgaggagagattttccttgaacacttctggcctcttgccccacccgtawccctttgagcttggtgtatgggtagatgctattccctgccataacaccctttacttacccctctccctgacagcatccctgcctcattacctggatcatcagctttgtgagcacagggttcacctttgtcttactcattttggcatccttaactttttgcctggggcatgacattataatgaattgtatgaaattcaacatattagactactatgacttgaatgtgtcctccaaagttcatatgttgaaaacttaattccaaatgcaaaaagtgttgagagttgtgtgatagttaatactgagtatgatcttgattgaaggatgcaatat

SEQ ID NO: 56446 - DNA, 1768 bp, Homo sapiens
aaatcatactcagttttagccccttatttcagtcgtttaccaagaggtcctcatgaggcttttgcttagtagtatttttagatgagtaaaaagccagtttttcaggttagagttaatatatactattaacttgaactgatagcattgttacccactagataactatgacagaaatcctaatacaagtggaaatcattttctgataccacatttaattagttttaaatatatttcaaaaggattttttggaagtgaaatgaatatacccaggggccagggactagactgcacagaatccaagaccccctcagttctaggataaataatggcaaccggcctttagccagtcttcctaccctgtcttgtcctcctctaatcctttttttccaacatggtgaacagagagagctttctgaaacatagaacccatcaaatcatccccctgctttcagactttcaatggctggcttctcattcccataggatgaagtctacttagcataacttatgatgttctttatgagctattccatgcataccccaacagcctcctcttttaccttatctccaccattatttttactctaacttcaacccaggaaacacttttcctaagtctttaaatatgccacgctctccttttcttgaacctttgcacaggctctaacatctgccttgctaatatccttcctttttcttcatttggttcatctcggttaaggttgttatatcctcccaaattactttgctcagcccccaagactggatcttcatttgtcctctaacaacaacccattaacttcttttcttgaaattaattagctttcaccctttgtgtaataggctgaataatggttcccaaagatatccaggcattaatttctggaacctgcgaatgttacccttgcatggcaaaagagacgttgcagatataattaaattaaggaccttgaggtgagaagattaaactggattatccaagtgggtcctaaatgcaatcataagcattcatataggagaaagagagaggatatttgacacatagaagaaggcaatgtgaccattgaaacaaaatccaatgctgctgactttaaagacaaatgaggaggtccacaagccaagcaatgcaagcatttcagctctagaagctggaaaagtcaaggaaacatactccccactagatcctacagagggagcttgaccctgcctatacattgattttgcccagtgaaactaatcttggacttttgacctccagaactgtgagaaaattaatgagtgtgttgtaaaccactaagtttgtgatgatttgttacaataaccaaaggaaactagttactgtaacaaatcatcacccaaaacacttatgacccagtcatttgggttccatgaggagagattttccttgaacacttctggcctcttgccccacccgtatccctttgagcttrgtgtatgggtagatgctattccctgccataacaccctttacttacccctctccctgacagcatccctgcctcattacctggatcatcagctttgtgagcacagggttcacctttgtcttactcattttggcatccttaactttttgcctggggcatgacattataatgaattgtatgaaattcaacatattagactactatgacttgaatgtgtcctccaaagttcatatgttgaaaacttaattccaaatgcaaaaagtgttgagagttgtgtgatagttaatactgagtatgatcttgattgaaggatgcaatat

SEQ ID NO: 56447 - DNA, 1768 bp, Homo sapiens
aaatcatactcagttttagccccttatttcagtcgtttaccaagaggtcctcatgaggcttttgcttagtagtatttttagatgagtaaaaagccagtttttcaggttagagttaatatatactattaacttgaactgatagcattgttacccactagataactatgacagaaatcctaatacaagtggaaatcattttctgataccacatttaattagttttaaatatatttcaaaaggattttttggaagtgaaatgaatatacccaggggccagggactagactgcacagaatccaagaccccctcagttctaggataaataatggcaaccggcctttagccagtcttcctaccctgtcttgtcctcctctaatcctttttttccaacatggtgaacagagagagctttctgaaacatagaacccatcaaatcatccccctgctttcagactttcaatggctggcttctcattcccataggatgaagtctacttagcataacttatgatgttctttatgagctattccatgcataccccaacagcctcctcttttaccttatctccaccattatttttactctaacttcaacccaggaaacacttttcctaagtctttaaatatgccacgctctccttttcttgaacctttgcacaggctctaacatctgccttgctaatatccttcctttttcttcatttggttcatctcggttaaggttgttatatcctcccaaattactttgctcagcccccaagactggatcttcatttgtcctctaacaacaacccattaacttcttttcttgaaattaattagctttcaccctttgtgtaataggctgaataatggttcccaaagatatccaggcattaatttctggaacctgcgaatgttacccttgcatggcaaaagagacgttgcagatataattaaattaaggaccttgaggtgagaagattaaactggattatccaagtgggtcctaaatgcaatcataagcattcatataggagaaagagagaggatatttgacacatagaagaaggcaatgtgaccattgaaacaaaatccaatgctgctgactttaaagacaaatgaggaggtccacaagccaagcaatgcaagcatttcagctctagaagctggaaaagtcaaggaaacatactccccactagatcctacagagggagcttgaccctgcctatacattgattttgcccagtgaaactaatcttggacttttgacctccagaactgtgagaaaattaatgagtgtgttgtaaaccactaagtttgtgatgatttgttacaataaccaaaggaaactagttactgtaacaaatcatcacccaaaacacttatgacccagtcatttgggttccatgaggagagattttccttgaacacttctggcctcttgccccacccgtatccctttgagcttggtgtatgggtagatgctattccctgccataacaccctttacttacccctctccctgacagcatccctgcctcattacctggatcatcagctttgtgagsacagggttcacctttgtcttactcattttggcatccttaactttttgcctggggcatgacattataatgaattgtatgaaattcaacatattagactactatgacttgaatgtgtcctccaaagttcatatgttgaaaacttaattccaaatgcaaaaagtgttgagagttgtgtgatagttaatactgagtatgatcttgattgaaggatgcaatat

SEQ ID NO: 56448 - DNA, 873 bp, Homo sapiens
atctcatcctataaagtgtttttctagaattatttcattaatcctgccaatggccctgaaagtakatgctatttttattctcattttacagatcaggaaatcaagacacagaggtttaagtagcttgcccagggttgtgtttctggctagtgacagtgatgagattcaagctcagtgtgacttcaaacccattgcctttgaaaagcagtagtcttggtagaggcattagcagcccgaggtaacatgaaaaactagtgtgtgtgtgtctgtctgtctgtgtcatatggaagtctctgaggtataggatactagctagggagggtccgtgtcttgaaattcatgaaaggaattcctagagcagctgaacacagcaagcctcactttttatgaaaagtacatggttctgctgataactatttatcctgcaaagtagtaagttatgttttctggaagcataggagctgaaaagtattgccagaacactgatattttacaaggcctgtatgtttaaacagttcatgaaggtcatgggaaacaaaaggcaaagagaatgggtctgtttgaaaataaaataactgtataccaagcttgtttggggtactaatacattattaaggtagaactaacacatttaaattattatcctatcattgtaaataagattttagatcctatttgtattgcgaacaatttcctaaaatccattacttggccaaatcaaacacgttttggtgaaaatatgataggtgagttttgaataataaagttggtggctgtatctctgcctttcttgcaacttgaatgcactaattgaggactcaaggtttttgttacaatggatgctgttgacatagccttttgagatagcatgca

SEQ ID NO: 56449 - DNA, 873 bp, Homo sapiens
atctcatcctataaagtgtttttctagaattatttcattaatcctgccaatggccctgaaagtatatgctatttttattctcattttacagatcaggaaatcaagacacagaggtttaagtagcttgcccagggttgtgtttctggmtagtgacagtgatgagattcaagctcagtgtgacttcaaacccattgcctttgaaaagcagtagtcttggtagaggcattagcagcccgaggtaacatgaaaaactagtgtgtgtgtgtctgtctgtctgtgtcatatggaagtctctgaggtataggatactagctagggagggtccgtgtcttgaaattcatgaaaggaattcctagagcagctgaacacagcaagcctcactttttatgaaaagtacatggttctgctgataactatttatcctgcaaagtagtaagttatgttttctggaagcataggagctgaaaagtattgccagaacactgatattttacaaggcctgtatgtttaaacagttcatgaaggtcatgggaaacaaaaggcaaagagaatgggtctgtttgaaaataaaataactgtataccaagcttgtttggggtactaatacattattaaggtagaactaacacatttaaattattatcctatcattgtaaataagattttagatcctatttgtattgcgaacaatttcctaaaatccattacttggccaaatcaaacacgttttggtgaaaatatgataggtgagttttgaataataaagttggtggctgtatctctgcctttcttgcaacttgaatgcactaattgaggactcaaggtttttgttacaatggatgctgttgacatagccttttgagatagcatgca

SEQ ID NO: 56450 - DNA, 873 bp, Homo sapiens
atctcatcctataaagtgtttttctagaattatttcattaatcctgccaatggccctgaaagtatatgctatttttattctcattttacagatcaggaaatcaagacacagaggtttaagtagcttgcccagggttgtgtttctggctagtgacagtsatgagattcaagctcagtgtgacttcaaacccattgcctttgaaaagcagtagtcttggtagaggcattagcagcccgaggtaacatgaaaaactagtgtgtgtgtgtctgtctgtctgtgtcatatggaagtctctgaggtataggatactagctagggagggtccgtgtcttgaaattcatgaaaggaattcctagagcagctgaacacagcaagcctcactttttatgaaaagtacatggttctgctgataactatttatcctgcaaagtagtaagttatgttttctggaagcataggagctgaaaagtattgccagaacactgatattttacaaggcctgtatgtttaaacagttcatgaaggtcatgggaaacaaaaggcaaagagaatgggtctgtttgaaaataaaataactgtataccaagcttgtttggggtactaatacattattaaggtagaactaacacatttaaattattatcctatcattgtaaataagattttagatcctatttgtattgcgaacaatttcctaaaatccattacttggccaaatcaaacacgttttggtgaaaatatgataggtgagttttgaataataaagttggtggctgtatctctgcctttcttgcaacttgaatgcactaattgaggactcaaggtttttgttacaatggatgctgttgacatagccttttgagatagcatgca

SEQ ID NO: 56451 - DNA, 873 bp, Homo sapiens
atctcatcctataaagtgtttttctagaattatttcattaatcctgccaatggccctgaaagtatatgctatttttattctcattttacagatcaggaaatcaagacacagaggtttaagtagcttgcccagggttgtgtttctggctagtgacagtgatgagattcaagctcagtgtgacttcaaacccattgcctttgaaaagcagtagtcttggtagaggcattagcagcccgaggtaacatgaaaaactagtgtgtgtgtgtctgtctgtctgtgtcatatggaagtctctgaggtataggatactagctagggagggtccgtgtcttgaaattcatgaaaggaattcctagagcagctgaacacagcaagcctcactttttatgaaaagtacatggttctgctgataactatttatcctgcaaagtagtaagttatgttttctggaagcataggagctgaaaastattgccagaacactgatattttacaaggcctgtatgtttaaacagttcatgaaggtcatgggaaacaaaaggcaaagagaatgggtctgtttgaaaataaaataactgtataccaagcttgtttggggtactaatacattattaaggtagaactaacacatttaaattattatcctatcattgtaaataagattttagatcctatttgtattgcgaacaatttcctaaaatccattacttggccaaatcaaacacgttttggtgaaaatatgataggtgagttttgaataataaagttggtggctgtatctctgcctttcttgcaacttgaatgcactaattgaggactcaaggtttttgttacaatggatgctgttgacatagccttttgagatagcatgca

SEQ ID NO: 56452 - DNA, 873 bp, Homo sapiens
atctcatcctataaagtgtttttctagaattatttcattaatcctgccaatggccctgaaagtatatgctatttttattctcattttacagatcaggaaatcaagacacagaggtttaagtagcttgcccagggttgtgtttctggctagtgacagtgatgagattcaagctcagtgtgacttcaaacccattgcctttgaaaagcagtagtcttggtagaggcattagcagcccgaggtaacatgaaaaactagtgtgtgtgtgtctgtctgtctgtgtcatatggaagtctctgaggtataggatactagctagggagggtccgtgtcttgaaattcatgaaaggaattcctagagcagctgaacacagcaagcctcactttttatgaaaagtacatggttctgctgataactatttatcctgcaaagtagtaagttatgttttctggaagcataggagctgaaaagtattgccagaacactgatattttacaaggcctgtatgtttaaacagttcatgaaggtcatgggaaacaaaaggcaaagagaatgggtctgtttgaaaataaaataactgtataccaagcttgtttggggtactaatacattattaaggtagaactaacacatttaaattattatcctrtcattgtaaataagattttagatcctatttgtattgcgaacaatttcctaaaatccattacttggccaaatcaaacacgttttggtgaaaatatgataggtgagttttgaataataaagttggtggctgtatctctgcctttcttgcaacttgaatgcactaattgaggactcaaggtttttgttacaatggatgctgttgacatagccttttgagatagcatgca

SEQ ID NO: 56453 - DNA, 873 bp, Homo sapiens
atctcatcctataaagtgtttttctagaattatttcattaatcctgccaatggccctgaaagtatatgctatttttattctcattttacagatcaggaaatcaagacacagaggtttaagtagcttgcccagggttgtgtttctggctagtgacagtgatgagattcaagctcagtgtgacttcaaacccattgcctttgaaaagcagtagtcttggtagaggcattagcagcccgaggtaacatgaaaaactagtgtgtgtgtgtctgtctgtctgtgtcatatggaagtctctgaggtataggatactagctagggagggtccgtgtcttgaaattcatgaaaggaattcctagagcagctgaacacagcaagcctcactttttatgaaaagtacatggttctgctgataactatttatcctgcaaagtagtaagttatgttttctggaagcataggagctgaaaagtattgccagaacactgatattttacaaggcctgtatgtttaaacagttcatgaaggtcatgggaaacaaaaggcaaagagaatgggtctgtttgaaaataaaataactgtataccaagcttgtttggggtactaatacattattaaggtagaactaacacatttaaattattatcctatcattgtaaataagattttagatcytatttgtattgcgaacaatttcctaaaatccattacttggccaaatcaaacacgttttggtgaaaatatgataggtgagttttgaataataaagttggtggctgtatctctgcctttcttgcaacttgaatgcactaattgaggactcaaggtttttgttacaatggatgctgttgacatagccttttgagatagcatgca

SEQ ID NO: 56454 - DNA, 1089 bp, Homo sapiens
attgatagtcaaatacaatgaagaaaagagaattatttcatagtacatacaaatgtattgttattgttagacttgtagacagatgagcagaaactcattttaaatcccacatacggtttgactatatttataaatatcacaggctaacaccccccccccacacacacacacacacataggtacagaaataaaaaaagtggtctgcccttaaaagtattaaaatattaatacttatggatatgtgatgataactaggcatgagtgacgtgatcgatagatagaatgaggagatatctacacatcaaagcagtagggtaggagagaatgaaattagaaagatttacaaaaaataacagtgacattaaaatgtttaaggtaccatcagaaattagaagtgttctgtgtacaaactaatcttacatctctagatatatggaagtgtttttttaatgtctgtttacttttcttagcttataaaaatgtgtgagccccaatctgggaagttgtgaaataacaatcaagaataataattggtgtcagaatggtgttgtccagcactgggatttcctttaaagaattaacctaacagtggagaacttagcaaaaccgaagtgtgaattttcagtattagaagactgaagatttaaggcatgtctgggattgaagatttaaggcagaaataatcagaaatcgcaagggaacactttttgttgttgctattttcagtgcattttcactgattcttatcaacatattgctcctttttcctttctgctcttttgacagagaatatctgcaattgcttgtaatataggtattttccagtatacacgatgtaacgtaaaaacatgtgcacactgaggaataatagttttgtatccattgtcctgttgtgtagtctcgaaataacaattttgctttgtttcttaatctataatactgaggaccttaaaaagtaccttttaaactcaggtgttaaaaatttcacaaggtatttgttacctgaaatatktagattactttctttctgaaattccttaagagggaaggtagatagatgggagcttaatatccatgctatgaatcatg

SEQ ID NO: 56455 - DNA, 825 bp, Homo sapiens
ttggctttccacagtttcactttccacaattttagttacccatggtcagccaaggtctgaaaacaggtgastatggcacaatacaataagatattttgagaaagaaagactacatttagataatttttattacagtatagtgttataattgttcttttttttcattaattgtagttaatctcttactatgactaatttataaattaaactataccatgggtatgtaggtataggaaaaaatatagtatatatagggctggctttatccatggtttcaggcatccactgggggtcttggaacataccctccacagataaggagggactactactgtatactctgtgatccagcaattttactactagatatatagccaaaggaaatgtatacatacataaacaaagacatatgtaagaatgtttatagaagcactatttatcatagttcagtgccagttataaattcagctccaaggacatacatactatatgtatatatacacatacacattcttcagcatacctacatcaggactggaattcacctctcctcagcaaagtgtatggcaaaagtatttctaagtacagtgggctatagagaggcattcctatcccccatagaaaaaaaatgattgtgtttctagaacttctacttggggatccagtgctaaatattcactcatcaccagaattttctttaaatgaaaaaatttgtattttggattttaggtattcagcattggattaatcataatcctagttatgactcaatgccaacattgtttcgcatatggcccacttttttactcattcgttcatttattc

SEQ ID NO: 56456 - DNA, 825 bp, Homo sapiens
ttggctttccacagtttcactttccacaattttagttacccatggtcagccaaggtctgaaaacaggtgagtatggcacaatacaataagatattttgagaaagaaagactacatttagataatttttattacagtatagtgttataattgttcttttttttcattaattgtagttaatctcttactatgactaatttataaattaaactataccatsggtatgtaggtataggaaaaaatatagtatatatagggctggctttatccatggtttcaggcatccactgggggtcttggaacataccctccacagataaggagggactactactgtatactctgtgatccagcaattttactactagatatatagccaaaggaaatgtatacatacataaacaaagacatatgtaagaatgtttatagaagcactatttatcatagttcagtgccagttataaattcagctccaaggacatacatactatatgtatatatacacatacacattcttcagcatacctacatcaggactggaattcacctctcctcagcaaagtgtatggcaaaagtatttctaagtacagtgggctatagagaggcattcctatcccccatagaaaaaaaatgattgtgtttctagaacttctacttggggatccagtgctaaatattcactcatcaccagaattttctttaaatgaaaaaatttgtattttggattttaggtattcagcattggattaatcataatcctagttatgactcaatgccaacattgtttcgcatatggcccacttttttactcattcgttcatttattc

SEQ ID NO: 56457 - DNA, 825 bp, Homo sapiens
ttggctttccacagtttcactttccacaattttagttacccatggtcagccaaggtctgaaaacaggtgagtatggcacaatacaataagatattttgagaaagaaagactacatttagataatttttattacagtatagtgttataattgttcttttttttcattaattgtagttaatctcttactatgactaatttataaattaaactataccatgggtatgtaggtataggaaaaaatatagtatatatagggctggctttatccatggtttcaggcatccactgggggtcttggaacataccctccacagataaggagggactactactgtatactctgtgatccagcaattttactactagatatatagccaaaggaaatgtatacatacataaacaaagacatrtgtaagaatgtttatagaagcactatttatcatagttcagtgccagttataaattcagctccaaggacatacatactatatgtatatatacacatacacattcttcagcatacctacatcaggactggaattcacctctcctcagcaaagtgtatggcaaaagtatttctaagtacagtgggctatagagaggcattcctatcccccatagaaaaaaaatgattgtgtttctagaacttctacttggggatccagtgctaaatattcactcatcaccagaattttctttaaatgaaaaaatttgtattttggattttaggtattcagcattggattaatcataatcctagttatgactcaatgccaacattgtttcgcatatggcccacttttttactcattcgttcatttattc

SEQ ID NO: 56458 - DNA, 1904 bp, Homo sapiens
caaataagaatatgctatacccaagtattaggggtgaattttgtctccccaaacgatattggagtcctcactcctgggacctgtgaatgggacctttttggaaataaggcctttgctgatgattaaattagaatgaggccattacagtggccctcatccaatatgactgatatccttacctaaaaggaaaatttggacacagagacagacatgcacagagggagacaatgtgaagacagtcttcacattgtagacatctacaagtcaaggaatgcctgaggctaccagaatctccgggagggggcatggaacagattgtccctcagaaccctcagaaagaatccactctgctgagaccttgattgcagacttctagcttccagggcctgggagaaaatacattcttgttgtttgagccacccagtttgtgatacttcgttatggcagccctagccaacaaatataccaagtggctgatctgagttaaaataattcatttttaggagtgtacaaaggttgtggtcccaatgttttggccaacagcagatcccaaggaatggcccttagaaggaggggaatgcctaccccagttgctaccagtccccaggggaaaaccttgctttctcagccacttatgtgcatgtgtgattagttcatcagacgcatttctaagagattggctgacatcaaggtgatgagtgacgactttgactggagtgatgaaattgcagtgaaagtggaagcattgcccagctgatcaggcatactacccaggatctggttaccactaccatagcatgaagggaaattgatggaccaatcaggagggttgaagtttgtctaaggacgtcatacacaaggttagcaacctgctttttttttttttttttttttttttggtgctgtgggctaggttcgtgcaggtaacagaagggtatggctgcatggagaggtcaggagaggagtgggggagctgaagggaggatccaggtgctgagataaggggacaaagcttagggttgaagggggaacagtgggaggcaccatggtttccttaatgcactgcgcggagccaggaccctaggtaggacaaggcttggctttcggtggacaaacatcaaggctggagggaacagaaacggaaacacttcctctgtgcttggccaaagaaaactggcagcaccttcccagttacagggaagggattagggcagcatgggctgtctggacggtgtcattctgtagtcatgtgtccaattattcacaaagcaagatggtttcttggggtgatgcatattttatatgtaggctggtggttttggagacaaaatcaagtgccatttaggctgctgtgctttctgaagcagaagtgtctcataatgactctgcgtgcagaatatagaacagagttaagcaaagtggttgatagacaaatgcacmttttagtctttgaatggctaaggccctttctctgatccagcaggaaccaagtttctgctttcatttcttctatcatcttgatccctcccttcatcattggatgaacaaacgtggaggcaagtgggaatagtggagggcaggtaggagatggagggaaacaaaccattacatatctttgcggagggtggttttaacagcaatcccaataacagcaacaggaatgccagtggctgatattcactgaggacttgctatgtgtgagccctagacttggtatgttgagtcccactctaattatgcaaggaagctctaattatctctttcttataacaaaaaactggtgtctcccagattttaagtattggtctacatcactactcttgacacacatggccaagagtagactctagtaatatacagtattgtttcataatacctagcaagcagaatttttggcctagttt

SEQ ID NO: 56459 - DNA, 664 bp, Homo sapiens
tgtgtaaggaggggatctgcagagcaggggagttgggaagggtggtagggatctgagcccatgtcctatgcacaaggcctgactcctcctgtggccaagcttgagctgctctgctgcctttgtaggctgctgtgttagtttcctccagcagccataaaagttacctccatcttgatggcttaaaacagttatgaaggccagaattgaaagatgagattattggcagggtckcactccctcctaatgctctagggtagaaccctcccttgcctctgacagcttctagtgcatgtcagcatgcctcggcttccctggatgcatggctccagtgtgcctcagtggccacagtccctcctcctcctcatgtgtcttctcctcttctgtctgttacaaaggtactcgtcattaaattcagtgcccacctgggtaacccagaatgatctgatctcttcattacttctgcaaggaccctttttttgaaagaaggtcacagtcacaggttccaggggttaggaaatggacataatgttggggaccaccattcaacccattacagttgctgagagaattgtgagggcctaaatctgtattggtttttaaaaaactttttttttgggtttcagttgagaccacacatattcactgggcttgaatttgcatgtgg

SEQ ID NO: 56460 - DNA, 664 bp, Homo sapiens
tgtgtaaggaggggatctgcagagcaggggagttgggaagggtggtagggatctgagcccatgtcctatgcacaaggcctgactcctcctgtggccaagcttgagctgctctgctgcctttgtaggctgctgtgttagtttcctccagcagccataaaagttacctccatcttgatggcttaaaacagttatgaaggccagaattgaaagatgagattattggcagggtctcactccctcctaatgctctagggtagaaccctcccttgcctctgacagcttctagtgcatgtcagcrtgcctcggcttccctggatgcatggctccagtgtgcctcagtggccacagtccctcctcctcctcatgtgtcttctcctcttctgtctgttacaaaggtactcgtcattaaattcagtgcccacctgggtaacccagaatgatctgatctcttcattacttctgcaaggaccctttttttgaaagaaggtcacagtcacaggttccaggggttaggaaatggacataatgttggggaccaccattcaacccattacagttgctgagagaattgtgagggcctaaatctgtattggtttttaaaaaactttttttttgggtttcagttgagaccacacatattcactgggcttgaatttgcatgtgg

SEQ ID NO: 56461 - DNA, 874 bp, Homo sapiens
agctccacattatcttattatctggcaacaaaacttccaactgccacaattagggatcttttcattttatcaaggctatttgctgataattctccctataaaagctttgcaataaaccactttttaaaaattcgaatttgcaccatcataattgggaatgtaatattctgcttaaaaagaagcatgaacatgttttaggaaaaccttctcaatccactctaaaatctaagcctaaaattatttacatgcaattttcagtgatttattaattattaactaaagtagggctgatgttggaatttttttttttttttttttttttttgctacttattactaaactactcttcaactgctagaaaaagaaaacctacaattataaacaagacataagcaaccctggtaacagatccaccttttataacaaataaaaatttttcaaaaacaattaatgttccttcacatgtagcatatgtttgactgattgttacaagcaattccaatggcctctgttatatttttgaggaaattaatgtctaggtaactgtggatctaggtgcattaactttagactagttatatgagcctagattatattcattttagaccttaaaatcttgcacttgtttttgatccaattttagactcttttatgatacaagtaacttatcagcaaacagttagtaatctgcaagttatacaatttataatataggatattgagcaattgttatttaaaaataataactgtgataacaatagaaatggttctccaaatataatgagtagtcactacctacttttcataccacaaggatagaagatgtttttgaaatcatgtgcatcagcattgaaaatacacccaagaaacygaa

SEQ ID NO: 56462 - DNA, 1681 bp, Homo sapiens
gaagatctactcacagaatttaggaagaaaaaaggacagggcagggaatgaaaggaagtctcacacaagccatttcatacactgccctataagtgcccattcgttgtctgacatcaaccaacccaaagccctgttggccactctggaaacagatagctaaataagcctacatttttttcatttgtaaaatggtgagtcaaaaaggcaaaggatttatctcatgcctctacagatcgtttataatgtggctaagtggcccaggataaaatcaccacagtcaaagtgattcatgcaagaaacctattctgttgagacagaaatgaaaatccacattaaatcacagtctattctatgcatgggagaattgcagtgagccagctcagtggattcccaggcccgttgaaggctgaatgcaattgttcttctaaaatggagaaatcagactccttcaaagtgagggtgcagcctctagttcggagagcaggggtgagcagccagtggccctgccaagcaggcatctggaactatattcccggatggcagccagcctggggatctattcaattactgcaagtttcttgccaggaggttttcaccagttccactatttatcaagacaattggacccagtacaaaaaccacctttgcaaattgccattaaaggggctatctatgtgactgaactacggacgtctgctgcttgttggcatttgaactcaatggtacagttactgtattttcttctggcttttaatacctgaaaaaggtgtaatctcctctcctcaccttcccttcttgccctaaagttctcaagcttagggaatgatgtaagtacaggagcagattcattgagcagtggcccatggtctgttattttgctcatgacctgttttttgtgtgtgtgacatgaaagtcctttcagcttctctcccttcctccagctgtcaccacatttcttgactttttcttctgatatctgtcagtctccactctagaaaacaaaggttgggctccgggcattggcaatggccaagtgcaatgctttgtcagctcaaatcctcacatcttagtgcttttctgtgagaagttgactgatgttgtatccaaagccctccaattttattgtaaattaacctaaactgtagaaatgtctgattcgtattttctttttctccagtggttcctttctttgcattacatttcattcatatattgatgttgcaacttaaaatacagaacaaacataaagaacaatgtctcatgccacatggagcaagctggttgacaaccaggacatctgaaagggaggcaatccattaactacatacacattagtttggcacttgccgtaaatcattggccctcatctgttgtctttatgaaagctgacaatgggcattgtgagccattctaaagggtggtctaagcrgcatgtccagaactgcaataaaggtaggaattccatccacagtgggttttgcaaagacacaacctcatcaaagtaaagccccttccttgaaaataagtaaaatctgttaatatattacacttttatgagaagtatttttgtccttggaggcaatggtaaattatcttgtctattgacaaaacacttgaaaactgcatttctgtaagaatctttgcctttcttcaaaaatacctcatggcctatatttatgca

SEQ ID NO: 56463 - DNA, 653 bp, Homo sapiens
tgacagtttaaacccaggtgttttgcaaatccttccaaaatatcacttggcttttcctctccatacctcctcccttgcccagttggaaaaaataayaacaacaacaacaacaacaacaacaacaacaacctgcagtacgtgtgcccacatcctcctctggatgaaatagagttgcacagagaaaaggaaagttgatttcctagttattctcccacacatggagttctgggtggcaccatcccacactatttgcatcactgagctacacactctgccaagactgcatcttaaatttaaacacattttgatgaaaatagagaaaggctgaggaagaaaggttaacacttccccataagaggtgcgtaagcactatacatcgtatgtttttcttctggctcttggattaggacagaatgttaattaaaaagtaaaaagctgatcttctgagcagcaattaatttcaggattgctcttctttcatctgttgggtctttgcatttctgaagacgtggtggaaaatatttcctaggggtctttctaatacacattttcatttgattgttttgatctttaggctacatgttgacttaaaaaggaaccaatattacaaaaagaaatgtcattccaaggttctggattctgattatcgctct

SEQ ID NO: 56464 - DNA, 551 bp, Homo sapiens
tctcatttagttctcacttcaggccttttttgaattaattactactagtattttattttatagcaaatacaagatgggtgtggtggctcacacctgtaacccagcactttgagaggccaagtagggcggatcgcctgaggtcaggagttcgagaccagcctggccaacgtggtgaaaccctgtctcctactaaaaatacaaaaattagctgggcttggtggcgggcatctataatcccagctactttggaggctgaggcaggagaatcgcttgagcccaggaagcagaggttgcagtgacccaagagttgtgccmctgtaactccagcctgggtgacagaatgagactccatctcagtaaaaaaaaaaaaaaaaaaaaaaaaaaagaaagaaaaaaagagggagagagagagagagaactctaagtttagagaggctgggtaacttgcccagggccatagagccagaaagagctgaggtgaaggaaggagcacacctctgtccatcttagctccctgagaatagttcacatcaaagaagatgttgaagaat

SEQ ID NO: 56465 - DNA, 1102 bp, Homo sapiens
tgaaagatatggcatcaccagtcactggggaaagggttttctgtttattgaatgtgccaggccagttggttatctgtaccaatagaacttggatctttmccttaaagaatacacgaaaatgcctgtaatcccagcaccttgggaggctgaggcgggcggatcacgggttcaggagatggagaccgtcctggctaacatggtgaaaccccatctctactaaaaatacaaaacaattagccaggcatggtggcggtcacctgtagtcccagctactcaggaggctgagggaggagaatggtgtgaacctgggaggcagagcttgcagtgagctgagatcgcgccactgcacttcagcctgggcaacagagcaagcctccgtctcaaaaaaaaaaaaaaaaagaagaatacacaaaaataaattccaaatgaattagagatctaaacatgaaaagtaaaacattgagggaaaaatgaagaaaaaaatattaacacaggtacagaaaagaatttcttaaataaaatacagttagcagaaactataaaaagtttgattaatcttgaaaatgtgttaaattaaaatattgttatagataatgataccatgaatataatgaatgatattttatttatatagggaattaaaaatgtgatgatatttgtatgcacacaaccttcaaaacattagtatgtaaatcataaagaactccttattaacaaatgcaagacaaaaactctatagaaaagtaggcaaaaaaatattgtggcagagatggtgaactttcttctagtatccttttcctcttattccatgtgataatagaacacctggagtttttgcttacaaatggctgcctttccaaagactacattttccagcttccttgtagctaggtgtgtccacacgactacatctgggccaatcagatgttagtggaagtaatgtgggcatttcccagtcaggtattttgaaaaaggcactgtttgcacagcacttggactctccccacccccttcttgtaggctggaatgcagacttttttttttttttgacattaaagcaagtttttgaatttgtataacatacattttgaattgtataata

SEQ ID NO: 56466 - DNA, 1102 bp, Homo sapiens
tgaaagatatggcatcaccagtcactggggaaagggttttctgtttattgaatgtgccaggccagttggttatctgtaccaatagaacttggatctttaccttaaagaatacaygaaaatgcctgtaatcccagcaccttgggaggctgaggcgggcggatcacgggttcaggagatggagaccgtcctggctaacatggtgaaaccccatctctactaaaaatacaaaacaattagccaggcatggtggcggtcacctgtagtcccagctactcaggaggctgagggaggagaatggtgtgaacctgggaggcagagcttgcagtgagctgagatcgcgccactgcacttcagcctgggcaacagagcaagcctccgtctcaaaaaaaaaaaaaaaaagaagaatacacaaaaataaattccaaatgaattagagatctaaacatgaaaagtaaaacattgagggaaaaatgaagaaaaaaatattaacacaggtacagaaaagaatttcttaaataaaatacagttagcagaaactataaaaagtttgattaatcttgaaaatgtgttaaattaaaatattgttatagataatgataccatgaatataatgaatgatattttatttatatagggaattaaaaatgtgatgatatttgtatgcacacaaccttcaaaacattagtatgtaaatcataaagaactccttattaacaaatgcaagacaaaaactctatagaaaagtaggcaaaaaaatattgtggcagagatggtgaactttcttctagtatccttttcctcttattccatgtgataatagaacacctggagtttttgcttacaaatggctgcctttccaaagactacattttccagcttccttgtagctaggtgtgtccacacgactacatctgggccaatcagatgttagtggaagtaatgtgggcatttcccagtcaggtattttgaaaaaggcactgtttgcacagcacttggactctccccacccccttcttgtaggctggaatgcagacttttttttttttttgacattaaagcaagtttttgaatttgtataacatacattttgaattgtataata

SEQ ID NO: 56467 - DNA, 1102 bp, Homo sapiens
tgaaagatatggcatcaccagtcactggggaaagggttttctgtttattgaatgtgccaggccagttggttatctgtaccaatagaacttggatctttaccttaaagaatacacgaaaatgcctgtaatcccagcaccttgggaggctgaggcgggcggatcacgggttcaggagatggagaccgtcctggctaacatggtgaaaccccatctctactaaaaatacaaaacaattagccaggcatggtggcggtcacctgtagtcccagctactcaggaggctgagggaggagaatggtgtgaacctgggaggcagagcttgcagtgagctgagatcgcgccactgcacttcagcctgggcaacagagcaagcctccgtctcaaaaaaaaaaaaaaaaagaagaatacacaaaaataaattccaaatgaattagagatctaaacatgaaaagtaaaacattgagggaaaaatgaagaaaaaaatattaacacaggtacagaaaagaatttcttaaataaaatacagttagcagaaactataaaaagtttgattaatcttgaaaatgtgttaaattaaaatattgttatagataatgataccatgaatataatgaatgatattttatttatatagggaattaaaaatgtgatgatatttgtatgcacacaaccttcaaaacattagtatgtaaatcataaagaactccttattaacaaatgcaagacaaaaactctatagaaaagtaggcaaaaaaatattgtggcagagatggtgaactttcttctagtatccttttcctcttattccatgtgataatagaacacctggagtttttgcttacaaatggctgccyttccaaagactacattttccagcttccttgtagctaggtgtgtccacacgactacatctgggccaatcagatgttagtggaagtaatgtgggcatttcccagtcaggtattttgaaaaaggcactgtttgcacagcacttggactctccccacccccttcttgtaggctggaatgcagacttttttttttttttgacattaaagcaagtttttgaatttgtataacatacattttgaattgtataata

SEQ ID NO: 56468 - DNA, 663 bp, Homo sapiens
cagtgtttgcatgtacaagtatgggacatttcattctcctgagcaaaacttccattgrtgattcactaagagcaagaaagaagactagtctggatgacttagaatgaacacaccagtgtttctgtaaatagaattatatgatttgtaatgtgtttgtgtatacgtgtttgtgtgtgtgtatgtggaatcttttgctcagttctatattcatgggattcattgacactgatgcagttaacattattctatttcattgaaaaacactataaagttttaattgtatgaatatgccacaatttacatatcctgttgtgggacatttgagttgttttcaatttagagctattacaaataatgcaaccgcaaatgttcttatacgtgactttttgcacatttgctgtcactctcctgggtatttatgtagcggtaaaaattgctgggacagaggctctgtggatgatgaattctagtagataatgatgattcattttcacaattggatgagagattcggttgctccacatcctcactaaaacttggcattatgaatcttaactttaaccattttggaggatatgtagagatttcattgtggtattaatttgcatttctctggagaccaagtaccttttcatatatttattagctatttggatgttttgt

SEQ ID NO: 56469 - DNA, 663 bp, Homo sapiens
cagtgtttgcatgtacaagtatgggacatttcattctcctgagcaaaacttccattggtgattcactaagagcaagaaagaagactagtctggatgacttagaatgaacacaccagtgtttctgtaaatagaattatatgatttgtaatgtgtttgtgtatacgtgtttgtgtgtgtgtatgtggaatcttttgctcagttctatattcatgggattcattgacactgatgcagttaacattattctatttcattgaaaaacactataaagttttaattgtatgaatatgccacaatttacatatcctgttgtgggacatttgagttgttttcaatttagagctattacaaataatgcaacygcaaatgttcttatacgtgactttttgcacatttgctgtcactctcctgggtatttatgtagcggtaaaaattgctgggacagaggctctgtggatgatgaattctagtagataatgatgattcattttcacaattggatgagagattcggttgctccacatcctcactaaaacttggcattatgaatcttaactttaaccattttggaggatatgtagagatttcattgtggtattaatttgcatttctctggagaccaagtaccttttcatatatttattagctatttggatgttttgt

SEQ ID NO: 56470 - DNA, 663 bp, Homo sapiens
cagtgtttgcatgtacaagtatgggacatttcattctcctgagcaaaacttccattggtgattcactaagagcaagaaagaagactagtctggatgacttagaatgaacacaccagtgtttctgtaaatagaattatatgatttgtaatgtgtttgtgtatacgtgtttgtgtgtgtgtatgtggaatcttttgctcagttctatattcatgggattcattgacactgatgcagttaacattattctatttcattgaaaaacactataaagttttaattgtatgaatatgccacaatttacatatcctgttgtgggacatttgagttgttttcaatttagagctattacaaataatgcaaccgcaaatgttcttatacgtgactttttgcacatttgctgtcactctcctgggtatttatgtagcggtaaaaattgctgggacagaggcyctgtggatgatgaattctagtagataatgatgattcattttcacaattggatgagagattcggttgctccacatcctcactaaaacttggcattatgaatcttaactttaaccattttggaggatatgtagagatttcattgtggtattaatttgcatttctctggagaccaagtaccttttcatatatttattagctatttggatgttttgt

SEQ ID NO: 56471 - DNA, 663 bp, Homo sapiens
cagtgtttgcatgtacaagtatgggacatttcattctcctgagcaaaacttccattggtgattcactaagagcaagaaagaagactagtctggatgacttagaatgaacacaccagtgtttctgtaaatagaattatatgatttgtaatgtgtttgtgtatacgtgtttgtgtgtgtgtatgtggaatcttttgctcagttctatattcatgggattcattgacactgatgcagttaacattattctatttcattgaaaaacactataaagttttaattgtatgaatatgccacaatttacatatcctgttgtgggacatttgagttgttttcaatttagagctattacaaataatgcaaccgcaaatgttcttatacgtgactttttgcacatttgctgtcactctcctgggtatttatgtagcggtaaaaattgctgggacagaggctctgtggatgrtgaattctagtagataatgatgattcattttcacaattggatgagagattcggttgctccacatcctcactaaaacttggcattatgaatcttaactttaaccattttggaggatatgtagagatttcattgtggtattaatttgcatttctctggagaccaagtaccttttcatatatttattagctatttggatgttttgt

SEQ ID NO: 56472 - DNA, 622 bp, Homo sapiens
attcagcatattaacatggtagataaattttacaaccaataatcctgctttttttgtttatgaaaagtattgctattcacatcccttatgtgctaatacatgcattaatttcattccacatatgccaatgattccagctctgcctcccccaatgtatactcaagtggcaaggatactttcggtctcaacccacccaaagttgctcaatgcttcgtaaacacatttctctttgaaaataaagttggtttagaaatatgtccaaaggtaataatgtcttttgtagagttcctttgaaaagtagctttattttggatcatttgaaaaatctgttatacaattaatgtatcaaaactattctcaattacaaagtcaacttttttcacatatatctcttctcttctagtccctatatttaatgctacaattacagtcgtaacttacctttgtcttgtctttttcatgaaagtttttgttgttgtgatgacatctccaggtttatcgcttttgataaacayatactatttgttagggcgctatgacatttatctttgactttgacatttggctaaaatcttttagttacagtcagctttgccctcagtttatgtcagtgtcatttctg

SEQ ID NO: 56473 - DNA, 2126 bp, Homo sapiens
cccaaaccccactctgtccactgcttcaacaggtcaggtgatgtcatgtgcccctcctcgaaaggagtagcattatctcagctcctctgggggctgcaggtctaattgtctgcatcttgacacctggaaagtttgcccaacacctaacacaggacgtggattaggggaaggagcttgggactgtagatggatatttgtgagggaccgtagatggatatttgtgagtgatgtgcatagagacagccccctgcagagaaagatmatctgttgttcacctttgaatcctcaatctctgttgcacagggcattcagtaaacatcagatgtctgtggaacaaatgcatggattgtacataaaagaagcaaaagggactaccttctcatggtgtagaaatttagagctgcatgacacatttagccctaaatttaggaatccacccctctaggcaagaaataccttttccaatgaactaatgatctctccactcctttccctgaagagtttactgaacaatgatcaggagggcaccataaaccttattttcatgtcaaacagtacctgtcctccaatggtttatctatttggtgagacatgatacaaatgaagaaagattgctccccatcctcagaaagtctgtaacctcaccagacgaggcatccgtctcacacttgcttctccagaaggactagagaaccacaggagaccatgtgtactgaaaggttgaatgcacaatcacttagcactgaaaatatgcagcacagaaaataagtgtttgtagttgggtggcactatcagggcaggcttcctgaaagaagctggctttgaactgccctaggctgggaagaagttgaaaagagaacagaaaattcattggtctgtggtctggaggcaccctgggtcctcggaccctgagtctcagccagagatcctggtggggagacagaggtgtgaagccatcgaccaccctgcccatgttctcactcttcagagtgtggcaccagggcagaagcagcaaagatgaccactgcatacattccagctcccagacagaggtgcacttggcttctgatgcacaaggccccgttcaacaaaatccatgccttttcagggtgcaggataatagagtgaagtgcgtgtggaccggagagaagtgctgcccaggttaatggcaccagctcagagcatcctcagggaagccagcacgtttggagaagattgagggacgaggccatctaatgagccagaaggtccctgagagatgaggcggccttggcctctgggattccctacccctcattcacagaagcagcttggtccgtggagttaagcagcactgttctgaaataataatgaacagcacgcctggcatgcctcctgtcagagcccagtgaggtgggcaggccagtgctgtctccccagcacctgctcctaccccagccagcagccctgacccttctgacaaaccccaaaatgctccaaccactatgtggtttctcaccatctccagcccaaactctctgcttccaaagcctagtggatccacccaatggacctcacctcccgcagtcccagcacacgctgcttaatctgagaggagcctgctccctgcgcggcagcgtgcatgttgacctgggggctttctcgcactgttcccaccacctgagatacctgctcccttctaccccgaacaatggtaggaaaaaatcaacatggacttagaatcagaagagccagcttcaagtcctccactgaagagagagtgcatattcccaaaaaagaacataaacttaggatcttacagtgacagaggtccgatgtccacagtcagtctccgagggctgaagtcacggtgtcatcagggctggctcactctggagctccagggagacgttgctcccttgcctttcccagttcccagaggcggcgtgggttccttggctcatggccccgcagcacatggacctctgcttctacggccacatctccgtctctgactttggtctttctgcttccctctaatgaggactcctgtgattacatcagacccagccaggtaacccaggagaatctccccatctcaacatccttagttgaatcacatctgcaaagtcccttttgccaggtaa

SEQ ID NO: 56474 - DNA, 2126 bp, Homo sapiens
cccaaaccccactctgtccactgcttcaacaggtcaggtgatgtcatgtgcccctcctcgaaaggagtagcattatctcagctcctctgggggctgcaggtctaattgtctgcatcttgacacctggaaagtttgcccaacacctaacacaggacgtggattaggggaaggagcttgggactgtagatggatatttgtgagggaccgtagatggatatttgtgagtgatgtgcatagagacagccccctgcagagaaagatcatctgttgttcacctttgaatcctcaatctctgttgcacagggcattcagtaaacatcagatgtctgtggaacaaatgcatggattgtacataaaagaagcaaaagggactaccttctcatggtgtagaaatttagagctgcatgacacatttagccctaaatttaggaatccacccctctaggcaagaaataccttttccaatgaactaatgatctctccactcctttccctgaagagtttactgaacaatgatcaggagggcaccataaaccttattttcatgtcaaacagtacctgtcctccaatggtttatctatttggtgagacatgatacaaatgaagaaagattgctccccatcctcagaaagtctgtaacctcaccagacgaggcatccgtctcacacttgcttctccagaaggactagagaaccacaggagaccatgtgtactgaaaggttgaatgcacaatcacttagcactgaaaatatgcagcacagaaaataagtgtttgtagttgggtggcactatcagggcaggcttcctgaaagaagctggctttgaactgccctaggctgggaagaagttgaaaagagaacagaaaattcattggtctgtggtctggaggcaccctgggtcctcggaccctgagtctcagccagagatcctggtggggagacagaggtgtgaagccatcgaccaccctgcccatgttctcactcttcagagtgtggcaccagggcagaagcagcaaagatgaccactgcatacattccagctcccagacagaggtgcacttggcttctgatgcacaaggccccgttcaacaaaatccatgccttttcagggtgcaggataatagagtgaagtgcgtgtggaccggagagaagtgctgcccaggttaatggcaccagctcagagcatcctcagggaagccagcacgtttggagaagattgagggacgaggccatctaatgagccagaaggtccctgagagatgaggcggccttggcctctgggattccctacccctcattcacagaagcagcttggtccstggagttaagcagcactgttctgaaataataatgaacagcacgcctggcatgcctcctgtcagagcccagtgaggtgggcaggccagtgctgtctccccagcacctgctcctaccccagccagcagccctgacccttctgacaaaccccaaaatgctccaaccactatgtggtttctcaccatctccagcccaaactctctgcttccaaagcctagtggatccacccaatggacctcacctcccgcagtcccagcacacgctgcttaatctgagaggagcctgctccctgcgcggcagcgtgcatgttgacctgggggctttctcgcactgttcccaccacctgagatacctgctcccttctaccccgaacaatggtaggaaaaaatcaacatggacttagaatcagaagagccagcttcaagtcctccactgaagagagagtgcatattcccaaaaaagaacataaacttaggatcttacagtgacagaggtccgatgtccacagtcagtctccgagggctgaagtcacggtgtcatcagggctggctcactctggagctccagggagacgttgctcccttgcctttcccagttcccagaggcggcgtgggttccttggctcatggccccgcagcacatggacctctgcttctacggccacatctccgtctctgactttggtctttctgcttccctctaatgaggactcctgtgattacatcagacccagccaggtaacccaggagaatctccccatctcaacatccttagttgaatcacatctgcaaagtcccttttgccaggtaa

SEQ ID NO: 56475 - DNA, 2126 bp, Homo sapiens
cccaaaccccactctgtccactgcttcaacaggtcaggtgatgtcatgtgcccctcctcgaaaggagtagcattatctcagctcctctgggggctgcaggtctaattgtctgcatcttgacacctggaaagtttgcccaacacctaacacaggacgtggattaggggaaggagcttgggactgtagatggatatttgtgagggaccgtagatggatatttgtgagtgatgtgcatagagacagccccctgcagagaaagatcatctgttgttcacctttgaatcctcaatctctgttgcacagggcattcagtaaacatcagatgtctgtggaacaaatgcatggattgtacataaaagaagcaaaagggactaccttctcatggtgtagaaatttagagctgcatgacacatttagccctaaatttaggaatccacccctctaggcaagaaataccttttccaatgaactaatgatctctccactcctttccctgaagagtttactgaacaatgatcaggagggcaccataaaccttattttcatgtcaaacagtacctgtcctccaatggtttatctatttggtgagacatgatacaaatgaagaaagattgctccccatcctcagaaagtctgtaacctcaccagacgaggcatccgtctcacacttgcttctccagaaggactagagaaccacaggagaccatgtgtactgaaaggttgaatgcacaatcacttagcactgaaaatatgcagcacagaaaataagtgtttgtagttgggtggcactatcagggcaggcttcctgaaagaagctggctttgaactgccctaggctgggaagaagttgaaaagagaacagaaaattcattggtctgtggtctggaggcaccctgggtcctcggaccctgagtctcagccagagatcctggtggggagacagaggtgtgaagccatcgaccaccctgcccatgttctcactcttcagagtgtggcaccagggcagaagcagcaaagatgaccactgcatacattccagctcccagacagaggtgcacttggcttctgatgcacaaggccccgttcaacaaaatccatgccttttcagggtgcaggataatagagtgaagtgcgtgtggaccggagagaagtgctgcccaggttaatggcaccagctcagagcatcctcagggaagccagcacgtttggagaagattgagggacgaggccatctaatgagccagaaggtccctgagagatgaggcggccttggcctctgggattccctacccctcattcacagaagcagcttggtccgtggagttaagcagcactgttctgaaataataatgaacagcacgcctggcatgcctcctgtcagagcccagtgaggtgggcaggccagtgctgtctccccagcacctgctcctaccccagccagcagccctgacccttctgacaraccccaaaatgctccaaccactatgtggtttctcaccatctccagcccaaactctctgcttccaaagcctagtggatccacccaatggacctcacctcccgcagtcccagcacacgctgcttaatctgagaggagcctgctccctgcgcggcagcgtgcatgttgacctgggggctttctcgcactgttcccaccacctgagatacctgctcccttctaccccgaacaatggtaggaaaaaatcaacatggacttagaatcagaagagccagcttcaagtcctccactgaagagagagtgcatattcccaaaaaagaacataaacttaggatcttacagtgacagaggtccgatgtccacagtcagtctccgagggctgaagtcacggtgtcatcagggctggctcactctggagctccagggagacgttgctcccttgcctttcccagttcccagaggcggcgtgggttccttggctcatggccccgcagcacatggacctctgcttctacggccacatctccgtctctgactttggtctttctgcttccctctaatgaggactcctgtgattacatcagacccagccaggtaacccaggagaatctccccatctcaacatccttagttgaatcacatctgcaaagtcccttttgccaggtaa

SEQ ID NO: 56476 - DNA, 2126 bp, Homo sapiens
cccaaaccccactctgtccactgcttcaacaggtcaggtgatgtcatgtgcccctcctcgaaaggagtagcattatctcagctcctctgggggctgcaggtctaattgtctgcatcttgacacctggaaagtttgcccaacacctaacacaggacgtggattaggggaaggagcttgggactgtagatggatatttgtgagggaccgtagatggatatttgtgagtgatgtgcatagagacagccccctgcagagaaagatcatctgttgttcacctttgaatcctcaatctctgttgcacagggcattcagtaaacatcagatgtctgtggaacaaatgcatggattgtacataaaagaagcaaaagggactaccttctcatggtgtagaaatttagagctgcatgacacatttagccctaaatttaggaatccacccctctaggcaagaaataccttttccaatgaactaatgatctctccactcctttccctgaagagtttactgaacaatgatcaggagggcaccataaaccttattttcatgtcaaacagtacctgtcctccaatggtttatctatttggtgagacatgatacaaatgaagaaagattgctccccatcctcagaaagtctgtaacctcaccagacgaggcatccgtctcacacttgcttctccagaaggactagagaaccacaggagaccatgtgtactgaaaggttgaatgcacaatcacttagcactgaaaatatgcagcacagaaaataagtgtttgtagttgggtggcactatcagggcaggcttcctgaaagaagctggctttgaactgccctaggctgggaagaagttgaaaagagaacagaaaattcattggtctgtggtctggaggcaccctgggtcctcggaccctgagtctcagccagagatcctggtggggagacagaggtgtgaagccatcgaccaccctgcccatgttctcactcttcagagtgtggcaccagggcagaagcagcaaagatgaccactgcatacattccagctcccagacagaggtgcacttggcttctgatgcacaaggccccgttcaacaaaatccatgccttttcagggtgcaggataatagagtgaagtgcgtgtggaccggagagaagtgctgcccaggttaatggcaccagctcagagcatcctcagggaagccagcacgtttggagaagattgagggacgaggccatctaatgagccagaaggtccctgagagatgaggcggccttggcctctgggattccctacccctcattcacagaagcagcttggtccgtggagttaagcagcactgttctgaaataataatgaacagcacgcctggcatgcctcctgtcagagcccagtgaggtgggcaggccagtgctgtctccccagcacctgctcctaccccagccagcagccctgacccttctgacaaacccyaaaatgctccaaccactatgtggtttctcaccatctccagcccaaactctctgcttccaaagcctagtggatccacccaatggacctcacctcccgcagtcccagcacacgctgcttaatctgagaggagcctgctccctgcgcggcagcgtgcatgttgacctgggggctttctcgcactgttcccaccacctgagatacctgctcccttctaccccgaacaatggtaggaaaaaatcaacatggacttagaatcagaagagccagcttcaagtcctccactgaagagagagtgcatattcccaaaaaagaacataaacttaggatcttacagtgacagaggtccgatgtccacagtcagtctccgagggctgaagtcacggtgtcatcagggctggctcactctggagctccagggagacgttgctcccttgcctttcccagttcccagaggcggcgtgggttccttggctcatggccccgcagcacatggacctctgcttctacggccacatctccgtctctgactttggtctttctgcttccctctaatgaggactcctgtgattacatcagacccagccaggtaacccaggagaatctccccatctcaacatccttagttgaatcacatctgcaaagtcccttttgccaggtaa

SEQ ID NO: 56477 - DNA, 1661 bp, Homo sapiens
ttgtttctgctgagtccccgtggcctcacctagagcttggtatgcagcaggaaccccatgaccatctcctggatgaagctacaactgaccaatcgagtgaacagaggatgctgtcacttatgaccagctrcaactcttcttttgtcagcgcctcagtctgccctttccagcaatgcgggaagaatccatcagcgccaggcgttggcagggaagccagccctgcatcccatggcctgaagctgagctagctctactagtctatgctcctcagaaaacacaaaaccatctgacaggcacacgccacctatggcaacatcacataaaaagaaaacatttttgttcacctcgaaattcctttctaacaaagcagaatacaattgtcttgggctatcagaagagtaattattacaggcttggcttcatggtcactaaagagcaggcggctctatcttaaaaggcttggattcaatcttatgtcgcatgctggacaaagccagcaggagctcactgagaggctgggtgtgtgaagaaatgaagagcaaaaattttctattcagaactcaggtcctctgaggctcacgttatctcctgaaacgtgagggcatgggaagccccggaagctgacctacaggatccacggctcttgcccagacctgaaggagcactttgttcctctaatattcaccaccttcatctccactcaagttctctgccttgtccccatgggctctaagggagaagagagggagcagaaacacgaccttggaggtgggcaggaacggttcatggagcacaaactgtttatgaccccctctcaccagcgaggcataaagcaacacggtggtctctgccctgggcaggggcagaagtcgaagtccacatgggcagcctggaattacactaccagactgcaacgaggcagcatctgctcattcatgtcaactcgattttattgagcacacccctatgccaaacactgggtcagctctgggaacatcaaactgtaaagacgtggttcctgccctgaagcagctcgagcccagccagggagaggaggcaacaacagaagcacaagcaggtgcgtgagcaaaacagagcagctgacacccgaagccaccaagacgacacctgagccaggccttaaaggagaggaagacatctgccaagggaggagggcagggtgtttggccacagcacgttgcatgagcaaatcctcagacaggacagaggaaggcctggtgcgctggaggaagttcagggcagcggggaagctggcgtctggtggatggcggctggaggtggcgtcagaaggcgccctgcagacagaccgtgaaggccggggatgaaccttcaggaatatccacggagggtctctggtcttgcagttaccctcccacagatgtggtggccaggatgtcacaggacacacgggactcatcatcaggtgcagccccccaccccatccacatcaccattttgttttccttgtaggcaaacatgctgacttcacataggtgctatttgttttcatgtctattaactgtcccctccatgtcttcttcccttctacgtccacagcatctggacagtgccatactcagagcagacactcagggatggtggtgaggttccagtgtgaatggaaacggggctgtcaccag

SEQ ID NO: 56478 - DNA, 1661 bp, Homo sapiens
ttgtttctgctgagtccccgtggcctcacctagagcttggtatgcagcaggaaccccatgaccatctcctggatgaagctacaactgaccaatcgagtgaacagaggatgctgtcacttatgaccagctgcaactcttcttttgtcagcgcctcagtctgccctttccagcaatgcgggaagaatccatcagcgccaggcgttggcagggaagccagccctgcatcccatggcctgaagctgagctagctctactagtctatgctcctcagaaaacacaaaaccatctgacaggcacacgccacctatggcaacatcacataaaaagaaaacatttttgttcacctcgaaattcctttctaacaaagcagaatacaattgtcttgggctatcagaagagtaattattacaggcttggcttcatggtcactaaagagcaggcggctctatcttaaaaggcttggattcaatcttatgtcgcatgctggacaaagccagcaggagctcactgagaggctgggtgtgtgaagaaatgaagmgcaaaaattttctattcagaactcaggtcctctgaggctcacgttatctcctgaaacgtgagggcatgggaagccccggaagctgacctacaggatccacggctcttgcccagacctgaaggagcactttgttcctctaatattcaccaccttcatctccactcaagttctctgccttgtccccatgggctctaagggagaagagagggagcagaaacacgaccttggaggtgggcaggaacggttcatggagcacaaactgtttatgaccccctctcaccagcgaggcataaagcaacacggtggtctctgccctgggcaggggcagaagtcgaagtccacatgggcagcctggaattacactaccagactgcaacgaggcagcatctgctcattcatgtcaactcgattttattgagcacacccctatgccaaacactgggtcagctctgggaacatcaaactgtaaagacgtggttcctgccctgaagcagctcgagcccagccagggagaggaggcaacaacagaagcacaagcaggtgcgtgagcaaaacagagcagctgacacccgaagccaccaagacgacacctgagccaggccttaaaggagaggaagacatctgccaagggaggagggcagggtgtttggccacagcacgttgcatgagcaaatcctcagacaggacagaggaaggcctggtgcgctggaggaagttcagggcagcggggaagctggcgtctggtggatggcggctggaggtggcgtcagaaggcgccctgcagacagaccgtgaaggccggggatgaaccttcaggaatatccacggagggtctctggtcttgcagttaccctcccacagatgtggtggccaggatgtcacaggacacacgggactcatcatcaggtgcagccccccaccccatccacatcaccattttgttttccttgtaggcaaacatgctgacttcacataggtgctatttgttttcatgtctattaactgtcccctccatgtcttcttcccttctacgtccacagcatctggacagtgccatactcagagcagacactcagggatggtggtgaggttccagtgtgaatggaaacggggctgtcaccag

SEQ ID NO: 56479 - DNA, 1059 bp, Homo sapiens
ccgctcgccacctttttctcctcatcactctcgtattcggcgaggaccagctcctcctccccagactccagctgctccagccgctcggcctccgggcctgtctctagcatctccctgctgaggcggaggagattctctgtttcttcttcttcctgcctctggacaggggcagtggaggtggggagggaggaagaagtctcagcaccagtacccacctccccacgtgccagagacaaagcacaccacgcccattcacataggcctggctgcctggctggagagaggtcgactcctaggatccacgcctcaaccactcacagcccagcttctgtacgggagcacatagccagtgagggtcatggaggggagaccaagaccctggccacgcacccatgagcctccaagcagggcgaccctgcctggacataatcctgccccccaagaaatgaggctcaccaggcgcttggctgcatacttgagctgcaccctgtgctgcagctgctgcaggcgttcttctcgctgcttcctcctggcctgctccacctacaggaggcagacatgaaggaaaatcaccaggaagcccaaaaccaggcstctcctaaggagtctgggccactcagcccggcgcctcctcactgcgggcagctctccttccccgaccagcactcaagggctgccgcatcccctcccgggacctcatccctgcaggtcccagcctcgctgctcactgtggaaggcggcacgctcctcccaaagccacacgctctccatcagatccatttgcagccattgaaccatgctgccaatggcaacgatcaggtcctttcccaggtgagtaataaatgggcaccaacagttccttgtgtggagaaggccctgctgacctccagctcaaaagagacagcacagcggcagcaccatcgacccaaggagctgagggaagagctgagaggcacagcaacggcaggggagcatgcactgcctgagtctcggaatcgccccacaacaatcgctgaagccctgtttcctccagcactcccacttccggataccccaggt

SEQ ID NO: 56480 - DNA, 1059 bp, Homo sapiens
ccgctcgccacctttttctcctcatcactctcgtattcggcgaggaccagctcctcctccccagactccagctgctccagccgctcggcctccgggcctgtctctagcatctccctgctgaggcggaggagattctctgtttcttcttcttcctgcctctggacaggggcagtggaggtggggagggaggaagaagtctcagcaccagtacccacctccccacgtgccagagacaaagcacaccacgcccattcacataggcctggctgcctggctggagagaggtcgactcctaggatccacgcctcaaccactcacagcccagcttctgtacgggagcacatagccagtgagggtcatggaggggagaccaagaccctggccacgcacccatgagcctccaagcagggcgaccctgcctggacataatcctgccccccaagaaatgaggctcaccaggcgcttggctgcatacttgagctgcaccctgtgctgcagctgctgcaggcgttcttctcgctgcttcctcctggcctgctccacctacaggaggcagacatgaaggaaaatcaccaggaagcccaaaaccaggcctctcctaaggagtctgggccactcagcccggcgcctcctcactgcgggcagctctccttccccgaccagcactcaagggctgccgcatcccctcccgggacctcatccctgcaggtcccagcctcgctgctcactgtggaaggcggcacgctcctcccaaagccacacgctctccatcagatccatttgcagccattgaacyatgctgccaatggcaacgatcaggtcctttcccaggtgagtaataaatgggcaccaacagttccttgtgtggagaaggccctgctgacctccagctcaaaagagacagcacagcggcagcaccatcgacccaaggagctgagggaagagctgagaggcacagcaacggcaggggagcatgcactgcctgagtctcggaatcgccccacaacaatcgctgaagccctgtttcctccagcactcccacttccggataccccaggt

SEQ ID NO: 56481 - DNA, 2444 bp, Homo sapiens
gaactagaaatatttgaccctgcaatcccattactgggtatatacccaaaggattataaatcattctgctataaagacacacgcacacttatgtttattgcggtactgtttacaatagcaaagacttggaaccaacccaaatgccatcaatgacagactggataaagaaaacgtggcacatatacaccatggaatactatgcagtcataaaaaaggatgagttcatgtcctttgcaggggcatggatgaaactggaaaccatcattctcagcaaactaacacaggaacagaaagccaaacaccacatagtctcactcataagtaggaatcgaacaacgagaacacagggacacacagaggggaacatcacacactggggcctgtcgggggttgggggctaggggagggagagcattaggagaaacacctaatgtagatgacaggttgataggtgcagcaaaccaccatggcatgtgtatacctatgtaacaaacctgcacactctgcacatgcacctcagaactgaaagtataataaaatgaagcatttgaaatatgcattgaaacagacgtatatatataaagcaacattagagacctattttttttctcatgtagatacctgtatagatacctatatagtagtaaaaatcttaagaactgggaggttaaatgctatttattaattttttaaatattaatttgtggaatttcatttatctttcaagactaagttaatttccaagagatagaataccaaggaggagatgatattgactagtccctttacagccattctccaaatgtccagagtccacatttgccttttttgatttcttggtttaacttggaagcctcyatgttctctcactatcccttgtctgcacttaaccaaaaccactggtccttattactaatatctctacaggagtcccacaggtaacctccattatctccatccaaacctgtgccttctcgtgccagtccttctgattggagcacattccttcccatatgacaattgacttctttgtcttcatctgtcatgtcacattccttatacttaatatttttttaaaaaatcatttttccattaattatgatatttcattcctttcaaacattagtgattcgttcatacctgctaattcgttctccttcgtttggtaatgcatttcctatttcttgtgcttgatgaatcctgatactaagtaacatactatggaaaagctgcccatgtagatagccccatccttcctgttttatcacctcaggccctaatgaaactccctgttcaatgctcagtgaggatccctgtcatcattttaggcctccactatttgacactgaatattgagaaaaaacttaaaataaactcaatgctggactagggtttgtcatgatgttacattataccaacagttaaaataatcaaatttttttttattttataaaatggcggaattgacaactttgacattttatgcaaaacacttatacatagaaataaatacatgtaaaagtttaaattttgaagtcaagatcatacagtcttctcactttgatttgagaacatctcatttgctacatttcactacagcccatttacatgatattgtcagcatagaatagaatataaaaaaaaagtataatgtaatactggaagcatttctttcctggtttatatttcatattttaagtataaaggaggaagcagttttaactactttccctcacactcacacatcccaaactgtattttcgactagggttcaagctataactccaagctgatgttgaagcctttggtccattgcaatactttttctatccaatttgcagaaacatttgtgcttcaggcccttggcctgcaaaagctaatttaagatgatgtgacaggaatttcgagcttttgctgagaatataagaagtaatgcaatcgaagcaaaaaatggaaaagaataaatatatactgactttccctatgctgtctccatataatacctagtttttttattttcttatattttgctttagctttagtttattatcaataagtttgatttttattatgtgtatgttgtttaaatatttatttttgccagttgcaatcaactgcaaaaatataaaaatactaaagtggcaatgtgacacaataattagcattggctattgagtaagaaacacaaatgtgaggaagtggtccaagttctactagatctgtgacctagggcaaactggctaaacaatcctacactcaggttctgtaactgtatcatgggaaacatagtaacacctaaataataacatcagtgtctccatttgtgctgtatattttctaattgcttggctcccttttcctcactagaacaactttcagtcttctcagttctgttctatacaatacaccaggagggttgatccccaagtgcttgattatgtagg

SEQ ID NO: 56482 - DNA, 2444 bp, Homo sapiens
gaactagaaatatttgaccctgcaatcccattactgggtatatacccaaaggattataaatcattctgctataaagacacacgcacacttatgtttattgcggtactgtttacaatagcaaagacttggaaccaacccaaatgccatcaatgacagactggataaagaaaacgtggcacatatacaccatggaatactatgcagtcataaaaaaggatgagttcatgtcctttgcaggggcatggatgaaactggaaaccatcattctcagcaaactaacacaggaacagaaagccaaacaccacatagtctcactcataagtaggaatcgaacaacgagaacacagggacacacagaggggaacatcacacactggggcctgtcgggggttgggggctaggggagggagagcattaggagaaacacctaatgtagatgacaggttgataggtgcagcaaaccaccatggcatgtgtatacctatgtaacaaacctgcacactctgcacatgcacctcagaactgaaagtataataaaatgaagcatttgaaatatgcattgaaacagacgtatatatataaagcaacattagagacctattttttttctcatgtagatacctgtatagatacctatatagtagtaaaaatcttaagaactgggaggttaaatgctatttattaattttttaaatattaatttgtggaatttcatttatctttcaagactaagttaatttccaagagatagaataccaaggaggagatgatattgactagtccctttacagccattctccaaatgtccagagtccacatttgccttttttgatttcttggtttaacttggaagcctctatgttctctcactatcccttgtctgcacttaaccaaaaccactggtccttattactaatatctctacaggagtcccacaggtaacctccattatytccatccaaacctgtgccttctcgtgccagtccttctgattggagcacattccttcccatatgacaattgacttctttgtcttcatctgtcatgtcacattccttatacttaatatttttttaaaaaatcatttttccattaattatgatatttcattcctttcaaacattagtgattcgttcatacctgctaattcgttctccttcgtttggtaatgcatttcctatttcttgtgcttgatgaatcctgatactaagtaacatactatggaaaagctgcccatgtagatagccccatccttcctgttttatcacctcaggccctaatgaaactccctgttcaatgctcagtgaggatccctgtcatcattttaggcctccactatttgacactgaatattgagaaaaaacttaaaataaactcaatgctggactagggtttgtcatgatgttacattataccaacagttaaaataatcaaatttttttttattttataaaatggcggaattgacaactttgacattttatgcaaaacacttatacatagaaataaatacatgtaaaagtttaaattttgaagtcaagatcatacagtcttctcactttgatttgagaacatctcatttgctacatttcactacagcccatttacatgatattgtcagcatagaatagaatataaaaaaaaagtataatgtaatactggaagcatttctttcctggtttatatttcatattttaagtataaaggaggaagcagttttaactactttccctcacactcacacatcccaaactgtattttcgactagggttcaagctataactccaagctgatgttgaagcctttggtccattgcaatactttttctatccaatttgcagaaacatttgtgcttcaggcccttggcctgcaaaagctaatttaagatgatgtgacaggaatttcgagcttttgctgagaatataagaagtaatgcaatcgaagcaaaaaatggaaaagaataaatatatactgactttccctatgctgtctccatataatacctagtttttttattttcttatattttgctttagctttagtttattatcaataagtttgatttttattatgtgtatgttgtttaaatatttatttttgccagttgcaatcaactgcaaaaatataaaaatactaaagtggcaatgtgacacaataattagcattggctattgagtaagaaacacaaatgtgaggaagtggtccaagttctactagatctgtgacctagggcaaactggctaaacaatcctacactcaggttctgtaactgtatcatgggaaacatagtaacacctaaataataacatcagtgtctccatttgtgctgtatattttctaattgcttggctcccttttcctcactagaacaactttcagtcttctcagttctgttctatacaatacaccaggagggttgatccccaagtgcttgattatgtagg

SEQ ID NO: 56483 - DNA, 2444 bp, Homo sapiens
gaactagaaatatttgaccctgcaatcccattactgggtatatacccaaaggattataaatcattctgctataaagacacacgcacacttatgtttattgcggtactgtttacaatagcaaagacttggaaccaacccaaatgccatcaatgacagactggataaagaaaacgtggcacatatacaccatggaatactatgcagtcataaaaaaggatgagttcatgtcctttgcaggggcatggatgaaactggaaaccatcattctcagcaaactaacacaggaacagaaagccaaacaccacatagtctcactcataagtaggaatcgaacaacgagaacacagggacacacagaggggaacatcacacactggggcctgtcgggggttgggggctaggggagggagagcattaggagaaacacctaatgtagatgacaggttgataggtgcagcaaaccaccatggcatgtgtatacctatgtaacaaacctgcacactctgcacatgcacctcagaactgaaagtataataaaatgaagcatttgaaatatgcattgaaacagacgtatatatataaagcaacattagagacctattttttttctcatgtagatacctgtatagatacctatatagtagtaaaaatcttaagaactgggaggttaaatgctatttattaattttttaaatattaatttgtggaatttcatttatctttcaagactaagttaatttccaagagatagaataccaaggaggagatgatattgactagtccctttacagccattctccaaatgtccagagtccacatttgccttttttgatttcttggtttaacttggaagcctctatgttctctcactatcccttgtctgcacttaaccaaaaccactggtccttattactaatatctctacaggagtcccacaggtaacctccattatctccatccaaacctgtgccttctcgtgccagtccttctgattggagcacattccttcccatatgacaattgacttctttgtcttcatctgtcatgtcacattccttatacttaatatttttttaaaaaatcatttttccattaattaygatatttcattcctttcaaacattagtgattcgttcatacctgctaattcgttctccttcgtttggtaatgcatttcctatttcttgtgcttgatgaatcctgatactaagtaacatactatggaaaagctgcccatgtagatagccccatccttcctgttttatcacctcaggccctaatgaaactccctgttcaatgctcagtgaggatccctgtcatcattttaggcctccactatttgacactgaatattgagaaaaaacttaaaataaactcaatgctggactagggtttgtcatgatgttacattataccaacagttaaaataatcaaatttttttttattttataaaatggcggaattgacaactttgacattttatgcaaaacacttatacatagaaataaatacatgtaaaagtttaaattttgaagtcaagatcatacagtcttctcactttgatttgagaacatctcatttgctacatttcactacagcccatttacatgatattgtcagcatagaatagaatataaaaaaaaagtataatgtaatactggaagcatttctttcctggtttatatttcatattttaagtataaaggaggaagcagttttaactactttccctcacactcacacatcccaaactgtattttcgactagggttcaagctataactccaagctgatgttgaagcctttggtccattgcaatactttttctatccaatttgcagaaacatttgtgcttcaggcccttggcctgcaaaagctaatttaagatgatgtgacaggaatttcgagcttttgctgagaatataagaagtaatgcaatcgaagcaaaaaatggaaaagaataaatatatactgactttccctatgctgtctccatataatacctagtttttttattttcttatattttgctttagctttagtttattatcaataagtttgatttttattatgtgtatgttgtttaaatatttatttttgccagttgcaatcaactgcaaaaatataaaaatactaaagtggcaatgtgacacaataattagcattggctattgagtaagaaacacaaatgtgaggaagtggtccaagttctactagatctgtgacctagggcaaactggctaaacaatcctacactcaggttctgtaactgtatcatgggaaacatagtaacacctaaataataacatcagtgtctccatttgtgctgtatattttctaattgcttggctcccttttcctcactagaacaactttcagtcttctcagttctgttctatacaatacaccaggagggttgatccccaagtgcttgattatgtagg

SEQ ID NO: 56484 - DNA, 1298 bp, Homo sapiens
tgttaggtattgtataacatggtcttytttatttctattaaggctttttgtctaacagtatgcctgtttactataactatacaagcttccttttgtttccttttgtttagttttcttcatgatattttttaacccttctatcttcataagttctgtatctttatatctttgagatgtctcttgaaactgcacagagttgagtttaatattttaaacattatgattgtgttagcatttggaaatataacatcttgaaatttaccctaaatactgatatgtgtggttttaattctacatcctcactctatatttgatgatgttcagcatttttcctcttttctttgcctggattaatttttcgttacatgctttcatcctctattagcttattatttgtatataattttactttttttaatagttgtcatagtattcatccttgacttaatgtttgctataagtttgtttttctctcttccctgagactgtaagaattctaaaattctttaagtctttttacctcctttctcacttacactgttgtttaggagtgtatattaaatatatgtttaagcctcacagtccattattgctaatgtttttgacttcgaatatttatttcaatttcctacacgtttattctttaggttgctcttcatttattgtatctctgagcttctccctgggataatttttttcttctgcctaaggaaattcctgtactatttctttgataataaagttcctgcttttatttttctaaaaagtattttcttttacatttatttttctgggaaaatatttgctggttttggaatattagattggcagttatagcttctgtgattaattttgttgaacttagctccaattctattttcgattgtttgaaagcgagttgtcttttattcctccagcttttaaaaataatcactttggaagtgaacagacacttttcaaaagaagacatacaggcagccaaaacccatataaacagaaaagctcaacatccctaatcattagaaaaatgcaaagcaaaaccacaatgaaataccgtgtcacaccagtcagaatggctactattaaaaagttaaaaaaaataaaagttgctggcaaggttgcagagaaaagcaaactcttatatactgttgatgggagtataaatcagttcaaccattgtagaagcagtgtggtgattcctcaaagagcaacaaacaggactaccattagacccatcgatccaaccattactgggtatatacccaaaggaagataaatcattctgccgtaaagacaca

SEQ ID NO: 56485 - DNA, 641 bp, Homo sapiens
gatccgtgtagatccgatcgctcaccatgagggtctccctagagcagacatttggaggacttggctgaggagccacaggtgtatgtttctcatgaattgccttcctcagccactctgggttgtgagtattgactgatgctgactgtgggcctctgggccctttctagattcccttggcatctcttcctcccctttctcttcttgccctgcccttggctctacactttctcccaagtcactgtcttggagaccagtgtcaggaccttgagtaacacctccgtgtggatggctcgctctccccgctcagccttgacacttcatgaaggcctcttgcccstgagcccacatgtcacagccactgccactcccgtgcccccgctgttaaccttgggtggttcacatgtaaaacctgcctttatattcttgatttactttttgagaacattgtcaaagttaggtgagtgttcatacacaaagccttcaacctgccttcatatgcagggatagggctgtccacgtgcgcatcaggaaccgagtggaatgttgtgagcatggtcagttcgggcacagtttgttttccctactgcagaataaaagtgatatttttgacaattcaggttcttttttttattgtaaaggag

SEQ ID NO: 56486 - DNA, 1246 bp, Homo sapiens
agttttgtagtgggaagttattccaagtatctattccactattttgccagaaattgtagtgtaaagaatttcataaatataaaaaaatctaactcattctcaaatttattatgaattagtgtcatctattggatgagggctgaggtctgcactgaaagcagaattcagggccagagaaacagaagaaatatttaaaatcattttaaaatgtagcaaatgatctgaccaaagtagtcagattccgagccagggcacaggttgaacggacagtaaaagccagcaagctgactgacacagagctcttgtaaacttagtggacatccggttgcctgcctttgtaaagatggctgcaagggctgtgccctttctgcttgatttagctggctaacctaggcctccagtgagatattattagaaattcataataatttcaccactcatacttagaagaattctgagaagtaattctctagcaaactccaagtcagttttggttttaattttcaaagtggagaagtgaatttctattgaaagaatgccacatatggcattatagaaacacagaaaacccttacctcctctatttcttttacgtttgactggcccagttataaggaaatggttggttttagctggcaattgccttgtggaaaagtgacgacccataggrcatttttggcctaaattttgctttgaaattttttgccttatttctgatttctgcatgtcttttttttttttttgttacttttccattttcattaaaatatgctataccctgccacaaaaagtgtagctgtcaatctataaaatagtacaatttcagtaatcgtgtctggtattttaaattgagaaccataaaaaaatattattattatggctctgaagaatatataactcctcaggaaacatcataaaaaagaattcagagtgtgtgtcacccccagaaaggaaggaagggaggcagagagggagagagaaaaagcttactagatcattttaagttccagaaaatgtaatgaaaggagaatcaaaatttttagtttaagagaaaaaaacgttagtttcatgaagattattatttgtttttccttgttcatgcccttttttctttaaccttttttttttaaacagaagatatttacatcattaggtctagttcctaataattcatgaaaacaatgagatccctggtaaacattttttgtcaacataaaacatagaaacgtatgtttagagttgaagc

SEQ ID NO: 56487 - DNA, 560 bp, Homo sapiens
cattctaggcagccacaaccaattgctttaaaagcaggcattccagttgagccttgttactatctctgacacgttatatgcatgctcccaaagttttgacaaaaatcctactggacaagatgaatctgctgatgagtggacagagagaatagttcagaggagccacaatgacaaggcagcaatacctaaagaccgccaaatgaaaacgttaagtcttttaaccttgggagtaagtttttggatgtaagagtccgtgtgtgtstgtgtgtgtgtgtgtgtgtgtgtgtgtgtgaaacgtcagggacctccattctcgttagatatttgaattgcataattaaatgtatacagagatggcatgctgaataatgccaataagaatgatagtgaaaatgatacatctaatctgtagtaggcatgaaagacttttctatattatctctgttctgctcattaaccctgcaaagtgggcccagagaagataagaatctcatagaagatcaagcaggtggaaagcagaggagtcagcatagaaaccaagtttcgtatgacctccaaat

SEQ ID NO: 56488 - DNA, 560 bp, Homo sapiens
cattctaggcagccacaaccaattgctttaaaagcaggcattccagttgagccttgttactatctctgacacgttatatgcatgctcccaaagttttgacaaaaatcctactggacaagatgaatctgctgatgagtggacagagagaatagttcagaggagccacaatgacaaggcagcaatacctaaagaccgccaaatgaaaacgttaagtcttttaaccttgggagtaagtttttggatgtaagagtccgtgtgtgtgtgtgtgtgtgtgtgtgtgtgtgtgtgtgtgaaacgtcagggacctccattctcgttagatatttgaattgcataattaaatgtatacagagatggcatgctgaataatgccaataagaatgatagtgaaaatgatacatctaatctgtagtaggcatgaaagacttttctatattatctctgttctgctcattaaccctgcaaagtgggcccagagaagataagaatctcayagaagatcaagcaggtggaaagcagaggagtcagcatagaaaccaagtttcgtatgacctccaaat

SEQ ID NO: 56489 - DNA, 1039 bp, Homo sapiens
aaatcacagcattcttatacaccaataatagatgtcactattcttactatgagcggtctgatgtcattgtgccatcatttgtcaccagctgcctggggttcagtagtgtctatcactgcagtctctcagaggcaattcttgggcatgagattatcatttagtaggaaactgaaattgtagtaagtttcaattgaatacctagcactaaaactttaggagctctctgcatgttgtagctaatagaaaagcaaaggtctgagaaatggtaatatagttctggaatttacggtgccatattatgattgtaagaagtaaaggtatatttatttctctgtgggtaagaaggtagtactttaggagtgagtataattaaggaagtgttttaggtagggactaagtaatttaatttccataaactattaaggcaattccagtgttatttttccctaagccaccaagaaaatgaaaatgtattttaccagcagtgttttttggttttttttttgttttttttaaccagaagtttggtacattatggtcttcagcattttgtttatgtttaagatgtactttcaaagagttttctcccttaaactataaaagttacctctaacaacttgtggggagttttcctgcattttctgcatagtttgccaattccctggtaagttttttaatacctttagamaccaaatagtctcttgcctaagaggatacatacaaaaatgctctttaggctaacaagaggttattattacatcattaagaatattaagaaacattcaggagttatgatttattcattcagcacacacattgatcacttcctataaaataggtactatgcttggccctaagtatatcacccatcggctaatggaacacaagcatacaaaataaaactttagtagatacagtttgacaaatccaattataaaagaatggaacaatggtaacacagacgaaggcatgattaaatatttttggagggatggaaagtgtggctgagttaggtcttcagtgaagaataagggctctc

SEQ ID NO: 56490 - DNA, 525 bp, Homo sapiens
tttgttccttataatttgcttaataacatttgattttctctagcttactttattgcaaaaatacagtatataatacatataacatccaaaatatgtgttaattgactgttgatgttatcattaaggcttccgctcaacagtaggctcttagtagttaagttttggggaatgaacagttatacgcaggttttcaaccgcacaggggtcagtaccctgacccctgcattgttcaagggttgactgtaatttgaaaagttttaatacttttacaaaagttcamtacatgctatactgttcttcaaaaatatatgtatttgttaagtttttaagggcatttgatagttttgttttgttttcactgttagaaaactgatttaattatgttcttatacaggctatctaatgtatagaaagctattcatttttattgattaattttaaatacaacaaacttataaaaatttttattgattttaataggtttttagattactctagacaataatgagaatcttactgattttt

SEQ ID NO: 56491 - DNA, 525 bp, Homo sapiens
tttgttccttataatttgcttaataacatttgattttctctagcttactttattgcaaaaatacagtatataatacatataacatccaaaatatgtgttaattgactgttgatgttatcattaaggcttccgctcaacagtaggctcttagtagttaagttttggggaatgaacagttatacgcaggttttcaaccgcacaggggtcagtaccctgacccctgcattgttcaagggttgactgtaatttgaaaagttttaatacttttacaaaagttcaatacatgctatactgttcttcaaaaatatatgtatttgttaagtttttaagggcatttgatagttttgttttgttttcactgttagaaaaytgatttaattatgttcttatacaggctatctaatgtatagaaagctattcatttttattgattaattttaaatacaacaaacttataaaaatttttattgattttaataggtttttagattactctagacaataatgagaatcttactgattttt

SEQ ID NO: 56492 - DNA, 690 bp, Homo sapiens
taaaggctgagtcacagaagctctgtggaccgggactttcactctgcgtattctgctgctctgaaagctgggtctctctcccggaaccctgtttgtggtacagtctgcccagcgtacctggcttgactatgctgtgaccatcagagctaggtgatcttggatgcttttctgcttctcagttagtacagttttctccttaaatcctaagtatttccrcaccttgtggtgttgatgttatgtgtgcctgtttggcctcctttggaacagcaactatacgacaaaattagcaaaaactaagctgacaactaactttgttccttcagaagttctctggctgctgtcctagacactcaatcctggccttagattccacttgacttctctttttttctaaagaactctcctaggactctaaatccagtcgaccttgctttactgcagacacaggctgtgcctgtgtctgtgtgtgtgttttattctattattttaataaataataataataaaacacttttctatgtcaggcactcttctagctgccttatgagtattaattacttttgttctcataacagctttatagggtagacagtattattattcccattttaaaaataaggaaaatcagccacagagtcaagtagtttgcccaagctcacctggccaggaactggcagagtccagcttgga

SEQ ID NO: 56493 - DNA, 1076 bp, Homo sapiens
tgttctcagcttagcctcaagtctttgcagttgctgtttccatatcctgcaatgctctggatcgcctagatctttatatggttygctacctcacactatttgtctctgataaaatgtcatttcctcaaacatttcttctctgactgtccttgcaaatactcaagtcagcttcctcatgacaattattcacttgaataaagacaaccatgagttttctcatgtacaagataaatatccttaattccattacccagtctttaatggttaggaatattctcatcattccttgttcttcaaattgtcattgtacctcttaaaataaatatctaaaattgaataaagtatcatgtatggcatggccagtaaagggcagaagagaactgttaccttcctcattttaaatgcttgaattctttaatatatcttgagatttcattagcatgtttgtcaaatatatcttcttgttgactcacactaagaatattgaaaattatgtacctaaataatgctataatagtaagccacatttttctctcttgatttatacttttaactaaattttactttttctttcaatgactattttaaatgttggccaatgtatataaaataaaataatatataatttgacatcaaattaactagaaacattaactttatcctaataactaagaacccctaggttcttaaaggaaacatttattgtttcatttggttcctcaagtgacaattctatattctcttatcacaacaattgttttatgacctaatgaacagaataaatttgccagaaacactagttaaaaactaaaattagttaacaaatcttgaattatattgtagtattagaataacactacatttttaattaatgttactatttatacttgagaaatgttattaactaagatgttggaataatgagcttttcacacctcaaagctcagtggagagtttggctgtagaggaaaatcaattcattataaaattatcttctaagcaactagaagctgttaataaaataaatcatcatagtattttcagaaccatgaagctgctcatgcaacagtgatgaa

SEQ ID NO: 56494 - DNA, 1076 bp, Homo sapiens
tgttctcagcttagcctcaagtctttgcagttgctgtttccatatcctgcaatgctctggatcgcctagatctttatatggtttgctacctcacactatttgtctctgataaaatgtcatttcctcaaacatttcttctctgactgtccttgcaaatactcaagtcagcttcctcatgacaattaytcacttgaataaagacaaccatgagttttctcatgtacaagataaatatccttaattccattacccagtctttaatggttaggaatattctcatcattccttgttcttcaaattgtcattgtacctcttaaaataaatatctaaaattgaataaagtatcatgtatggcatggccagtaaagggcagaagagaactgttaccttcctcattttaaatgcttgaattctttaatatatcttgagatttcattagcatgtttgtcaaatatatcttcttgttgactcacactaagaatattgaaaattatgtacctaaataatgctataatagtaagccacatttttctctcttgatttatacttttaactaaattttactttttctttcaatgactattttaaatgttggccaatgtatataaaataaaataatatataatttgacatcaaattaactagaaacattaactttatcctaataactaagaacccctaggttcttaaaggaaacatttattgtttcatttggttcctcaagtgacaattctatattctcttatcacaacaattgttttatgacctaatgaacagaataaatttgccagaaacactagttaaaaactaaaattagttaacaaatcttgaattatattgtagtattagaataacactacatttttaattaatgttactatttatacttgagaaatgttattaactaagatgttggaataatgagcttttcacacctcaaagctcagtggagagtttggctgtagaggaaaatcaattcattataaaattatcttctaagcaactagaagctgttaataaaataaatcatcatagtattttcagaaccatgaagctgctcatgcaacagtgatgaa

SEQ ID NO: 56495 - DNA, 1076 bp, Homo sapiens
tgttctcagcttagcctcaagtctttgcagttgctgtttccatatcctgcaatgctctggatcgcctagatctttatatggtttgctacctcacactatttgtctctgataaaatgtcatttcctcaaacatttcttctctgactgtccttgcaaatactcaagtcagcttcctcatgacaattattcacttgaataaagacaaccatgagttttctcatgtacaagataaatatccttaattccattacccagtctttaatggttaggaatattctcatcattccttgttcttcaaattgtcattgtacctcttaaaataaatatctaaaattgaataaagtatcatgtatggcatggccagtaaagggcagaagagaactgttaccttcctcattttaaatgcttgaattctttaatatatcttgagatttcattagcatgtttgtcaaatatatcttcttgttgactcacactaagaatattgaaaattatgtacctaaataatgctataatagtaagccacatttttctctcttgatttatacttttaactaaattttactttttctttcaatgactattttaaatgttggccaatgtatataaaataaaataatatataatttgacatcaaattaacwagaaacattaactttatcctaataactaagaacccctaggttcttaaaggaaacatttattgtttcatttggttcctcaagtgacaattctatattctcttatcacaacaattgttttatgacctaatgaacagaataaatttgccagaaacactagttaaaaactaaaattagttaacaaatcttgaattatattgtagtattagaataacactacatttttaattaatgttactatttatacttgagaaatgttattaactaagatgttggaataatgagcttttcacacctcaaagctcagtggagagtttggctgtagaggaaaatcaattcattataaaattatcttctaagcaactagaagctgttaataaaataaatcatcatagtattttcagaaccatgaagctgctcatgcaacagtgatgaa

SEQ ID NO: 56496 - DNA, 1050 bp, Homo sapiens
gcatgcatacatgaagaagaaagtaggtgggtttttaccaggagtaaggctattggatgagagaaaggcaaaggaatgaacacactcacaagattcagttttgataataagctgtgtaggccmtggagtccagatggtgtaagggcagaagttagaacttcagagaattaaatttactgagggtgttgagttggagaatttaaaagcaatggaatttgtttagtcagttaactgttacttatttcatttctgactagtccagctatgatagattaaacactggtcgtctaacaagaaaacataaagctacttttttacaagctcgttgagaagatttactctacgttaaaagtcaattatttcttatgtaatttaggactactgaaggtcatacagttaccatgaggaattagcataatatccaaataacttgttaaacctatacattacttgcattagtattgcctttatactcaagcaagaaaggcctggaatttttgaggacataattcataagcacaaaccgaaaaaatatacttattaaggaggataaaggaatttctttcatagttatggcactcagcacttggcagagcaacatctataaaatctacacatctactgtagtggtaacacctttccgtctctaagaaggcagtcttccatataggacaagagtcctgtgacctcataacaaactgcaactgcttctgactgtcatgaagtttgtatattgcattcctgccaatgttagagatagatattgattcagagtgtatgtaggatttgagtgatggatgtgcttagataggaggaaagacaaattaattaacttgtcaaatccttcttctcagacagcaagaatgcaatagattcttgcataattaggtattgattcccagtagttccaaacatctgtttccttgcttatcttgatgttcccatttgtgatttcagaggaactcataaattagaaatggttttcacaacaatggcaaacggaggctgatgtacatttgtaatattaaacaatttatcttactcttgaaa

SEQ ID NO: 56497 - DNA, 1050 bp, Homo sapiens
gcatgcatacatgaagaagaaagtaggtgggtttttaccaggagtaaggctattggatgagagaaaggcaaaggaatgaacacactcacaagattcagttttgataataagctgtgtaggccatggagtccagatggtgtaagggcagaagttagaacttcagagaattaaatttactgagggtgttgagttggagaatttaaaagcaatggaatttgtttagtcagttaactgttacttatttcatttctgactagtccagctatgatagattaaacactggtcgtctaacaagaaaacataaagctacttttttacaagctcgttgagaagatttactctacgttaaaagtcaattatttcttatgtaatttaggactactgaaggtcatacagttaccatgaggaattagcataatatccaaataacttgttaaacctatacattacttgcattagtattgcctttatactcaagcaagaaaggcctggaatttttgaggacataattcataagcacaaaccgaaaaaatatacttattaaggaggataaaggwatttctttcatagttatggcactcagcacttggcagagcaacatctataaaatctacacatctactgtagtggtaacacctttccgtctctaagaaggcagtcttccatataggacaagagtcctgtgacctcataacaaactgcaactgcttctgactgtcatgaagtttgtatattgcattcctgccaatgttagagatagatattgattcagagtgtatgtaggatttgagtgatggatgtgcttagataggaggaaagacaaattaattaacttgtcaaatccttcttctcagacagcaagaatgcaatagattcttgcataattaggtattgattcccagtagttccaaacatctgtttccttgcttatcttgatgttcccatttgtgatttcagaggaactcataaattagaaatggttttcacaacaatggcaaacggaggctgatgtacatttgtaatattaaacaatttatcttactcttgaaa

SEQ ID NO: 56498 - DNA, 882 bp, Homo sapiens
tatggcaaagcatttagtaggtacactacttgaaattcaattctagctctgccactaaccagttaggagaactgttgaatcttcacatacctcaccagggaaccgtggggataatagctaccacctttccatcaacacactttgtgcttctacaccagataaaayacacaaagatctggtttttctgctagccagagtgttaggaaatgtttctaatagttcttcattctgtcttttcgcttttcttcttcctaatctttctctcccctatccttttatcatctttctcattttcctatacaaatattcattgaagaagtactctgtgttagacattatgttagcttatagatactgcatttatttctagagaaaatatatatcattgagcacttatgacacaaattacttttacttacaaagactttgtaaagtaggtgataatcctatttctctctctctttcacacacacacacacacacacacacacacacacacacacacacacacacagagagagagagagagagacagaattaaaggcagagccaagctatttctactacacaatcctgagtgatttatgggagtatattataatgagagattttttctcactcagcaaggtaaaggaatttatgtagggttggcttcatatttggtatttaaaaaaatgagaaaggatatcacgaatcattctatctttatttgaatagtcattaaagatgctatttgaagtgcctgtcacaactcctaggtgcacagtgggctcggggaccatacttaaacacaatttctctgtagcttgtattgatactccatgctgttctgacagctgctgcagcacccccgtcaaatatgtggtgtttcatcattatttt

SEQ ID NO: 56499 - DNA, 882 bp, Homo sapiens
tatggcaaagcatttagtaggtacactacttgaaattcaattctagctctgccactaaccagttaggagaactgttgaatcttcacatacctcaccagggaaccgtggggataatagctaccacctttccatcaacacactttgtgcttctacaccagataaaacacacaaagatctggtttttctgctagccagagtgttaggaaatgtttctaatagttcttcattctgtcttttcgcttttcttcttcctaatctttctctcccctatccttttatcatctttctcattttcctatacaaatattcattgaagaagtactctgtgttagacattatgttagcttatagatactgcatttatttctagagaaaatatatatcattgagcacttatgacacaaattacttttacttacaaagactttgtaaagtaggtgataatcctatttctctctctctttcacacacacacacacacacacacacacacacacacacacacacacasacagagagagagagagagagacagaattaaaggcagagccaagctatttctactacacaatcctgagtgatttatgggagtatattataatgagagattttttctcactcagcaaggtaaaggaatttatgtagggttggcttcatatttggtatttaaaaaaatgagaaaggatatcacgaatcattctatctttatttgaatagtcattaaagatgctatttgaagtgcctgtcacaactcctaggtgcacagtgggctcggggaccatacttaaacacaatttctctgtagcttgtattgatactccatgctgttctgacagctgctgcagcacccccgtcaaatatgtggtgtttcatcattatttt

SEQ ID NO: 56500 - DNA, 882 bp, Homo sapiens
tatggcaaagcatttagtaggtacactacttgaaattcaattctagctctgccactaaccagttaggagaactgttgaatcttcacatacctcaccagggaaccgtggggataatagctaccacctttccatcaacacactttgtgcttctacaccagataaaacacacaaagatctggtttttctgctagccagagtgttaggaaatgtttctaatagttcttcattctgtcttttcgcttttcttcttcctaatctttctctcccctatccttttatcatctttctcattttcctatacaaatattcattgaagaagtactctgtgttagacattatgttagcttatagatactgcatttatttctagagaaaatatatatcattgagcacttatgacacaaattacttttacttacaaagactttgtaaagtaggtgataatcctatttctctctctctttcacacacacacacacacacacacacacacacacacacacacacacacasagagagagagagagagagacagaattaaaggcagagccaagctatttctactacacaatcctgagtgatttatgggagtatattataatgagagattttttctcactcagcaaggtaaaggaatttatgtagggttggcttcatatttggtatttaaaaaaatgagaaaggatatcacgaatcattctatctttatttgaatagtcattaaagatgctatttgaagtgcctgtcacaactcctaggtgcacagtgggctcggggaccatacttaaacacaatttctctgtagcttgtattgatactccatgctgttctgacagctgctgcagcacccccgtcaaatatgtggtgtttcatcattatttt

SEQ ID NO: 56501 - DNA, 813 bp, Homo sapiens
ggggatttgtgaacacacatgtttggggagaaggcaggagttgcactaccacctggaggctgggcaggcacacccctgtggtgtttgtgttcgtgtgcctgtgtcaaggtcctggccggaagcrcctctcctgggttaggtttagcgtgctggcaatgcctggcgaaatcaagctccttttttctgggtccccagctttcatcctctccatgaagtcacttttcttatcgcatcctaaatggagtgatggggtggtaggggaggggaggaggaaggatatgtccctttgtgtgttcctggagggtcacaagtcttaaaggtctcctctgctgagggggcactgcttcctgacaccttgctggctttgctatcaggtttcatagcaggaagaaatagcttctcctgccctcccacaaacattccaaggtgtggagatgctcttagcatacagctatgcaacaaaaaataagaagagaatggcttccagcccctttctatttagaggaagtagaagtgtgaacctaccaaccttccctatacttgtaaaaattgccttaaaaaatacaaatggcttagcggtcctgtttagtaacttgctgagtggcacgcttaaagagccacttggattccaccattttattttcatgtatgtgtgtgtgtatcatcatcattatcaaaattagataatatatgtgaaagtgctttgtaaacagcagaagaagtaggtatatgagattattgttgtttttgccctgttactaaaaacatctcttaaagctctgctttttgtgaggcatcgtggcagattccttt

SEQ ID NO: 56502 - DNA, 663 bp, Homo sapiens
ctaatttttaaatttttttgtagagacaaggtctccctgtgttgcctagactggtctcgaactcctgggttcatcttcccacattggactcccgaagtgctaggactacaggcgtgagccactgtgcctggcctccctaagatttttacttaaatcattacctcacttcatttggaagacttccctgaccactttattttaaatagttttacccttccctcattgttctgtccctttaccctttttttcttgatagtccttaacactgccagatattacatatgtctatgtgtatatatgtgttcatcttctgtctcttcctctagaatgcaaatgtcatgagaggaggaactttggttaatttgtgtgcccatcatatagaatagtatcctgcatgtagtaagtgcttaataaatgtgttgaataaatgaatgaaacctattaggtatagataatattactcacaatttcagatatggaaatgagtctaccayagctggcaggttttctgattcctagtccattcttttctaccttagccacttgtttctgaaaccatatctgattatttatttatcctcatctgattatttcttatctgaatttctgtggtgcttcgtgttattcccagagcatttactacattttgtcctctgctgtggc

SEQ ID NO: 56503 - DNA, 611 bp, Homo sapiens
ctgagtggaaattgcttagtgggaagggcatctgaagtggagggaacagcacgaaaaggccaagaggccagactgaatgatgggccataggtagtgggacaatgaggacacctggctggagtgtggagaaagaggagggagggactggtcagctggaggaggttcccaaggtgactgtatctgaaagtcagttatgggccagaygctgtgctaagtgcttttttgaacatcactttttatcttcccaacaatcctgtggcagccccattttgcagatgagagcattgaggctcagaatggataaaggacttgctcaagaccacatagcaccagccaaagccttgcacaataggtgctcaatatatatgtctgaaggggctggctgactgcatgaatgaatgagtgaatgaatcaatcaatgaatgagtaatagaattcaagcccaagcacccctggcttttagcttgagctctgtcctgtcctataccttgttgcctgaattctctccacctcaaaaacaactataattctaatggtaagaagagtgaataacatagcttccccctgagcctgaagtgcttggggctttgagcaaagccctcacattcctc

SEQ ID NO: 56504 - DNA, 748 bp, Homo sapiens
ctcctctttatctttctccctccctctatccaggtatayttttatccgcaaagcctctcatcctccctgtgatattgctcagatataattgattttctcttttgttttagtttttgagacaggatcttgctatgttgcccaggctgtcctggaacttttgggctcaagtggtactcctgcctcagtctcccaagtggctggtaccacagaagcgtgccaccacatccggttctaattatgttcatgtatctggctcatctcaggttccaaataaaataaatttacagaattccactatactctatgtagatatgtcacatacattcaaacagtatagacagtatagcctggggaaagagatgaccagtgaatggaaaaaaatattgactttagttgttccccactcctgcaactggaaaatatctctcctgaatatctaccacgtttttattccctacaggtggctcttacaagtgctgtggactatacataagtatatctgcctaatcccaaagagaataaggtcctagacaggaaccatgtcattcatatatatatatatatatatatatatataattttttttctttttttagagagacagggtcttactctgtcacgcaggctggagtgcagtggcacaatcattgtctctcactgtaacctcaaactcctgggctcaagcaatcctcctgcctcagcctcctgagtagctaggactacaggcatcaccactacacctggctaa

SEQ ID NO: 56505 - DNA, 1578 bp, Homo sapiens
gttttgatgaataaacaattgggtctaaactcataattgaagtggagaagtcaccaatggcttaccacttgtattcccttcaaacttctgttctcagaaactaggaacatgaagcaactatagtaagcttagcatgcgccatacttggacgtgacaaaaagtagaataaaacatgttttttagttggagaagcagtcagacatggcagaaagcacagactttggagttaagctttccagggttaaaatcctgatttttccgtttactagttttttggccctggatccctactttctgacttaatttcttcatctccaaaaaggcattattaatgcatgtcttcttagattgatgaagtctttgagtagtaaattcaaggtagacttttcagaatatctcttggaggtcagaggatgcaaaatagggacaccgaaatggctggaattagaatctgagcctgacactatggcctatctttttaattgcatggaaatcttgaatatcagatactttcccaaatatatttccatgttgatgctatttgtgttacttttttttaaattaaaatttctttcatttaaaaggaaatctagcatgctaagagagaagaataatgttcctaggatttgaaaatacgtgattttcagaaatcagagccagaagagactgcagattggtgtagtcttgcacatttgcaggtcaggaagctgagaaccagagacatctgaggggcagtcaaatttagatggtaggttccagtttctgtacactgggcacatctagatcttctcctacaccctggggtgcagggccagcaagatggctctacaactgggaggaartaatatataaataaacacatacatatgtgtgtctggtatcttaaaagattaataactgttctttgtcaagataaaaatgtgaggaaaatgtcattataacctggcaggtgctctcatagcactagtgaatgaagagagattatttcttaattggggaaggggggcagtgaaactttcttattgggtgataaaacccaatctgaaaggttgaacaagagtttgtaaaattgttaagaagatgatggagaaaatggtgagaggcagaagtattgttcagaaaagagaaaattttagctactagaattagcatctccagagtcataaaggccagaaaggagcctggcatgttaggacatcatgaacttggagaaccaggaatataaagtggacagtcacagtgacaagggtgggttggctgcaaaggcgagtctgtgaaagtagattgaggtgaggcagagaagggctttatgagccatggttgggggttccacttgattctgttttaaagtcagagagtggcatgactagacatatttagaaacactctgcaatggtgcggaagatggatgggtggaggatgaactgctagaggctgtggaagtacctggctggggcatgattaagtcctaaagtaagacaggagcccttggaatgggtttcagtaatgctgcagaataacctgacatagaggcacacacttgtagtcccagctgctctggaagctgaggcaggagga

SEQ ID NO: 56506 - DNA, 1072 bp, Homo sapiens
ctgtaagaaatagaaaaaagaaatttggtgaatggagaggctttggagaaatggccacaaaccatacagaagacaaattatatttcaagtcacaaaaccacccttacatttgacatagtaaatccagtcctgataattcctttcaaaacaactgttgccatttcctcaataataaaggatgtgtattatcaaatgttctaaatcatcattagcagtgttttatagaaagttagaagtaacctaaatccaacaacagtaaaatggtaaactaaaataaaatagaaataggaaggactctatggttactaaaaattatgtatggaacaaattagaatggacaaaggtctatcatttattgtctaatacatatgtgcagatatcataaaatatcataatttagaacatcaagttacatgtattataataatgtaaattatctagaactgtaaagtgcagagaggtacctacagatgtttaacagctgtgctatgttgtaattaagaaaattttttcttttaaaataatttccttatacaatattaaaagattgattcagtacttaaaatatttttaatcctcttaacagtgtcttataatacatgcaatgcctgctttttcctgagcaatttcaaaggacccaacaatatgttaactttcatagaaaacaaggcagaaatggtacatactctcagtaatctccatgttgccttgtgaactgtacatttaaaaaattagtagaatattgtgtttcaagagctcctgtctggggcccaaaagaattctgtaatcacagcaattaccttgtgaacctctaatttctgttgtagttttaaagttcggagttagcacacccacccacaagcaccatggcttgttcatcttgatgcaatttcagtcccattcttgggaaaataataattayaggtacaacaaggtatttaaagaccaaaaaaatactcatgaaaacaccacttccatgttacaacacagtgagagttccttaaaagaattaaaacccagactggaaagaagtttcctgagtcacatcttttcaggacagtaagaacttaca

SEQ ID NO: 56507 - DNA, 686 bp, Homo sapiens
ttattttccttgtcctatttactgttaacatactgtagaacttattttacttattattattacatattttattctttattaattatttgatgttgttcctctttctttcacaaggaaaaggtaagctgcaaaaaaaaaatacttttttattgttttattccttgatgtcctccaggacagggcttggcacataataaatgctcaaaaaatatttgatgaatgagtgaatgcttcagatatttttaataatattctgttttccgcactgtaacagaggttatagactcactagatggagttatagaaaatgcaatttcttgggaaacattccgagatattctacagtcagggtagtacctaagaatcagcatttttcatgcacatgggcaaaggccacagtttgagaagcattacaatcctggctgtgaggccttagctctgtacccataccacctaacccaaggcctggcacatatgaacttaccaatccacaaccagtctttagtattaatttttcagacatrcctggagcatgaagtatgtgttcatttggattccgtacccatgtgttggcaaaccacccaaaccctcacacagaggcaaaccttgctgctaccttcctctaccagtggacagggaggcagcctgaaaatgaaatacaattcttccaagactcttttgttcaa

SEQ ID NO: 56508 - DNA, 686 bp, Homo sapiens
ttattttccttgtcctatttactgttaacatactgtagaacttattttacttattattattacatattttattctttattaattatttgatgttgttcctctttctttcacaaggaaaaggtaagctgcaaaaaaaaaatacttttttattgttttattccttgatgtcctccaggacagggcttggcacataataaatgctcaaaaaatatttgatgaatgagtgaatgcttcagatatttttaataatattctgttttccgcactgtaacagaggttatagactcactagatggagttatagaaaatgcaatttcttgggaaacattccgagatattctacagtcagggtagtacctaagaatcagcatttttcatgcacatgggcaaaggccacagtttgagaagcattacaatcctggctgtgaggccttagctctgtacccataccacctaacccaaggcctggcacatatgaacttaccaatccacaaccagtctttagtattaatttttcagacatacctggagcatgaagtatgtgttcatttggattccrtacccatgtgttggcaaaccacccaaaccctcacacagaggcaaaccttgctgctaccttcctctaccagtggacagggaggcagcctgaaaatgaaatacaattcttccaagactcttttgttcaa

SEQ ID NO: 56509 - DNA, 718 bp, Homo sapiens
tgcattatttattctacccctctcacctctaagctaccattttttgaatactgctgctgatgcctaacatttacatccctggtggcaatataacagaattggaacctctgccactagaattgcaactagggtgaggtatatgagactcttaggacacaaaatttaagaagttattcccttttagagtcatagaagttcacagtgccatctgtgcggaattggagcccctgctgtatctttccttagggacctcctgtggatacttctataatactagattgacaatatacattgtgtcctcatattaatttgagctcttaaagatgaggatctctacctaactcaagtcagtgttcttagtgcttatcatagtgcctggcacattgtggaccctcattaagtgtctgttcaatgtaagtatgtatggtctcaaaagataagataaactttttgttgttgttatttgtgtgtttatrtaggttttattacaccaatgttcccaaaccaacaccagcactctttatatgttcttagtaaagagcaggcatactgtttatgataaaataaacagcataaatttgaagttaaaatatgaataaaatattataggggaaaagtttaataaaaaagaagacagtgggaaatactgatagtaaaacctatatttaaagaataaatcttttatttactaactcttggacctgaggaaagttactta

SEQ ID NO: 56510 - DNA, 1088 bp, Homo sapiens
ttcagaaatcatttctgccattgttgcagttctcttgatggtgatcataagtcaggaaattcagaagttgacatcagatagaagggccattggacactgagatacaagagaattaaaacctcagaatgaaagcacagctgggttaggcagagtgatgcttccaggtggacatttgtattagaaattcgtcaggtctggatccgtgatgaaggggtgactgagctgacttgggtccacagagaaactctagtcccatccagatggcgctcccgtttacctggtgacaatcttcattttttttctgcttcttagtcacatccatataagtgtacccttcttggacttcaacagagaatcagttttacagttttccagaatattatctggagacaaagaagatgcagatgctgagcttcttgatattgccatttgtaaaagagaatgcagagaaactaaagaggcaaggctagagggcaaacttgcccttgtttacaatgaagaaatacgcaccatgggtatttctaaaccttactgctcccttcatcacttaatccattataaaacattttagttttattaagttctatacggtttatatgtttataaacaatataaaattttgtctgttttaataaaaatatatattgtattaaaatcctatattttatatgcttttataaaacaacatagtttttaacataaaatacgaacttaataattttagaaaatacaaaatagacagtaataatttatccatcaacataccacaaagaagtaacaattaatgctacattgttttatatttttccaggtttataccataaacatacccatataatttttgacacaactggaatcctgctatatgcaaataatgctttaaaaattgtattatttatatgtctctataaaacaaaggtataaggatttttaatacactattttttattaaaaartaggggaaagacctttgttagaggtggattaatatctaagcaattattcatcttatctctcaaaactattattataaagaacttttaaatattaaatatgatgtatatttctaagatacatcataagaaatg

SEQ ID NO: 56511 - DNA, 684 bp, Homo sapiens
tccagaaaatgctttccaggagttcatcraatcccaaagcataaacttttatactacaggaataaacaaacttatttctcgttggcaaacatgtgttgattgcagtggttcctattttgattaacaaagatatgtttgagcctagttataatgatttaaaattcatagtccaaaactgcaattacttctgtgccaacataataatagccaaagccagatttaagcctctttcctgaaacccagccaagaactagcctcatcactttgtattttctagctagtgtctcgaggcttcacattcagatgatccagtgtgtgaagtggcagggtgccattttaagcgagaatcttcttattctgccagtgccataaaattgcctatgagaaactggtaggtttttgcgagggtcaagaatctccccaggtcacttcactacccaagcaccagactttgagtttctttttgtgtttgatttcagggaatggatacccaacctcatcaactatgcattaaaggaataaagacaatgatgcaagtttagatgccacctccacaagtaaggacgcatcattcctgagtcctatgatatctacaacaagtaaattttttgttgttgttaagagtggtcgtctcttaaaagtgactggtgcttagggaattagaattcacctgtgatagaggat

SEQ ID NO: 56512 - DNA, 943 bp, Homo sapiens
ttttgacaaacacatacaagctaacaacactcagagaagatctacagcatttccagcactctggaaaatggtgtgtgtgtgtgtttgtgtgtgtgtgtgtgtgtgtgtgtgccacttttcactcaattcttaaaatcattagccttctgggaaatggaaacaagcaaatttgccttgggatggctgtaatactgtcaggttaactttcataatgttctcttttctcacactttatttctctcaagatcttcctacagagtcaaccttgtgacctccacttggcacatctaatagtcagaattctatgatatccctccaggtttcctgatcctggtgtaacatgccctgtgtaatccccacgactgtgaayatgatggattttactcctgttattttatatggcacagctgatcttaatatatgcaggtgatttgggtgggtccagcctaatcacataagccctttagaagccaagatctttctctggctggtcacagaaataaaaaattaaaaaaaaaaatgaagcatgagaggagtttaacatgagtggcatttttcttttctgagatggaaagggccacatggcaaagacctgagagcagcctcaaaaaatggaaaaagaccctgcagctgacaaccagcaaggacacagagattttattccaattggaagaaactgaattatgccaacaatgtgaatgagcttagaagctgatttttcccaagagcctttagatgagaacttggcctgacagacaccttgatttcatctttgtaataccttaatcagaatactcagccatgcaatgggaaacttctgtcctacagaattatgtgttaatgtgtaggtgttgtgttagaccactaaatctgtgataatttcttatgcagtgataggaaactaacacaatactatagtcagtgcatgggtatgttttagatg

SEQ ID NO: 56513 - DNA, 678 bp, Homo sapiens
gggatcctaaggcatttataagaaatcacacttgcttttgtggggagagatgtgtgtgtgtggacacacactcatacatgtgtgcatatatttatagaaaggtgatgatttctgccgggggtggtggctcacgcctgtaatcgcagcactttgggaggccgaggcgggtggatcacgaggtcaggagatcgagaccatcctggctaacmcggtgaaatcccgtctctactaaaaatacaaaaaattagctgggcgtggtggcaggcgcctgtagtcccagctactcgggaggctgaagcaggagaatggcatgaacccaggaggcagagcttgcagtgagccaagatcatgccactgcactccagcctgggcaacagagcaagactccgtctcaaaataaataaataaataaataaataaataaataaataaatgtgatgatttcaggagggattgtaattcgtttttagtttgtgcaatttttaatttttctaccatgaacatagattatttttagttaggaaaaataagggcatgttttaagtgtgttagagaaaaatttaggaattacttgtccagcttaacatttacatatggggaaaccaaggctcagagagctcaaatatctcggctcaagttgtccagtgactctatgacagggccaggactactgccgtc

SEQ ID NO: 56514 - DNA, 678 bp, Homo sapiens
gggatcctaaggcatttataagaaatcacacttgcttttgtggggagagatgtgtgtgtgtggacacacactcatacatgtgtgcatatatttatagaaaggtgatgatttctgccgggggtggtggctcacgcctgtaatcgcagcactttgggaggccgaggcgggtggatcacgaggtcaggagatcgagaccatcctggctaacccggtgaaatcccgtctctactaaaaatacaaaaaattagctgggcgtggtggcaggcgcctgtagtcccagctactcgggaggctgaagcaggagaatggcatgaacccaggaggcagagcttgcagtgagccaagatcatgccactgcactccagcctgggcaacagagcaagactccgtctcaaaataaataaataaataaataaataaataaataaataaatgtgatgatttcaggagggattgtaattygtttttagtttgtgcaatttttaatttttctaccatgaacatagattatttttagttaggaaaaataagggcatgttttaagtgtgttagagaaaaatttaggaattacttgtccagcttaacatttacatatggggaaaccaaggctcagagagctcaaatatctcggctcaagttgtccagtgactctatgacagggccaggactactgccgtc

SEQ ID NO: 56515 - DNA, 1250 bp, Homo sapiens
caaccccaggttttagtaaaaacttggaaggttacattgaattaattatatgagcctgacaatttgtcactgtttgaagctaaaaccaacataccgctctccctcatttctacagaccaaagctgggatctgcttagtacagactcctaaacatgtttttgagaaaaaaaacatgaactgcctcactatgttatcagtcctttaaactttgaggaggaactaaaaaggtgcaagttctattttcaaacacttatgtgcttgactacaaagacattatgatacaaagtatataatgtttcagagagaaaactttaacagtttagttataacatacaacctacccctgagaatctgcttttcaaattatagacataatatgtgcatatacatatctacctataacaaaggttgctcctcattagttgaggatactatatttacaaattcatctactcactaacatttatttgtatccccaaaatcattactcatagcacttccactgtcattgcagacatgtgcacaatggtgaaaaatgtgagtctactgacgtgcacattctagtttcagcttacatagtgtaaacaagtgtccttttcatggtctatttagtgccatgtttttctcatttttgtgcttgctattggtgatttcactgttgaaaacagtccctaagcrtagtgctaaagtgctgtctagtgttcaaggagcaaagactacagagaaaatacaagtgtgagataatcttcattgaggcatgatttacagagctgttggccatgatttcaatgttaataaatcaaccaaatatattaaataaggtgtatttaaactgcaacagacataaaacaaggttgtatcttgatcagttgacaaaaatgttgtgaacagcagctttcaggaatctaacaccatagtaggagcagtggttcagtgtttgctaatccagttttcacggtgactttttgcaacataactaattatataaaaataacaacagagagacggacggatttattaaaaagacactgcagaggtcattatgagtaaactaccaatgtttgcaggagcatggcaaaaacacttcagggcacagtatctactgagtcttcctggctctgtttaaacaactttgggccaaaacaaaaaatgcaaaatctaccaagtctgtgctttggtctatcttagcttctaccgctttgcctactcagtggtatccctctccccaaatcaagtactctaaacttgaa

SEQ ID NO: 56516 - DNA, 812 bp, Homo sapiens
ggatcctatgggcaggtggacccagagaatagtacttcttgggtttacaacataccagggtgaggacaggagaggtgccaagagggaaggggagctgatggcgccagaagatttggaagcccaggatctaaaagcagaygtccttttgttgttctgtgccacccactattgattcagagaaagaaacatgggtctcctgcctgacactgtaccacatgaggacgttcttccaatggctggaagaaaggaaggggcaaaaggttacctggagtttagttaccctcagtaattaattactaaggggtccccatgccacttttgagtccatacttgctagttctctatcagttcagccagccataatgcttctgatgctgatgtaaaaggaaaatctgttcactgatgaaaactgagtgtagagttcaaatcctggctccaacacctcttagctgcataaccttggatagcttacctggtcactccggtccttttttcctgcatttgtaaaaccaggtatgcacatataactcatatagttgctattaagaataaatatgacattcaaaagcaccagtctaataatgtgtgttccctttacctttactcaataattatcggcccctcttcctggaccacttcagacattttcttaggataccacttaggcaaacggtgacagcctgtgattgaccctctgagaggttccaggaatagcagcaaggactgctaccaccacccatgggccatattccatgtttagctgtctggtggatgccaacccccctcaaattcagaatcaaaactgaattttc

SEQ ID NO: 56517 - DNA, 812 bp, Homo sapiens
ggatcctatgggcaggtggacccagagaatagtacttcttgggtttacaacataccagggtgaggacaggagaggtgccaagagggaaggggagctgatggcgccagaagatttggaagcccaggatctaaaagcagacgtccttttgttgttctgtgccacccactattgattcagagaaagaaacatgggtctcctgcctgacactgtaccacatgaggacgttcttccaatggctggaagaaaggaaggggcaaaaggttacctggagwttagttaccctcagtaattaattactaaggggtccccatgccacttttgagtccatacttgctagttctctatcagttcagccagccataatgcttctgatgctgatgtaaaaggaaaatctgttcactgatgaaaactgagtgtagagttcaaatcctggctccaacacctcttagctgcataaccttggatagcttacctggtcactccggtccttttttcctgcatttgtaaaaccaggtatgcacatataactcatatagttgctattaagaataaatatgacattcaaaagcaccagtctaataatgtgtgttccctttacctttactcaataattatcggcccctcttcctggaccacttcagacattttcttaggataccacttaggcaaacggtgacagcctgtgattgaccctctgagaggttccaggaatagcagcaaggactgctaccaccacccatgggccatattccatgtttagctgtctggtggatgccaacccccctcaaattcagaatcaaaactgaattttc

SEQ ID NO: 56518 - DNA, 812 bp, Homo sapiens
ggatcctatgggcaggtggacccagagaatagtacttcttgggtttacaacataccagggtgaggacaggagaggtgccaagagggaaggggagctgatggcgccagaagatttggaagcccaggatctaaaagcagacgtccttttgttgttctgtgccacccactattgattcagagaaagaaacatgggtctcctgcctgacactgtaccacatgaggacgttcttccaatggctggaagaaaggaaggggcaaaaggttacctggagtttagttaccctcagtaattaattactaaggggtccccatgccacttttgagtccatacttgctagttctctatcagttcagccagccataatgcttctgatgctgatgtaaaaggaaaatctgttcactgatgaaaactgagtgtagagttcaaatcctggctccaacacctcttagctgcataaccttggatagcttacctggtcactccggtccttttttcctgcatttgtaaaaccaggtatgcacatataactcatatagttgctattaagaataaatatgacattcaaaagcaccagtctaataatgtgtgttccctttacctttactcaataattatcggccsctcttcctggaccacttcagacattttcttaggataccacttaggcaaacggtgacagcctgtgattgaccctctgagaggttccaggaatagcagcaaggactgctaccaccacccatgggccatattccatgtttagctgtctggtggatgccaacccccctcaaattcagaatcaaaactgaattttc

SEQ ID NO: 56519 - DNA, 812 bp, Homo sapiens
ggatcctatgggcaggtggacccagagaatagtacttcttgggtttacaacataccagggtgaggacaggagaggtgccaagagggaaggggagctgatggcgccagaagatttggaagcccaggatctaaaagcagacgtccttttgttgttctgtgccacccactattgattcagagaaagaaacatgggtctcctgcctgacactgtaccacatgaggacgttcttccaatggctggaagaaaggaaggggcaaaaggttacctggagtttagttaccctcagtaattaattactaaggggtccccatgccacttttgagtccatacttgctagttctctatcagttcagccagccataatgcttctgatgctgatgtaaaaggaaaatctgttcactgatgaaaactgagtgtagagttcaaatcctggctccaacacctcttagctgcataaccttggatagcttacctggtcactccggtccttttttcctgcatttgtaaaaccaggtatgcacatataactcatatagttgctattaagaataaatatgacattcaaaagcaccagtctaataatgtgtgttccctttacctttactcaataattatcggcccctcttcctggaccacttcagacattttcttaggataccacttaggcaaayggtgacagcctgtgattgaccctctgagaggttccaggaatagcagcaaggactgctaccaccacccatgggccatattccatgtttagctgtctggtggatgccaacccccctcaaattcagaatcaaaactgaattttc

SEQ ID NO: 56520 - DNA, 935 bp, Homo sapiens
cacggccacagcttaggagcagtagttatttcatttatcaattaattttctttagtgcctggcatatctatttcaaaaccattaagtaattgtagctgttaactgaatgcttactatgtgccgggtactgtgctgcattatctacatattctctgccttggtccttacccaaccctatgaggggcactgcaatcattcaaagatcagaactgatagtatagagatgggggagagacatgtccctgggctcacctttacaagaggaaaatggtttgccccaataagaaaacattcatatagtacctaaagtttccaatgtcttaatgctcatcatctcatttgagtcacacaataattctctgaactaggcatgacattaattattatctctgacttacaattaagaaaagctccaagtcatgcaggccactgtcttcttgccttcaaacatctctgcatgtttctttctagagctggtggaaaaaggaccatatctgtgcccacttgtgaagggagtaaaggagtatccttggcattactaaygtctcctttctgatccgagagagagtgtgtcatgaagacactcaggcagctccaagtggaggtccacacagtaggaactgaggcctcctgccagcaactaggtgcaggagccgtgttgaaagtggatccgttagtccattcagcctccaaatgacgacagccccaactgtcaacttgaccacagtctcacgagaggccctgagccacaccatccagatgagctgctccaagactcctgacttgttcctgacataataaatatttgttgccttaagccccttaatgatgaggtaatttgttacacagcgatagataactaatgccaatccaaaccctgagatatatgaagcctgagggtttcaacatgaagaagctgacaagaactgggatcc

SEQ ID NO: 56521 - DNA, 932 bp, Homo sapiens
tttgaaatcttgctaaaagatcacaacccctcctaccactcagctattcccctagggactaggcagcctgccacataaaaataaatgcaggaagtgaagaagagctaacaaagacatcagcaccatatggaaatcamgaaactgttgaccaaataaattaacagcctggatggggtgggtcacacccagagacttgggagtagaccctcaaaattattatccattattctctacatttgctttatttttaaataaatgataccccacatttctgttatttatttctaaggcacaattacaatgttaaaatgatagtgacatattattgtgttattctttttttgaagcctttcctctctagttttttggcctcaggaaccattcctcttccccttaaaattataaagttgttttgctttgtttaaattcaaactagtataatgtgtagtgggctacgtgactgtcacttctatataacagtgctaaactaaaggttatgactaacatgagagcactcaagtatacatatttattcagctccataaaaggtagtcaggagggttttctacacaatgtatgctctagttagcaacactgctctatcaaagtaggaaataccacacacagtaaatgtgctgcgctgagcttaatgcttggaaactcttgaaaggcatgatgcaatttaacgtattttaaatcatttgatgttcactgaactctcactgtaagcagagtattgtattcaagccctaggtatgagagaaagtagaaaaacaacagaatctgggcctgatactacagagcattagaatactcgtggttgaaaacataaggaaaactcagtgtttattttaaaaatttacagctctgttaagtacaatcagtagcaagaacagattttttgataacttcacataagaaggttggaagag

SEQ ID NO: 56522 - DNA, 961 bp, Homo sapiens
attgtacctttgtaatgtgttggtatccactaaggcaagacctcccttcattattacagttttgactagtccaggtctttaagtttttggtcacattccaggaacaaaaagttctcttgtcttaaatggcatatggtataatggaggagtaacaaaagttccttctctcaaaactttgtaaaacaaacaacaacaaaaagaacagtttatctctaatgaagcaaggaaatggtgccagcttccaaacacaaattatgaaggttttttttttttttttttttgagtactgtgaagtttggatgtaggggagggaggatcctgaagactgacatgtgtttccttggattctgagcaggacagagatttctgtaaggatgtcctatgtaataaactttttaaagaacagtgaaattggtggccctgagtgggtcttggaaaaagcaggtattgtccccaaaaaggcctagtttgacaccaaaaatgacatggtacatagaattgaaagggaacccttattgaccaaaaattggattgtccatktgtacaaaacagcctcctacagagggagattggtgcagatgaaatgggatgaaggggtgggtgggtggaagagcaaccctttccataacaaagagactgtaggttaggggctctcttgagatccctgatgacttttgaatgctgaaaatgaagagaagataggactccagagaaaagaaaataacatatttagtgataggattaaccaaacaccaaagcatagtggaagttagggactactctattcattttctgtctcgtaccccatgtcctctttatgctgctcttcagcttgaaacaacaaaaataagtgccatggaataagcaattgggaacatgctagacaaaatatacacccaacaagatgaaatgtaaaaaacaaaaatatacaaatggtgatagaaaaatgatgacaaaggag

SEQ ID NO: 56523 - DNA, 646 bp, Homo sapiens
tggaagtatcactctctccagcccacagatgaatcctgaatgttcttccttcctctcattcccatcccatattttttgggtaaaagttgtacccatctttttttgggaaaagctgtagttaaaaattttctattttcccctacttttaaaactgatctgtccctcccaaccctatccccactggaaagagaacatctccctaaaattctagatctcaagggataactttagttataacattttgcacaattttccaatttttttgtaaatacataaatttattaatttttaaaataaaaatgggcccaggctaggtggctcatacctgcaaccccagcactttgggaggctgaggcaggtggatcacttgagttcaagagttcgagcccagcgaacgasttcaaggttcgccagtcaacatggcgaaaccttgtctctactaaaaatacaaaaattagctgggcgtggtagcaggcgcctgtaaacccagctacttgggaggctgcggcaggagaatcacttgaacctgggaggtggcagctgcagtgagccaagcgaccacgccactgcactctagccttggtgacagagcgagactgtctcaaaaaaaccccaaaacaaaaaacaaaaacagaaaaaaaaaatg

SEQ ID NO: 56524 - DNA, 475 bp, Homo sapiens
tttttaagcacctagctaatttttagatttatttttgtagagacagggtctccctgtgttgcttargctggtcctgaacttctgggctccagtgatcctcttgccttagcttcccaaagtggtgagattacaggcatgagccactgcacccagcctcttactcttagagggtaaaaaataagatccctacctaacaaatattacttcttggagatattattgtactgaagagtcacacagaaggatttccaacaaacctagtaagtcaattataccctagaagaaagaagatggagatagggtctcattcaacaaaggagatgaaaaactttactttggaaaaagacatttatatgggataaacaaattaggaaaaggagactccttggtaacaagtcttccgaagctttctaaaacaaaaggattaacttggaatttccaaactcccattttaaaagtaaaatattttattttt

SEQ ID NO: 56525 - DNA, 962 bp, Homo sapiens
tatatgacaacactgtacaaaatgttttatgttgggcagaatgttgatcaatattgaaagtaggtaccccatatattcattatactattctttttactaagaatgtttgaacctttcttaattaaaaaaaaaaaaggtaattgagttacttgcagatggttttcttgggagcaaaagagtaatcaggaaaagatttttttaacccaaagtgctttatatctattaccctacttaattttcataatttatgacataggcaatcttacagacaagaaaagtaaggcacggagttgaacttgactaagattatgccctagtaagcagtaaagccaagattggacccaggcattctggctccaggacctgtgcctttaactaccacaatgacttactagtgattggcccgtgatttaattgtcttgccagcttcctaaattaagaaggatgttttatgaaaaaggggaggagtttcaaatttagaaaattctgatttctaggatgttattttgcgttcagtaggagtatgggtcttcattatgaactcaagacattggcaggacttttatcactttaaaatcggtaaagttgatgtcttaactatttctctccctgcttcctaatatttgttttccctaggtacttccaatgaggtagcccagtttctctccaaggaaaatcaagtcattgtycgcatgcgggggctccctttcacggccacagctgaagaagtggtggccttctttggacagcattgccctattactgggggaaaggaaggcatcctctttgtcacctacccagatggtaggccaacaggggacgcttttgtcctctttgcctgtgaggaatatgcacagaatgcgttgaggaagcataaagacttgttgggtaaaagatacattgaactcttcaggagcacagcagctgaagttcagcaggttggttttaaaaacaagtatgtt

SEQ ID NO: 56526 - DNA, 603 bp, Homo sapiens
ctcattttacagaggagcaaactaaccctgattgattatacaatttgatattgttcactaaaggtaataatgctgatgctgctagagtgtaaatttaagtccagataatttgacttgaaaatccattctatttttgttttacaactctgcctaccattactgttaattaataagtaaaattccattcaaagttacatttgtttatctggcaaaatcttaagcttttaaagtaggttgagtggccatgtatgagactcttctagagccttaggtttttgtttttgtttttgtttttgagacagrgtctcactctgttgcccaggctggagtgcagtgggacaatcttggcacactgcagcctcggcttcgcaggctcaggtggttctcccacctcagcctcccaagtagcttagactatgggcacacactacaaagcctggctaattatcttattttttgtagagggtaggtttcaccatgttgcccaggctggtttcaaactcctgagctcaagtgatccatctaccgcagcttttcaaagttctaggattacagacatgagccaccactcccagcctagagtcttagattttaaccagaatt

SEQ ID NO: 56527 - DNA, 603 bp, Homo sapiens
ctcattttacagaggagcaaactaaccctgattgattatacaatttgatattgttcactaaaggtaataatgctgatgctgctagagtgtaaatttaagtccagataatttgacttgaaaatccattctatttttgttttacaactctgcctaccattactgttaattaataagtaaaattccattcaaagttacatttgtttatctggcaaaatcttaagcttttaaagtaggttgagtggccatgtatgagactcttctagagccttaggtttttgtttttgtttttgtttttgagacagggtctcactctgttgcccaggctggagtgcagygggacaatcttggcacactgcagcctcggcttcgcaggctcaggtggttctcccacctcagcctcccaagtagcttagactatgggcacacactacaaagcctggctaattatcttattttttgtagagggtaggtttcaccatgttgcccaggctggtttcaaactcctgagctcaagtgatccatctaccgcagcttttcaaagttctaggattacagacatgagccaccactcccagcctagagtcttagattttaaccagaatt

SEQ ID NO: 56528 - DNA, 1496 bp, Homo sapiens
tgcagtgtttggaaaatgcagttgtgtacagcattatataagcacaaatggaatataaatacagtctatcttacatatagtgttacatataaaatattacacatatataaaatggcaaagatggtgaagaggtgagaatgtggagcaatgaagattctcattctttgccaataagagtataagttaggccagcaactttaacagttggcattacctagtaacttgaacaggctcatatcctatatcccagaaataccactcctaagtggaattctaaacaaactcatatacaggtaccaggaaccatgtaaagaatgctcacactagcattgttcactatggtaaaaaattgcaaagcacacaaatgtttgtcaatagtagagtcgatgagtgaatgatagtgcggtcatgcaacggcacagcacgctgccatcaaatgagctggctaaagccacaaacccaatgtagagccaagaagctgatcacaaaaaagaatgcatgcagatgattctgtttataagccagacaaaaccacacaacacttaacaatatactatttagtgataagtgaataggtggaaaaactaaagaaaagcaaggggaagatatcagaaaagtcttctagtagttgcctcagaaggaacagagggaatgttactggggaaggaggacatagtgagctttaaggtacaggcactaacctgtttcttaacctggatggaaackttatgttctaccttctcctctccctcctcctccttctcctcctcctcctccttattctttaaattgtatggggggtcctctatactctgacatattttctaattttacaaaatatagcaattcatcatgacatacaatgccttagttcaggctgctattacaaaaatactctagacccagtggcttaaacaacagaaatttattctttagagtttttgaggctgagaagtccaaggtcgaggtgctgactgattcaattcctggtgagttgccctcttcctggcttgcagagggacaccttctttccttactctcacgtggcagaaagaggactcttgtcccttcagctccttataaggccaccagccccatcatggtggccctacattcataacctcatctaaccctcatcacctcccaaaggccccacctccaaatactctcgcattaggaattaagctttcaccatatgaatttgggagggacataaacattcaatccatagcatgcagtgtgtgaccaagtgtttccatgtaaactacaactttacaggactgtgtctttataccctagaatcacatacaaccaaagaaaggctcacaatatgagagaagttgagaagagaaaccggagaacaaccaggaaaacagcagttgatgtctcccgtctcagactcactctggacatatatgctccttctgtggaatggctgctggaataagctgcattgcattatgtacactgtcttccccatgggcttttagcaaaat

SEQ ID NO: 56529 - DNA, 998 bp, Homo sapiens
atttttgggcctgatgagaaagaaatcccatcaggaacatccaccagtcatcatcctccacatacaaaccttggggggaattcacctctctgggccccagtttccctatttataaaatgaggtcatcaccaagggaccttctagcaagtcatgatacctttgacttcagtgctcccagccaacgccaggccccagcccctttccatgatagtatcactgctattttatttctttttctctttgtttcttcaccttggacatgccaagtgtttatggcatttctgagaatccaataaactgcattattgggaggagatggggagtaacaaacataggcaaaaatctgctattttcacatgaatgctttaggcaatcagccatgatgggaaatgaaatgtgtggaaaaatacagggtgaataaagagggctttagtgagatgatgaggcgtttatgttcrtgcctgcacatgactgctgtcgatccgtcagcccagcggctgcagcgcagcctgcgacggcttctgccgtggaggtctggctcccaatcctcctctgcaggttgggtttcgatgtggaacaacccatagttatttatcaaagttccagtaaggatcaagtgaggagagcaagggcgagaatccctgcaggaagggacccagatcaggcatcaggagttgcttctgtcaattacaagctcttgagagaccttccttggggaaacgagggagtctgtcctgctgactaatgtggtggaagggactaatgtggtggaagggacattcaaggtgccctttggaggcagcacccaggcctgaatgacctcaggttgagggttcttgattctgtatcaaggtggcttagcgtaagttctgcaaatgtgagaattaagaggcgtgttcaagttatagctggaatcctgacctgttgtgtgatgttagacagcacgaccaatctccctgctcctccgttgggtgtcaccgattcagacactaacgctc

SEQ ID NO: 56530 - DNA, 1113 bp, Homo sapiens
tgggagtaggggaaggagaagaattataaaaggccttgaggaaacttctggggtgatggacatatttatgatcttggttatggtgatggttttaccagtgtatatgtacgtgaagacatcaaattgttcacttygaacatgtgtagttgggcataaaaaaaaaaagatctagatctgaatttgactgaaaatcaaaaccaaaaccacatcacctctctgcatcttagttttctgcatctgtgcaaatggagtcataacctgaaatatcttcccagtactcttgtgaggcttaaactaagtaagcaaatggaagtgcctggcccagagtaggtctcagtaagtggatattcatttaattcccattttcataagaatcctcaaaagagaagtggtgggctctaggagaacaccccaggtgggggccctggagcatgtgtgtgtgcctgtgaacgtgtgtgtgtgtgtacatgtgtgcacacacatgtgtccaggtgaggctgactctgactagccaaggtttagcatgaaagtccctgaagactttgggaagtgggattagcattactaacatccgtgtttacttcctacattccccaccaaaaggccttaagaaaaaacaccagctcccatgtgggattgcagtgattaatgtttatctcattctgcatcagggctccaggctggaagcttgggctcctttctgccagcctttatcatattgttacctggttaaccagctcagatcttgcagccaaaaccaaagggaggcagcccaagtgggcgtctttctttacttccctgcctcttcctccctctttgaaagctctgtggcttgctgctccattgtcggatgagctacaaaggctctccaggtgcacggcgagcaggagtgtgacacgcgggcacgcatacacgcgctcgcacacacgctctgcttccagccggggccagggtgatgaattgcggcatttgaaagtctccttatcgcggtgatgcacatgggctgggatgtgtgtgcctgtgcgggtgtcggaagaaagcaatggggagcctggaatgagaaaatagagctcctggctccccttgtccctgcctctttgtctagatgcaatt

SEQ ID NO: 56531 - DNA, 914 bp, Homo sapiens
gatgtatcatttctccaaagactagggcagggagttgacggattttcccctcctccccaccgcttaccacctactcttctgtctattttttggggagtggtgaatgaagagcattagttcttctggaactttccactcatgtttcacatactgccatactgtcttcccagctcaccccagtgacaactgtgctgagaaggtccattgcatttacttcttgtcaaaagtgttactaccagagtgagtgattctatgggaagcttgaggatactttccagataagggatcttaggtatgaaccatcactggctgagataattaatacacattcagtgctttaccgcttactccatttctactcccatttggttcttacagcttttctgtaacacatgtaggtgtatttgccccattttacagrtaagagaaccgtggctcagtttgagaaatttaaaaaaacgtgccgaaggtcaaacagtagtgaaaccagaaccttgatctcaggtctcctgactgctctactgttttctcagtgcctagggcagcatattttctgagtcagaactccaggtatatgatttgagaagactgagtattatgatatttgcatcagaatcattctgggaagttaaagggtccagtctttatcattgcaccatattgctggcgtggatccaccaaatgtgagccttagagcctcgagaataagaggtgagggcaggacaggctctgagttgacctgcagagtggttgcggaggatgcaagttcttgagacttctgccttctaagacccatgaaccatccaagcaaatgctcgggctgttttctctctgtggtcaccagatggtctccaatgtggacaaagcctgtaggccttaaaataacaacagttttagatttggttgccaattca

SEQ ID NO: 56532 - DNA, 1343 bp, Homo sapiens
ttgtctggaatgtagttgggcaacgctgatgtggactttccactaatatggtctcacctcctcccaggctacttagaatctgaggaaaactcaaagataaaaccatttaaggcacgtagagcagaaggaattttacttgcagagaaagtttttaaaggattggccaccaaataaaaatcgctacaaatatttacagggaaaaaacaaagcacaagattttcaaggttatcaagttgacagtctgcccttggtggacaaacaacagttttctcatatgagtatcgtgtttyccaagtttatgacaagtcttcagctttcagctttgaaaattcagggcacagctgttcttgttagggagtcagtaatttacaagaaagctcaaggtttcctttatttttgaaactagagctagacagggaggctctggggcttttgttgttatgtttgcttgtagagttggtgctggttattcatgatagttctgttttacaaagttgccatgaacactgaattagccaatacttacccgttgttcccaggggaaatacagggttaggttcctgacaaccactgttcataacattttcatcaatcagtcaatacaggaccttgttttatgtgtttctgtttgaagatactatatttaatttgcatcattgattcattaacattgaatcacggccaacactattattcatagctgtttaaagcctgtctaacacacatattttctttataagacacatcacagccttcttgtgcttgggaactctagacagctattgagcactacacttgggggccattttaaatagtgagatcaccaacaaagagcaagaaaatacaaaagacgtggcactcaatggaccattgaagaggacacttgtttgcagtatgggaggtgaagcaagaaggcagagtgtttgttaccttgttggaactccactgggaacatgcatataagcaactccaagtttttgccactctgtggatgtccaagtagtgcgttgagcattggttttaggattatgaatcaattctagggtgtgcagagttggtgaataatgaagaccaactgtatgcatgcatgcacgtatgctgtacatatgtattttggcttatctaagggtacaaagagctttctatatccctttattgtgagttgaaaaaagtaaaaattagttcagactagatgagatgtgcatactgttctttagtggctgaaggtcaaggtgtgaattttgtttccaagtcaaatctccttaggcccttcacatgaaaaaacagctatacctctagggcagtggttctcaaagtggggtccaggagctcttagtgtccaa

SEQ ID NO: 56533 - DNA, 1837 bp, Homo sapiens
actgagctagaccacttggcttcctggctttgggcccctttccaggggagtgaatggttctgtcttgctggcattctaggtgccactggagtatgaaaaaaaaactcctgcagctagctcagtgtctacccaaatggccgcccagttttgtagttgaaacccagggtcctggtggtatagacaccccagggaatctcctggtctgtgggttgtgaagaccatgggaaaagcatagtatctgggctagatagcaccgtccctcatggcacagtcccttgtggcttcccttggctaggggagggagttcctcaaccccttgagcttcctgggtgaggtgacgccccaccctgattctgctcacccactgtgggctgcacccactgtctaaccagtcccaatgagatgaaccaggtacctccattgtaaatgcagaaatgccctgccttctgtgttggtctcactgggagctgcagattggagctgttcctattcaaccctcttgcccaggaatattgagatgttctatgtcttgactgggctgttagtcacatggctgtatctatttggcaaagctcgttgaattgtacctgttaagaactattcatcttatatgtaaactttacctccaaaatgtataaagcacaaaagaatagatgaaacagaagagacatgattcccaagtagaggtgtctgtccccaaagcctgacttctgcctactgtttggatagaaagctcctctgtgtacagctagtcacaggtggtggccaggtgcgccgccaacattagggggatgttcacaggtaggggagccatcgaggaggaagccagttgagctggttcacctgagcccctgacctgggccatgctgaactagccccacaagtgaggatgaattagatggaaccaccgcctggagcagtttccagcccggggatgctgtcagtataacagaggtggaccacagggaacagcttcagttgatatgggactccagtccttgaataaggtatggggtggggtgcataaccaataaaggaaaaaggggatcctagtttcggaggaataggggtcccagggacataagaaatacacagtcccagccggagggaataaggatggaattcaactactgcacgtggagtagaaggtaggaatgtggttttcaatggaagccagaagaataggaatgacactttggcccaaagcgagagctggattatcagaaagtctgacttcagctgagtctccagagcacagagccagtgtggtatagcgtggctctgttgcctgctagtgtgtgaccttgggctggttacccaacatctctgctcctcagtatcctccagtggaaataatgacagtacatacctcagcacagtgttctgaggattaatttattttatatgtcaagccgttagaccagtgccagcatcacagttgttgttatgttatcacaagtgttgttaagttaggacccttaaactgacactaactgaagacatagttggttgctagccctggtcaagggtccatttgtgggttaagtagctccaaatgtgagttgtgggggttgcagatgcaacaggacttggtgagaattaatgaaaaaaaagaacaaatttggctatcccatttcatgggataatatatcaaggcctcaggaggttaacactggtctgagatggcacagctagttagtggaagacccggggctacctgtcagttcttctgctycccgtcagagcttctcccatcagctcagaaactgccatcctccctagccctttggactcattaactgaccctgtacagagttaaccttgatcaggaatgagg

SEQ ID NO: 56534 - DNA, 879 bp, Homo sapiens
tgggcattctttaaatgctgtgggatagcttccttctttgagcaagatgggcatggtggatctttaatcactcatttacccctggaaacgtcttgaatgctgtctgtcgctcaggtaccatgggaggtgctggagccccagaagggaagagtcagggtcctgccctcagatggtcatagtctggcaggagacacacactcaggaaatagctcagcagtgagaggtgcttcgaggggatgctgtcttggtctgtttgtgttgctatgaaggaatacttgaggctgggtaattgataaaggaaacaggtttatttggttcatgatcttgcagggtattcaagatgcatggctccagcatctgcttctggtgggggcttcagactgcttccactcaaggtgggaggtgaaggggtgctggtgtgtgcagagatcacatggagagagaggaagcaagagagaacaagaaggggagtgcaaggatttttttttttttttttttttgagatggagttttgctcttgttgcccaggctggagtgcaatggcgctatctcggctcaccgcaacctscgcctcccaggttcaagcagttctcctgcctcagcctcgcgagtagctgggattacaggcatgcaccaccatgcccagctaattttttgtatttttagtagagacgggctttctccatgttgaggctggtctcgaactcctgacctcatgtgatccgcccgcctcagcctcccaaagtgctaggatcacaggcgtgagccaccgtgcctggctgcaaggatctttttaacaatcagcccttttaacaaccaataatagagcagaactcgcttccctggccccctcctgcctcagggagggcattaatctat

SEQ ID NO: 56535 - DNA, 678 bp, Homo sapiens
tggcaaataaacaatgggctcctcatggcccagtgctttcttccttcccccttccttcatctctcctattagacacttaattatctatatctttctccctttcttggagcttgagttatatcaaaaactaccaagggaagaagctagaactgaccacagggcatggagagactgaggctgtgtatccatcaagatgggctgggttatgctgtggtaaacaaagaactcaacgtctcaatagcctaagactgtaaaggttaattgctaaatcttgatacaggtgtgaagtgtggagataaggatgagaggctctgtttcatgcgatcatcgctcattccttacccaggccagaagaaactacaatctcaacagagatctctgggctcacatagtatgggaggaatggagaaacaagaggtattcactccagcaactaaattctctatctgaaaaaaacataagctctttacccataacccacaggccatagctagcrtggcaggaaagggggcaggaaagtaattgtaatcctcccttaatcgtggaagaagaggagaacaagatcaaaatagaagtaagtgttagaattacctattacaaaccatgtctggaagccagcaagaacagatcaatgaagacatcaagggtggtagatggtcccattaatggcccctcaat

SEQ ID NO: 56536 - DNA, 934 bp, Homo sapiens
ctgcaggtaataattctgtatgtgaacaagtgacctagaggtaaaggaatccaaatacagagacgtgtggataatgtgggagaggtcagtttttcacaagacataggaaagaggctgggcgcggtggctcctkcctgtaatcccagcacgaggccgaggtgggtgtgtcggtcacttgaggtcaagagttcaagaacagcctgaccaacatggtgaaaccccgtctctactaagaatacaaaattagctgggtgtggtagtgtaatcccagctacttgggaggctgaggcaggagaatcgcttgaacccgggaggtgaagattgcagtgagccaagatcacaccattgcactccagcctgggcaacaagagtgaaactccatctcaagaaaaacaaacaacaacaacaacaaaaaagaaggaaagagctaacatctgacctcctttattattagaatactccaaaaggaattttgatccacatgctctttcttcataatagaatgaatgttgcatgtcattttacagacaaattttattagttcttgctgatgatataaactttgcttctaaccttttcccattttcccaactgtgtctctcaggtgatgactgaaaaagggaaactgtgccactatttgtaccatcattttcaccaaaatctaaaaatgctttttatgacgtatggagacattcttcatgtttgtttcagtggacactccttgcagatgtaaaaaactgagaaaactcacttttggaaagtgacctaaagagtgtcattgaagtgaattttaagtaggcacgatgattgttttcatggttgctgttggatcatatctcaggagctggaatgacagacattattgaacaaagaaatcaggatagtggaacttaaagggcttcatctcagtgctttcataagtatgaagtgcata

SEQ ID NO: 56537 - DNA, 934 bp, Homo sapiens
ctgcaggtaataattctgtatgtgaacaagtgacctagaggtaaaggaatccaaatacagagacgtgtggataatgtgggagaggtcagtttttcacaagacataggaaagaggctgggcgcggtggctcctgcctgtaatcccagcacgaggccgaggtgggtgtgtcggtcacttgaggtcaagagttcaagaacagcctgaccaacatggtgaaaccccgtctctactaagaatacaaaattagctgggtgtggtagtgtaatcccagctacttgggaggctgaggcaggagaatcgcttgaacccgggaggtgaagattgcagtgagccaagatcacaccattgcactccagcctgggcaacaagagtgaaactccatctcaagaaaaacaaacaacaacaacaacaaaaaagaaggaaagagctaacatctgacctcctttattattagaatactccaaaaggaattttgatccacatgctctttcttcataatagaatgaatgttgcatgtcattttacagacaaattttattagttyttgctgatgatataaactttgcttctaaccttttcccattttcccaactgtgtctctcaggtgatgactgaaaaagggaaactgtgccactatttgtaccatcattttcaccaaaatctaaaaatgctttttatgacgtatggagacattcttcatgtttgtttcagtggacactccttgcagatgtaaaaaactgagaaaactcacttttggaaagtgacctaaagagtgtcattgaagtgaattttaagtaggcacgatgattgttttcatggttgctgttggatcatatctcaggagctggaatgacagacattattgaacaaagaaatcaggatagtggaacttaaagggcttcatctcagtgctttcataagtatgaagtgcata

SEQ ID NO: 56538 - DNA, 2015 bp, Homo sapiens
gccagagttgggtatcaaccagatacactgcaggggatcagaggacatggcctttgtgtactgcacatctgtcagattttctcaagcacacccgtgtttcctcttcacctcccacgtggaagtgatgaattggccaggaccatgttggtgagggacaatcatcatctcatgttaacctcagagaagccaggaagctcctggacacacatggtgtaggcttccttggaggctgttggatctctcctgaatgtaagcaattccttcccagtgcaccctgattttcctcatttgcagaaacaaagattgtgtgtggatcgatgatgacttccatatatacattccttggaaagctgaacaaaatgagtgaaaactctataccgtcattctcgtcgaactgaggtccagcacattactccaacaggggctatacagagagggccggcattgattccttgacatgggtggcaccaaggggaccatccaggcttaggatggggtttctttgggtgaatggtagacacaggggagtaggatctcccatgcacaggacataccttgtttgaaggacttttgtgtcctagggctggataactcatgtgctgtttggaggactaggtaaatggcagattgcatgggaagagttaactggtagcctgcctctgatggccaagtttgtccttgagtccaagctgtgggtaccgaagtcccccagaggaagacagatccttctggttgcggggagagcaaaaggctacacctttgccattagttggctcattttatccttagctgaggatgttggagttgtgtttacccggcatagcctctgtgcctatgtgcccatgttgtgtactgtgcattgtgaggatgtatatttggcatgaacaggcaggcttcctctccaaactggggctgatagacagcgaggctctgggttatcccaaaccagatacaggtcaatggcttcctctttaggggtgcagggccttgattattttgtgactggcattgcaggtgttgaaacaagggtattgagaaggatgctcaacatcagtgctctttagcgggatgatgcattctgagggctgccatccccaagatgagcatacttgtgtccataaatttctgggttcacgaacaagggaagccagagacaggcatattccagataaaccacagggggaagatagcatggtcctcrtgacctgtgcacccgtctgcctttctgaagcatgcttctttatcctctgcacttcgcaggtagtgttggtgtaaaaggcaaacccgtgtcatgagggatggtcatcatcttgtgtgatccttggagatggcaggaagccctggacatacatggtgtgggggctcctccagaggctgttgggatcctcctggatgtaagtgattccatttcaaagcaccctgagtttcctcatttgcagggatggagattgtgtgtggatcgatgatgacttccatatatacattccttggaaagctgaacaaaatgagtgaaaactctataccgtcatcctcgtcaaactgaggtccagcacactgctccatcaggggctcgagagagaggaacaacatccatttgttgacacagactgcaccaaggcttggggtggggtctttttctggcagaggagagtagctgggaattttggacgtttgtaactaagagacagcttggttgaaggcagccaggtgtgtcgtcaatttgtaccttgggtcccttgtcctccagaggaagactattgcttccacatggggagacagcacaaggtcattcccagacacctctttcactcactttcatccttgtcaagggacgtaggacttcccatggtgtttggatagcatcaggggcaggcaggcagtcttcaggaggatggcgatgctgatttgctttctgcagaggagcccagagagggtatccacactgaacttgtatgtccataggaggaaacccaaaccgcatggtcccagaagggtcctggtggttagaaggggag

SEQ ID NO: 56539 - DNA, 2015 bp, Homo sapiens
gccagagttgggtatcaaccagatacactgcaggggatcagaggacatggcctttgtgtactgcacatctgtcagattttctcaagcacacccgtgtttcctcttcacctcccacgtggaagtgatgaattggccaggaccatgttggtgagggacaatcatcatctcatgttaacctcagagaagccaggaagctcctggacacacatggtgtaggcttccttggaggctgttggatctctcctgaatgtaagcaattccttcccagtgcaccctgattttcctcatttgcagaaacaaagattgtgtgtggatcgatgatgacttccatatatacattccttggaaagctgaacaaaatgagtgaaaactctataccgtcattctcgtcgaactgaggtccagcacattactccaacaggggctatacagagagggccggcattgattccttgacatgggtggcaccaaggggaccatccaggcttaggatggggtttctttgggtgaatggtagacacaggggagtaggatctcccatgcacaggacataccttgtttgaaggacttttgtgtcctagggctggataactcatgtgctgtttggaggactaggtaaatggcagattgcatgggaagagttaactggtagcctgcctctgatggccaagtttgtccttgagtccaagctgtgggtaccgaagtcccccagaggaagacagatccttctggttgcggggagagcaaaaggctacacctttgccattagttggctcattttatccttagctgaggatgttggagttgtgtttacccggcatagcctctgtgcctatgtgcccatgttgtgtactgtgcattgtgaggatgtatatttggcatgaacaggcaggcttcctctccaaactggggctgatagacagcgaggctctgggttatcccaaaccagatacaggtcaatggcttcctctttaggggtgcagggccttgattattttgtgactggcattgcaggtgttgaaacaagggtattgagaaggatgctcaacatcagtgctctttagcgggatgatgcattctgagggctgccatccccaagatgagcatacttgtgtccataaatttctgggttcacgaacaagggaagccagagacaggcatattccagataaaccacagggggaagatagcatggtcctcgtgacctgtgcacccgtctgcctttctgaagcatgcttctttatcctctgcacttcgcaggtagtgttggtgtaaaaggcaaacccgtgtcatgagggatggtcatcatcttgtgtgatccttggagatggcaggaagccctggacatacatggtgtgggggctcctccagaggctgttgggatcctcctggatgtaagtgattccatttcaaagcaccctgagtttcctcatttgcagggatggagwttgtgtgtggatcgatgatgacttccatatatacattccttggaaagctgaacaaaatgagtgaaaactctataccgtcatcctcgtcaaactgaggtccagcacactgctccatcaggggctcgagagagaggaacaacatccatttgttgacacagactgcaccaaggcttggggtggggtctttttctggcagaggagagtagctgggaattttggacgtttgtaactaagagacagcttggttgaaggcagccaggtgtgtcgtcaatttgtaccttgggtcccttgtcctccagaggaagactattgcttccacatggggagacagcacaaggtcattcccagacacctctttcactcactttcatccttgtcaagggacgtaggacttcccatggtgtttggatagcatcaggggcaggcaggcagtcttcaggaggatggcgatgctgatttgctttctgcagaggagcccagagagggtatccacactgaacttgtatgtccataggaggaaacccaaaccgcatggtcccagaagggtcctggtggttagaaggggag

SEQ ID NO: 56540 - DNA, 1242 bp, Homo sapiens
acataggctgccactccaagctgagtctgataggcaatgagactctggcttatcctgatcccggtgtagatcaaagtcttcccagtaggattgcatggccccgaggctattgtgagctgcattgcaggtgtggaagcaagggtgttgagagggatgctcaacattagtgctctttagcgagatgatgcactataagggcaccctgaacccagacgtgcatccctatgtacgtgcatttctgtgtccataaatagttgaagccagacagccagattccagatgtatcgcagggggctggatgacatggcccttgtcacctgtgtacctgtctgcctttctgaagcacgcttgtgtttcctctacacctcccaggtagcattggcatggaaggcaggcccatgttggtgagggacaattgttatcttgtgtgagccgcagggataccaggaaacccctggacacaaatggcaaaggcttctttggaagttgttggatcccttctgcatgtaagcagttctttcccagagcgctctgattttcctcatttgcagggacaaacactgtgcgtggatcgatgatgacttccatatatacattccttggaaagctgaacaaaatgagtgaaaactctataccgtcatcctcgtcgaactgaggtccagcacattactccatcaggggctagacagagagggccaacattcgtttgttgatatgggttgcatcaaggggtccatccaggcttaggatggggtccctttgggcaattggaagtcacagggaagtgggagctcccatgcacaggaaattccttatttgaaggacttctttctccctgggcgggataactcacctactgtctgaaggactaggtgaatggcaggtggcatggaaagagtttgtgggtagtctgcctctggtggccaagtttgttcttgagtccaagctctggattcccagaggaagacagatcccctggttgcggggagagcacaagcctacactattctcayttgttagcttgttttgtccttggcggaggacgttgtatttccaggcacccagcatagcctctttgccgcatttccatgtcatatcccatatgttatgaggatttgtgtattgcatgatcaggcaggcttctgctccaagctggggctgtcaggcaaggagtctctgggttattccaaacctgatttaggtcagtggcttcctctttcaggattcatggccccaaggctt

SEQ ID NO: 56541 - DNA, 1242 bp, Homo sapiens
acataggctgccactccaagctgagtctgataggcaatgagactctggcttatcctgatcccggtgtagatcaaagtcttcccagtaggattgcatggccccgaggctattgtgagctgcattgcaggtgtggaagcaagggtgttgagagggatgctcaacattagtgctctttagcgagatgatgcactataagggcaccctgaacccagacgtgcatccctatgtacgtgcatttctgtgtccataaatagttgaagccagacagccagattccagatgtatcgcagggggctggatgacatggcccttgtcacctgtgtacctgtctgcctttctgaagcacgcttgtgtttcctctacacctcccaggtagcattggcatggaaggcaggcccatgttggtgagggacaattgttatcttgtgtgagccgcagggataccaggaaacccctggacacaaatggcaaaggcttctttggaagttgttggatcccttctgcatgtaagcagttctttcccagagcgctctgattttcctcatttgcagggacaaacactgtgcgtggatcgatgatgacttccatatatacattccttggaaagctgaacaaaatgagtgaaaactctataccgtcatcctcgtcgaactgaggtccagcacattactccatcaggggctagacagagagggccaacattcgtttgttgatatgggttgcatcaaggggtccatccaggcttaggatggggtccctttgggcaattggaagtcacagggaagtgggagctcccatgcacaggaaattccttatttgaaggacttctttctccctgggcgggataactcacctactgtctgaaggactaggtgaatggcaggtggcatggaaagagtttgtgggtagtctgcctctggtggccaagtttgttcttgagtccaagctctggattcccagaggaagacagatcccctggttgcggggagagcacaagcctacactattctcacttgttagcttgttttgtccttggcggaggacgttgtatttccaggcacccagcatagcctctttgccgcatttccatgtcayatcccatatgttatgaggatttgtgtattgcatgatcaggcaggcttctgctccaagctggggctgtcaggcaaggagtctctgggttattccaaacctgatttaggtcagtggcttcctctttcaggattcatggccccaaggctt

SEQ ID NO: 56542 - DNA, 607 bp, Homo sapiens
ggtactatgaaacggcctgtggaattagacaactaaccagctcacatacagtacaggaaattactggacagttaacctaccaatatatggttgggggtaagacggagacttttcaaatgcttggctggtagcatctgtacactacagtgaccagacactgggagccagcacaggagttataggatttacaggaaattattgtgtgaacccacaagccattcagacatttgtgtgagcgcccagaatattctggttgatggtttgttgcttgatggcaaagagatgtcagcattcaaagacatcatgagtttttacttctccttttcttttaagtgaaataattgcatggaaattaaagaataaatatcttatatgaaatatatgaaacatatgaaatataagatatttatttatatcatataagatataaatatctcatatgaaawcttgtagtatattttcatttgattgccaacccagtcactaggactgaaacagttgtttattttttgttttcccatcaaccaagcaagctatttaatacatgtttcagtgctggtttcaactacatgttgcagcaaacatttttagaagtgatatttcaaat

SEQ ID NO: 56543 - DNA, 1319 bp, Homo sapiens
aacttatcgatgttattccatgtgckaccatttcaatcatggaagagttcttcccagcacaggtcccagacctgtcatacccagttcactcaaaagacaagcctaaaatgagcaggcatgagccacttctctagttaatattattgctaaaatagatttttaaaccaaagtcactatataaatttttaaaaatctaagggagaaaaaattcaaagaaaaaatatatataatatctggtatcatgtggaaatcataatcatttattttatcttgaaagtattatttgattaacatcattcatgcttaggtctgttagtgggggagtgtaatgtaaatgatggaattaacaagatttatttaagactgatctattttaagcctgatggagatgtttaagcatggagaatttaggagtgtatgtatgcctaagaaactgaaatctaagatagcaagatagaatagctcactaagttcttttcttcctgtgttagtagcttgaacttaagagccatttctgataagaaattgaacacttataaagaaatggcagttctgcccctgtgcacctgtgtgtgtatatgtgtgtacacacacaagtgcagtgccttgagtctctgtgatcttcccaagtggtagttttagtcctaccgggttctgtttcgtgtctgggagcctgtccactccttgttggtccactctcatctcacagattgatggacaatgccctgagccagccttccacccccagggacttggcaggaccacagtcagaaatgaaaagagaagaggaaaaaccctggggggagccgcagatatttgattttgtgtaacttaatcaagtgctagtcacaaagagaagtctgttgaaacaaaataaatagttgcaagcaggtgctgaagaattcattgcttaacaactcaggaactttgaaaggtgtgctctgtgcttatggatgcaaaaagatagagggtctagtggtgactccttaagcactgtaattaattagctcaattcctttcttaaggacacttgaatactgcataagttctgatgacaaagagtctctccttgaccaaactctaatcaggcctttctgaactcacttctcaactgggccctgacctttgggtgtcagtgttcatctctgcattggaaacttttagcaagaaccctgcgaaatcatttcgaccagaacccccaaccctggatatctgactgtcttcggtatctgttcagttttctcatttaccatctgcctggtggtgtttgatcaccctggcctgtctttagcaaaaacaaagttaggtcagtttttcca

SEQ ID NO: 56544 - DNA, 1069 bp, Homo sapiens
taaatttgctcacacaacactaaaatgtgcaatgaaaatgtagcttcctgatgcaattttcctcaagaaggtccgggttttggtggyataacagaaacacccttatactgagtatacgtgagtcaagtctgacttaagtctgacttagtaacttataagaaagatacttcacctgttttaaaaatatatttatcattcagatctcacttgctttcccccacgcctctgcaagtgggcatctgctgatcttgcagcaggaaagaggtctgggcaaggggccgggggcctctgtgttctcagtggtcccgctgcacagtgtattcagactgctcagctccccaccctggagaacactgagcaacactgcctccgactggccctcgggagtgacatgtaggtaataaacctacagctttagtctggcagactgacccaccatccctccccagaagctgtcccctccaccttccccctccttggaggctcctgaacccaagaaggctggggaggactctggtgcctttactgatccagccactgactgccacctctccatcatcctccgcacagcacactggacaaaagcgccaagctaatggctagccttttaggaggcctgcagactttgcacacaacccctgcagaagaagcctttaagttaatctgggtatttctaaagcctccatggatcaggcccccaaattctctgtggatgtggagggtggggaacaaaatctcacttctccctataacttcttgagccaaaaatagatcagttcatgctttactttttcagggcagaaaggttcacaccatctgttccctatgcccccagcaggctccttcacttcctccaggtgcatgctcagattccacccaagcagcagggccttccctgcactccctacctgccaggctctgccatgcccaacagcacacactaccatccaacacaatagatgtttacttgcatgtttgtttgtagtctgtctctctctacagaacatctgccccagcatggcagaggcttcattctattccctgatgtaacctcagtacctagaaccaa

SEQ ID NO: 56545 - DNA, 767 bp, Homo sapiens
ggatccaccgaagccccaacctcagcctcatgcaatatacccttgtaacaaacctgcacatgtttcccctgactgtaaagttaaaattaaaaaacaataaatagataaatacatatgtgcagtacatggatgttgattatgcctcaaaaaactaaacaaaacaaagactatcccactccactcaatgttcattcacttcaatcagaagatgcttcaggctctatccaccttcgaaactcaacggggtcccagcacaaaaattgaacctggcacagcgcctgaggcaatacccgcctcatgcaacgaaacaaccaggcatgacacatacttatccataaaatcttcatacaaaagagttcatacagaagtgttacaggagcctagaaatccttccttggaaattcacacttagctgttattttcaaaaacctaggtaatagtcacttagggctytggaatcaaattgaggggttttttttttctgttccttttcattttatggcatgttatgctttgttaatatattcattgcttcatcaaacatttatttagcacctaatgtacacaaagaaatggactaactgcagttaaggagaaaaaaggtttgcttccttttctgataaaatctgcactaacttgttttaaaacaacttaggtttaaaaaacgagaaaataggggtaaatgcatgaatagagtaaaaaggacctcaaagtaaaaaaggaatgagtgaagcagagtcatcaacaagggttttcagggaggaagg

SEQ ID NO: 56546 - DNA, 767 bp, Homo sapiens
ggatccaccgaagccccaacctcagcctcatgcaatatacccttgtaacaaacctgcacatgtttcccctgactgtaaagttaaaattaaaaaacaataaatagataaatacatatgtgcagtacatggatgttgattatgcctcaaaaaactaaacaaaacaaagactatcccactccactcaatgttcattcacttcaatcagaagatgcttcaggctctatccaccttcgaaactcaacggggtcccagcacaaaaattgaacctggcacagcgcctgaggcaatacccgcctcatgcaacgaaacaaccaggcatgacacatacttatccataaaatcttcatacaaaagagttcatacagaagtgttacaggagcctagaaatccttccttggaaattcacacttagctgttattttcaaaaacctaggtaatagtcacttagggctttggaatcaaattgagggkttttttttttctgttccttttcattttatggcatgttatgctttgttaatatattcattgcttcatcaaacatttatttagcacctaatgtacacaaagaaatggactaactgcagttaaggagaaaaaaggtttgcttccttttctgataaaatctgcactaacttgttttaaaacaacttaggtttaaaaaacgagaaaataggggtaaatgcatgaatagagtaaaaaggacctcaaagtaaaaaaggaatgagtgaagcagagtcatcaacaagggttttcagggaggaagg

SEQ ID NO: 56547 - DNA, 670 bp, Homo sapiens
ttgttctacatgacagtcaccctcaagaaatgtgtgctatgtcccagttggctccctaagaaatgatgaagcagaaagtgagaacagatccacagatggcatttaccaactactattcagctcacttgttgactaactcctgctcaatacaggtgcagatcagatagtgccaagaaatgggcagctaccaggtgcaggcactgtactaggcagtacactccagggacaggcagtcaatgagggaatgagggcataggcaaaagtgactgctgcttccacaaagagagtcctgggtactagggcactgcatgaggagaggagctatatgggagggggtgaaagaatacctccagggaataggcgatgaagctcaactccaaaaagagtagsagtcatcgcagggaagagaaggttcaagagtgtttctgcagaggaatcagcatgtgcaaaagacctgaagtggaagatagcacgccacatccatgggcatcagcttgtctgtgattgctagccaaactccaaggctatcagagtttcaatcctggttccaccagttaaaagttgtgtgaccttaggcaaggtatataaaaccagcttttcccttcctcagctcccttgtctgtaaaatgaggatcagtacaggacctttatgcgggctgtttggaaggat

SEQ ID NO: 56548 - DNA, 670 bp, Homo sapiens
ttgttctacatgacagtcaccctcaagaaatgtgtgctatgtcccagttggctccctaagaaatgatgaagcagaaagtgagaacagatccacagatggcatttaccaactactattcagctcacttgttgactaactcctgctcaatacaggtgcagatcagatagtgccaagaaatgggcagctaccaggtgcaggcactgtactaggcagtacactccagggacaggcagtcaatgagggaatgagggcataggcaaaagtgactgctgcttccacaaagagagtcctgggtactagggcactgcatgaggagaggagctatatgggagggggtgaaagaatacctccagggaataggcgatgaagctcaactccaaaaagagtaggagtcatcgcagggaagagaaggttcaagagtgtttctgcagaggaatcagcatgtgcaaaagacctgaagtggaagayagcacgccacatccatgggcatcagcttgtctgtgattgctagccaaactccaaggctatcagagtttcaatcctggttccaccagttaaaagttgtgtgaccttaggcaaggtatataaaaccagcttttcccttcctcagctcccttgtctgtaaaatgaggatcagtacaggacctttatgcgggctgtttggaaggat

SEQ ID NO: 56549 - DNA, 492 bp, Homo sapiens
tctcagaagtaaagtaaccacagtctcctgcactatgtagttaccatgaggaaagaaccctggggctatgtatgccagggcagggagcctagagagtccgcagaacctctgccatggctgttcacttggaatgcttttcttgttcacccacaccagtgttcctctcagagccatctgcagggacactgatagatatctaaaggatggatgtttagcaggatatgatgaccagtgtcatctgtgggtccaggtgtcttagttagctcaggctataatataacaacataccccagactgtcttataaataacagacattcatttcccatagttctggaggctggaagtctgagatcattgagctaatgtaaatataatcgggttctggtgagggctctcttctgggttgctgacagccaccttctccttgtattctcatgtggtggastgcagacaaagcaaactctcatgtcttttctttaaagggcactaat

SEQ ID NO: 56550 - DNA, 492 bp, Homo sapiens
tctcagaagtaaagtaaccacagtctcctgcactatgtagttaccatgaggaaagaaccctggggctatgtatgccagggcagggagcctagagagtccgcagaacctctgccatggctgttcacttggaatgcttttcttgttcacccacaccagtgttcctctcagagccatctgcagggacactgatagatatctaaaggatggatgtttagcaggatatgatgaccagtgtcatctgtgggtccaggtgtcttagttagctcaggctataatataacaacataccccagactgtcttataaataacagacattcatttcccatagttctggaggctggaagtctgagatcattgagctaatgtaaatataatcgggttctggtgagggctctcttctgggttgctgacagccaccttctccttgtattctcatgtggtggacwgcagacaaagcaaactctcatgtcttttctttaaagggcactaat

SEQ ID NO: 56551 - DNA, 517 bp, Homo sapiens
agattaaatttattggattctgatttaatgtcagtcctacaatcttcaaataagacttattataaagttcaaatggcccttgataaagagggtaaacacagtgagtccgatcaaagaatgtaacaatgcacgcagtggtattttggctcattaggttgtttactgctctgtgactctacctataaccttcttggatgcctaatcttcactatctttaatgatattcatcactgtgttagtattgtatagctcttrtaaatgttatgccagatacagcaaaaggaaaaaggcacgattgaaagcccggatcatgatagcttgcaaaatggatctgatctgggatgtttagaccaaaccctagtcctgactccatctcataccttaaacagtgggctattacatcaagtcagactgtgttctccccaccgtgatccaaactgctaatatttaaaactattaccaccaaccagactactctaggaatgagccttcctggcgctgtaggaccttgccaaat

SEQ ID NO: 56552 - DNA, 739 bp, Homo sapiens
agctgttctttgtggggggacaatttgcatctgtaaagcatctctgttaacataaccagatctttttcttccagaccctcccaatcttaaagaaatgaactaagatctgaatagaaaacacttgtcatctattgtctctaagggcagccactataagacttcaaaagactttggtctccacaatctttatcttaacctgaacattccctttctatcaatcccaggtctttagacaaactcaaccaattgccaaccagaaaatgtttaaattcacctatagcctggaagcccctgctttgagttgtcccaactttctgcaccaaaccaatgtatttattaaatgtatttgattgatgtctcatgcccctctaaaatgtataaaaccaagctgcaccctgamcatcttgggcacatgttctcaggactgtgtcatgggccatggtcactgatatttggctcagaataaacctcttcaaaaattttacagagtttgtatctttttgttgacaatatgcactattccaatcttcattaatattttttcaagaataaacatgttttcattgtgctcacaaaaaaagaatatttcaataatcattatataaaatgtggcaatctaatggcaaatagttaccactaaatttattacagtaatgattatagatttagtttacatgaacagtgttaccttgagctcaccctccttttcttgttataaccacaatgggtttgttgcctg

SEQ ID NO: 56553 - DNA, 739 bp, Homo sapiens
agctgttctttgtggggggacaatttgcatctgtaaagcatctctgttaacataaccagatctttttcttccagaccctcccaatcttaaagaaatgaactaagatctgaatagaaaacacttgtcatctattgtctctaagggcagccactataagacttcaaaagactttggtctccacaatctttatcttaacctgaacattccctttctatcaatcccaggtctttagacaaactcaaccaattgccaaccagaaaatgtttaaattcacctatagcctggaagcccctgctttgagttgtcccaactttctgcaccaaaccaatgtatttattaaatgtatttgattgatgtctcatgcccctctaaaatgtataaaaccaagctgcaccctgaacaycttgggcacatgttctcaggactgtgtcatgggccatggtcactgatatttggctcagaataaacctcttcaaaaattttacagagtttgtatctttttgttgacaatatgcactattccaatcttcattaatattttttcaagaataaacatgttttcattgtgctcacaaaaaaagaatatttcaataatcattatataaaatgtggcaatctaatggcaaatagttaccactaaatttattacagtaatgattatagatttagtttacatgaacagtgttaccttgagctcaccctccttttcttgttataaccacaatgggtttgttgcctg

SEQ ID NO: 56554 - DNA, 1255 bp, Homo sapiens
agagtggaaactgatacttttagaggctcagtatctattctggggccacttggctaataaggagttttagttctgtctgatttcatatccagttaactacaatgctggcaagacttttatgtctatatatttaaggctaacacatcctcaaagtctccaataccatcctctcttacacaaagtcttatttctctgttattggctagggtgtagtgtaatgtagcaattcagttttcacatatggtttactgtgttttagggtcatagctgcttgagaacagaattggtacctggttaacctctaagtaaagcacagtgcataaagaaaccccaattttgtgaaccactgaaaagactattgaaaatgtagattttagaatgaagaaaacacactgggactgcagtgaaacagagagaactgcagagttccaggacatctgtaactgagcctttcacctgtaggctaccctctctatgttggagattgaggacgaggggatggctgaagtgggtgaatggcagtagtctccatacgagcagatagaattgatcttgtgtttcacctgtctacttccatttatcattttctctcatatcccagatgtgacagacaatctgactgtggccacatttattagttttaaggcaaatgaaggattctagagacaggctgtagagaagctaaagaaaatatttcatcagagagaagttaaatacttctgaagtatttcagcaaaatacacatacaaatcctttaaaaatttcttattaactttagagactgaaacttgttaagaacctgtgaaatttctgacttaaatttcaatgcatgaacataggatgtgtgacagatacgagaatgcctgtattgggttgcagcccacggaggtctgagattggtctccaggttggaaggacaacttggatgatctcaggaactaagggacttgagcagactgaactttgaaattttctcttccctaatctccaggacacactgggacctgcagtgaaacaaaggacatctgtagcaaagcctttcaactctagattgtcctctccatcctagaaatggaggaggaagtgatagctgaagttggttaattaaaygctctgatcttctgtaaaatacctagccagtgttcttcaagactctcaaggtcatggaaaccttggaaaaactgagaaacttccatctcagaccagaggacactaaggagaaataatgagtaaatgcaatttgatatcctggatt

SEQ ID NO: 56555 - DNA, 1255 bp, Homo sapiens
agagtggaaactgatacttttagaggctcagtatctattctggggccacttggctaataaggagttttagttctgtctgatttcatatccagttaactacaatgctggcaagacttttatgtctatatatttaaggctaacacatcctcaaagtctccaataccatcctctcttacacaaagtcttatttctctgttattggctagggtgtagtgtaatgtagcaattcagttttcacatatggtttactgtgttttagggtcatagctgcttgagaacagaattggtacctggttaacctctaagtaaagcacagtgcataaagaaaccccaattttgtgaaccactgaaaagactattgaaaatgtagattttagaatgaagaaaacacactgggactgcagtgaaacagagagaactgcagagttccaggacatctgtaactgagcctttcacctgtaggctaccctctctatgttggagattgaggacgaggggatggctgaagtgggtgaatggcagtagtctccatacgagcagatagaattgatcttgtgtttcacctgtctacttccatttatcattttctctcatatcccagatgtgacagacaatctgactgtggccacatttattagttttaaggcaaatgaaggattctagagacaggctgtagagaagctaaagaaaatatttcatcagagagaagttaaatacttctgaagtatttcagcaaaatacacatacaaatcctttaaaaatttcttattaactttagagactgaaacttgttaagaacctgtgaaatttctgacttaaatttcaatgcatgaacataggatgtgtgacagatacgagaatgcctgtattgggttgcagcccacggaggtctgagattggtctccaggttggaaggacaacttggatgatctcaggaactaagggacttgagcagactgaactttgaaattttctcttccctaatctccaggacacactgggacctgcagtgaaacaaaggacatctgtagcaaagcctttcaactctagattgtcctctccatcctagaaatggaggaggaagtgatagctgaagttggttaattaaatgctctgatcttctgtaaaatacctagccagtgttcttcaagactctcaaggtcatggaaaccttggaaaaactgagaaacttccatctcagaccagaggacactaaggagaaataatgastaaatgcaatttgatatcctggatt

SEQ ID NO: 56556 - DNA, 951 bp, Homo sapiens
gcatgtaagtggtcagggaggaggcaggagtggtataggagaacatcttgtaaatacttcttcctatttcatcttgcttagggatggatattttcagcattaacaacgttaataatcatcataactaacagaaagcagcagtattacacaatgccctgaccttgataattgctccaatgtataataattagactgtggtgtgacttgtgtttgatggagacatgcactgaacccagcttggggacactggaggatgccgacaggtaaatgactccctctaggaacacttccttagccagttgtatccccacagtttactcagaagacatgtctgaaggacaggtgcagaagagggaatgatggaattttgatattgtccaatggcttatctttcctttataaacaagtgccctgaaggagtcttagactttcactgaatataaaagtgaagcgaactaatactgtgatgaatacactaagtgttaggcattatgtgaggcctgtaactacaggattaagctggttcatgcacaaagctattgaaaacagactcaggaartagaaacctgtcaaggttatataactttcataaaatggcaattagaaagtggcccagccacttaaacacataaaatgtacagtggttattcagaatagagaacacatacaagcaatatgaaaaatgcaggcgacccaatagaaaaatgagtaaaagactgaaaacttcctaaaagaatatattcaaatagtaaacatatggaaagctgcttactttattagaaatcaaggaaatatacgttaaaaccacaagaaaataccattacacacccatagaatagctgtaattaaaaagaccaaccaaagtattgatgaggatgtggaataatcaaactctcctacagtgttggtgtgggtataaattggtaaatcacttttgaaagctgtttggaa

SEQ ID NO: 56557 - DNA, 951 bp, Homo sapiens
gcatgtaagtggtcagggaggaggcaggagtggtataggagaacatcttgtaaatacttcttcctatttcatcttgcttagggatggatattttcagcattaacaacgttaataatcatcataactaacagaaagcagcagtattacacaatgccctgaccttgataattgctccaatgtataataattagactgtggtgtgacttgtgtttgatggagacatgcactgaacccagcttggggacactggaggatgccgacaggtaaatgactccctctaggaacacttccttagccagttgtatccccacagtttactcagaagacatgtctgaaggacaggtgcagaagagggaatgatggaattttgatattgtccaatggcttatctttcctttataaacaagtgccctgaaggagtcttagactttcactgaatataaaagtgaagcgaactaatactgtgatgaatacactaagtgttaggcattatgtgaggcctgtaactacaggattaagctggttcatgcacaaagctattgaaaacagactcaggaaatagaaacctgtcaaggttatataactttcataaaatggcaattagaaagtggcccagccacttaaacacataaaatgtacagtggttattcagaatagagaacacatacaagcaatatgaaaaatgcaggcgacccaatagaaaaatgagtaaaagactgaaaacttcctaaaagaatatattcaaatagtaaacatatggaaagstgcttactttattagaaatcaaggaaatatacgttaaaaccacaagaaaataccattacacacccatagaatagctgtaattaaaaagaccaaccaaagtattgatgaggatgtggaataatcaaactctcctacagtgttggtgtgggtataaattggtaaatcacttttgaaagctgtttggaa

SEQ ID NO: 56558 - DNA, 1128 bp, Homo sapiens
cctgtaatcccagctactcgggaggctgaggcagaagaattgcttgcagtgagccgagattgtgccactgcactccagcctgggcgacaagagcaagactttgtctcaaaaaaaaaaaaaaaaaaaaaaagtgataagatgaataccagcccagagatgataacaacttggggattattgtgtttggtgaatggggtgagggacgtcacattaaaaccatggcatcagggcaaacctccgtgaaaagacaggcagagccacagctggagagacctccccagtactggggccttggtgaggagctggggagcttagatttaccatgtcccagaagccaccctctcactgagcagatttccctggcagttgcccccatcgcatgtggctggtccctcaggagcctgtgtctcaagagctacctggtcagccagaggctggactttggaaagctgttcatttcattgagacatctgggaacctttctacaaattcatgttctctcgrgttgagggaaggctgggctgcactatgttttgaggctctggcttcatggatttgccatgaaagtaagctgaaactctaggtccctcactttcagggatcccttcaagaccaagcgcctaattttatctttgtaattttgaattattcttctgaagagggacccctcagttgtgtgagccttaggcccaacaaatctggatcgacccctggttccagcaaccctcgtcttagagacttctgcatggacactgggaagacagaacccagcactgccaagggtaatggatctcccattttgatgtgagtgaaaaccacctgaaggtggagggtgttaaacctgggaccttgctttggttggtccgagggggtttggtaatctgcacaccaaggcactgggtgattctgaaacagacccggaagcctcaagtgagaactgtgcccaaacttcctgaagcagtttgtctgcgaagcccatagttcccaagtgtggccccatcccaggagcctctcaggttgaaggaacagctactaataaatcactgacttcactggactcagggtaggcagaatggagtatctgcctttctttgcatcaaaagcacatcaccctatcctgttctgtat

SEQ ID NO: 56559 - DNA, 555 bp, Homo sapiens
cacatgaatggcttagtgctgtcctcatggtaatgagtgagttctccctttatgagttcacccaagagatggttatttaaaggagcctggcacttcctcccctctctcttgttttctctctcactatrtgatgcaccagctcccctttgccttccgccatgattggaagcttcctgaggcctccccatagtgcagatgccagcactatgcttcctgtacagcctgcagaaccgtgagccaaataaatctcttttctttgtaaattacccatcctcaggtattcctttatagccgtgtaaacagactaacacagccagggccgttggaagttttgtggaagcactgggtaggactgacgtgtggtagtcactgtccctcctgagtctcctcttatactgtatgtgagagggagattctttcaggcagcaagtattttccaagcaccaactatagctcaggcacaattccagactctggcaactaaactgatgaaactcgtggtctcaggagcttatattttggtggggaaatggaaaatagagaaattaggatgtt

SEQ ID NO: 56560 - DNA, 555 bp, Homo sapiens
cacatgaatggcttagtgctgtcctcatggtaatgagtgagttctccctttatgagttcacccaagagatggttatttaaaggagcctggcacttcctcccctctctcttgttttctctctcactatatgatgcaccagctcccctttgccttccgccatgattggaagcttcctgaggcctccccatagtgcagatgccagcactatgcttcctgtacagcctgcagaaccgtgagccaaataaayctcttttctttgtaaattacccatcctcaggtattcctttatagccgtgtaaacagactaacacagccagggccgttggaagttttgtggaagcactgggtaggactgacgtgtggtagtcactgtccctcctgagtctcctcttatactgtatgtgagagggagattctttcaggcagcaagtattttccaagcaccaactatagctcaggcacaattccagactctggcaactaaactgatgaaactcgtggtctcaggagcttatattttggtggggaaatggaaaatagagaaattaggatgtt

SEQ ID NO: 56561 - DNA, 555 bp, Homo sapiens
cacatgaatggcttagtgctgtcctcatggtaatgagtgagttctccctttatgagttcacccaagagatggttatttaaaggagcctggcacttcctcccctctctcttgttttctctctcactatatgatgcaccagctcccctttgccttccgccatgattggaagcttcctgaggcctccccatagtgcagatgccagcactatgcttcctgtacagcctgcagaaccgtgagccaaataaatctcttttctttgtaaattacccatcctcaggtattcctttatagccgtgtaaacagactaacacagccagggccsttggaagttttgtggaagcactgggtaggactgacgtgtggtagtcactgtccctcctgagtctcctcttatactgtatgtgagagggagattctttcaggcagcaagtattttccaagcaccaactatagctcaggcacaattccagactctggcaactaaactgatgaaactcgtggtctcaggagcttatattttggtggggaaatggaaaatagagaaattaggatgtt

SEQ ID NO: 56562 - DNA, 636 bp, Homo sapiens
cctgtaatcccagccactcaggaagctgaggcagaagagtcacttgaacccgggagacggaggttgcagtgagccaagatcatgccactacactccagcctgggcgacagagcaagactctgtctcaaaaaaaagtaataatgaacatataataatgagtccaacccaggatatattcatctttagaccaaggcaatggtaaaattgaattaagaatttttttttccacggaggaaggaacgcacaaaagccacagtgtggcccttgctccagggattccgtctgagcaaacacttcctccttggccttcccatcacactccaagtggagtaaaatcctggcgggacctacacaggtcagtccctgaacacctagacatcctgatccctcagtcacaaacctagcatggacttaagayccctcatcctggccaggcatggtagcttatgcctgtgatcccaacacttaccccaaagtggacagatcgcttgagcccagaagtttgagaccagcctgggcatcatggtgaaaatacaaaaattagctgggcgtggtggtgcatgcttgtagtcccagctactcgggaggctgaaggatcgcttgagcccaggaggttgagactgcagtgagctgtga

SEQ ID NO: 56563 - DNA, 780 bp, Homo sapiens
cctgtcaactatgggcctgtaaggaagataaaccaggctaaaataaataaatctcaaattatgtcataggagaaaaggttgcaagggtagagagatatttacccggaaaagaaaaaactgggaggaggagagataagacatgattgttgtttcagtgtttctggggaacttttatgtgggagtaggattagtcttactatataagaaatgtgaggaattttgattccatggaagaattttcttatataaaacttttaagaactagaagagttttcctggacaggtaaatmttgctcaataaatgtaggtaaaatcatggttacttggtatctgtcagggattctatggaggcccctaaacattggatgtgggagaagaatgctgtgggcttataaaattttgtattttaaagagtatctgctttatgaacattatgcaatttggagaaaagttatgaaataagattatttcaccttctccagttagctacttccatgatgttatggaccgtatagttgttacaacttctttttgtgtactgaacagacaaatgagattaatatcctaaccattagtcaaagatgatgataaactaagcttttggtgccaagtttctgttgtcaaagttcatttttatcctagttttgatgttttaaaatagggctgtctttgtaatcaatatttatatactttcctcttgtatctaaagaggagtgttgttgtcatcagatgtagaatgaagatttaaattagttgccttacacttgtttccgcaatgaa

SEQ ID NO: 56564 - DNA, 1846 bp, Homo sapiens
  misc_feature (1)...(1846): n = A,T,C or G
ctctctctcccctcattctatatactgccatcactggtttactctaatgcttctgccagattttgccaaggctcaaaagcctcacacagatccaagaaaacacacatttgcctctgagaccattggtatacaatgcagccatatatgagaaggcctcaggatgtggtttgtttgtattttgcctgccctgatctgggacaagagcctggtcctagtcatcactctattcggctgctaagcatgggacacacatcagacattttagtctattactgaataactgaacttacagagttgcgcagagttcattccaaaccacaggggaagcacatgggcattcctgaggacagagtttacagggccattttcctggtgaggaactgctccctgcagaaccccacttcctacaggccccactcattcagtaaacattcactgagcatctgctactacatgacaggcattagactaggctttgaggataaagaggttaacaatcaccaccacctacaaacaatgttttgtgagaggctcacaacttcaaggagggaaatgaacaaatatactaatgaatcatatttaggggctatatgaactcagatgtaagcacagtgctttcagaacaaacagggagcttagaagtaaagggtaaaagtttcatggagggggacatctgagtgagctttgagggtaaaagtaaaagggaactaagggaactcagcattactactaagagtcaatgccaaggcaagttggggcaaaaagtatttagagcttaaggaatatayataaatcaaatagtaaacaagggaaaaaccatcaagaggtttttttgtttgtctttttgttttttgagaccaagtttcactcttgttgcccaggctggagtgcaacggcatgatctcggctcaccgcaacctctgcctcccgggttcaagcgattctcctgcgtcttctttcccgagtagctgggattataggcatgcgtgaccatgccnnnnnnnnnnnnnnnnnnnnnnnnnnnnnnnnnnnnnnnnnnnnnnnnnnnnnnnnnnnnnnnnnnnnnnnnnnnnnnnnnnnnnnnnnnnnnnnnnnnnaaggagttccccgacccttggagtcattttgcaacttcctgaacaggcatgttttggagccaggctttgaagaagctgtaggataagagaaggaagagacatggtttgtacagggagatggaataagatgggtatgatatgtatgctggattagaaattgataggataccttcaagagagaaaagaagctagtgagataaagggttcaaaatgaatgttaagccaggagatggatgaaagaggaaggcagatttattgtcaagggaggggaaagactaacatcagttatgtttaagggaagctggcctagcaatttacatggaagtggcttgtgatacagggagtatagtttaagtcttttaaggtatatgtgaaatgattggccaaacttgttattgctgagtatagaaagtaaaaacagaaatggtatgtaaataacttaatattgcttttgtgatcatggaaaagtaggaaggatttgtttgggaaaggaacgatgaatacctttgttttcagttacataaaagattaaattaattttcctcctctttcttgttctgttgcaactttggactccagttggagactggatctcccttattctgtacctgacatcacctggcatgatgactttgctcatagttgttgctcaggaacattcattaactaattgcgtatatgaagaaatatagattactggagtatgtctttccactgctctactgatatttgctaaaaaagagattttg

SEQ ID NO: 56565 - DNA, 1231 bp, Homo sapiens
agtggcccctgaaacacagctcatgccccactgctttgtgatggccttgggggacaacttgcatcagcagctaagaacttaggattcaatgacaaagcacagctttcctttatttcctgtgcatctgatttcctgatgtcttcttgatttgccttgtagcaatatgtggttgctcagcttcagtgaaaaatatattgccttttcccccatatatatgcaatagcacacaccctttctgctttcaccaaggttgcccttgataataaacggatgtaatcctgcataasacctgggtctgaatgtcttcttaggaacacatttgtcagtgctgccctcgagagcttgctccactcgaccgaagggcaggagcctcagcctacaactatgttccagcacttgccacagaaaactttgtggtggggcagaaccaggaggaagcaacatccaccccagccagaccctctgattccagttgggtggctcgatttctccccgttagggagagggcaagaaaataagctttaaatttaaaaggctggaataaaaataggaacatacactcttccttcacctgacccacctcaattcctgtgctgagactaattcaccaggacatacccgttgtgttgtggatccacagcgtctagcatttcacaatcaaagagtccaggtagctcagagagggctagtgggtcgtagctggagggggcctcttgcagtcctgggcttctgggacagtctggccccgttaggtcgctctgctgggctccatccacaggatactgacagggagtgggatagtctggcgcaggggaagcagcgcttggcagctcacaagtctgataggagaactgtaagggggctggggcagctcctggctgtcgtggtggtggagggggtggtggcggtggcggctgctgctgctgtagctgcgtgggcagaggaggagcagcccggggaccggaagtggagggcaggggctgaagctgcatctcttggtactggctgaggaaagggctgtattgcatctgctcggaggaaggctccaggacggggctcaggggctgggtcaggctgaacggtggggcctgctgagaaggcggtggagtctcctggcggggaaggggcagctgctgacttggctgtgggtaggagctctctgctatctgcatctgattaaaataggcctgcagttgagactgcttctgaagaaagagtcgcttctgctgga

SEQ ID NO: 56566 - DNA, 897 bp, Homo sapiens
tgcatttaacaacacagcaaagcaaagcagtacccagatgtccagctgtggtccttcatactgctgcccttcaaagacttctggggctgcataaggggggctgccacaccatgttgccagcagttcaccacttttaaagaaatttccaaaaccgaatctattaggatggaaataaatgttattttcatctatgctctcaaactatactgcatttctctgtaataaattttctaatatgctatattaacaatatcactactatttactgtgaggactgggatggcatcttatcttgtgatgtttccctggcattagcacaatgactagcaaatagtactcaaggaatgttgctgaatgaatgtgtaaatgaatcaagttttcttcccaaagcgagtaagtgagagactggaaaaatactttatatcatgtgaaagaaaatcagccttaaagtggacaacccaactagtatttgataatcttagaatttcaattacctgatgactgctaaagagctctttatcttaaatggtctataaggaaagaaacaaatgagtaaagctctaagacattyacctaaacacaactgagtgactggctgccattaccccagatatataacccttgaaggcaactgagtgcagtgtttcctaagtaacaaccctctaagtgttggtccacatatcctgttttaggcagataaccatctgaatagctcattaacatatgatggccacatagcccagccacaagccacctatcaccatcacttatttactaatttatggatcgcagtggcattatagttcaaaacagttaatggccttctccttatgatcttagccatactgactctacagttttgatacagagaatgcactctggaaacactacttagat

SEQ ID NO: 56567 - DNA, 2153 bp, Homo sapiens
atccaatatcaaactaaaggactagaacatggcacagagtatggcatcctctccctctccctcatccaacttacctttccctctaactgcttaattgtcaatcctgaaaactagttttctctacttttagcaaaaccaaacctcatgcatatgagtcaccaactcactagctccataaacactatattctggatctgactttgaatttttctcagacaccttaatacattacaacaacgctgttaggtaggcattgttattcccatattacagataaggaatttgacatttattcagttagagtaactttaggcgagttaatctacacaaaactagaacttggcgaaagagggaagcaaaattcaacccagaatgtttaaccccaagtctgtgctcagaacagctaaaccataactgattaaaataaaaattctgagcagctctacttttttcatcaaaacactaatatattaagaaggaagtaaatttactctaagagggctggaagasagatgttaagaaaccagatgaacagggttcataatgaacatgggataaattacaatcatttctattgaaattttagctttgctcccaggcattcatcagtctctgaggcagttaccaagacaagaggaccaacctctacctacgatgctttgagggctctgcccccttagcgcctcatgcagccttctacctatttaaaatatttggtctcattgtcagcccaacgcaaagctgttgtacctcactatgttaaaaacctgagaataaaggcctaatggtttcctagattgttgttaattcaattctacaagccatgtaatcaggtcctttgaaagtgtggaactgactaatgattagtgaataaaaggagctaaagcaaaatctgtgaagatgttaatcaatcggaataaatagttggacttcagctcagagaggcagcccttctccatccatataaaagtagagggggcgttgaggtattgcatacacttacacattctagagttctaacatagtacttgcaatcgttacaaatgtttttaattaacttagaaccaaccatctcatccatctttctgccagtgaaagatggtctctgggttatagttatttttgtttaatattttttaatttctcaaattatggacagtttagcagtttctttagaaattaaattaaaataaaaaagaagaaagtgggtaaaataataattaagcttaactccaatccagttcttcataagccttctaaaataccttgcaaatgttttatttcaggcaaatttagaaagctacttgtacaagtgcatattaaaagagtgtcaagggaaaaatgcaaatttgcatgcctgaggcaaagactgtgccagaatgcatggaggatacagagaaatcggatgctagattgggcacattagcttacagtgtctcccatgtgcaggggacagaagagcggggaattgggagtgggacttttcttttaccatttagtgactaagtctccattttccttcctctgcccccttgtcatcccttcgctgacttctgattcactaccatccacttctcctttctcttcctccccttgctttccgcttccttctctcagtccacaaaatgtcaccagggcagctagcaagggaaaaagataaagggattcaagtcccatttccacctcaaacccagagcagaacccaggactaggatgaggctgaaaaatgaaggtgcagatggaaataaaactaattatatgggcaatatttatactttatttcttagccctctccatgaaggtttgccttttcgtttccaaaaatgatcaataagaatactatctaaggctttcaaagtaaatgaaatcatataaaaatgtacaatcaaatcatatacaaatttctcaaccttcttggatatataggctttgtgacatgaaatatttttagattttaatgttaccaatgaagatttatgcatccattagcaacttaaccaatagcctcaaaatggggccttgacaacaattagagggccttcccagggccaggcactgggtgttgtgcatgtgttgtcttacttagttcatacaccaaccttgcaacttacgatcttttctatcctcaatttatagttgagaaaactggatcc

SEQ ID NO: 56568 - DNA, 599 bp, Homo sapiens
tagtcattcctggttcatgttgagaggctgtatgtttccaggaatttgcctgtttcctttaggttttctagcttgtgagtgtagatatgttcattgaaatctctgatgatcatttgtattactgtggtatcagttgtaatgtctccttttcatttctgattmtgcttatttgaatcttttctctttttgtcttagttaatctagctagtggtctatcaactttgtttatttttccaaaagagaaactttacatttcattgatcctttgcattttttatctctatttcatttagttctgttcagatctttgttatttcttttcttctgctagctttgggcttggtgtgttcttgtttttctagttccaaagatgtgatgttaggtggttaatttgtaatctttctattgtttgatgtaggcctttcattgctccctcttagcactgcttttgctatatgttgcctctattttcattcaattcaaaaaaagtgttgactttcactttcatctaattattgaccaaatataagtcaaaacacatggtttgatttccacatatttgcatagttttgatttctagttttcttccactatgatct

SEQ ID NO: 56569 - DNA, 599 bp, Homo sapiens
tagtcattcctggttcatgttgagaggctgtatgtttccaggaatttgcctgtttcctttaggttttctagcttgtgagtgtagatatgttcattgaaatctctgatgatcatttgtattactgtggtatcagttgtaatgtctccttttcatttctgattctgcttatttgaatcttttctctttttgtcttagttaatctagctagtggtctatcaactttgtttatttttccaaaagagaaactttacmtttcattgatcctttgcattttttatctctatttcatttagttctgttcagatctttgttatttcttttcttctgctagctttgggcttggtgtgttcttgtttttctagttccaaagatgtgatgttaggtggttaatttgtaatctttctattgtttgatgtaggcctttcattgctccctcttagcactgcttttgctatatgttgcctctattttcattcaattcaaaaaaagtgttgactttcactttcatctaattattgaccaaatataagtcaaaacacatggtttgatttccacatatttgcatagttttgatttctagttttcttccactatgatct

SEQ ID NO: 56570 - DNA, 857 bp, Homo sapiens
gaaattcttaaaatgctagcttatgaaatagttaaaaaaagaaactttttacttagattaataaattggggaaatgcttcaaataattgttcccctcccctttgtagatacgcaatttaaactgttgtatggggcattaaaaataaaaattcaacttttttaaccaagaattttatcagcttctttttgtgaccagagaacttttctcaaaatttttgttaattactcacatgaactagtttttatagaatctagtatggtaaaacctggggttctacccccggttccttctagagatactatattagcaaaagcaagattattatagattcaagaatgtttcaggtataagttggaatgtgagctgggcagttaagaaaataaaagttagataagcaagggaaaaggcatttcatagattggtattaaaataatacttgaccaggtgcggtggctcacgcctgtaatcccagcacttcgggaggccaaggtgggcagatcatgaggtcaggagatcgagaccatcctggccaacatggtgaaaccctgtctctgctaaaaatacaaaaattagccaagtgtggtggcacgtgcctgtagtcccagctactcaggaggctgaggcaggagaattgcttgaacccgggaggcggagattgcagtgagccgagatcgtgccactgcactccagcctsgtgacagagttagactctgtctcaaaaaaaaaaaaaaaaaaaaaaaaaagtcaaagaaatggaattaatttagaattattctaatagtttcacaaccatgtgtttgtagtcttttgtctcacgtgccctgtacagtagcatgaatacagtgttacttaatac

SEQ ID NO: 56571 - DNA, 857 bp, Homo sapiens
gaaattcttaaaatgctagcttatgaaatagttaaaaaaagaaactttttacttagattaataaattggggaaatgcttcaaataattgttcccctcccctttgtagatacgcaatttaaactgttgtatggggcattaaaaataaaaattcaacttttttaaccaagaattttatcagcttctttttgtgaccagagaacttttctcaaaatttttgttaattactcacatgaactagtttttatagaatctagtatggtaaaacctggggttctacccccggttccttctagagatactatattagcaaaagcaagattattatagattcaagaatgtttcaggtataagttggaatgtgagctgggcagttaagaaaataaaagttagataagcaagggaaaaggcatttcatagattggtattaaaataatacttgaccaggtgcggtggctcacgcctgtaatcccagcacttcgggaggccaaggtgggcagatcatgaggtcaggagatcgagaccatcctggccaacatggtgaaaccctgtctctgctaaaaatacaaaaattagccaagtgtggtggcacgtgcctgtagtcccagctactcaggaggctgaggcaggagaattgcttgaacccgggaggcggagattgcagtgagccgagatcgtgccactgcactccagcctcgtgacagagttagactctgtctcaaaaaaaaaaaaaaaaaaaaaaaaaagtcaaagaaatggaattaatttagaattattctaatagtttcacaaccatgtktttgtagtcttttgtctcacgtgccctgtacagtagcatgaatacagtgttacttaatac

SEQ ID NO: 56572 - DNA, 606 bp, Homo sapiens
taaattgtgcacaaacagtgaaatctgtgaatgcaatttcaaagagctcacaagccctctgaagccaatccctggatttctcagagggtttgtggattcagattaataatgcttccaagcacaactactgccactcagaacaggacaatagttacacatgctgttctggagttagacagacctgagttggaatccttgctatcactgtttcttcgtaccttagtcaaattactcaacctttatggccctcaatttctcctctgtacaatgaagatggctctagcccacgtctcatacagttgccgtgagaattacatgagttaatggatgtaatatgtttagcatatgtattagtggtagtaatagctctgttggtgagtaccatttttgyacatgatttcctgcttcttcagatgctgtcccagtaaagagaccttcaggagaagagctactttatgaacacaggccccagttttttcatctgacaaacgggtttgtcgtaacacctgtcctgccaatgcacagacttaatcagaaagcacaaccaagctaaaagaaaggagagtgctctgttaattacagatgccataaatgtgtggctctgag

SEQ ID NO: 56573 - DNA, 591 bp, Homo sapiens
tgtgtctagtctaagatgtgaatgactgatagctgtccatttctggaacagtagaaagtgcaggtgtctggaagtcagagagatccagggtagtgccacttatcaccttgaacatgygcacagaaagggcctggcctatgcttggtgtaggatggttgataagtaagtcagtccctctctccaggccacttcttctctgtgtagccctcagtctgccccctcctctctccttatactcctttacaaacactcttcttgctcactcaattgcctaaaaacgaatggcctttctgtccctcctaatcaacatctttggaaaggagttatttcattgattaccatcctggtggatagatttgtttgaacaaataaattgccctttttgtaggtcaaacccagtcaaatacaggcaacttcatattacaacagtagaaacacgtgccccaagacttctcacttggcctttctagaaacaagaagtagattcatatctttggagaggccaccttagcccaattgttgggtgggggatggtgagagagaagagcttgccatctttatatgaatcatcacattaaaattttacagaca

SEQ ID NO: 56574 - DNA, 1511 bp, Homo sapiens
gtaccctccaaggttttctaataggacagcacatcagaaagagtagtcacagaatgaggtaggagagatgatgtcagatgaataggaggggaaatggagaggtgtctttcattctttgttcacttacttattccttcctatttattaggtgccactgcataccaggcatcaagccatggactgaggaggtaataatcactgccatcatggagcttatggtttcaagagggaagttgctcaagcaattatacaagtaaatgagaaattctagctgtggcaaagtgtcatagaggtgagaaacatgatgccatgagcaccaacaacaggagggtttgacttggttgaggaggtcagggatggcttctttgggaaggcaatacttgagctaaaatctgaaagaagagtaaatatgtggagtagtcatcaggattgttcataaatatttgattccttctctttgtccagggatatgcatggtagggttgcactttcctgccccattgaacccaagagtggtcattgcttcaaccagtgaaatgtgaacagaagcaatggctcacttccaggcaaaagacctcagaggcagtacacattttgcaatattctatttatcctctatcatagttgctagcaatatttcagatagtgcttgcccaggggcctggatcccagagtgcaaatgagagtaaaaatgcagggcagaatgccctgctaaaccatgacaaacatgaaaagtgtacaagtaaaggatgcagtgatgagtttgccattcattcagcaagtatttgaaatgcctactgtgtcccagataccaagtctagcattttcttcctagatggagtgaccaaggggagggtggtatctgagctaggctttgaaaaagacataggatgtcgactgctttagaagaaaggggttggggaaggcatttcaggcaggataaatatcacttgcaaaagtgtaggtatatgaaaactatcggcttgytggagagacagctggaggagtagaaactgaagacagaaaagcaggtggggcaaagccttgaatgcagagctaaagaactgggggcctttcatctgagagccatagggagtcactgaaaaagtttgagctgaggacagtcatcatataagctgttcttgaggaactggctaggaagcaatgccctgtgatggcaagggtcagagagtgcatatgggagcatttcagcttggagaactgtttggaaactgatccttataaattgctggggaggagaaaagagtcctagagggctgtgatcattgacttaaaatgttcaaaaagctccaagtgggtgggtgagtgagtgggaatcatgggtattctaagagagcaaaagtgggttcaaagatagtgatggctgggaggtatatttgttccagcaaacagaacttcctgacaatgatagcaactatattcattttcttttgctggcctaacaaattaccataaatgtagtggcataaaatgacacaaatagattttct

SEQ ID NO: 56575 - DNA, 1511 bp, Homo sapiens
gtaccctccaaggttttctaataggacagcacatcagaaagagtagtcacagaatgaggtaggagagatgatgtcagatgaataggaggggaaatggagaggtgtctttcattctttgttcacttacttattccttcctatttattaggtgccactgcataccaggcatcaagccatggactgaggaggtaataatcactgccatcatggagcttatggtttcaagagggaagttgctcaagcaattatacaagtaaatgagaaattctagctgtggcaaagtgtcatagaggtgagaaacatgatgccatgagcaccaacaacaggagggtttgacttggttgaggaggtcagggatggcttctttgggaaggcaatacttgagctaaaatctgaaagaagagtaaatatgtggagtagtcatcaggattgttcataaatatttgattccttctctttgtccagggatatgcatggtagggttgcactttcctgccccattgaacccaagagtggtcattgcttcaaccagtgaaatgtgaacagaagcaatggctcacttccaggcaaaagacctcagaggcagtacacattttgcaatattctatttatcctctatcatagttgctagcaatatttcagatagtgcttgcccaggggcctggatcccagagtgcaaatgagagtaaaaatgcagggcagaatgccctgctaaaccatgacaaacatgaaaagtgtacaagtaaaggatgcagtgatgagtttgccattcattcagcaagtatttgaaatgcctactgtgtcccagataccaagtctagcattttcttcctagatggagtgaccaaggggagggtggtatctgagctaggctttgaaaaagacataggatgtcgactgctttagaagaaaggggttggggaaggcatttcaggcaggataaatatcacttgcaaaagtgtaggtatatgaaaactatcggcttgttggagagacagctggaggagtagaaactgaagacagaaaagcaggtggggcaaagccttgaatgcmgagctaaagaactgggggcctttcatctgagagccatagggagtcactgaaaaagtttgagctgaggacagtcatcatataagctgttcttgaggaactggctaggaagcaatgccctgtgatggcaagggtcagagagtgcatatgggagcatttcagcttggagaactgtttggaaactgatccttataaattgctggggaggagaaaagagtcctagagggctgtgatcattgacttaaaatgttcaaaaagctccaagtgggtgggtgagtgagtgggaatcatgggtattctaagagagcaaaagtgggttcaaagatagtgatggctgggaggtatatttgttccagcaaacagaacttcctgacaatgatagcaactatattcattttcttttgctggcctaacaaattaccataaatgtagtggcataaaatgacacaaatagattttct

SEQ ID NO: 56576 - DNA, 723 bp, Homo sapiens
aagcagaagtgggagggactgggggtgtggccaaagtgactataggattgtgggaaaagtgcccttgccactggcattatgagaagcctgtgagtatggcaggaaaggtgctagctttggagcccagaaatgccaagtgcacatcctgctatcttctctgccttcccgaggggtcttgggcaagaacgcaggtctctctgatctacctgcgagatggagagaggaacagtgcctagcacagaggggtgtggcaagcgcctggggagcagcatcacccccaatttttcagatgtgaaaatggtcaagacattatcattattagggggttccagtcagtggaggtgaacacgaagcctgacaggcccgggaccgggtgggcgggrattccttccactctcagatatctaagttctcatccaaggtcactgggcttcagaaacaccattctataaagtctcctcagaggaagcgaatcagcgtgaggctgcagtttcttcatctccctctcccacgacttcaccctgcattcttcagccaatcaacacgatctccacactttagctcactccaaaacccttaaaagccctagccatctcctggggagatggactagaggtttcctctcctctccttgctcagcagccctctgactaaacctctttctctacagaaaaaaagtcccagacaatcactcccttttataatcttctcctcaaacttcct

SEQ ID NO: 56577 - DNA, 723 bp, Homo sapiens
aagcagaagtgggagggactgggggtgtggccaaagtgactataggattgtgggaaaagtgcccttgccactggcattatgagaagcctgtgagtatggcaggaaaggtgctagctttggagcccagaaatgccaagtgcacatcctgctatcttctctgccttcccgaggggtcttgggcaagaacgcaggtctctctgatctacctgcgagatggagagaggaacagtgcctagcacagaggggtgtggcaagcgcctggggagcagcatcacccccaatttttcagatgtgaaaatggtcaagacattatcattattagggggttccagtcagtggaggtgaacacgaagcctgacaggcccgggaccgggtgggcgggaattccttccactctcagatatctaagttctcatccaaggtcactgggcttcagaaacaccattctataaagtctcctcagaggaagcgaatcagcgtgaggctgcagtttcttcatctccctctcccacgacttcaccctgcattcttcagccaatcaacacgatctccacactttagctcactccaaaacccttaaaagccctagccatctcctggggagatggactagaggtttcctctcctctccttgctcagcagccctmtgactaaacctctttctctacagaaaaaaagtcccagacaatcactcccttttataatcttctcctcaaacttcct

SEQ ID NO: 56578 - DNA, 733 bp, Homo sapiens
acccgggttttctaccggtttggggagcatttattaatggtgctctgctgcttgttcgaggcaggtgctttttcactgccacagcctgccctgatggatggcacagcctcttccctggctgaggcggccccaatcagagctctctctcctcactccaggccttactcatcatagtagctactgtgtcccaaatgccagctgygttgagacactgttcatatgtcttggcttgtggaaacctcatagcctcctacagggaaggcactattaatattgtccattttgcagatgaacatagtgagacatggtttaaggactccccagaggcctcacatcggtgtgaggtggcagatccaggatacaaacccaggttggtgcagatccaaggccctgctgtttttctgcaacattctgctttggtgagtagatcttagggtgaagtagacaaggcactggtttgattcaccagccttgggaggcacccctgtctggaccatggcatacagtaggccaggttgtacactgctcagctctagagggcactagtcactgtgaaggctatgtgaatggcgccctctagaattaagcagggcataaactgcacaaccaaaacggtggccgggccactgtgagtgctgttaatggttatgtttatcacttagagcagtgttaccttggctcttcaattgagttcccatatccattaaatagcaacctatcagggtcatggtaa

SEQ ID NO: 56579 - DNA, 733 bp, Homo sapiens
acccgggttttctaccggtttggggagcatttattaatggtgctctgctgcttgttcgaggcaggtgctttttcactgccacagcctgccctgatggatggcacagcctcttccctggctgaggcggccccaatcagagctctctctcctcactccaggccttactcatcatagtagctactgtgtcccaaatgccagctgtgttgagacactgttcatatgtcttggcttgtggaaacctcatagcctcctacagggaaggcactattaatattgtccattttgcagatgaacatagtgagacatggtttaaggactccccagaggcctcacatcggtgtgaggtggcagatccaggatacaaacccaggttggtgcagatccaaggccctgctgtttttctgcaacattctgctttggtgagyagatcttagggtgaagtagacaaggcactggtttgattcaccagccttgggaggcacccctgtctggaccatggcatacagtaggccaggttgtacactgctcagctctagagggcactagtcactgtgaaggctatgtgaatggcgccctctagaattaagcagggcataaactgcacaaccaaaacggtggccgggccactgtgagtgctgttaatggttatgtttatcacttagagcagtgttaccttggctcttcaattgagttcccatatccattaaatagcaacctatcagggtcatggtaa

SEQ ID NO: 56580 - DNA, 733 bp, Homo sapiens
acccgggttttctaccggtttggggagcatttattaatggtgctctgctgcttgttcgaggcaggtgctttttcactgccacagcctgccctgatggatggcacagcctcttccctggctgaggcggccccaatcagagctctctctcctcactccaggccttactcatcatagtagctactgtgtcccaaatgccagctgtgttgagacactgttcatatgtcttggcttgtggaaacctcatagcctcctacagggaaggcactattaatattgtccattttgcagatgaacatagtgagacatggtttaaggactccccagaggcctcacatcggtgtgaggtggcagatccaggatacaaacccaggttggtgcagatccaaggccctgctgtttttctgcaacattctgctttggtgagtagatcttagggtgaagtagacaaggcactggtttgattcaccagccttgggaggcacccctgtctggaccatggcatacagtaggccaggttgtacactgctcagctctagagggcactagtcactrtgaaggctatgtgaatggcgccctctagaattaagcagggcataaactgcacaaccaaaacggtggccgggccactgtgagtgctgttaatggttatgtttatcacttagagcagtgttaccttggctcttcaattgagttcccatatccattaaatagcaacctatcagggtcatggtaa

SEQ ID NO: 56581 - DNA, 733 bp, Homo sapiens
acccgggttttctaccggtttggggagcatttattaatggtgctctgctgcttgttcgaggcaggtgctttttcactgccacagcctgccctgatggatggcacagcctcttccctggctgaggcggccccaatcagagctctctctcctcactccaggccttactcatcatagtagctactgtgtcccaaatgccagctgtgttgagacactgttcatatgtcttggcttgtggaaacctcatagcctcctacagggaaggcactattaatattgtccattttgcagatgaacatagtgagacatggtttaaggactccccagaggcctcacatcggtgtgaggtggcagatccaggatacaaacccaggttggtgcagatccaaggccctgctgtttttctgcaacattctgctttggtgagtagatcttagggtgaagtagacaaggcactggtttgattcaccagccttgggaggcacccctgtctggaccatggcatacagtaggccaggttgtacactgctcagctctagagggcactagtcactgtgaaggctatgtgaatggcgccctctagaattaagcagggcataaactgcacaaccaaaayggtggccgggccactgtgagtgctgttaatggttatgtttatcacttagagcagtgttaccttggctcttcaattgagttcccatatccattaaatagcaacctatcagggtcatggtaa

SEQ ID NO: 56582 - DNA, 733 bp, Homo sapiens
acccgggttttctaccggtttggggagcatttattaatggtgctctgctgcttgttcgaggcaggtgctttttcactgccacagcctgccctgatggatggcacagcctcttccctggctgaggcggccccaatcagagctctctctcctcactccaggccttactcatcatagtagctactgtgtcccaaatgccagctgtgttgagacactgttcatatgtcttggcttgtggaaacctcatagcctcctacagggaaggcactattaatattgtccattttgcagatgaacatagtgagacatggtttaaggactccccagaggcctcacatcggtgtgaggtggcagatccaggatacaaacccaggttggtgcagatccaaggccctgctgtttttctgcaacattctgctttggtgagtagatcttagggtgaagtagacaaggcactggtttgattcaccagccttgggaggcacccctgtctggaccatggcatacagtaggccaggttgtacactgctcagctctagagggcactagtcactgtgaaggctatgtgaatggcgccctctagaattaagcagggcataaactgcacaaccaaaacggtggcygggccactgtgagtgctgttaatggttatgtttatcacttagagcagtgttaccttggctcttcaattgagttcccatatccattaaatagcaacctatcagggtcatggtaa

SEQ ID NO: 56583 - DNA, 1253 bp, Homo sapiens
ctgaagggcaacatagcacaagttagtcacacatatttgttaaccatatgacacagaaattccactcctgagtatatattccataggtccctaacgggattgcacccaggtgcaatctgggtgcctatcaacaggcagtaacaaatgtaaaatgtggtagaagcatacgatggagtgctattgagaagttaaaaattacagattggatgtatatatatatatagagagagagagagagagagcgcaacatggatggattcttagaacttaatattgagtgaaaagagtaaggaacagaatgaagcatatgacattatatatgtatgtaaattaaaattctatatgcatgaaatatacacatattttacaagaatgcatacaaacaaaagaccctcattaaccttaacagatttgtagtcagtggtcaaggtaacaggattgggaaagggaaataaagggaataaataaatacatgaatgaatgaatgaatgaatgaatgaatgaataaaaggagagagacgatgcatgattgaatgtgtcatgaactaggaatatggttgactcaattctctggcctaaagcctagtcaaatagaaaagaaaaaaagagatgattaaatatggccactaggtcttacaatttagtaaaaggacatagacatatttcatttaaaaaataggttggaattattgagatattttggaacaattctgcttgtgatagaatagtgacacaaatgatgatgtagtgacttctatctgagtggggactggggaaatgagaagtggccttatagagaagacaacaaactattgggggagaccggcatgaacagaaataatgtaattcagagaatgatagggaaaaattcaaagtgaattatcaaaatgaattcaatgggaatgcaaggaaaggcatgataattctgcagagggaattgaggaaggcaccttgatcctgagcaaagcccatagcaccgggctggtgactcaggcaatcagccagtctggggtcacatctaggtccagaagtggctgctgactttagcagactatgcatggaagcccaaatcaaagctctgcacaatcgtacycccaatgtagttagtgtgacctaagaaccaatcaattagtaataaaatataaacttttattctgcttcttcagtgaggaggtgaatcattttaaaaccaggttccatgctgtttttttttttttcaggaccatggcatttagattctgtttccaagtttg

SEQ ID NO: 56584 - DNA, 726 bp, Homo sapiens
ctggaatttgacctcagaggtcctggttgactaatacagatgttttgtgtattttcacctaactcttctagttgctctcagtgaaagtattggtttactataagttactctattatagtcctgttcgattgatttttgcaagatgattaaaatagaaaacttgaaaaaatgacactgttagatgaaaatctatgtttttgcaaaatggctaattgtctaagaagtaaagctacctggtttcattatcctcatctacccataaaatttgaggttttataacacagatgaaataaggcatagggattataaacattattttatctttgcctaattatgttcaaacttctagcacacaaaggacacaccacaccacttagatgagatcatttccgaagttccttggaatcttgttccagtttacaatgggataagatcaractggtcttcacatgattgattttagttttttctgtaaaaacaataaagtaactactctttaaaacacacacacatgcaggcatgcacacacattttgcccactgacaaatatttttatgtgaataacttgttattgtagttttttcaaatgacacattcagcaaccatatttaagcaaatgcagaagacttaatttaactccaccatctgtccatacaactttgaataaatttcatttgttcaaaatatctttaaatatagattattttaaacatagattatttgtca

SEQ ID NO: 56585 - DNA, 634 bp, Homo sapiens
ttcactttttacatttttatttgtttttcaaaggtgtgaatttcttctgcagttagacacagattatgactaaaaaacaagtggcttttatgtagattcatagtcaatatcatagtcatttattttaaaaagctgcccagggcttgttaagttgctgtcaagatgaagcactaggggatcagcatgttcaggtgaaaaggtgctgctcagggaagaggtgagaggaggctgcaggtgctgtgtgctgacttacctgagctagcacagatgcagcacacggctcacacactacctcttatggcattatcactacccaatctgccattagcgcatccaattaatggcaatagattaaattgtatagctccctcyaccaccacaatctgcaaccaaaaccatccgggggacatcctaagctctcaaaaggatctttatggggaagagatttgttgagggccaagagctgagctccatgcctttgaggatgagaattctggggtcctgggtgccttttaaagtgatctgggagaggtaggctctgggagcgtatgtcctgttggcatcaccaactcccagcgctgtaaggagtcgcagaaccagaagaaggccagaggagagaccttgaaagtgtggg

SEQ ID NO: 56586 - DNA, 634 bp, Homo sapiens
ttcactttttacatttttatttgtttttcaaaggtgtgaatttcttctgcagttagacacagattatgactaaaaaacaagtggcttttatgtagattcatagtcaatatcatagtcatttattttaaaaagctgcccagggcttgttaagttgctgtcaagatgaagcactaggggatcagcatgttcaggtgaaaaggtgctgctcagggaagaggtgagaggaggctgcaggtgctgtgtgctgacttacctgagctagcacagatgcagcacacggctcacacactacctcttatggcattatcactacccaatctgccattagcgcatccaattaatggcaatagattaaattgtatagctccctccaccaccacaatctgcaaccaaaaccatccgggggacatcctaagctctcaaaaggatctttatggggaagagatttgttgagggccaagagctgagctccatgcctttgaggatgagaattctggggtcctgggtgccttttaaagtgatctgggagaggtaggctctgggagcgtatgtcctgttggcatcaccaactcccagcgctgtaargagtcgcagaaccagaagaaggccagaggagagaccttgaaagtgtggg

SEQ ID NO: 56587 - DNA, 571 bp, Homo sapiens
ctgggaaccgaggtgggcccctggccatggggaatcacccagggcggatgtgagactcaggcgcctgttggggattatccaggtctttcactcatttatgcattcagcaatcagcaaggattcctgaggaatactgtcaattaatcactcaagtttcaccctcagaaacataacgttctggcatcagagggacagaaagattgttgacgtgcctggtcaggaaggtgaattcggtcgagcaggattgtgctggggagctgctacagtctgaatgtcggtgtctccccaaagttcatagttgaaatcctaaccctcaaggtgatgggatttggaggtaggggctttgggaggcgatccagtcacgagtgtkgagtcctcatgaatgggattagtgccttgacaaaagaggctccagaaagctttctcgccccttcctccatgtgaggacgcggtaagaagacactgaaccaagaagcaggttctcaccagacaccaaatctcccagcgcattgatcttggacttttagctttgagaactatgagaaataaatttttgttgtttgtaaaccac

SEQ ID NO: 56588 - DNA, 707 bp, Homo sapiens
atcctcaaaaggttgaccctcaggaaaaagtagattcttcctctcccccacaaaaaaacttccctggcacaggaaattacaaataattagtctttggctgggctgctgatttcctttttttttttaattctatagagataaggtctatgttgcccaggctggtctygaactcctgggctcaaatgatcttcctgcctctgtctcccaaagtcctgggattacatgcatgagccaccgtgcctggtcactactgattatttttaagtttcctctaagatagtaaaattctgggatttcctctaagatagtaaaattctgctattcacataggaagtccaaatttacactactggcatgaacaacaaaccccagaatgacaaatttaaaaaacaaaacaaaaaaaaaaacaatttcaggtataatataccccctgaggctccaggcaaacttaatccatacgttctggtaataaacatttcctaagcacatactatgtgtcaagtactcttctaggggctagggatgcaataagcaaaacagacaaaaatctctactcttatgaaacataaacagtagtccctcttgatctacagggtatacattgcaagacccctagtggatacctaaaaccacagataataccaaatgctatatacactatgtttttttgtatacacacatacctatgataaagtttaatttataaa

SEQ ID NO: 56589 - DNA, 707 bp, Homo sapiens
atcctcaaaaggttgaccctcaggaaaaagtagattcttcctctcccccacaaaaaaacttccctggcacaggaaattacaaataattagtctttggctgggctgctgatttcctttttttttttaattctatagagataaggtctatgttgcccaggctggtcttgaactcctgggctcaaatgatcttcctgcctctgtctcccaaagtcctgggattacatgcatgagccaccrtgcctggtcactactgattatttttaagtttcctctaagatagtaaaattctgggatttcctctaagatagtaaaattctgctattcacataggaagtccaaatttacactactggcatgaacaacaaaccccagaatgacaaatttaaaaaacaaaacaaaaaaaaaaacaatttcaggtataatataccccctgaggctccaggcaaacttaatccatacgttctggtaataaacatttcctaagcacatactatgtgtcaagtactcttctaggggctagggatgcaataagcaaaacagacaaaaatctctactcttatgaaacataaacagtagtccctcttgatctacagggtatacattgcaagacccctagtggatacctaaaaccacagataataccaaatgctatatacactatgtttttttgtatacacacatacctatgataaagtttaatttataaa

SEQ ID NO: 56590 - DNA, 718 bp, Homo sapiens
gcctatatgaaagtatagaaactgactgagtcatggaaatcctgaagataaagtgatcttacagaaactagaacaaagttaagtaaaacaagggtctcgataaaaagcccagtcaaaaatgagtaacttaaaacacctgtgttttgtcaacagtggcttggcagctagaataggaaggacagaggaagttaaacccacgctggtttccagaagtcagctacaaaaaatgaacctctaggaccagatggttttatggctttggtaaacaatagatttgcataatgcttcctcaataattctgtcaggaagagtgctgagctaaaaaacaacgtgcaattgtgccttttttgaaagaccagctctctaaatggccaactggtaattaggagaatctaatgctgagaaggacagagtatataaaggactattatcttgamtaagtaattgtaaatgccagtatatttggtagtattaggtctccactggtggccacattatacactgattatcaaaggggaatgaaggcgtctctgattttgggcaccacctccctaaagtttctttgtttgttctgctttgtagcttcctttgacttttgtttctaaggcttgcggggggctgccatttggtttctcttcaagaattaacaaaccacttactcttgaattctcttctagttaacacaggcatcactacttccaattgatctcaggatgtg

SEQ ID NO: 56591 - DNA, 439 bp, Homo sapiens
tagtacatatgtatgtgygaatgtatatatatgcacatataggaatggttttgattttacaaatatgtatgtactcatgtatttacaaatggaaaaatttatctgtaattcacatatgatcatactaaatatacatgattgtttttctttttatttgcttaatattataagcatttttccatgttaagtgttccttgaaaacactgactgcctgtgtaatattttattacatcaatgattctcaaacattagcatgtatcaaaattaagtgaatactcttattctaccaaatcgtctttgctactcagtatatttctatgttataagttgttagtcaaactaaagtcttatttcagtttacatttctttcattactgatggcagcagccacccatctagagtggctcccgctatgacactggctgctgaggcactccag

SEQ ID NO: 56592 - DNA, 439 bp, Homo sapiens
tagtacatatgtatgtgtgaatgtatatatatgcacatataggaatggttttgattttacaaatatgtatgtactcatgtatttacaaatggaaaaatttatctgtaattcacatatgatcatactaaatatacatrattgtttttctttttatttgcttaatattataagcatttttccatgttaagtgttccttgaaaacactgactgcctgtgtaatattttattacatcaatgattctcaaacattagcatgtatcaaaattaagtgaatactcttattctaccaaatcgtctttgctactcagtatatttctatgttataagttgttagtcaaactaaagtcttatttcagtttacatttctttcattactgatggcagcagccacccatctagagtggctcccgctatgacactggctgctgaggcactccag

SEQ ID NO: 56593 - DNA, 439 bp, Homo sapiens
tagtacatatgtatgtgtgaatgtatatatatgcacatataggaatggttttgattttacaaatatgtatgtactcatgtatttacaaatggaaaaatttatctgtaattcacatatgatcatactaaatatacatgattgtttttctttttatttgcttaatattataagcatttttccatgttaagtgttccttgaaaacactgactgcctgtgtaatattttattacatcaatgattctcaaacattagcatgtatcaaaattaagtgaatactcttattctaccaaatcgtctttgctmctcagtatatttctatgttataagttgttagtcaaactaaagtcttatttcagtttacatttctttcattactgatggcagcagccacccatctagagtggctcccgctatgacactggctgctgaggcactccag

SEQ ID NO: 56594 - DNA, 545 bp, Homo sapiens
tcacaatttcccaggtgatgctgatgctgctgrtttggggcccatgttttgtgaaactctgttctaaataaaattgaggtaaccaattgaaattatcaatacacctaaataccaatacacctaaagaaaataataaataaccatcttagtttctcctcgggataaatacctcaatcagatttaatcttccaattaatattactttaatcaattctattgctcttccttaaattctctgggtaaaagaaatcaccctgaaaatataaaaattacagttggacaccatatgttaacaaaggcctaatagacagtgaattaagtggaagtagcattccccagctcttgcaagtaacccaataacttaaaaatatccaagtatatattagctttttaggttaaagcacaacattgatcaagaaaggccccatgaggctagtttatcaagcaaaaaatgtattgttcagatttcctgtttatttaatacatattcctgtttatttaaacatagactacctagagataggtagtctatttttcttttaata

SEQ ID NO: 56595 - DNA, 1813 bp, Homo sapiens
ccagtgtttggctggattggccagtgccaaagaactagattccaagctctgaatatttaaataaattgataactaattagtcacatataagagaagkttagagtagaccatggagcagcaaaccttttttttataaagggccgggtaacgaatgttttaggctttgcaggccttacagtctctacctcaactactcacatctgctgttgtgcaaaaactaccagagaacacagaaacaaatgaccgtgatggtgttcaaacaaaacgttatttatacactgaaatgtgaatttcatataatttttatgaatatttttctatttccctcaagcatttcaaaatgtacagccattcttggctcccagtccatactaaaacaggtgtctgacaggaattaaccctcagctggtggtttgctgacccacggaataaatgataataaacaaaatgagtccgtattataaggcaggcattttgtagacaccagctctggtctttgaaaggcactggtattccagctttacacaggaagagactcaagagcagaaaaatcaggttgcctacagtctctgagtgtctgtgttcaaaacccatgctgacttcacaaaccaggttgtttccctgctgtgatagtcctaatttactgaccacctactatgcatcagcaccataccattcacacgcataatgccatttaggcttcacaataacactttcaatacgatatcaccatactcatttcatagacgcaaaaggtgacttcaataagctaagtatacgatccaggtcacagactttgtaagtagtggagctgagagacacacctaggaacttaccccagagctttccactgcatggtgctgctttgtagagcccactggtcaaaggtatgtattctagtaatggcaattagtaattattggatgcttatcatgtgccaagcactagtttaagccctttgcccatgtgaacttgtttaatttacacattgctgtgaggtgggtattattactaatgttgtccccatttatagatgagaaaagtaaagaacagagttttaatcacatgctcaagtttccattctaacataccttcaaatccaagagttttgctccagagccttcatgcttgactgctgatgtaacctcctggttttcatcaaatttctctcatcttactatactagtacatgttcatagttcttaatatgaactgagagaagcaaagaaagttctgtgattataacaaagtttactataaaacacattattctttctattcctcacataatatacatgcacatgtacacaaagccaggccagcattctagttaatcagaacattattgaattttgtgtagaattcattttcaggactagaaaaatttattcagctaagaaacgtaaagtcaaaatttcagtggaacctgtttacagcggtgtgacactaactacagcaatacagcttgttcctcttctgtgcacagctctgtaatcttggattctaaaaacggaaggtggttcttctgtggttgtataattagtatgtaactagtgtacagttccatctcttcataactcaagtgaatttcctcttcagttgtggtgtttttctgttcctccaaagggtgacttccttctacttacaagtggaaatctgtcccacagactgtccatgttgtggggagtcactttgtttcattcattcactcttctactgggtcatagatctatctgttgtatgatgacgccaggcaaggcagcatagaggagactacaataaagaaggcatggctgtgcagagatggaggatt

SEQ ID NO: 56596 - DNA, 579 bp, Homo sapiens
ccacatcttcctaccattccaccaaccgtgggatcacatgagccagaattatttcctgtatatataaggccatcttgaaagaatcaaggagaagaaatacatttgagagactaagaaattccaagtatgaacacagctcaggctcattatagaaaaaagaaccacagaaaatactcacaaaaaagaagaaaatactcataatcacatacatcttgcaacagatcctgttagatcctttcaatatcattccctcatctctctctctcacttgctgtctgtcacgcaggcacttattttctgtggctcagcctcttaccactcatgcgaccttgagcatattcatcatttgtgaaatgaaggtaataataataagtcatgtgctgcacaatgatgttttggtcaatgacagactgcatatacaatggcrgtgccataagattataatagagctggaaaattcctattgtctaatgacatggtagccatggtaaggtcatagcacaatgcaatagtgtttgtggtgctgggtgtaaacaaaccttcacaaactttcacagtacatataattatgtatagtat

SEQ ID NO: 56597 - DNA, 732 bp, Homo sapiens
tgaagctatgctacccctttctctccagatctgcctctgcacagattgctgcatcagaggcttttcaccaccattcttcatgctttctatgattgatcacagagtgaagcacatttatttctcatataacccaacccatggaaacagaatggattagcattcctgacttacaaatgagggaaaaatgtgtgacttatatcagtaactttataacagatgaagggctcagaaagcccaggtctctcctcctgtcttatttcctttgcctgccttctccctgcttttcctctttcttccttcaaacaaattttcagttgacttaactctgagctaggcactgaggataaaatggcaagctacataggcatggactctaccctcaaatgatacattattacaaagagaggtcctttgaagaaaagcaatgtgctttgagaaaggttgacaaggagttctaattttggcaaagaaatctcccgagttgtggcctaaaacagagttccctcaccttagaggtagtgacatttaaggcaaaatarttttctgttgttgctgaccatcctataggactgggagatatttagcaacatccccgtgctctacccactagatgacactaacaccaccaacctattgtgacaaccaaaaatgtctccagacatttccaagtattctccggggaacaatccagttttcacacacacacacacacacacacacacacacacacga

SEQ ID NO: 56598 - DNA, 853 bp, Homo sapiens
tttcttgacctgtgaccccttcctccatctttaaggccaacagcatagtatcttcaaatctctctcattctctctctgatctctgcttccttctccctgactgtgaccttctgctcccaatgtcacatctcctattctgatcctcctgtctccctcttataagaagtcttgtgattacatcatacttggataatccaggataaccaccctagtcaggatccttaatttaatcatttctgcagagttccttttgccatgtaaggtagcatattcacaggatctgagaattagtatctagacatctttgggggagcattattcagcctgtcacactccatagtactgtgcagccactaaaaagactgtgtgtacagasacaggaagatttcactgaaaaaacaagaggattgcctttgagtggtggctcacgcctgtaatcccagcactttgggaggccaaggcaggtggatcacctgaggtcaggagtttgagaccagcctgaccaaaatgccgaaaccccatctctactaaaaatgcaaaaattagccgggcctggtggtgcatgcctgtaatcccagctacttgggaggctgaggcagaagaattgcttgaaccagggaggcggacgttgcagtgagccaaaattgtgctattgcactctagcctgggcaacaagaacgactctgcatctctaaaaagtaaaatgaaaaatagaggatagcttgtgaatggggaaaaaggcaaactgctgaacactatagaatgatcccctccttgtgtcgtgtttacttgtaagaaaatatttcagatcaaccggccgacccctttgtgtgacatcgtttaaaagaagtaa

SEQ ID NO: 56599 - DNA, 853 bp, Homo sapiens
tttcttgacctgtgaccccttcctccatctttaaggccaacagcatagtatcttcaaatctctctcattctctctctgatctctgcttccttctccctgactgtgaccttctgctcccaatgtcacatctcctattctgatcctcctgtctccctcttataagaagtcttgtgattacatcatacttggataatccaggataaccaccctagtcaggatccttaatttaatcatttctgcagagttccttttgccatgtaaggtagcatattcacaggatctgagaattagtatctagacatctttgggggagcattattcagcctgtcacactccatagtactgtgcagccactaaaaagactgtgtgtacagagacaggaagatttcactgaaaaaacaagaggattgcctktgagtggtggctcacgcctgtaatcccagcactttgggaggccaaggcaggtggatcacctgaggtcaggagtttgagaccagcctgaccaaaatgccgaaaccccatctctactaaaaatgcaaaaattagccgggcctggtggtgcatgcctgtaatcccagctacttgggaggctgaggcagaagaattgcttgaaccagggaggcggacgttgcagtgagccaaaattgtgctattgcactctagcctgggcaacaagaacgactctgcatctctaaaaagtaaaatgaaaaatagaggatagcttgtgaatggggaaaaaggcaaactgctgaacactatagaatgatcccctccttgtgtcgtgtttacttgtaagaaaatatttcagatcaaccggccgacccctttgtgtgacatcgtttaaaagaagtaa

SEQ ID NO: 56600 - DNA, 853 bp, Homo sapiens
tttcttgacctgtgaccccttcctccatctttaaggccaacagcatagtatcttcaaatctctctcattctctctctgatctctgcttccttctccctgactgtgaccttctgctcccaatgtcacatctcctattctgatcctcctgtctccctcttataagaagtcttgtgattacatcatacttggataatccaggataaccaccctagtcaggatccttaatttaatcatttctgcagagttccttttgccatgtaaggtagcatattcacaggatctgagaattagtatctagacatctttgggggagcattattcagcctgtcacactccatagtactgtgcagccactaaaaagactgtgtgtacagagacaggaagatttcactgaaaaaacaagaggattgccttkgagtggtggctcacgcctgtaatcccagcactttgggaggccaaggcaggtggatcacctgaggtcaggagtttgagaccagcctgaccaaaatgccgaaaccccatctctactaaaaatgcaaaaattagccgggcctggtggtgcatgcctgtaatcccagctacttgggaggctgaggcagaagaattgcttgaaccagggaggcggacgttgcagtgagccaaaattgtgctattgcactctagcctgggcaacaagaacgactctgcatctctaaaaagtaaaatgaaaaatagaggatagcttgtgaatggggaaaaaggcaaactgctgaacactatagaatgatcccctccttgtgtcgtgtttacttgtaagaaaatatttcagatcaaccggccgacccctttgtgtgacatcgtttaaaagaagtaa

SEQ ID NO: 56601 - DNA, 1384 bp, Homo sapiens
caagggtttcctgctctgtcatgtctaatatcaataatcagttgttctcagtctcacctttttttcattctccaaaaagagggtcaatcttatcacataccacctccatcaaacccttgccattttgttggctgaatacctgcacatcctgtatgcctatactcaaatggtaccatgctagacagtcaataggatgacaggcacccacatttcaagaaatgtgattaacttatggcaamaacagtcagagattattcttcccacaaaccactgaatgagtcagtcacacaaaatttctatttgtaccaagtatgtaatgtcacaaaaattgcaagcttcataatctatacttttttgtcaagaatggccctgtgcattaggtgcctcaaattctacaaaattaacacaagtcactgtgagagctcagtacacttctcaaagctactcagccaatgcatgacagataaagactcaaaatcaggtcttctggcttcaagtctcacaatcttttctattacttcattccaggaaattgaattctagttacgaaggcaaaactaacaggtaagaaacaatcaaaagcccacctatgcgatgggtttataagttcagtacaagggctggatcagcatgggctggaagatttaaaggaaaatgtttgggaatactttttttcacatgaactctacatggaagtgtaaaacaagtatatgagctgttttgattggagctagggtaggatcctcccagagcccctttcccactctatgcaatgaactctcctcagtaacttctcagccactagggctctaccgagtagtttggaagccaatggactaaatcagtagttctcaaagtatagtccctggactagcagtgtcagcaatacctggtaacttcttagagatgtgaattctttgaatcagaaattttggagatggggcttaataaactatattttagcatgttccccaggtgattctcagacttgtaaagtttgagaaatagtgaactacttcatctccataaagtaggaagggacgccacctgctttaaaagaacatttgagattgggattggaaactttgaagggggtagggaaggtctgggactgccaataggaagccttctctcaaatagcagagatagatgatagggatgaacgtcctgaccaaggctagaaggtgtcagtatgcacacccagtaatcctgtcttgcccctaaacttctcctgcaatacctagaataggacagaagacagtgggcatttgaggtcatctatacctggatagaaagtttaaggaaaagaggggtctaggaggccacgttgaagtgactggccaggaagggaccgaaatcttgatagaggaaatgaataggctca

SEQ ID NO: 56602 - DNA, 568 bp, Homo sapiens
catacaattgtgaggggttcacagagtccctgaagtatatcctcagactctggctgaaggccctgtgtctaaaccatggcctgcagagggcaacagggcagctggagtccacattgagagctgcattcaggaaagctggggacgctgtagaatttgatgagttttttgaaggcacttttcttcagcatcatcatgtcttctggaaacctggaaaagattctgaccctggaggagcccccattcttcacagaggcctctgtgggcagtggcttctgagcactcactggcacactgttgcaactgagggagcgcaccgtcttcttcttagtctgcacagacaagtaactgaacaggaaggaggacagcttgtgcttggtggcatctggggcctcttctgaaaagcagtcatcaactgggtccagcagggtttcaagatggaggccrttttcccttttcatgggaccggctcccacacgctgaggctgcttgatgatcttcctggcctggactggatcatctcctgccccactgacagactgaagggacgttccacaggcccaggctctgg

SEQ ID NO: 56603 - DNA, 825 bp, Homo sapiens
gtgtaggtagcacttcttttctgttatcttccctccctctgcaaagttagctgctcccttctacagctcccataggagcccgtatttataattatcagggcacttatacacagtatgatagggttcaattttttaatttttctttagagacagggtcctgctctgtctcccaggctgragtgcagtggcgtgatcatggcttactgcagcgtcaacctcctgggctcaagtgattttcccatttcagcctctcaagtaactgggactacaggagtaccatgcccagctaactttttgtagagatgatgtcccgctacgttgcccaggctgatctgaaacttgtgagctcaagtgatcctcccacctcagcctttcaaagtgctgggattacaggtgtgagccaccatgcctggcggatgtggtttaattcattttctcctctattagacagggagatctttgaaattaagataataatcaaatcatctttgtacccccagaactactagataagtgctcaataaatgtttataattgaaaaaattttgcacaaaatatgatattagtgtggaagacacagaggaataagctaaagctgcttaaaggattcagatctggcagttgataaacctttaatgaaacataatgtaagatgaaataatttctgagatacaagtatgccttgcttacaagtaagggcccacagaggcaaattttaaaacaacaactcctactgctaaagaattgtgaaatctcctttctttcctcctgtcatgagactcagggtccatagtcaaacaatccgttcataagttacctggatcc

SEQ ID NO: 56604 - DNA, 750 bp, Homo sapiens
ctcatctctcaccttatgcaaaaatcaactctagatggattaaggacttaaacctaagtcctgaaactataaaaattctagaacataacattggaaaaaccctctagacattggcttatgcaaggatttcatgaacaaaaacccaaaaccaaatgcaataaaaacaaagataaatagctgggatctgattaaactaaagagcttttgcaaagcaaaaggaacagcagagtaaatagacaatccatagagtgggagaaaatctttacaacctatacatctgacaaaggactaatatccagaatctacaacgaactctaaccagtaagaaactaacaaatctaatcagtaagaaacgaagaaactaaccaacgaatctaatcagtaagaaaacaacaaacaatcctatcgacaagggggctaaggacatgaatagacagttctcaaaggaagacatacaaatggtcaacaagcatattaaaaaatgctcaacatcactaatgatcaaggaaatacaaatcaaaacttcaatgtgataccacctcactcctgcaagaatggccataattaaaaaatcaaaaaaccgtagatgttggcatggatgtggtaaacaagaaactcttctacactgctagtgggaatgtaaactagtacagtcactatggaaaacagtgtggcgatcccttwaagaactaaaagtagaactacgatttgatccagcaatcccactgctgggtatctacccaaaggaaa

SEQ ID NO: 56605 - DNA, 704 bp, Homo sapiens
aggctctaaaatgtgttctctagcaaggcttggtggctcacacctgtaatcccagcactttaggaggccgaggccgggggatcacttgaccccaggaattcaaaaccagcctgggcaacaaagtaagatcccatctctacagaaaatcaaaatattagctgggcagggttacatacgcctgtagtcccagctacttgggagtctgaggtaggaggattgcttgagcctgggagttagargttgcagtgagctgagatcacaccactccactccagcctgggtgacagagtgagaccctctctctaaaaaataaataaaaataaataaaaataaaatacattttctttctataccctaggtgactgccatgaagtgtcttgccttttccactcctattaaaaaggcttgtattatttctctggaaggagtgcatcactctgatctctctggtcactgaacattctctggctgagtatactgcacacagagtctctgtgtctaggctttggccatggcccaaagccctctctgatctcttgcaagacagaaagttaggaagtgtccttccctggtttacatcccatggttctgtggcttccaaattcctgacacaggccctaggactccacctgtgtctgttgtttcgggaaggttcagctcacatacgtaatgagcctgagcaactccctgcacaagttttaagc

SEQ ID NO: 56606 - DNA, 666 bp, Homo sapiens
atcataaagtttctaaattgggtgtctgggagtcatccataggaaaccacttccagagacatttaggaaatttatcatttgttcactgggatttggtgactgactggctgaaatagaaaaggaaatcagataactttatggttaactacaggtggtactgcataatggttaagagtgtgagttttggagtccagcagatttggatactggagtcaagaaaaagtttcgtattttccaatgttttcttgtggaacaaaatgaaataagaaagaaaaggtttggatcaggataaagattcggtaattgaaaagtgacatttagatttggtgtttaaaagctcattaatggccttagggagagcagtttctgtggagcaataagggcagaatccatgtttcagtgaataggaggtgagttaaaggaggtatccagtctaaattattatactttcgaggagcttaactcagaaggaaaaaagggtcagggcagtggctaaagaatattgtgggataaaagagtcttttgttttgttttcaggtggaagcaaatactgcacatgcgtgttggtcctgtgagggaaaccagctagtggagagggagaggttgaaggaacagaaaaatgagaagayaactcactggtagagtaacttggaatagatagaaatg

SEQ ID NO: 56607 - DNA, 648 bp, Homo sapiens
gatcctggagtaaaattgaaaatctggccgggcgcagkggctcgctcctgtaatcccagctcaggctggtggatcacttgagcccaggagtttgagaccagcctgggcaacatggtgagaccccgtctctacaaaaaaaattttatataaaattagatgggcattgtggtgcatgcctgtgatctctgctgcttaggaggctgaagtgggaggatcgcttgagtctggaagcttgagactgcagcaagctgtgatcgtgacactgcactccagcctgggcaacaaagtaagatcctgtctcaaaagaaaaaaaaaaaaaggtatgtttttccattttaattaaatcatttatgtttttcggtagagatattaaatgccattgattaaatagtccatctttttcattttttactatttattaagcacttactatggcattactttgaaatgccatgtttatctcatactaagtaggcctttctatggatttctatggctatgtttagtcctatacaaactactttctttattgtacattttaatatcttggtaacttatttaaccccactcagtatcaatttattgattttcaatacagtaatatttcacaaagttatttcaaggattaaagataacattattaaaagc

SEQ ID NO: 56608 - DNA, 715 bp, Homo sapiens
aagcaatctgaaggaaattcagtaccatacaatttactgactgaaatacatcatattgctcatactaagaataagagtggagaagaatcatttttttcctgctaaaatgatagaggcagaagagcaacagccttgcaagacagacttctattctgaattgccaaaagtggtgagaattcaactacagaaatcttgagtggttgctaattataatgactttgatgttgcttcttttcatcaaagtaaattttggctgggcgcagtggctcatgcctgaaattctggcgctttgggaggccaaggcgggtggattcacctgaggtcaggagtttgagactagactggccaacatggcaaaaccccatctctactaaaaatacaaaaattcgctgggcttggtggcatgcctgtagtcccagctactcaggaggcggaggcaggagaatcgcttgaacccaggaatcggaggttacagtgagctgagatcgcaccagtgtactccagcctgggtgacagagggagactccatctcaaaaaaagaaaaagtaaattttgtaggcaaaatttgtaaactttattatgtagctaaatctagtaagcagtttgcctattgcaaactaccaacattaagtacttggtaagatgctatgaatctrttggatatttgataagttttactggttgtatctcttaggaacttcatgcccacttgaat

SEQ ID NO: 56609 - DNA, 483 bp, Homo sapiens
tcctctctaatctgcttctctctagcctctgtgacagagctaggtcagtctcatgggtcgctgtgtctgtctttcaccaccaacaccacattttcaggccagagaaaggctcattaaattctgggactggtaacagtgagaagttgtaaacattcctaggagggaaacaagcaccttttctccctagttgwtgccaaaggtcatagctccctttaggacttttcctacaggattatatggtttctcccgtttcctcgggacttggtgggtataaatgagacgttttcctgcattttcccagagggcagcagacctggcttagagacactcagaaggaactgtgtgtgtgtgtgtgtgtgtgtgtgtgtgtgtgtgtgtgtgtgcacggagagaagtatgagtgagggaaatcctgctgaaagataatgggaaaggggaggagaaatgttctggagttcggtgtggagtctcagggctgtcctg

SEQ ID NO: 56610 - DNA, 952 bp, Homo sapiens
tacatgtactcaccaaaagatatgtacaaaagtgtccgtagcagcactatttaaaataggccaaaactggaaagtgcacaaatgcctataaacagtaaaatgaaaatataaaatatggcatattcccaaaatacggtacctaaataaagcaatgagaatgaattatcactacatacgatgacatgggtgaattttacaacttaatgttgagggggaaacattgagaaaccaaagaaaacatagattatgatttcatagttacaaagttcaaaataggctaaagtaatcagtggtgtaataaatcaggatgaacctagttcttcaataaatgattattcccatctcccagcytccaaaatctcaggccatagaaaagtggttgagataaaatgccaaaccctgaaactccagtttaggaaaaatgtaagcaggtgtgcagcggcgcaaggggaggaataaagaagaattcacaaatattatacctgagcaaagagaaattctgttcaagattcacacactaaatgtgaactagattaatcacagtgagaatcacataaacagacaaaaaagtataaataacagaaacaaagaaatgaagggaatgagagagggagagagaaaagcagaaaaaagaaggggatgaggaaggaaagaaagaagtagaaaggaagggaagctgggcagagtggcatgggcctgtagttccagctactcagggaagctgaggcaagaggatcagttgagcccaggaattaggaatttgagtccagcctggacaacatagcaagaccctgtctcttaaaaaaagaaaaagaaagggagatgaggaaaggaggaaggagaaaagataaggagggagggggagagaaagagaggggcagaaagagaaagggaagacaagagggaccagcagggagtggagaggaataaaaggtatcaagctccaagtcca

SEQ ID NO: 56611 - DNA, 952 bp, Homo sapiens
tacatgtactcaccaaaagatatgtacaaaagtgtccgtagcagcactatttaaaataggccaaaactggaaagtgcacaaatgcctataaacagtaaaatgaaaatataaaatatggcatattcccaaaatacggtacctaaataaagcaatgagaatgaattatcactacatacgatgacatgggtgaattttacaacttaatgttgagggggaaacattgagaaaccaaagaaaacatagattatgatttcatagttacaaagttcaaaataggctaaagtaatcagtggtgtaataaatcaggatgaacctagttcttcaataaatgattattcccatctcccagcttccaaaatctcaggccatagaaaagtggttgagataaaatgccaaaccctgaaactccagtttaggaaaaatgtaagcaggtgtgcagcggcgcaaggggaggaataaagaagaattcacaaatattatacctgagcaaagagaaattctgttcaagattcacacactaaatgtgaactagattaatcacagtgagaatcacataaacagacaaaaaagtataaataacagaaacaaagaaatgaagggaatgagagagggagagagaaaagcagaaaaaagaaggggatgaggaaggaaagaaagaagtagaaaggaagggaagctgggcagagtggcatgggcctgtagttccagctactcagggaagctgaggcaagaggatcagttgagcccaggaattaggaatttgagtccagcctggacaacatagcaagaccctgtctcttaaaaaargaaaaagaaagggagatgaggaaaggaggaaggagaaaagataaggagggagggggagagaaagagaggggcagaaagagaaagggaagacaagagggaccagcagggagtggagaggaataaaaggtatcaagctccaagtcca

SEQ ID NO: 56612 - DNA, 1342 bp, Homo sapiens
tcccaacaggtttttaattctctctaaagaacacatatcttacagagggatgtgaattgattttattcttatctacttgccaaggccttttgtggttgtattttctccgtgagggtttagaagagcccttgcatcatagtgtgaaatctcataaaggatgctttggggagtccttttcagtaagtagctgaggacttaatttcaggctaggaacctgcagagaagttaaaaaaaaaatatgggtttaggcatgatggaaattatgctatatcctggccttctttatacttgttggaagataatttccatggggaacttttcttcgaaaatgcatgtcttgctgggaatatctattatcaattggggctatgttgatttctgagtataattcttgagagaattctgctccatgtctgcaaatatggaaaaaatgatcctggccagaggaatgggaactgaaattatattgcgttttgaaaccaggtttatcttgggcttccttttatgcttgtcctttcctctgtcaacaaaatttttctataaagattagatagtaaatattttagtttttgcagactatacagtgtctgtttcaactactgaactctgccattgctgtatgaaagcagacatagacagtacattaacaaatgagtgtagcttgctccaacagaacttcatttaccaaaaaaaaaaaaaaaaaaaaaaaaaaaacaggtgggagctgcatttggcccatgggctatgattttctgacccctgatctacctgctttacagctagcaaagcctcggaatggttgacatcccaaggagagcagaagcaaaggtatgatgaggaagataaaaagtgaacagccttctccagctcttttttttcttcattgacaggattgttttcttccatctgtgcaaagttctacttccatagggcaggccttgtgctgacccatggagggcattggagaggaatcttacttggtttttcttgtaaattggtaagtcttctccctattcctattcaaggtctataagagtaactctcagaggagagacttgcagtcagacctcctattccccaatgttttgatggtggtggttctctgttgcttctcttaaaggtcaaaatcattagcctgaaggtcttacatttggggcaagaaagactaaaccacctgacttatttttgtcacaactcaaaggaaagatgggaakatgggtgagaaggactgatattccccaggcagaactttacaagaacagaaggaaatgttttcttcagatgataatccaaggatgtggtgagcccagacatgagggtagttgagaaagcatgccagaga

SEQ ID NO: 56613 - DNA, 1935 bp, Homo sapiens
actgattatcccagacctttctgccagctccctaatagcagaggagagaatacactgttggagtcaggggcaaccaaagcagctagtctgagtatagaatttctttgaattctcatctttaagaaccatgctcagctgggcacagtggttcatgactgtaatcctagcacttcgggaggccaaggtgggaggatagtaatggcctggtgtggtggctcatttccataatcccagcactttgggaggccaaggtargcagattgctggagtccaggagttcaagaccagcctgggcaacacagggagaccccccatctctacaaaaaaacaaaaaagtagccaggtgtgatggcacttgcctgtagtcccagctatttgcagagggctgaggcgggaggatcacttgagcctgggaggttgaggctgcaatgagctgtgattgtgccactgctctgtagcctcgaggacagcgtgaccctgtctaaaaaaaaatggatgatatatccacatgattcagaattgaagaggtacaaaacaataaccaataaactctttctccccactgtgtcctagccaccttgttttcttccctggaggcatccagaagccaattttgttagtttcaacttctggagatggcttatgaaaatataagtaaatgcatctatattcaaccccattttagaagaaatgatacctactatatcagctgctttctgtgcaccttgcgttttttctttttcacactttagcatgatgatttttctgtattggcacataaagagcttcttctttgttagttggtggttcttatggcagacaactgaatccaccctagatggttaagccaaaaagggattcggattttaggtaactcatggaatcctttggagggctggaggaacaggctagcatccgggtgcccagaaacaaagccccaagacacacgtagtactagcattaagtggaagccacctgtgctgctgccctccactgaacagcagatgctaggtatttgacttgactgcaactggctctacctccactcctggaccgggaaggcaacctagcagtgacacctgcaaaagtagaagctctgagcagagcctctttccttacatttctcacttctaaagcaaaatctggtgtggatgtatctgattagtggtgactaggtgacacatttgcatcttagcttcaatagagtctaggaattttattctcaacttttaaacttggaggtgggacttgtaataggtgaaatttttgcaaatagagaaataattttcaaagtatgatggacagtcacagatatggcaaatgtccactagagctgcttagaattccattgtatggatcaaccacaattgattaaactaatatcttagatggtagacctctaagtgttttctagttttctagtctgtgacttaggcaatactgtattaatgaccatatacatgtgtcattttgctaatgtaaaatggaatataaatttctagcagtggaattgctagatcaaaaggtaaattgtaattcttgtggatattgccaaatggtttctggatgctatactgattttttgcttccactagtgatgttcctgattttttttttttttttttttttttgcacagagtcttttccttttttagattccttctgagccagagtggcaggctgagtgttccctgctactggggtgagttttgggccttgggccaagaatgctgacaaatcagatctgggccataacctatgccaatatagactgtatttagcatctggactggatttggcttatagtttattgtagtccttctagccctaaattaaatggcatcttggggtatctaaaagataatgttgcttccaaaattgatttgcaatgtgggagtagcttacattcttggattgttatgtgttcacaaatgc

SEQ ID NO: 56614 - DNA, 1935 bp, Homo sapiens
actgattatcccagacctttctgccagctccctaatagcagaggagagaatacactgttggagtcaggggcaaccaaagcagctagtctgagtatagaatttctttgaattctcatctttaagaaccatgctcagctgggcacagtggttcatgactgtaatcctagcacttcgggaggccaaggtgggaggatagtaatggcctggtgtggtggctcatttccataatcccagcactttgggaggccaaggtaagcagattgctggagtccaggagttcaagaccagcctgggcaacacagggagacccccyatctctacaaaaaaacaaaaaagtagccaggtgtgatggcacttgcctgtagtcccagctatttgcagagggctgaggcgggaggatcacttgagcctgggaggttgaggctgcaatgagctgtgattgtgccactgctctgtagcctcgaggacagcgtgaccctgtctaaaaaaaaatggatgatatatccacatgattcagaattgaagaggtacaaaacaataaccaataaactctttctccccactgtgtcctagccaccttgttttcttccctggaggcatccagaagccaattttgttagtttcaacttctggagatggcttatgaaaatataagtaaatgcatctatattcaaccccattttagaagaaatgatacctactatatcagctgctttctgtgcaccttgcgttttttctttttcacactttagcatgatgatttttctgtattggcacataaagagcttcttctttgttagttggtggttcttatggcagacaactgaatccaccctagatggttaagccaaaaagggattcggattttaggtaactcatggaatcctttggagggctggaggaacaggctagcatccgggtgcccagaaacaaagccccaagacacacgtagtactagcattaagtggaagccacctgtgctgctgccctccactgaacagcagatgctaggtatttgacttgactgcaactggctctacctccactcctggaccgggaaggcaacctagcagtgacacctgcaaaagtagaagctctgagcagagcctctttccttacatttctcacttctaaagcaaaatctggtgtggatgtatctgattagtggtgactaggtgacacatttgcatcttagcttcaatagagtctaggaattttattctcaacttttaaacttggaggtgggacttgtaataggtgaaatttttgcaaatagagaaataattttcaaagtatgatggacagtcacagatatggcaaatgtccactagagctgcttagaattccattgtatggatcaaccacaattgattaaactaatatcttagatggtagacctctaagtgttttctagttttctagtctgtgacttaggcaatactgtattaatgaccatatacatgtgtcattttgctaatgtaaaatggaatataaatttctagcagtggaattgctagatcaaaaggtaaattgtaattcttgtggatattgccaaatggtttctggatgctatactgattttttgcttccactagtgatgttcctgattttttttttttttttttttttttgcacagagtcttttccttttttagattccttctgagccagagtggcaggctgagtgttccctgctactggggtgagttttgggccttgggccaagaatgctgacaaatcagatctgggccataacctatgccaatatagactgtatttagcatctggactggatttggcttatagtttattgtagtccttctagccctaaattaaatggcatcttggggtatctaaaagataatgttgcttccaaaattgatttgcaatgtgggagtagcttacattcttggattgttatgtgttcacaaatgc

SEQ ID NO: 56615 - DNA, 649 bp, Homo sapiens
tgtttctcaaagtatgttccacagaacattagttcttcaggatgttaatagaagttacatgagaataaggagatgaaaccaaataaatttgggaactgatgggctacgcaaaggcaagtgacttcctttcagaatttcagagtgtgtaatgttctgtgtgctcagtgaatctccaagrgggagatagaccaggcagtgtttcctaagcttatctgtagattcttcttccccctaggccaggggctgacaaattatggctcataggcctcatctatcccaccactttttttttgtaaataaagtttattggaacacagttgtgcccattcatcgtattgtctgtagctgctttagcacaacaggagagttgcagagtggctacagaggtagtctggccctcaaagcctaagatatttactatctgcccattacagaaaggtttgctaatccctgctctagacaattcatggaactggtgcttcctggtaccccctttcagagatgctactagaagaagatatacatgggttgttctagcactgctttatgataaatctgcctcattttattctgtttccatactgccatcattcctgcctcttgctttaaactactttatctctcaaccatttacccattatccaggatc

SEQ ID NO: 56616 - DNA, 1463 bp, Homo sapiens
atccgcctgccttggcctcccaaagtgctgggattacagacgtgaagccactgcgcccggctggtatagatatttaaaaaataagaaagttagtttctgggtcacgggaaactcatgtttatgttacctaacaaaggcctgaagtggaaatacttcatgttgttgagtaagctgagaggtataggctttatatatcagcccttatttttctgctaaaacatgattgtcaggaaataccyagaacagaaccctgactccattctcttcccattctgatccaccctacccagaaccttcagaatcatctatctcaaactccctctgagtatggcaaagactgtagaaggaactctactgcatatttcagcctagactcccagctgggcttcatactacctttcacagctgatccctctacctagtcaacttcttccagtcacattggttgcattcactcactgttgcacaaaagactgcagcctggatcaaatctttgttccgtatgctttcatcttgacttgccaatgggattgcaagatctttgagggaaaggatttatgtcttttaaaatttctttcttttcctctcaggacctcatgcgaagcatatggtaaatagttagtgactgctgcttaactcagtttatcctgaccaatacacagaacagcaccagccacaattaggtatttaataaggatattttggattgagacaaggatcctctcagagtcagacattgtcttggcatgcctttttttttttttaatttattgggtctctgtgactgtagtcagtgacttggtgtgtcttttgtaatgacaacattaataataaagccttcagatgacatggtgtaatggagttcaaaaggtctaagtctgaatgccagccctgccacttattaactatatgaccctgggcagggcactgtgaactacagtttccttgtaaaagaatgatgttcatgggggccttagagtggttgtgaggattaagttatatgccaaaagtaaattatctagcatagcaaatggctgtaataggtgttcgataaatgttttttttcttttgagactgaatttcattttgtcacccagcctggaatgcagtggtgcaatctcagctcactgcaacctccacctctcaggctcaagtgattctcctgcctcagcctctggagtagctgggattacaggtgcgtgccaccacgcccggctaattttgtatttttattagacatggagtttcgccatgtggccaggctggtctcgaactcctgacgccaggtcatccacccacctcggcctcccaaagtgctgggattacaggcgtgagccaccatgcccaacccaataagtgtttttattacagaaaatttaaaatctccgtcactttttactttattgattttcaatttgcttctttacctggatcagaaagataatttcaaattgtttggaggt

SEQ ID NO: 56617 - DNA, 1439 bp, Homo sapiens
caagaaataacatttcaaattaaaaatttgaagcctaaaatttgtgatttgattttgtttccatattaaactataagtttccaaaataaaagcaaccatgtaaaaatattatgagatcatttccttctcctgggaaggggagaactgaaaaagaggagagaggcaggcaaaggccttctggtccactttgtttctgacaacccctttttcctcctcccacttagcagagagagacgtggcagcctgagcgctggtcaagctcatccaaccaagagcacttaggaagtcggcacgaacacacctaagtagcagcctgttgctgagtgacagaaaagagaggctgagatggtcactccaaagaacaggaagcagccagttccctctgaactggtcctcagaggaatcagcttcctcacgcaacccagtttgccacgtcaaacttcctcacacagagcaccaagttaaagaaacctgactcagcttcaagcggcgacacggcagaaagccacttggtataagcaggcctaggatcaaaatctggggagccccaaccccagaacggccccctggctcactgtcacccagcaactctagccaaggtgcacttctaaccctggaacaagttcgtatttggccagatcagtttcactattcggatgtcccgaggcttcaagatatagttgccatttttaccatgaatatttctaacatttccttccttcaaaaaaggaaattaagttgataaggagatgagaaaaccgctggcaatgacactcgaatggtggccactgaggatcctaacaaggcagttcctgcatcccaaggcaaaaggtgggggcgggtaaaaaatgcccacgcccacctsctgctcccccatcccgccggccccactattaaactgcactagaaggctaaagaacaaagaatgagttctcctcccgccgccactgcctcaggtgagcacccggcctcccgccgcgtccccgggccgggcgccgcaacccgctccgctgtgcctgggcagggctgtcccgcatgaaggcgtccgcgggtgggaggctttacctgttcccgctcccgcaccccgcgggcttccgagcgctggcggctctgcgcctagtgccggcagccctcggtggccgggctcccgctgcggtcgcttctcccgccgcgcctcttccccggccggcgtccccttagcctggactcacgctcggagttgcagctgggctgggaactgccacgtcaaaccctttctcggctgcgcgcccccagcgccgggcttggaccagccgccgcgctcccgcctgcgcacgcgcacagccaccggccgccgcggggcggggccaccgggctgagcctgcgagcggccgagcgacctcccccttttcgctttttccctttttccggttttttgttttttggttttctttttcccg

SEQ ID NO: 56618 - DNA, 635 bp, Homo sapiens
aaagtttgagtaaagaagttagatttataaaaagatcaattgtgtttaaatccatgcacwgttaatgacgttttttaaaaaacatattgattacattttcgtatggtggggaactgcttcattattttaaaaagttataaggaaaagaaaataattaagcatttatttttcaaaagggccaggctcagtgtctcacacctgtaatccagcacttcggaaggctgaggtgggagaatagcttgaaactaggatttcaagaccagccttggcaacaaagcgagaccctgtctctacaaaaaatagaaaaaaaaaaaattagctgggtgtggtggcacacacctgtggtcctagctacttaggaggctgaggtgggaggaacacttggagttggaggctgtagtgagctatgatggtgccactacagtccagcctgggcaaactgtttcctaagaaaaataaaaataataaaataattaaaaaggagctgcattggaaaaggctgaattcaatagtaatttgctaaaataccattttaggcataaaaaaagatctagtaaggtacacactaaattggtagcattttgagagctcttctcttttttaaacaaagatacaaattataatttggagaaatt

SEQ ID NO: 56619 - DNA, 635 bp, Homo sapiens
aaagtttgagtaaagaagttagatttataaaaagatcaattgtgtttaaatccatgcactgttaatgacgttttttaaaaaacatattgattacattttcgtatggtggggaactgcttcattattttaaaaagttataaggaaaagaaaataattaagcatttatttttcaaaagggccaggctcagtgtctcacacytgtaatccagcacttcggaaggctgaggtgggagaatagcttgaaactaggatttcaagaccagccttggcaacaaagcgagaccctgtctctacaaaaaatagaaaaaaaaaaaattagctgggtgtggtggcacacacctgtggtcctagctacttaggaggctgaggtgggaggaacacttggagttggaggctgtagtgagctatgatggtgccactacagtccagcctgggcaaactgtttcctaagaaaaataaaaataataaaataattaaaaaggagctgcattggaaaaggctgaattcaatagtaatttgctaaaataccattttaggcataaaaaaagatctagtaaggtacacactaaattggtagcattttgagagctcttctcttttttaaacaaagatacaaattataatttggagaaatt

SEQ ID NO: 56620 - DNA, 635 bp, Homo sapiens
aaagtttgagtaaagaagttagatttataaaaagatcaattgtgtttaaatccatgcactgttaatgacgttttttaaaaaacatattgattacattttcgtatggtggggaactgcttcattattttaaaaagttataaggaaaagaaaataattaagcatttatttttcaaaagggccaggctcagtgtctcacacctgtaatccagcacttcggaaggctgaggtgggagaatarcttgaaactaggatttcaagaccagccttggcaacaaagcgagaccctgtctctacaaaaaatagaaaaaaaaaaaattagctgggtgtggtggcacacacctgtggtcctagctacttaggaggctgaggtgggaggaacacttggagttggaggctgtagtgagctatgatggtgccactacagtccagcctgggcaaactgtttcctaagaaaaataaaaataataaaataattaaaaaggagctgcattggaaaaggctgaattcaatagtaatttgctaaaataccattttaggcataaaaaaagatctagtaaggtacacactaaattggtagcattttgagagctcttctcttttttaaacaaagatacaaattataatttggagaaatt

SEQ ID NO: 56621 - DNA, 754 bp, Homo sapiens
cagaatacagattcctcacagcagctacaacccctaaccaaaatgaaagtcctaagccaatccyctttccctgatctctcaagtccgttttggaggcatctttgaaagcttactttattctcctcagaacccctcaactgcataagtaataaacctttttcccctcatacgatgtgtgtggtgtcatcggctttgacagcaaaatcacattttgagtcagtaaatgaaaggagattcaaattagcactttagttttttgaatatgcttaggtttaaaaaaaaacctttcagtttcatacttataatttgtgaaagcagtaataaaatttctaaccacaggaaaattgagtggaatgtaatctaagccccggtattgattaaggccgtaacagtgatcaggtggtgcattttagcaacattaatatggtgattctacactttgaggccttcatatccagtattattgaaattaccagttccatattgtgctattgtcgatttggctaacatattaaaaaagtcttacagttggtttgccttcatctgctaaagaacaaaatatacatacatataccacatgactcacagaatgcatcaacagccttgccactgcacactgtctttgtataagactttttttttttttcggtagatcctaagtggcagttttattaagctgacattttccttttttgaactgcgttactttggcaagtactaacataatcctttctacataacagtctcattttat

SEQ ID NO: 56622 - DNA, 927 bp, Homo sapiens
aaaatgaagctgtaacacgaccaccttgggcacatgttctcagaacctcctgagggctgtgtcatgggccatggtcactcatatttggctcagaataaatctcttaaaatattttacagagttcgactcttttcatcgatacaggtaaagtgaaactcttcttcttaacctcttcagtgcacctattctcgagaattttgttacaatggtgtactggaacttctctgctggaccccccaggctcccataaaggcattctgtttcattgatgtttgtcaaaattgatgcttctattggaagttatggtagaaaacttcttttccaccattttcctgatgtaatttcttagacatgttttaacatacttacccatatgtactctatttacacataatgrcaaataatattgtttaacatggttaatatctacatgtatggtattataattttgctctttgtatcatatttataaatgttattaaatatagatttttacagtccctgttctgcctttccataacaatagtttcagaacattcctttcctctctgtttcttaaaatagattaaatagcttcagaattatttgttcattgaaaaatttgtgagcattcacgtataaaatctttctgttgtcttacttttattttggcaaaggaggtaattgaaagttgaaatggtgaataaagataatgggaaattttaaaaatatatttcttaactgtttctatagtaattgcttgtatagatttttctgttattgttggtcaatgttagtattttatatattttgatatatccataaaatctattaatgtaaattgagaaaactattatattaattcctgtgttttacatgttgttgatgctttctgatgcatttttaaaatttcattccttgcattcatcagctctggaatttgtttca

SEQ ID NO: 56623 - DNA, 2639 bp, Homo sapiens
attttacacatgatagaagtaaggtaaaggaagcaataataacctccaggtcaaacagctgattaagtcttagaggcttaataaagtctaggccatctcactccagcatccatctgctcaaccattatgctgttctggctgttttacagaaatcacacccaaaaagctccattcacatttaattggccattcttaactaaagaacagactaagaaatgtggtctctgaatgggcacacttccacaaggattaaaagttagagtgttataccgaaagatggaggatggttattagatagctaatgtgtatatcctatgtctcttccacttgtaggtatagaaccttggggaaacttccacagcatagaagacaggaaaacatgcacatcatattgtttgcactaagaagtaaattgggactagtcagcatgcatcaataggatgtatgtattattattgttgtatagtcatggttaaaaaaatgagtgaagcagacatacgtatatcatcaggggaatcataaattaataatattgagaaacaaaataaaaattcacaataatatattcaatttgttataacttatttaaagtttatgaacataccaaacacggcaggtgcatatgccttaaaattggaaaagtctgcataacagttatacatatcaatgacagggtgcaagaaatgatgggaaaatgaacattctaagcaagaatttaacaatatttttcatgttttatttctttaaaatgatggcaacacctatgtcaaactcttagattgagttagatttgagtaggatgttcataaaatgtttatgttaatcactttaattttatatatttaaaaaaattgatgagaaagtataatccagtccatcaaaaaatgaaaataataataacatgcagggtgaacattttgattcagtttggttgctcacaactgagctccagtttacatttgtgaagttcctcttcacatgaatcctactgaagggcaaagaccatcgctctttaggtccactgaaaactctactctcttctttccagtttccctacagctagggcaaaattatgaggcctatgatagactttgactctggggatgatgattcaagagaaagaaagggttagaagctgtcttttccttattgcgaggatagtaacacaactggaaagtcgcatcctgaagcagaagtagagacagaaccaagctccagcctgctggcaggagcagctgtttcctctctaggctagttgtgaactgtagtttgagcctaattgtcaagccatctaacacattttcaaaacaacccagtatctatttaatctttttttctgtttacatatcagagttaacttttcttgggaagaaatgaagtggaaatatggttgctgcctaagaagtaataataggagatacaggaagcagtttgaaatggaataggtatgtaaaacactaatggagcagaaatacagtcgaaaataacatgcaaaaacaaacatagtaagcaactatagagaatgcattttggagctcatatatggacttttacaggtgtagtatataatgaagcaaagccaggattttgaaacatatgaggggactttaaaaagttcatggaaaaatggaactaaaagataaaagtaaaaaaaatacaaactatttctcaacataaggtccttcaagatcaatacacttttgcaaacgatgacaacagccatttatttaactgataaagagctaaaagtcctgggaattcaaccatgtcctgcagtcttctttacattattaactgaagaaaagtgggtgccctttacagatttttttaagattagggaacaaaaagaagtcagcaagagccaattcaggatggtaaggtgtatgcttaccactttatcattaaaactctcataaaattgctcttgtttgatgataggaatgagcagaatcatcatcctcaaggagaaggactctctgatgaagcttttccaggcatcattttctcaaaatgagttatctgtttgtaaactactgatttctttaggtggcagggggtggragggggcattgtcccataaacctttctctcctgtttttacacacgaagtcactattttattaatcctaattaggtatttttaattttgggtatccatcacatgaagcatttatcatttctttttgaatagaacatttcaaagcatcagtaatttcaccattctttcacccaagcttcaccataaatttgatgtttgttcctgcttcaattttagcagaatgtatgttactctgatatgggctgttttcaaactgatgtcttaaccttcttagaaccacaaactagatatttttcagacatgatataacttagtatgagtttgttttggttcaaaaaggttttgaaatccatgcagtttttttcgtaatattttcataacctttttcattaattttttgaagaccccttatatagtcttcaaatctttctaaagtcaagaggagacacacacactttacacacatagccaatacagtattgtaaacactatagctcttattcatgaatggcataattacaaattaaaatctgtataggatttacacaaatattttcaagtgcactatttattccctcca

SEQ ID NO: 56624 - DNA, 2639 bp, Homo sapiens
attttacacatgatagaagtaaggtaaaggaagcaataataacctccaggtcaaacagctgattaagtcttagaggcttaataaagtctaggccatctcactccagcatccatctgctcaaccattatgctgttctggctgttttacagaaatcacacccaaaaagctccattcacatttaattggccattcttaactaaagaacagactaagaaatgtggtctctgaatgggcacacttccacaaggattaaaagttagagtgttataccgaaagatggaggatggttattagatagctaatgtgtatatcctatgtctcttccacttgtaggtatagaaccttggggaaacttccacagcatagaagacaggaaaacatgcacatcatattgtttgcactaagaagtaaattgggactagtcagcatgcatcaataggatgtatgtattattattgttgtatagtcatggttaaaaaaatgagtgaagcagacatacgtatatcatcaggggaatcataaattaataatattgagaaacaaaataaaaattcacaataatatattcaatttgttataacttatttaaagtttatgaacataccaaacacggcaggtgcatatgccttaaaattggaaaagtctgcataacagttatacatatcaatgacagggtgcaagaaatgatgggaaaatgaacattctaagcaagaatttaacaatatttttcatgttttatttctttaaaatgatggcaacacctatgtcaaactcttagattgagttagatttgagtaggatgttcataaaatgtttatgttaatcactttaattttatatatttaaaaaaattgatgagaaagtataatccagtccatcaaaaaatgaaaataataataacatgcagggtgaacattttgattcagtttggttgctcacaactgagctccagtttacatttgtgaagttcctcttcacatgaatcctactgaagggcaaagaccatcgctctttaggtccactgaaaactctactctcttctttccagtttccctacagctagggcaaaattatgaggcctatgatagactttgactctggggatgatgattcaagagaaagaaagggttagaagctgtcttttccttattgcgaggatagtaacacaactggaaagtcgcatcctgaagcagaagtagagacagaaccaagctccagcctgctggcaggagcagctgtttcctctctaggctagttgtgaactgtagtttgagcctaattgtcaagccatctaacacattttcaaaacaacccagtatctatttaatctttttttctgtttacatatcagagttaacttttcttgggaagaaatgaagtggaaatatggttgctgcctaagaagtaataataggagatacaggaagcagtttgaaatggaataggtatgtaaaacactaatggagcagaaatacagtcgaaaataacatgcaaaaacaaacatagtaagcaactatagagaatgcattttggagctcatatatggacttttacaggtgtagtatataatgaagcaaagccaggattttgaaacatatgaggggactttaaaaagttcatggaaaaatggaactaaaagataaaagtaaaaaaaatacaaactatttctcaacataaggtccttcaagatcaatacacttttgcaaacgatgacaacagccatttatttaactgataaagagctaaaagtcctgggaattcaaccatgtcctgcagtcttctttacattattaactgaagaaaagtgggtgccctttacagatttttttaagattagggaacaaaaagaagtcagcaagagccaattcaggatggtaaggtgtatgcttaccactttatcattaaaactctcataaaattgctcttgtttgatgataggaatgagcagaatcatcatcctcaaggagaaggactctctgatgaagcttttccaggcatcattttctcaaaatgagttatctgtttgtaaactactgatttctttaggtggcagggggtgggagggggcattgtcccataaacctttctctcctgtttttacacacgaagtcactattttattaatcctaattaggtatttttaattttgggtatccatcacatgaagcatttatcatttctttttgaatagaacatttcaaagcatcagtaatttcaccattctttcacccaagcttcaccataaatttgatgtttgttcctgcttcaattttagcagaatgtatgttactctgatakgggctgttttcaaactgatgtcttaaccttcttagaaccacaaactagatatttttcagacatgatataacttagtatgagtttgttttggttcaaaaaggttttgaaatccatgcagtttttttcgtaatattttcataacctttttcattaattttttgaagaccccttatatagtcttcaaatctttctaaagtcaagaggagacacacacactttacacacatagccaatacagtattgtaaacactatagctcttattcatgaatggcataattacaaattaaaatctgtataggatttacacaaatattttcaagtgcactatttattccctcca

SEQ ID NO: 56625 - DNA, 1069 bp, Homo sapiens
ctgtttttctatgaggtgcttattcttttcttggttatatttgtagttgttctatatttgctgcatgtattttagttatataaagttacaaatatcttttcccatactgtaaactattttttattttcttcatgttggattgtgatgaaaccaagatcttaatattaatgtatttacattttctaatctttttatttgtgattagtttttattattattaaagaaataaatttgttacaaaagattatgagattataaaagtatacttctgtaatttcttctaaaagataaaattattgcttttacatttaagtctttaatccatcttcaaatttttcacaaagctgtcagttatgggcccaagattctattttcctcacagaaatagttatcccaccttcatttattgaacatttcctccttgatccagtaatgtaaaatgcacctgtattaaatagcaagtttccatatatgactgtatctctatctgggcatgtgtatcttcaccaatactatactcaatatttgtgtcttattaaaaggtgaagtacctctaattttaaaaaaactgattgtcttggctgcttttctttaattagatyttttattgaagaatagcaaataaataaaaatgcaccaaatgactatatataactaccaaatataaatgtcataatatggcatcataaatatcacaaaggggatataatcatctaaatatcatggatataaagaaatagaccataatcagtactggaaaaatcttctggtatttttccacatttttatgcccacagtattccacaaaggcaaccatcatcttggcttctaataacataaactaattttgctagacgttgaaatccaagttcattaaataatatgatgtttgttatggcatgacttcattcttcaaaataatacttgcagatttatccatattgttggtgtgtagcagcaggatattcctgaaatacacagctatattcattgaagacatttagctgtgtatttatccattctattgtttagatatttagcctgctttgagttgagggtatggcatata

SEQ ID NO: 56626 - DNA, 778 bp, Homo sapiens
ctaaacaatcacgaaacatgacttaatgcaatcatgtgcatggctaaatcataaaaattttagctttacttgggtgcatgtcacaggaggccacagacgctgtcatctcaattctctgaaactaacccagtccatctaaaaattatagtgctgctcccaggtatgagaagtcaactgaaagaacccaaataatattccaggacatggccaggcatggtggctcacgcctgtaatcccagcactgaaaggctgaggtgggtagatcatttgaggtcaggagttcaagaccagcctggccaatgtggtgaaaccccgtctctactaaaaatacaaacattagctgggcagtagtggggcacgcctgtaatgtcagctacttgggaggctgaggcagaggttgtggtgagccaagatcatgccactgcactccagtctgggcaacagactgagacctgtctcaaaaaaaaaaaaaaaaaaaaaagattccaggacacacttcaactgtttcactgtgaaaatggaatagtatgaaaaactctacgaatctggagtatatgatcactacagaatgaagcacacaaagtagagaaatttcctcatttttgactgatccttggcaaccttcccatacccttyttgtgccaagtgcataaagcccttataccaaaaaactcccacccatgcccccccccaccatataataatgttccatgctctaaattagctattttctcctcctaccaaaagatccaattctgcaaaaactgttaagtcacgg

SEQ ID NO: 56627 - DNA, 682 bp, Homo sapiens
aataactccaggtatctttgcctctttggttccttctttaacgttctatgtccacttttagtatactgataacatcagatatcactgataagttaaaaaaaattactatttccacaactggtcttttcaaatgtagtgaccttttctaacctctctcccaaaaaggaaaacacaattagctcagacattagtctaaactggctaaacaaggagattttaaagaaacagacattcagagctaaatatgaaatcttgaatttttttatttgtaaagatgccatttagtaaaactttagtctggatgagacctcaatatcaagtcttccaaaatttagaaaatataggtaagtgtccagttagttaaaatccttataacctattatctagatgttcaatatttccagaacataggctacaaaatagtaaatattttactcaaaggaaaatgcttgaaaagtcctaactttacatatttatttaataaacattaaatgaatacctactttggccagggtctacactaggaascaaaatgattcagttgctaatttgaagttactgttagtgggtaagactcttaaggtgttataagagcagaaagcaggtgtatctaatccagttttttgtttttaaagtgtggggatgctttttcgaagaaacaagacctgagcagagctttaaa

SEQ ID NO: 56628 - DNA, 682 bp, Homo sapiens
aataactccaggtatctttgcctctttggttccttctttaacgttctatgtccacttttagtatactgataacatcagatatcactgataagttaaaaaaaattactatttccacaactggtcttttcaaatgtagtgaccttttctaacctctctcccaaaaaggaaaacacaattagctcagacattagtctaaactggctaaacaaggagattttaaagaaacagacattcagagctaaatatgaaatcttgaatttttttatttgtaaagatgccatttagtaaaactttagtctggatgagacctcaatatcaagtcttccaaaatttagaaaatataggtaagtgtccagttagttaaaatccttataacctattatctagatgttcaatatttccagaacataggctacaaaatagtaaatattttactcaaaggaaaatgcttgaaaagtcctaactttacatatttatttaataaacattaaatgaatacctactttggccagggtctacactaggaagcamaatgattcagttgctaatttgaagttactgttagtgggtaagactcttaaggtgttataagagcagaaagcaggtgtatctaatccagttttttgtttttaaagtgtggggatgctttttcgaagaaacaagacctgagcagagctttaaa

SEQ ID NO: 56629 - DNA, 682 bp, Homo sapiens
aataactccaggtatctttgcctctttggttccttctttaacgttctatgtccacttttagtatactgataacatcagatatcactgataagttaaaaaaaattactatttccacaactggtcttttcaaatgtagtgaccttttctaacctctctcccaaaaaggaaaacacaattagctcagacattagtctaaactggctaaacaaggagattttaaagaaacagacattcagagctaaatatgaaatcttgaatttttttatttgtaaagatgccatttagtaaaactttagtctggatgagacctcaatatcaagtcttccaaaatttagaaaatataggtaagtgtccagttagttaaaatccttataacctattatctagatgttcaatatttccagaacataggctacaaaatagtaaatattttactcaaaggaaaatgcttgaaaagtcctaactttacatatttatttaataaacattaaatgaatacctactttggccagggtctacactaggaagcaaaatgattcagttrctaatttgaagttactgttagtgggtaagactcttaaggtgttataagagcagaaagcaggtgtatctaatccagttttttgtttttaaagtgtggggatgctttttcgaagaaacaagacctgagcagagctttaaa

SEQ ID NO: 56630 - DNA, 682 bp, Homo sapiens
aataactccaggtatctttgcctctttggttccttctttaacgttctatgtccacttttagtatactgataacatcagatatcactgataagttaaaaaaaattactatttccacaactggtcttttcaaatgtagtgaccttttctaacctctctcccaaaaaggaaaacacaattagctcagacattagtctaaactggctaaacaaggagattttaaagaaacagacattcagagctaaatatgaaatcttgaatttttttatttgtaaagatgccatttagtaaaactttagtctggatgagacctcaatatcaagtcttccaaaatttagaaaatataggtaagtgtccagttagttaaaatccttataacctattatctagatgttcaatatttccagaacataggctacaaaatagtaaatattttactcaaaggaaaatgcttgaaaagtcctaactttacatatttatttaataaacattaaatgaatacctactttggccagggtctacactaggaagcaaaatgattcagttgctaatttgaagttactgttagtgggtaagactcttaaggtgttataagagcagaaagcakgtgtatctaatccagttttttgtttttaaagtgtggggatgctttttcgaagaaacaagacctgagcagagctttaaa

SEQ ID NO: 56631 - DNA, 1726 bp, Homo sapiens
ctaaaatataaataatttgtaagttcaaaagcattagcctttatctggatttttgcatttaaactgcaagtgaagccctgagccagaagagacctggaaaggtggaattccatggcactcacgatgtgtcrctgtcacctttaccaccggtgaaccactgacctgtgtttcagagaccgccctccccctcttggggtgtgagtttggagggagtggtggagacttggctttgctgtgtttatcttgagccctgggccagccagatttctctttcatttacattatagctgtggtcgttttatttattgattttagccgggggtggggaatttggtaacgtcactgagtgttgtcttttggttctgttctaacttgtaaatgttatctagttctattctgttttccactttatgtaatgtagatccaggatctcaattatctgagccattaatcaggttgcaaaacctttctctttcccacgtgaaagcaaaaaggaagagtgggacttgtctacagatcgccaccacacctgttagttggatttttaggattgtctgcttctcacatacagttccctccctcactctccctttctttccccttcctttccctcccttctcctcactctcccctgggagagaggggatataaggtattactgagaaagacttcacatgcagggcagtaaccaaagactaccaactttttatctcacactttgtcttgatcactctcttccatttcctagtggtgatttctccatcactagcaagctggggatctgtgatttctagtgctcgtccctgctggcctgtggccccactcctgaggtcctttccaatagatgagcagttgatgcattccacacctggcaagagctggcattgaatatggtgatgatcctccgtattgtccaagaacactgtgagatggaaaaggctgaggatacctgcaagtagcaggctgtgtcaggatggattttgcaggctctagatggatctcaagatgtgtcaaaggctccaaaattggcgacagtggcctggggctgggtggagtgagtgatggctggcccaagacccaaacaaattactctggtatttcactattatctaaggaaaagataagtagtctatctttatgtttgggaccttaatctcataaatgtctgccataacaagcttatttatagctcattataaaaattagtgtacctggcttaaataaataagtggtacagaccttgacagacaccggaggattgctagaggtttgccaatcttgcagatgaaagcaaagatatgttcttaccagacttcccatgcaattttttgcactttctattccatttagatacaaaactctttgaagttaaaataaatagaaacaaaaagacaaaaacaaacaaaaaacctaaaaacatttctctggactgcagtaagcctcatgactctttaaaagacatgggaaatgcaaagagaagtttcttttagtcctactgagaggtgtactgtccatgtttatttgaaatttcccctttgtttattttcttctttagaagtagaacaactttttctagcactatgaagatgtggtgtcttcgacccattaagttaatttcatttcaagtggagatacaagttcttatgaagtttttacaaaacttctgttacaaaagcagaaatgggatggtttagctttcattttctttttggggtgcaatttaatt

SEQ ID NO: 56632 - DNA, 2821 bp, Homo sapiens
gtgtatatccaaacatcatattgtataccttaaatatatacctttaaaaaaaatccaatctgctaaagaaaaaaaatcaaactgatttcaaggtttgcaatgactcatgccaagagccacacatggaaaggaagagcagatggtttgtcccagaggtgtggtcgctgaaagcgccatgtagggaaaataggaggccccaggctgagaatgttatgtgtgattctaagagaatgaattcgatttttgaaaccaaaatcactttaggaagttttatgctcagcccagcgttgcttccatggctcaaaacttcctttgtggagaaactatagaccctaaagtaggttctgtcaaatgctaagccatggccagcctgtgaatggtgctgaaatttgtggtataaaataaaatcattttgagctgaacctagtgataaaagtaggtgaacaacctgggcaataacattttggggcaaaagaaatgaaagaagtatgaagtactaaacagattttcttttgtggttaatatactcattctgataatattttccacaaagggacagaggtcaactttcagaagatatccagtagctcctaaaattgctctacgtatttggatgctgcatctctggtgtgcttccttaaaagggaaataacagtgtgacatttaatgagtaataaaactatcctaatattccatttcctcataaagatgtagtgttaataataatactgactcctaaggttgtcatgaagattaaatgacagaatgtatgtgaagcactaagcgcagtgcctgggatatattaagtgcttaataaataaatattaactaattaatatgttggtgttcagcatcttccattttcaattcactctgctgggagcatttaaaaattaycttatttaacatgctcataaccatcccaaaagagattataatctgccttttgcaaatgaaaaaccccagtcttggagacgttgaaaatcttcccagtatcaggagtaagtggtgagcaggaattcagccctacagaggctccatgtccaatgctctttctattctttctcatgcattgtttttgagctatgtccagcgtagatccatgcaactctgtaggtgcggatggacaaggtgtttctctctcacatgacagaggaggggttcccctcacctaccaaactggggaactaaacttgaacctacatctactgctttccagtcaagagttctttctaaagtgatgcgcacactctctcggagctgagaatgttatgtgtgattctgagagaataaatcagatttctgaaaccaaaatcactttaggaagttttttgctcagcccagccttgcttccattgctcagaacttcctttgcggagaaactgtagaccctaaagttctgtcaaatgctaagccatggccagtatggccagaccaagtcaacaaagttcattgctggatttccaacctgaaagtcataatttgcaatcctcacttatttcctgagatgtagttccaaaacattcatgcaataacaggagatgagcctggaaattttatttactgggaaatctttatgatgagcagcaaatcatttggcaagatgtcttatcgtcaggatccattgtaaagcatttatggaaaatgaatttctctttagaaaagatctgccagtatcatatgcatgctctggctacaactttccacttcagatttctattcttctatatttatttagagtctcttctgctcagaaggcaatgatctttgcttgatgatgaactgtgtgaaatcctccccaagaagtagtcttcgatggggtcacttctgctctgttaggaggcacttcaccatgtctctatacttagacatgtgtctatacttagacaatgttacctgggtaactcctggtaacaggtcatttgcaatccacagattatgacatctctatcacccacaaaccattgtatatgattcttccattaccatagaggtgaaaaatttaaagtcactgctcatttttaagtccctatataacgatccctgtgtgtggatgtttctagtgtttagactgttggataaatggttttctactctatttacttttggagactggagttcatctggtgaaaatggccctcatggctacccttcaccttccagtggccgatgtgcctattgaattcacaatgacctagccctatgcgtattcttgtgattcttagagggacaagtgtcaaggtgcgtgtgtacactatgggagagtgccactgggtgttttccattaaacagtgggctctgtcgtacagtgctctcatgatgcactgttacctttcccaccacatctctcgccctgtttacctggaaggtacatgactttgttatcattagtttctatagttaagaattgagacaaatgtggacttcagtttttttcttttagttgattaacgtttaaaacaactgggcttagatatttgagctgaaaaaggaagtcagtttggttagtcagtgcttggggtgactgcattcattagtaagcacatatttacataagtttcagtggaaacacatttgtttgtacaaatacggaacagaataggaatatgtttccagcattctcacttggcaactcagaaaaagactcatcctgcagacacacatacaaatcaaccctcttcctcccctcccccagcattcagcatggaaagctggccgccctggttctttacggctcatttctaaacgtcaaattcacctcttacacagaatcttggaggtcatctggttgaactgatcccaatcagaagtgtcttccctg

SEQ ID NO: 56633 - DNA, 2821 bp, Homo sapiens
gtgtatatccaaacatcatattgtataccttaaatatatacctttaaaaaaaatccaatctgctaaagaaaaaaaatcaaactgatttcaaggtttgcaatgactcatgccaagagccacacatggaaaggaagagcagatggtttgtcccagaggtgtggtcgctgaaagcgccatgtagggaaaataggaggccccaggctgagaatgttatgtgtgattctaagagaatgaattcgatttttgaaaccaaaatcactttaggaagttttatgctcagcccagcgttgcttccatggctcaaaacttcctttgtggagaaactatagaccctaaagtaggttctgtcaaatgctaagccatggccagcctgtgaatggtgctgaaatttgtggtataaaataaaatcattttgagctgaacctagtgataaaagtaggtgaacaacctgggcaataacattttggggcaaaagaaatgaaagaagtatgaagtactaaacagattttcttttgtggttaatatactcattctgataatattttccacaaagggacagaggtcaactttcagaagatatccagtagctcctaaaattgctctacgtatttggatgctgcatctctggtgtgcttccttaaaagggaaataacagtgtgacatttaatgagtaataaaactatcctaatattccatttcctcataaagatgtagtgttaataataatactgactcctaaggttgtcatgaagattaaatgacagaatgtatgtgaagcactaagcgcagtgcctgggatatattaagtgcttaataaataaatattaactaattaatatgttggtgttcagcatcttccattttcaattcactctgctgggagcatttaaaaattatcttatttaacatgctcataaccatcccaaaagagattataatctrccttttgcaaatgaaaaaccccagtcttggagacgttgaaaatcttcccagtatcaggagtaagtggtgagcaggaattcagccctacagaggctccatgtccaatgctctttctattctttctcatgcattgtttttgagctatgtccagcgtagatccatgcaactctgtaggtgcggatggacaaggtgtttctctctcacatgacagaggaggggttcccctcacctaccaaactggggaactaaacttgaacctacatctactgctttccagtcaagagttctttctaaagtgatgcgcacactctctcggagctgagaatgttatgtgtgattctgagagaataaatcagatttctgaaaccaaaatcactttaggaagttttttgctcagcccagccttgcttccattgctcagaacttcctttgcggagaaactgtagaccctaaagttctgtcaaatgctaagccatggccagtatggccagaccaagtcaacaaagttcattgctggatttccaacctgaaagtcataatttgcaatcctcacttatttcctgagatgtagttccaaaacattcatgcaataacaggagatgagcctggaaattttatttactgggaaatctttatgatgagcagcaaatcatttggcaagatgtcttatcgtcaggatccattgtaaagcatttatggaaaatgaatttctctttagaaaagatctgccagtatcatatgcatgctctggctacaactttccacttcagatttctattcttctatatttatttagagtctcttctgctcagaaggcaatgatctttgcttgatgatgaactgtgtgaaatcctccccaagaagtagtcttcgatggggtcacttctgctctgttaggaggcacttcaccatgtctctatacttagacatgtgtctatacttagacaatgttacctgggtaactcctggtaacaggtcatttgcaatccacagattatgacatctctatcacccacaaaccattgtatatgattcttccattaccatagaggtgaaaaatttaaagtcactgctcatttttaagtccctatataacgatccctgtgtgtggatgtttctagtgtttagactgttggataaatggttttctactctatttacttttggagactggagttcatctggtgaaaatggccctcatggctacccttcaccttccagtggccgatgtgcctattgaattcacaatgacctagccctatgcgtattcttgtgattcttagagggacaagtgtcaaggtgcgtgtgtacactatgggagagtgccactgggtgttttccattaaacagtgggctctgtcgtacagtgctctcatgatgcactgttacctttcccaccacatctctcgccctgtttacctggaaggtacatgactttgttatcattagtttctatagttaagaattgagacaaatgtggacttcagtttttttcttttagttgattaacgtttaaaacaactgggcttagatatttgagctgaaaaaggaagtcagtttggttagtcagtgcttggggtgactgcattcattagtaagcacatatttacataagtttcagtggaaacacatttgtttgtacaaatacggaacagaataggaatatgtttccagcattctcacttggcaactcagaaaaagactcatcctgcagacacacatacaaatcaaccctcttcctcccctcccccagcattcagcatggaaagctggccgccctggttctttacggctcatttctaaacgtcaaattcacctcttacacagaatcttggaggtcatctggttgaactgatcccaatcagaagtgtcttccctg

SEQ ID NO: 56634 - DNA, 1139 bp, Homo sapiens
agaggttttattaacacaggtgtactcctgatattctcaaactgtatctttcaatttcaattgtttggatgtatctttccatggtacaataaaaatgttttatttaaaaaagtacccttccatttagaatagctagagcctagtaacaaattatttttaaaatctgagggtgtcatattaatagccagcggtcttagaaagcactcatcttgtgtttgaagggatgagatataggctgcaaagaggaagtaatttactccatgtgaggatcattataacatgatttatctaacctgtatccctgtctagttaatttctacctgtagtttatacctcatggtattcacagagactcatgttaggacaggtttctagtattctggtcatgcactaaggaggactgatttayttctccacatttcccagctgtacctccacttattttaacttgagatcattgcttttcttctttccttttttaaagatttaactaagatggaataaaatattctagtcccaggatccatgtctcaatatcattggccctttgggttttgggataataaaggttaaataaaattatttgatttgtcaaattttagatttaattgtcacatgtactaacctaagtaaatgggcataaaagaaaaataatgtctagttaagcttagggaacagtattgaatatcacacagatttaaaagcaatataacaatacaaattttctcatatttccttccaattatttctcctcccaagagaacatgttaacttctagtacgtaaaccccctaaatgcatgtgataggagaaaaagaatatttatggcctactaaaggaaaggcaggataatttagcttagtgcagtctctttcttcagttgttctgggaagcccttcacaatgttctgttttgaaattccgggatcttatttatacagcatttacctatacatattggattatctgtgcttaaggatgcaaatttttttctcgtgatatcccagcaggtcaaatgtcttaaatagagcaggtaaagaaagaaaacaaaatcttatgtcgtttgaaggttgtcatctccaggtgatgttatctggataattgtgatcaatagatagagaaatacctaccagtcagttct

SEQ ID NO: 56635 - DNA, 693 bp, Homo sapiens
ttattgttatgctttccaaataagtggtttgttttctttcttctttcttcctttctttctttctttctttctttctttctttctttctttcttttctttctttctttctttcttccttccttccttccttcctctctccctccctctttctttctttctttgtttctttctttcattctttctttctccttccttccttcctccctctttctttctctccttccttcctttttctttctttctttcttctttcttctctttctttcttctttagttcaacttaagctttttcttcttcacttaaaaaatccaccctgagcttctcgacctgtatttgatacatggtccagtgctttcatattctagcctccaggtctgactgtggcaggtgtacttaagcatttagggatttctccatcaatgaggatctttcaaatgttcctgagagatagtttgagtaggtcaatagctaagatgaaaataggatttggaataactagagagttaaaattattttaaaaataaggaaatgttggccaaagactaatgtatgataatagttsttttattaaaagaactggttatttatgatagcagaaggcagcctaatttgtcttttagtaatgtaaaaaactacccattgagaagccatgttagttgatgaaatgctattcagttgtccttattcatgca

SEQ ID NO: 56636 - DNA, 664 bp, Homo sapiens
aaatataaataaatataaatatatctactccatcagagtggaggattttaacaggcctctctcaggaattgacagaatgaacataaactaattagtaaactagagaagacaaactggcctatttcatatatagaacattccacctactagtgaattactgctaaatacacactcacacatcaacaaaagtaaaataacgtttaggtgatcaaggaaccccacttctcattttcactgacactgtgtctatactgagagctctgcatccaaaatatgctctcatagatctcctatatgtgtattctaacttcatccgcagaggggatcttctattgaatttgttgtagtaagaacgaatcaatccttatataggattggtaagtattgtacaaatctctcaacaataaattctcttacatatttgataatattcactccctgaatatcctggaactgccatcagactttattgcccttcatcttgagcacacttrttacctgattttccagtgttttagatacatgggaacagtaattatgcggacaggtatatgggtgataattcacaaaatggcactaaaaactgtgcccaaaaattataaattaattttaggtttaaattctgtatttttaagatgttaacaagaaaactaatgtttatgca

SEQ ID NO: 56637 - DNA, 586 bp, Homo sapiens
tgaccaaaaaagattwtaacattaagaaaagaataggctgataatacattcaccaattcatattttccctctgtttcctctttgtttattgaactctcacaatgaaaaggaagatgttttttcagaaccaattcgatgctttctttacattcgtgtatctatcatttattaaagtaatgaagaaaatgttttaaatgttataatacgttcaatcaacattaacagtctattctgatataatttattacattgcaggtttgttttatttctcagtaaaagagatcacataaacttttgaatcctataagctgttaattattttttcttttggataaaggaaattttacagcactgacataggttgtaccttcactgttaaagaagttacattttatctccccatgactttatcttttatttttttattattattaaagttgggctgtttttctttttctttttatgagttggcagtaattcatatttgcaaaacttttatactatctcagtagaattttcacatttttttgttttcagcttcaaatttggattctgtcagtcaactaaatgagaaaactctataaac

SEQ ID NO: 56638 - DNA, 1064 bp, Homo sapiens
tgcatgtgcaggtgtaatgtcacttgcaaagactcaggccaatgtattgatttcgtagaaatactggttaattttctttggcaacacacctttaagacgggtagaaattaacacttagatagtgcttgctatgtgctaggctctgtgctacacactttctacattaagtcatgcaatcatcacagcaactctagaggtagatattaattataatccccactttccagatgaggaaactgaggcacagatgtaacctaacgtgccaaagtggttcgtaagtggtagagtcagaatccaaatctgagcaatctggctccagggttatgcttctaaccagcagcctgtattttgtgtcacttaagatttgctccttggtgtattatatgcacttttctctgctggccacatgccattaattttttgttggttctgaatacatagtaattacagtaaacaatttacattcataaattatataaattaagttaatttccataacaactgtgtaaattttaatgtctccattttgcaagctgaggctaagtcatggtcctagctcagagagctaatacttggccaaggygggagttgatattagagagcaattaaggtggagtgcctgttcttctgcattgcattctgtgctgacttgggaagatgaggcagactgttattttctctccaaattggttctctctttcctccatatcatggaatttttggtgaatacaaggctacgttgtttggatttcatttcccagatgctcctgaagctaggtttggccagatgacaaggctctaaaggaataagaaaagtctgcaacttttaccaaaaattttgcttaccctggactcctttctgtgaactaaagcagaactgatttggcctaggctcgctaaattgtgacaccaattttcttctgatcaagaagtcacagtctataatcaactgctctcttctcccccatctgaagtagtctaatgataggaatgtttcctacattctgacaaagatttttcagaaaattatagcagctttacatctacgataataccaactggtt

SEQ ID NO: 56639 - DNA, 1083 bp, Homo sapiens
ggctgcaaatttggttttactatgttacatttaaaatgcacatgtatatcttggtatggtttgtttgaaggacataaaaagtgttttaagaaatttcaggccgggtgtggtggttcacgcctgtaatctcagcactttgggaggccaaggcggacggatcacgaggtcaggagatcaataccatcctagctaacacggtgaaaccccgcctctactaaaaatacaaaaaaaaaawaaaaaattagccaggcatggtggcgggtgcctgtagtcccagttactcgggaggctgaggcgggagaatggcgtgaacccgggaggtggagcttgcagtcagcaagatcctgccactgcactccagcctgggcaacagagcgaggctgtctcaaaaaaaacaaaaaaacaaaacaaaacaaaaaacaagaaatttctagaaaatgaggtaagtattaataatgatatatctgtgaatgcaatatgtacacatacacaaacatattcatctagagtataccaaaatgtatctatttttatattatatgtgcctatatgtattataagcatgtatacactatatatacatatgtatgtatatgtgtgtatggatatgtgtgtttgtgtatctcctgaaagactaaaagagctttcgtaagagactaaaaagaatataaaaatatactccctgccaaaagaatattttgaaaataaaattatcatgctaggacaattattctaaatattttgattagataattatccactatttctttcattttttttagcgtgaatcaaagtataaatacagatcatttagcacatagctaataacagagaatgtgatcatttctattctatagtacatgcagttttgtacaaaaagctcttgatttcacattgcttaattgtttttatcttccaccatagggttcttaatccactttttgttgattttggttttaaattattacttggtagagtttaccacctatccaaactccctgtgggaaaagcctgtattttatggctcttctatatttagctaattttttaaatttagatctctttcaaatttgtctttatgca

SEQ ID NO: 56640 - DNA, 1586 bp, Homo sapiens
cttatttgaactgttttcaatgacaatttaaagttccaaacatttgcaatgctatttttgtctgcttggtttaagtggttctgactgtggctctcactacttagtcccaattggtcctatttgtccttaggggtcagactgggttatgccacagggtatctctcaatgggcaagggaatctcagagctataaggatgaagaggcttccaaggctgaacatgtgctggctgtatctgcttcggctgtgttggacagagactgcttgctgagatgggtacttttttggcagcccccctcaccactactgcctggagtctatcgatttcaaaattttatttaattgcctagtatttcagttaatcatataaagtaacaattttcatgacatattagcgattatctatgggaacgttttattttgtctagatttttaattggggtctttaattcaraagtttcgacactgctatatcaattaatttgcctacaatttaaaatatttaaactgctctcaagaaaaaactctcaaatcctagagctaattaatggtctttcagttatacagctattaaagatgaagtttttttttttctatgaacctgacttgtgattggacacactgatagcataagcttcacgtggaaaaacaaggtagacacaatagcctggtaggaccacatatccatttatatccaagtattgtacataatgcagtctggaggggaagagtcattttgtttggctcaggaaaacgtgggcctgaatattgactgtccaatcttctaattatataaacttcattaatttatggaatctcttaaagtatccaatatgcaacagaagttgtagaataatttaattatgaaaaatgaatacaactgaatggggtatttatcaacagtttttgtttattagtttgagggcacaactcaacttccaaaactaagataaaccagtggcaggaaaatcatagcactacttgttaaaggcaataaaatcagaattcagggcttggaaggaagcatgaaaggttctatgcaagaaccacagaaactgtgagaacccaatcagtggacagtctccccaaaatatgagactcaaagctaaattatgcatgcaaaaaggagatctctgtctttcttcttagtttaaaaaataataaaagcaagtagataccaaaagagagttcactcatgaaagtgagagcttcagggagcttgtctgtcagtttgttgcttcatttaactgactgcattctcaaccagtcacagctcaggtagcaaaaatgtgatgctgagtagctttgaaatgtcaaagtacagattataagggaatgaatgagatactctgaaagtaaaggaacaacctcagaaaattggaaaccaaaagaaggcttactctccatctctgcttagatatttaactgagcaccaattatttgaagcccaagggaaacatataaggaccaagctaaaaaattccactattagaggtcatcatactagagtagagataattagctgctacacaccacagggagacacaatttcaaactgaagccatgcaagttattaatctactagaat

SEQ ID NO: 56641 - DNA, 1586 bp, Homo sapiens
cttatttgaactgttttcaatgacaatttaaagttccaaacatttgcaatgctatttttgtctgcttggtttaagtggttctgactgtggctctcactacttagtcccaattggtcctatttgtccttaggggtcagactgggttatgccacagggtatctctcaatgggcaagggaatctcagagctataaggatgaagaggcttccaaggctgaacatgtgctggctgtatctgcttcggctgtgttggacagagactgcttgctgagatgggtacttttttggcagcccccctcaccactactgcctggagtctatcgatttcaaaattttatttaattgcctagtatttcagttaatcatataaagtaacaattttcatgacatattagcgattatctatgggaacgttttattttgtctagatttttaattggggtctttaattcaaaagtttcgacactgctatatcaattaatttgcctacaatttaaaatatttaaactgctctcaagaaaaaactctcaaatcctagagctaattaatggtctttcagttatacagctattaaagatgaagtttttttttttctatgaacctgacttgtgattggacacactgatagcataagcttcacgtggaaaaacaaggtagacacaatagcctggtaggaccacatatccatttatatccaagtattgtacataatgcagtctggaggggaagagtcattttgtttggctcaggaaaacgtgggcctgaatattgactgtccaaycttctaattatataaacttcattaatttatggaatctcttaaagtatccaatatgcaacagaagttgtagaataatttaattatgaaaaatgaatacaactgaatggggtatttatcaacagtttttgtttattagtttgagggcacaactcaacttccaaaactaagataaaccagtggcaggaaaatcatagcactacttgttaaaggcaataaaatcagaattcagggcttggaaggaagcatgaaaggttctatgcaagaaccacagaaactgtgagaacccaatcagtggacagtctccccaaaatatgagactcaaagctaaattatgcatgcaaaaaggagatctctgtctttcttcttagtttaaaaaataataaaagcaagtagataccaaaagagagttcactcatgaaagtgagagcttcagggagcttgtctgtcagtttgttgcttcatttaactgactgcattctcaaccagtcacagctcaggtagcaaaaatgtgatgctgagtagctttgaaatgtcaaagtacagattataagggaatgaatgagatactctgaaagtaaaggaacaacctcagaaaattggaaaccaaaagaaggcttactctccatctctgcttagatatttaactgagcaccaattatttgaagcccaagggaaacatataaggaccaagctaaaaaattccactattagaggtcatcatactagagtagagataattagctgctacacaccacagggagacacaatttcaaactgaagccatgcaagttattaatctactagaat

SEQ ID NO: 56642 - DNA, 1586 bp, Homo sapiens
cttatttgaactgttttcaatgacaatttaaagttccaaacatttgcaatgctatttttgtctgcttggtttaagtggttctgactgtggctctcactacttagtcccaattggtcctatttgtccttaggggtcagactgggttatgccacagggtatctctcaatgggcaagggaatctcagagctataaggatgaagaggcttccaaggctgaacatgtgctggctgtatctgcttcggctgtgttggacagagactgcttgctgagatgggtacttttttggcagcccccctcaccactactgcctggagtctatcgatttcaaaattttatttaattgcctagtatttcagttaatcatataaagtaacaattttcatgacatattagcgattatctatgggaacgttttattttgtctagatttttaattggggtctttaattcaaaagtttcgacactgctatatcaattaatttgcctacaatttaaaatatttaaactgctctcaagaaaaaactctcaaatcctagagctaattaatggtctttcagttatacagctattaaagatgaagtttttttttttctatgaacctgacttgtgattggacacactgatagcataagcttcacgtggaaaaacaaggtagacacaatagcctggtaggaccacatatccatttatatccaagtattgtacataatgcagtctggaggggaagagtcattttgtttggctcaggaaaacgtgggcctgaatattgactgtccaatcttctaattatataaacttcattaatttatrgaatctcttaaagtatccaatatgcaacagaagttgtagaataatttaattatgaaaaatgaatacaactgaatggggtatttatcaacagtttttgtttattagtttgagggcacaactcaacttccaaaactaagataaaccagtggcaggaaaatcatagcactacttgttaaaggcaataaaatcagaattcagggcttggaaggaagcatgaaaggttctatgcaagaaccacagaaactgtgagaacccaatcagtggacagtctccccaaaatatgagactcaaagctaaattatgcatgcaaaaaggagatctctgtctttcttcttagtttaaaaaataataaaagcaagtagataccaaaagagagttcactcatgaaagtgagagcttcagggagcttgtctgtcagtttgttgcttcatttaactgactgcattctcaaccagtcacagctcaggtagcaaaaatgtgatgctgagtagctttgaaatgtcaaagtacagattataagggaatgaatgagatactctgaaagtaaaggaacaacctcagaaaattggaaaccaaaagaaggcttactctccatctctgcttagatatttaactgagcaccaattatttgaagcccaagggaaacatataaggaccaagctaaaaaattccactattagaggtcatcatactagagtagagataattagctgctacacaccacagggagacacaatttcaaactgaagccatgcaagttattaatctactagaat

SEQ ID NO: 56643 - DNA, 1205 bp, Homo sapiens
tgaatagagtgagggattttcctaataagataacaaacatactttttctggcctccacattggtaactgagacctgggtaataactaagaggatatcttttctctattataaagtttgatgaactagaaatgaaagagaaaaccagaagaatgtttatttccctgtaaaatgaacactatattgtttattgccatttcttatcattcgatttttctatacctaaaaactgtgtaatggtaggtaagagtaaaaaaaattatagaaaaatagaagatagcattatctaaaaatctaattcttatatataaattgtcatcttaggaaaaaattaacataaaattattttgcaatattttacataactaaaaaaggtaaggctgaattctgctggtgaaagtaaagtggaattttattacagaactaatggacaattctagggtagaatttttccttttttctttggcagtttctttagttttgctgaatcagctaatttgtgacctaaatgcttcctcctctaggccttttctttgtgtagcatgtagaatgcccataagcttgtgtcacatgtratactttaatgcaattactaactttaatgacctcataattggaaccactgtgattcttaatatgactatggtgaggtgagcttgtattgactttcctatagacatttatgtagactgaaactttgtggtgattcaactgcactctgagattccaacaacacatctatggccataccaccctgaacccgtccaatctcatctgaaattcaaacaacacgtttccattttaattacttaactgatcgcttatgtacttaaaacatgaaattctatgctactgaaaagttagctttttttggaaattctcaacatttgtatgccatatgctttcaaaaaataaaatattcaatatttaataaaataatcccaaactgaaactcatccattgcagctggagttgtttctttatttagaatggtttactaaactttagttgagggggagataattcaggaagaagccaagcttctcccagtaagactgtctttctcatcatgctgaaggtaattttataacactctattaatgaaaagatctaagcaagattaagaggcctctccaggtccctcccacagcccagcatgcactaaagtactttaaaggaactgtttgcattggaattctctcatgca

SEQ ID NO: 56644 - DNA, 1020 bp, Homo sapiens
ttttttaggtagaaataaaatcaccccagatgaaaacattgaaataaagrgagaaatcaaaagtaatgactaaatacgtgagagtatgcaaaatttcaccttgatttctattttacctgatatgaataattctttgtgtgctttgttattgtttgtctctgataagtactttttcttatctttcattacaatattttgtgtatgtttaggtgtatctcttgtaggtagcatatgattggatttgaactttggttgtgtttgctattgataatatctcgttaactgccacatatgatccaggactctctgtcatttcaaatagttttttcactctatattttttgatattaatgatataattaattagggtttatttattctatttttaattatttaatttttttattctaggagtttgagatatgtgtgtgtgcatgtgtgtatgtgtgtgtatattatatgcacataatttcttctgatgatcatccttaaatatttaacacatttatttaaacatgttttattactatttgagtttattatatcactagctacatacatcttggaaacagcttccaatttcctctttctcttgtcacaacacttccatgtcgataatatctagtatttctttttcatattgtttcaattgtttaatattatttgccaacaagtgtttggatttaactgtaagttttactggactctttgtgtactgataattatctttattttctttctctgattcattgtttttcattttcctagggtacattttgtaacatttgttttagtgactcatgcttgcacacccactttctgtgttgagaaacctatttaagtatacctagggatgccagccctgcttataggataacgtttacagtgatttaaaggaaaggcataagtgctcctgggttgagtgcaataatcttgaagttgtagaaatctcctactcttttaaaatgtcgttagctactgggtgtacaccttttcatttctagcttaaatgcttacata

SEQ ID NO: 56645 - DNA, 1020 bp, Homo sapiens
ttttttaggtagaaataaaatcaccccagatgaaaacattgaaataaagagagaaatcaaaagtaatgactaaatacgtgagagtatgcaaaatttcaccttgatttctattttacctgatatgaataattctttgtgtgctttgttattgtttgtctctgataagtactttttcttatctttcattacaatattttgtgtatgtttaggtgtatctcttgtaggtagcatatgattggatttgaactttggttgtgtttgctattgataatatctcsttaactgccacatatgatccaggactctctgtcatttcaaatagttttttcactctatattttttgatattaatgatataattaattagggtttatttattctatttttaattatttaatttttttattctaggagtttgagatatgtgtgtgtgcatgtgtgtatgtgtgtgtatattatatgcacataatttcttctgatgatcatccttaaatatttaacacatttatttaaacatgttttattactatttgagtttattatatcactagctacatacatcttggaaacagcttccaatttcctctttctcttgtcacaacacttccatgtcgataatatctagtatttctttttcatattgtttcaattgtttaatattatttgccaacaagtgtttggatttaactgtaagttttactggactctttgtgtactgataattatctttattttctttctctgattcattgtttttcattttcctagggtacattttgtaacatttgttttagtgactcatgcttgcacacccactttctgtgttgagaaacctatttaagtatacctagggatgccagccctgcttataggataacgtttacagtgatttaaaggaaaggcataagtgctcctgggttgagtgcaataatcttgaagttgtagaaatctcctactcttttaaaatgtcgttagctactgggtgtacaccttttcatttctagcttaaatgcttacata

SEQ ID NO: 56646 - DNA, 1020 bp, Homo sapiens
ttttttaggtagaaataaaatcaccccagatgaaaacattgaaataaagagagaaatcaaaagtaatgactaaatacgtgagagtatgcaaaatttcaccttgatttctattttacctgatatgaataattctttgtgtgctttgttattgtttgtctctgataagtactttttcttatctttcattacaatattttgtgtatgtttaggtgtatctcttgtaggtagcatatgattggatttgaactttggttgtgtttgctattgataatatctcgttaactgccacatatgatccaggactctctgtcatttcaaatagttttttcactctatattttttgatattaatgatataattaattagggtttatttattctatttttaattatttaatttttttattctaggagtttgagatatgtgtgtgtgcatgtgtgtatgtgtgtgtatattatatgcacataatttcttctgatgatcatccttaaatatttaacacatttatttaaacaygttttattactatttgagtttattatatcactagctacatacatcttggaaacagcttccaatttcctctttctcttgtcacaacacttccatgtcgataatatctagtatttctttttcatattgtttcaattgtttaatattatttgccaacaagtgtttggatttaactgtaagttttactggactctttgtgtactgataattatctttattttctttctctgattcattgtttttcattttcctagggtacattttgtaacatttgttttagtgactcatgcttgcacacccactttctgtgttgagaaacctatttaagtatacctagggatgccagccctgcttataggataacgtttacagtgatttaaaggaaaggcataagtgctcctgggttgagtgcaataatcttgaagttgtagaaatctcctactcttttaaaatgtcgttagctactgggtgtacaccttttcatttctagcttaaatgcttacata

SEQ ID NO: 56647 - DNA, 1020 bp, Homo sapiens
ttttttaggtagaaataaaatcaccccagatgaaaacattgaaataaagagagaaatcaaaagtaatgactaaatacgtgagagtatgcaaaatttcaccttgatttctattttacctgatatgaataattctttgtgtgctttgttattgtttgtctctgataagtactttttcttatctttcattacaatattttgtgtatgtttaggtgtatctcttgtaggtagcatatgattggatttgaactttggttgtgtttgctattgataatatctcgttaactgccacatatgatccaggactctctgtcatttcaaatagttttttcactctatattttttgatattaatgatataattaattagggtttatttattctatttttaattatttaatttttttattctaggagtttgagatatgtgtgtgtgcatgtgtgtatgtgtgtgtatattatatgcacataatttcttctgatgatcatccttaaatatttaacacatttatttaaacatgttttattactatttgagtttattatatcactagctacatacatcttggaaacagcttccaatttcctctttctcttgtcacaacacttccatgtcgataatatctagtatttctttttcatattgtttcaattgtttaatattatttgccaacaagtgtttggatttaactgtaagttttactggactctttgtgtactgataattatctttattttctttctctgattcattgtttttcattttcctagggtacattttgtaacatttgttttagtgactcatgcttgcacacccactttctgtgttgagaaacctatttaagtatacctrgggatgccagccctgcttataggataacgtttacagtgatttaaaggaaaggcataagtgctcctgggttgagtgcaataatcttgaagttgtagaaatctcctactcttttaaaatgtcgttagctactgggtgtacaccttttcatttctagcttaaatgcttacata

SEQ ID NO: 56648 - DNA, 1020 bp, Homo sapiens
ttttttaggtagaaataaaatcaccccagatgaaaacattgaaataaagagagaaatcaaaagtaatgactaaatacgtgagagtatgcaaaatttcaccttgatttctattttacctgatatgaataattctttgtgtgctttgttattgtttgtctctgataagtactttttcttatctttcattacaatattttgtgtatgtttaggtgtatctcttgtaggtagcatatgattggatttgaactttggttgtgtttgctattgataatatctcgttaactgccacatatgatccaggactctctgtcatttcaaatagttttttcactctatattttttgatattaatgatataattaattagggtttatttattctatttttaattatttaatttttttattctaggagtttgagatatgtgtgtgtgcatgtgtgtatgtgtgtgtatattatatgcacataatttcttctgatgatcatccttaaatatttaacacatttatttaaacatgttttattactatttgagtttattatatcactagctacatacatcttggaaacagcttccaatttcctctttctcttgtcacaacacttccatgtcgataatatctagtatttctttttcatattgtttcaattgtttaatattatttgccaacaagtgtttggatttaactgtaagttttactggactctttgtgtactgataattatctttattttctttctctgattcattgtttttcattttcctagggtacattttgtaacatttgttttagtgactcatgcttgcacacccactttctgtgttgagaaacctatttaagtatacctagggatgccagccctgcttataggataaygtttacagtgatttaaaggaaaggcataagtgctcctgggttgagtgcaataatcttgaagttgtagaaatctcctactcttttaaaatgtcgttagctactgggtgtacaccttttcatttctagcttaaatgcttacata

SEQ ID NO: 56649 - DNA, 1020 bp, Homo sapiens
ttttttaggtagaaataaaatcaccccagatgaaaacattgaaataaagagagaaatcaaaagtaatgactaaatacgtgagagtatgcaaaatttcaccttgatttctattttacctgatatgaataattctttgtgtgctttgttattgtttgtctctgataagtactttttcttatctttcattacaatattttgtgtatgtttaggtgtatctcttgtaggtagcatatgattggatttgaactttggttgtgtttgctattgataatatctcgttaactgccacatatgatccaggactctctgtcatttcaaatagttttttcactctatattttttgatattaatgatataattaattagggtttatttattctatttttaattatttaatttttttattctaggagtttgagatatgtgtgtgtgcatgtgtgtatgtgtgtgtatattatatgcacataatttcttctgatgatcatccttaaatatttaacacatttatttaaacatgttttattactatttgagtttattatatcactagctacatacatcttggaaacagcttccaatttcctctttctcttgtcacaacacttccatgtcgataatatctagtatttctttttcatattgtttcaattgtttaatattatttgccaacaagtgtttggatttaactgtaagttttactggactctttgtgtactgataattatctttattttctttctctgattcattgtttttcattttcctagggtacattttgtaacatttgttttagtgactcatgcttgcacacccactttctgtgttgagaaacctatttaagtatacctagggatgccagccctgcttataggataacgtttacagtgatttmaaggaaaggcataagtgctcctgggttgagtgcaataatcttgaagttgtagaaatctcctactcttttaaaatgtcgttagctactgggtgtacaccttttcatttctagcttaaatgcttacata

SEQ ID NO: 56650 - DNA, 723 bp, Homo sapiens
tggtgggcaggatggttaggaacacaggtttttgagtcagacagacctaatttcacatccagcctctgctacctactggctgtgattttgcccattccttaacctcccaaagctctggtttccttaactgtagagtggggtaataaatatacttacttctaaagcattaggagagttaaacaagataaagcaagaaaagtgatctgcatagtgggcattcatgacagtaattaataatcacaggaatgacaataaacatttattraggactgtgccaggaactggattaggtgctgagaatacagagatgagaaagatgtcgtctcattgtagagaagactgtcataaaagcaggtgctgaggcagaggtatgcacggggaatatgaagcacagctctacattacaattcttcctcataatgcaccaaaatgtctttccctgactctctacccacagacctgagttcagccccccagagcatctcaaatcactccaatccctcttccacatgacagcctttcagcctcttgaagaccgcaaatcacgcctctccccaagtccccccttttctaggctaaacagtcccagttccactcgaaaaataataagcctaccttatctctctacatgactttctccaaggaacaaagctattttaccggccccagctcatccatcttctcagcaccatgagcccacaaagaaaggaagatttacctgcc

SEQ ID NO: 56651 - DNA, 723 bp, Homo sapiens
tggtgggcaggatggttaggaacacaggtttttgagtcagacagacctaatttcacatccagcctctgctacctactggctgtgattttgcccattccttaacctcccaaagctctggtttccttaactgtagagtggggtaataaatatacttacttctaaagcattaggagagttaaacaagataaagcaagaaaagtgatctgcatagtgggcattcatgacagtaattaataatcacaggaatgacaataaacatttattgaggactgtgccaggaactggattaggtgctgagaatacagagatgagaaagatgtcgtctcattgtagagaagactgtcataaaagcaggtgctraggcagaggtatgcacggggaatatgaagcacagctctacattacaattcttcctcataatgcaccaaaatgtctttccctgactctctacccacagacctgagttcagccccccagagcatctcaaatcactccaatccctcttccacatgacagcctttcagcctcttgaagaccgcaaatcacgcctctccccaagtccccccttttctaggctaaacagtcccagttccactcgaaaaataataagcctaccttatctctctacatgactttctccaaggaacaaagctattttaccggccccagctcatccatcttctcagcaccatgagcccacaaagaaaggaagatttacctgcc

SEQ ID NO: 56652 - DNA, 929 bp, Homo sapiens
actgaagaagtattatccttaattatctgatgcactgaagaagtattatccttaattatctgaggtactgaagaagtattatccttaatattggtatgagggcttagatagcctaagtgacttgcccaaagctacacagtcagtaaatggcagagcacagcagaaatgctcactgctaacagatggacactgctatctgttcttgatactcagaccctcccatctctcccatccacaccagttacccaccatcatggaaacatgtggttccggatgtggacagctggctccccgggccccatacctcctgtgtgctcctggagccttctccatctgacacaccatgtcagatgtggtcctggaccttcctgctatcctcagctcactgtggactgtttctgagccaagggtattgtgtggttaccagggaaaatatgcccccgctctaggcctgccagcagctctagggcaataagccatctttctaaaatgagatttcctatttcagggactctgaaatctccagttctgccaaacagcaggtcttctcctcagcttaggatagctgggatcatggctgaggttgagctggtcacagaccatcccccactgaaccaatgataacaccctgccaagggcctcagcacgagcaccaggagcttctctgttcacatatttacatatcaagatagaaaatgaatatacgaaggagtctagcatgargaggacggggatgcgctgtgggagttagacacactttaggttcaaatcccagcgttgtcacttattaatttggggaccccgggcaagacatttaactcctctgtgagcctgcttcctttcttgtaaaatgcaaagaatgatcccatctacctcgaggagctgctatggggataaaggagagcaagccctcagtacggtgcctggca

SEQ ID NO: 56653 - DNA, 929 bp, Homo sapiens
actgaagaagtattatccttaattatctgatgcactgaagaagtattatccttaattatctgaggtactgaagaagtattatccttaatattggtatgagggcttagatagcctaagtgacttgcccaaagctacacagtcagtaaatggcagagcacagcagaaatgctcactgctaacagatggacactgctatctgttcttgatactcagaccctcccatctctcccatccacaccagttacccaccatcatggaaacatgtggttccggatgtggacagctggctccccgggccccatacctcctgtgtgctcctggagccttctccatctgacacaccatgtcagatgtggtcctggaccttcctgctatcctcagctcactgtggactgtttctgagccaagggtattgtgtggttaccagggaaaatatgcccccgctctaggcctgccagcagctctagggcaataagccatctttctaaaatgagatttcctatttcagggactctgaaatctccagttctgccaaacagcaggtcttctcctcagcttaggatagctgggatcatggctgaggttgagctggtcacagaccatcccccactgaaccaatgataacaccctgccaagggcctcagcacgagcaccaggagcttctctgttcacatatttacatatcaagatagaaaatgaatatacgaaggagtctagcatgaagaggacggggatgcgctgtgggagttagacacactttaggttcaaatcccagcgttgtcacttattaattkggggaccccgggcaagacatttaactcctctgtgagcctgcttcctttcttgtaaaatgcaaagaatgatcccatctacctcgaggagctgctatggggataaaggagagcaagccctcagtacggtgcctggca

SEQ ID NO: 56654 - DNA, 929 bp, Homo sapiens
actgaagaagtattatccttaattatctgatgcactgaagaagtattatccttaattatctgaggtactgaagaagtattatccttaatattggtatgagggcttagatagcctaagtgacttgcccaaagctacacagtcagtaaatggcagagcacagcagaaatgctcactgctaacagatggacactgctatctgttcttgatactcagaccctcccatctctcccatccacaccagttacccaccatcatggaaacatgtggttccggatgtggacagctggctccccgggccccatacctcctgtgtgctcctggagccttctccatctgacacaccatgtcagatgtggtcctggaccttcctgctatcctcagctcactgtggactgtttctgagccaagggtattgtgtggttaccagggaaaatatgcccccgctctaggcctgccagcagctctagggcaataagccatctttctaaaatgagatttcctatttcagggactctgaaatctccagttctgccaaacagcaggtcttctcctcagcttaggatagctgggatcatggctgaggttgagctggtcacagaccatcccccactgaaccaatgataacaccctgccaagggcctcagcacgagcaccaggagcttctctgttcacatatttacatatcaagatagaaaatgaatatacgaaggagtctagcatgaagaggacggggatgcgctgtgggagttagacacactttaggttcaaatcccagcgttgtcacttattaatttkgggaccccgggcaagacatttaactcctctgtgagcctgcttcctttcttgtaaaatgcaaagaatgatcccatctacctcgaggagctgctatggggataaaggagagcaagccctcagtacggtgcctggca

SEQ ID NO: 56655 - DNA, 1425 bp, Homo sapiens
ctgatactgaaggtacaaaataaacatcccagtatttccaggcccccaccttccaggcattggcaattcagcagaggtctgggtttattctccagttattactgcatttatgaatcctcaattagtcctgactttgcttgagagtttttatgaaactgcctagcgtagtgcctagcagagagtacatgttgaatacatttattagtttctttctttccatagctactgctgctggctaccttgcatttctgtggatttggtcacaagagggattgtctagagagaacagatggtctggtttactttcaattgtagtcacagcaataatagcaccatttatggggccatacactatacgctagaagttttacacacatttcctcatttaatactcttgtgaaatgtgcactatcatctccattttgcagataagcaaaccgaggctcagagaagtgaaatcatttgacaagtcatacacagctaaaacgtagatgccagagccaggatttgatgagaggtccccgtgacatttcaacccaagctgtttttggtgttcatatcactttctaaacagagaactggagagctggaaggaccctcagagatcatctgggccggtggttctcacctgggggcgattttgtccccaggggacatttgagaacatctgaagatattttcggttgttacaactaagtgggggagtaggggtacctgctcctggcctccagtgaggagcccagggtgctgctaaccactctgcaatgcacaggccagcccccatgacaaggattatcctacccaaaacgtcattcgtgctgaggttgagaaaccctggtctagaccaatctcctgattttacagataagaaaacccgggtgtgggtaaggttaaaggtcatgctaatgtccatggacaaaggctgctgggaatcaccatacatcccccacagtcctcccccaccctgtgctgcccaggaaaaagagctcaaagggagtgccccagactggctgtcacaagcatggtgtggaaaggtcctacttagttttccagggagccagcaattggttacatcagaaaactttattctcaggggcagtgcccttatttagatttcagggaaaagcaaaaacagctaaagttttctcaaatagtaagtttcccaatttgctccggttgataattttctaatgtagattcagtggaatctgcmtgagagggtgctgagtggggatgtgcttgccaaggggaaaatgaatgtgtcccctgattggaggccggcttgtcagacaactgtgactgtcagcacactgggctggggcctggcctcaggaagggagtggggaggagcagggatggggcctggggctcaggaagggggcagggaggagcagggatgcaccttcagggcagagagggtgctgg

SEQ ID NO: 56656 - DNA, 1425 bp, Homo sapiens
ctgatactgaaggtacaaaataaacatcccagtatttccaggcccccaccttccaggcattggcaattcagcagaggtctgggtttattctccagttattactgcatttatgaatcctcaattagtcctgactttgcttgagagtttttatgaaactgcctagcgtagtgcctagcagagagtacatgttgaatacatttattagtttctttctttccatagctactgctgctggctaccttgcatttctgtggatttggtcacaagagggattgtctagagagaacagatggtctggtttactttcaattgtagtcacagcaataatagcaccatttatggggccatacactatacgctagaagttttacacacatttcctcatttaatactcttgtgaaatgtgcactatcatctccattttgcagataagcaaaccgaggctcagagaagtgaaatcatttgacaagtcatacacagctaaaacgtagatgccagagccaggatttgatgagaggtccccgtgacatttcaacccaagctgtttttggtgttcatatcactttctaaacagagaactggagagctggaaggaccctcagagatcatctgggccggtggttctcacctgggggcgattttgtccccaggggacatttgagaacatctgaagatattttcggttgttacaactaagtgggggagtaggggtacctgctcctggcctccagtgaggagcccagggtgctgctaaccactctgcaatgcacaggccagcccccatgacaaggattatcctacccaaaacgtcattcgtgctgaggttgagaaaccctggtctagaccaatctcctgattttacagataagaaaacccgggtgtgggtaaggttaaaggtcatgctaatgtccatggacaaaggctgctgggaatcaccatacatcccccacagtcctcccccaccctgtgctgcccaggaaaaagagctcaaagggagtgccccagactggctgtcacaagcatggtgtggaaaggtcctacttagttttccagggagccagcaattggttacatcagaaaactttattctcaggggcagtgcccttatttagatttcagggaaaagcaaaaacagctaaagttttctcaaatagtaagtttcccaatttgctccggttgataattttctaatgtagattcagtggaatctgcatgagagggtgctgagtggggatgtgcttgccaaggggaaaatgaatgtgtcccctgattggaggccggcttgtcagacaactgtgactgtcagcacactgggctggggcctggcctcaggaagggagtggggaggagcagggatggggcctggggctcaggaagsgggcagggaggagcagggatgcaccttcagggcagagagggtgctgg

SEQ ID NO: 56657 - DNA, 985 bp, Homo sapiens
catgaggctctctctggcttccaggcctttgcatgggctgtgacctctgcatggagcctcctttctccctttctgcacatcccagcatcagtccgtaccctaaatggccttctcagaccattcatcctcacagccccaactcctccgctcttggttaggaatcagcaatgtgggcttccacagccccctgtgcttcctcagtttcaggtttctcacactttgttatagctatttacctatctgccactcctatgagagattgagctccctgagatgaggaacctagcacccagcacccagtgcctagcacctagcacccaacactcaacacctaacacctagcacctaatacctagcaccacgccagagcttcgaaggcactcaataaatgtctagtaaatgaccaaaaagccttggayacctaaactggtttcttttcagtgactggtgcggggatctgaatggcctctggaccatttttcattttgtaggaggaacgaggatgacaaaaacgggtcgtggccaaaagcactgtctccacctacttttctctgctggtagctttcaggttgtcgccaacctcagagggccacagtaccaaacttaaagaccctacccactttccctcctcttgagactcacaccatgagtggacaaaagccgtggcgggtgatcctcacctgcctgcgtcctgcctctgagggaaagtttcccgcacccggagaatgaggtggcaatatagacctccattttctcttctcctcccacatccctaggaaaagggggcaacccaacattgaccagaacccaaggacgggcgaggtggagcaggcggcaggggtgccccagattgaagaggcgtggcctttcgccggcacagcaccaacggggcagagggctctgaggggctcggccctgccagaccctgcctcactcagagaggccgccttgggaattgctttgataagtgaggacagccccagcc

SEQ ID NO: 56658 - DNA, 985 bp, Homo sapiens
catgaggctctctctggcttccaggcctttgcatgggctgtgacctctgcatggagcctcctttctccctttctgcacatcccagcatcagtccgtaccctaaatggccttctcagaccattcatcctcacagccccaactcctccgctcttggttaggaatcagcaatgtgggcttccacagccccctgtgcttcctcagtttcaggtttctcacactttgttatagctatttacctatctgccactcctatgagagattgagctccctgagatgaggaacctagcacccagcacccagtgcctagcacctagcacccaacactcaacacctaacacctagcacctaatacctagcaccacgccagagcttcgaaggcactcaataaatgtctagtaaatgaccaaaaagccttggacacctaaactggtttcttttcagtgactggtgcggggatctgaatggcctctggaccatttttcattttgtaggaggaacgaggatgacaaaaacgggtcgtggccaaaagcactgtctccacctacttttctctgctggtagctttcaggttgtcgccaacctcagagggccacagtaccaaacttaaagrccctacccactttccctcctcttgagactcacaccatgagtggacaaaagccgtggcgggtgatcctcacctgcctgcgtcctgcctctgagggaaagtttcccgcacccggagaatgaggtggcaatatagacctccattttctcttctcctcccacatccctaggaaaagggggcaacccaacattgaccagaacccaaggacgggcgaggtggagcaggcggcaggggtgccccagattgaagaggcgtggcctttcgccggcacagcaccaacggggcagagggctctgaggggctcggccctgccagaccctgcctcactcagagaggccgccttgggaattgctttgataagtgaggacagccccagcc

SEQ ID NO: 56659 - DNA, 599 bp, Homo sapiens
tcttttttcctgttgcataaatgtgtttcttgtttcctaagtaatggagcaaagagtacattattttcaaagtatttattaaatgtcatatcaccataaaaataattttaaaattacttgttaaagtatattaaatttactgaagaattggctcatgtttctaaggtaaattcctatatatccatccattgtagatctggaaaatgattgtgactatttcaataggctttccatggataggcgacttatcaacaaaattcagattttatgtatttattcatgatgtcatcgtgggaactaagaaacatacttggaaaactgctctttgcagaaatcctaggtgccttatttgaaataaatttttgttgctattagtcagtgtgatttacgtttcaaatacagacwctcatcattttcagtaggttataggatgataaatcttggggactggaagttgctgaaagcaaatatttaggcagtatccatataatcaattggaagaaacatttgcattgtttaatcaagcataactatacagaaagaaaaaaattgaaaaacaatttttctggttaagtagaaaaaaacagttataagagaca

SEQ ID NO: 56660 - DNA, 1093 bp, Homo sapiens
cttaacctctcagtgtytcagcttctgtatttacaaaatgggcatgaaagtagcccctacttgaaaccacacgagagcacacactggaggacatactagtgctcaataaataaatgctagatatgattgttctaacaacagcactggcagcaaaaattatgactaccatttatgagtgcttctttgccaagcaaatttatatatttcattgcatttaataattataatatgatgagactgatattattattcctatgatgcagatgaagaaattgaagtttagagagcttaagcaacttaagctaccaaatagaaaatgtcatagtaaacctagacctgtctgattacagagttcatgcttacatacattccagagttcatcttgttaagctgtaagcttcctaactaacatttaaggggtaaaatttagattgtattgtatttattcattagttttgtttgaatatcaagtttcataaaagtctttgaggaaataaggccaaatttatctagctatttatagagtctagaaataaatctgtgactacaaacatatatactttaaagacttacatatttatagaataattctgaacttgtgcagaagtaatgggaaaataactgagtcaaaacaagttagctagagtggacttagtcaaggctaactatctgtaaatgtgttaaactattgtttttttggaaattccgtaacacagcatatggcgatttattgagtttgaggaaaatattttctctaagaatatttgtctgacacaaatactgtagttgagttcgtgtctctaatattcacaaactattataatttttattttaaaggattattgtggtcatgaaaatggcacatttcgtattttaacggagagtgttccatgctgtgaagatgggctaacgtgctcaagaaaaattatagttgcttttcaggtacagtactattttctttattttttcctctcacattgtgagaagccaaataaaactgttattgtaaatctgtctgaatttacaggatcagaatattgtcttgcaagacggtaaagtaacagcagtcaaatctacagaaagtaagaaatgt

SEQ ID NO: 56661 - DNA, 595 bp, Homo sapiens
attcttgttcggacagtttcgtctttacagaaagcggcatctaaagtgcccttattggggcctggtgcggtggctcacgcctgtaatcccagcactttgggaggccgaggcgggctgataacttgaggtcaggagttcgagaccagcctgggcaacatgatgaaaccctgtctctactaaaaatacaaaaattagccgggcatggtggcgggcgcttgtaatcctagctgcttaggaagctgaggcaggagaatcacttgaactcaggaggcagagggtgcaatgagccgagatcgcaggactgccctccagcctgggcracagagcaagatggaatctcaaacaaaacaaaacaaaacaaaaatgcccttattggtatggagtagggcacggagaatggcatggcgttccatcctggctttgtgcaggagtgggtgcaggagggaggctctgtcctccggactctcctgacaggagcagggcctttctactagacttttactgaagatgctgcccccttgccagggggcagatgatagattcaggctggccctgccaccagtgagcagatagggcaagatgaagggcagggaca

SEQ ID NO: 56662 - DNA, 1205 bp, Homo sapiens
ctggggaggaagatgcaatgcaggcagcctgtgcacagcacttagagctttctcgccagctgtgtgtcggcgggtacgtacctcagtgcctttgcacatgctggcctctgtgcctaggaggtttctcctgccccgtcagaactccaactgccttctcaagtgtcccttctgtgaatctgtcccttcacccctcatccccatctgttcctctctctgctttgtgcacattcgggacctcgcacgcatcgcaaagccattaccgtattgtgccccagaaggtgccccagaagttaggactgagcgccatccatccctgaagccctgtgtgtacgagttcctaacagctcagtgtcccccacacagtaggggctcaaccagagactgcctggggacctgggtggactcctagctctactgtctgttcccaggttctgccacgttgggtcgctcgccttgcctgcgtggacctcgatgcttacctctgtcaaatgggcgtgctctttccctccctgcctcggggtgtcatgggagcccgctcgcaaggatcccgaaagctggggttagcgcgccctctgctggacgatgaaagactccgcgcgctctgctccccagtcccccaggtggcccgggggaggtgaagtaaggcgggagggcggggggactacaggagaggagggggagctgctgcacccgaacatttccagcgcaccctacacacatgtccttacttaatccctagcccgactctgtggaagagcttaggtgagacccattttccagagttcctacctgtttcctacttgctactgaatttcttactcgtagttaccttwttttttttttttttttttaagaggagaagcgactcagagagaaaaggggcgaagaaggctgggccgtgtagaggaaagaaaaggcgcgagagaagaagactgcccgggtgaccgcgaggcctctgaggaatggctgaagagcagatccatctacatggggctgggaggggaggtgcggtcaccgctcagccgccgactcagccgagggagaccttggccagcccctgccactccgcaggctcggtttcctcgcctgtgaaatgcgggcgatgactcccctccccgccgcgactgctcatcaccgggtccgagcccagccgctgaccccgggggaagcgccttgctcagcgccgggcggcccacgaggccctg

SEQ ID NO: 56663 - DNA, 1205 bp, Homo sapiens
ctggggaggaagatgcaatgcaggcagcctgtgcacagcacttagagctttctcgccagctgtgtgtcggcgggtacgtacctcagtgcctttgcacatgctggcctctgtgcctaggaggtttctcctgccccgtcagaactccaactgccttctcaagtgtcccttctgtgaatctgtcccttcacccctcatccccatctgttcctctctctgctttgtgcacattcgggacctcgcacgcatcgcaaagccattaccgtattgtgccccagaaggtgccccagaagttaggactgagcgccatccatccctgaagccctgtgtgtacgagttcctaacagctcagtgtcccccacacagtaggggctcaaccagagactgcctggggacctgggtggactcctagctctactgtctgttcccaggttctgccacgttgggtcgctcgccttgcctgcgtggacctcgatgcttacctctgtcaaatgggcgtgctctttccctccctgcctcggggtgtcatgggagcccgctcgcaaggatcccgaaagctggggttagcgcgccctctgctggacgatgaaagactccgcgcgctctgctccccagtcccccaggtggcccgggggaggtgaagtaaggcgggagggcggggggactacaggagaggagggggagctgctgcacccgaacatttccagcgcaccctacacacatgtccttacttaatccctagcccgactctgtggaagagcttaggtgagacccattttccagagttcctacctgtttcctacttgctactgaatttcttactcgtagttaccttattttttttttttttttttaagaggagaagcgactcagagagaaaaggggcgaagaaggctgggccgtgtagaggaaagaaaaggcgcgagagaagaagactgcccgggtgaccgcgaggcctctgaggaatggctgaagagcasatccatctacatggggctgggaggggaggtgcggtcaccgctcagccgccgactcagccgagggagaccttggccagcccctgccactccgcaggctcggtttcctcgcctgtgaaatgcgggcgatgactcccctccccgccgcgactgctcatcaccgggtccgagcccagccgctgaccccgggggaagcgccttgctcagcgccgggcggcccacgaggccctg

SEQ ID NO: 56664 - DNA, 1872 bp, Homo sapiens
taggaagatactgggatctcagggttgctgagggaatgggaccaccaaaatgacaagctgtgcatggtaacttcataaagttttctcaagtgtgcacagcaatgccactgtgtggcagcctgggagaacacccaaattatagcatcattgttgttgccatgatagtctatgatgcagatactgactgttgcctgcccctccccacctgtaccccatccaaagtgatgtaccctgtaagcctttgctgccttgctccttcatcctcactacagcatcaccttctcccccagcaaagttgattggcatctgactcactgcaagtcattcactagactgcactgagtcagaatatgtctctcaaaaacccaacacaaggtacacaaagaatgtagtctcagagtaatgtcatgcaattagcctgccagtcatgttgtgagcagaagacacagagggaggtaggagagaagcagagagaagtgagactatgaggcctctgagtgtccacaaaggcccttgcaagaagacaaaacaacctttgctcctgaatttccagttccactgagatgccctgcaatttctgtcctcggattctgaaaatatgatacacccctctattatttgaactatcttaaatgagtttctattccttcactctgtcctgtagacttcaaagtataaaaaatgggccctgaagaggcacaataaattatattgatttcctaaagggcatatcacaatggagatacaactattttaacttcctgagaatctgaaatgtcataactctttatgaaatccctcactgaaggcataattttcccccctgggtattgtgttrtcctctttttgaggaaaactttcttttttctgatggatttttggtgccattgtcttgtttttgaactccaggcatttattttctcttctctccagctcttcagagaggaactgaattgtaatggtcattgtcattgtgaaagtcatcatctttgaactgcaggtgtcttttaaggtcagactttttgatcaagatctaacacaaaaacctcttaatattaagcaggaaaatgcatatctgctcccatcaagtcctttttcctgaatcgctcactgtcagagcacaccctgaaaccgtcttggcaccaccatagaaactgagagccctaatgaagactgtatgaaaatcctggtaagttagaaccaatgctccgcccctggactaggcggatcacatgaatgtggcttgaagcctagatttgctgctaacaaggactgtgactttggatattgaagtcgctttgcttctgtggtccttggagctgtgcagcatcaccaggctccacatctgttctatttctacagtcatcctcactcacatcctcaaagccaactctgaacttgggcccagagcatctgcgcttttactttattcctgagaacaagatcacccctgccccaaccccaaaacaccctcatgatatttctccatgcctgagccttttcttgctgatctgaatagaagccctggctctctaagacagagcctgccttgtcctgcaatgtcccctccccggacctgaaacccagccgaccccgagatacatggaggtggctgccagcagagtccacaatagtgctggtctccctgtctgcttaggcctcttaacacacaatcctgggctcactgttgccagggttggcccagctgatgggtgatagtccccattatttggtcttgctcctcacccccattctgcccagaatcccagtcatcttttgaagcatccctgctggatttttcatttctgctcaaaaagactccctgtacctgcatgggggctcaccacctgccccccacacctgccccattcc

SEQ ID NO: 56665 - DNA, 1872 bp, Homo sapiens
taggaagatactgggatctcagggttgctgagggaatgggaccaccaaaatgacaagctgtgcatggtaacttcataaagttttctcaagtgtgcacagcaatgccactgtgtggcagcctgggagaacacccaaattatagcatcattgttgttgccatgatagtctatgatgcagatactgactgttgcctgcccctccccacctgtaccccatccaaagtgatgtaccctgtaagcctttgctgccttgctccttcatcctcactacagcatcaccttctcccccagcaaagttgattggcatctgactcactgcaagtcattcactagactgcactgagtcagaatatgtctctcaaaaacccaacacaaggtacacaaagaatgtagtctcagagtaatgtcatgcaattagcctgccagtcatgttgtgagcagaagacacagagggaggtaggagagaagcagagagaagtgagactatgaggcctctgagtgtccacaaaggcccttgcaagaagacaaaacaacctttgctcctgaatttccagttccactgagatgccctgcaatttctgtcctcggattctgaaaatatgatacacccctctattatttgaactatcttaaatgagtttctattccttcactctgtcctgtagacttcaaagtataaaaaatgggccctgaagaggcacaataaattatattgatttcctaaagggcatatcacaatggagatacaactattttaacttcctgagaatctgaaatgtcataactctttatgaaatccctcactgaaggcataattttcccccctgggtattgtgttgtcctctttttgaggaaaactttcttttttctgatggatttttggtgccattgtcttgtttttgaactccaggcatttattttctcttctctccagctcttcagagaggaactgaattgtaatggtcattgtcattgtgaaagtcatcatctttgaactgcagrtgtcttttaaggtcagactttttgatcaagatctaacacaaaaacctcttaatattaagcaggaaaatgcatatctgctcccatcaagtcctttttcctgaatcgctcactgtcagagcacaccctgaaaccgtcttggcaccaccatagaaactgagagccctaatgaagactgtatgaaaatcctggtaagttagaaccaatgctccgcccctggactaggcggatcacatgaatgtggcttgaagcctagatttgctgctaacaaggactgtgactttggatattgaagtcgctttgcttctgtggtccttggagctgtgcagcatcaccaggctccacatctgttctatttctacagtcatcctcactcacatcctcaaagccaactctgaacttgggcccagagcatctgcgcttttactttattcctgagaacaagatcacccctgccccaaccccaaaacaccctcatgatatttctccatgcctgagccttttcttgctgatctgaatagaagccctggctctctaagacagagcctgccttgtcctgcaatgtcccctccccggacctgaaacccagccgaccccgagatacatggaggtggctgccagcagagtccacaatagtgctggtctccctgtctgcttaggcctcttaacacacaatcctgggctcactgttgccagggttggcccagctgatgggtgatagtccccattatttggtcttgctcctcacccccattctgcccagaatcccagtcatcttttgaagcatccctgctggatttttcatttctgctcaaaaagactccctgtacctgcatgggggctcaccacctgccccccacacctgccccattcc

SEQ ID NO: 56666 - DNA, 1872 bp, Homo sapiens
taggaagatactgggatctcagggttgctgagggaatgggaccaccaaaatgacaagctgtgcatggtaacttcataaagttttctcaagtgtgcacagcaatgccactgtgtggcagcctgggagaacacccaaattatagcatcattgttgttgccatgatagtctatgatgcagatactgactgttgcctgcccctccccacctgtaccccatccaaagtgatgtaccctgtaagcctttgctgccttgctccttcatcctcactacagcatcaccttctcccccagcaaagttgattggcatctgactcactgcaagtcattcactagactgcactgagtcagaatatgtctctcaaaaacccaacacaaggtacacaaagaatgtagtctcagagtaatgtcatgcaattagcctgccagtcatgttgtgagcagaagacacagagggaggtaggagagaagcagagagaagtgagactatgaggcctctgagtgtccacaaaggcccttgcaagaagacaaaacaacctttgctcctgaatttccagttccactgagatgccctgcaatttctgtcctcggattctgaaaatatgatacacccctctattatttgaactatcttaaatgagtttctattccttcactctgtcctgtagacttcaaagtataaaaaatgggccctgaagaggcacaataaattatattgatttcctaaagggcatatcacaatggagatacaactattttaacttcctgagaatctgaaatgtcataactctttatgaaatccctcactgaaggcataattttcccccctgggtattgtgttgtcctctttttgaggaaaactttcttttttctgatggatttttggtgccattgtcttgtttttgaactccaggcatttattttctcttctctccagctcttcagagaggaactgaattgtaatggtcattgtcattgtgaaagtcatcatctttgaactgcaggtgtcttttaaggtcagactttttgatcaagatctaacacaaaaacctcttaatattaagcaggaaaatgcatatctgctcccatcaagtcctttttcctgaatcgctcactgtcagagcayaccctgaaaccgtcttggcaccaccatagaaactgagagccctaatgaagactgtatgaaaatcctggtaagttagaaccaatgctccgcccctggactaggcggatcacatgaatgtggcttgaagcctagatttgctgctaacaaggactgtgactttggatattgaagtcgctttgcttctgtggtccttggagctgtgcagcatcaccaggctccacatctgttctatttctacagtcatcctcactcacatcctcaaagccaactctgaacttgggcccagagcatctgcgcttttactttattcctgagaacaagatcacccctgccccaaccccaaaacaccctcatgatatttctccatgcctgagccttttcttgctgatctgaatagaagccctggctctctaagacagagcctgccttgtcctgcaatgtcccctccccggacctgaaacccagccgaccccgagatacatggaggtggctgccagcagagtccacaatagtgctggtctccctgtctgcttaggcctcttaacacacaatcctgggctcactgttgccagggttggcccagctgatgggtgatagtccccattatttggtcttgctcctcacccccattctgcccagaatcccagtcatcttttgaagcatccctgctggatttttcatttctgctcaaaaagactccctgtacctgcatgggggctcaccacctgccccccacacctgccccattcc

SEQ ID NO: 56667 - DNA, 1872 bp, Homo sapiens
taggaagatactgggatctcagggttgctgagggaatgggaccaccaaaatgacaagctgtgcatggtaacttcataaagttttctcaagtgtgcacagcaatgccactgtgtggcagcctgggagaacacccaaattatagcatcattgttgttgccatgatagtctatgatgcagatactgactgttgcctgcccctccccacctgtaccccatccaaagtgatgtaccctgtaagcctttgctgccttgctccttcatcctcactacagcatcaccttctcccccagcaaagttgattggcatctgactcactgcaagtcattcactagactgcactgagtcagaatatgtctctcaaaaacccaacacaaggtacacaaagaatgtagtctcagagtaatgtcatgcaattagcctgccagtcatgttgtgagcagaagacacagagggaggtaggagagaagcagagagaagtgagactatgaggcctctgagtgtccacaaaggcccttgcaagaagacaaaacaacctttgctcctgaatttccagttccactgagatgccctgcaatttctgtcctcggattctgaaaatatgatacacccctctattatttgaactatcttaaatgagtttctattccttcactctgtcctgtagacttcaaagtataaaaaatgggccctgaagaggcacaataaattatattgatttcctaaagggcatatcacaatggagatacaactattttaacttcctgagaatctgaaatgtcataactctttatgaaatccctcactgaaggcataattttcccccctgggtattgtgttgtcctctttttgaggaaaactttcttttttctgatggatttttggtgccattgtcttgtttttgaactccaggcatttattttctcttctctccagctcttcagagaggaactgaattgtaatggtcattgtcattgtgaaagtcatcatctttgaactgcaggtgtcttttaaggtcagactttttgatcaagatctaacacaaaaacctcttaatattaagcaggaaaatgcatatctgctcccatcaagtcctttttcctgaatcgctcactgtcagagcacaccctgaaacygtcttggcaccaccatagaaactgagagccctaatgaagactgtatgaaaatcctggtaagttagaaccaatgctccgcccctggactaggcggatcacatgaatgtggcttgaagcctagatttgctgctaacaaggactgtgactttggatattgaagtcgctttgcttctgtggtccttggagctgtgcagcatcaccaggctccacatctgttctatttctacagtcatcctcactcacatcctcaaagccaactctgaacttgggcccagagcatctgcgcttttactttattcctgagaacaagatcacccctgccccaaccccaaaacaccctcatgatatttctccatgcctgagccttttcttgctgatctgaatagaagccctggctctctaagacagagcctgccttgtcctgcaatgtcccctccccggacctgaaacccagccgaccccgagatacatggaggtggctgccagcagagtccacaatagtgctggtctccctgtctgcttaggcctcttaacacacaatcctgggctcactgttgccagggttggcccagctgatgggtgatagtccccattatttggtcttgctcctcacccccattctgcccagaatcccagtcatcttttgaagcatccctgctggatttttcatttctgctcaaaaagactccctgtacctgcatgggggctcaccacctgccccccacacctgccccattcc

SEQ ID NO: 56668 - DNA, 1872 bp, Homo sapiens
taggaagatactgggatctcagggttgctgagggaatgggaccaccaaaatgacaagctgtgcatggtaacttcataaagttttctcaagtgtgcacagcaatgccactgtgtggcagcctgggagaacacccaaattatagcatcattgttgttgccatgatagtctatgatgcagatactgactgttgcctgcccctccccacctgtaccccatccaaagtgatgtaccctgtaagcctttgctgccttgctccttcatcctcactacagcatcaccttctcccccagcaaagttgattggcatctgactcactgcaagtcattcactagactgcactgagtcagaatatgtctctcaaaaacccaacacaaggtacacaaagaatgtagtctcagagtaatgtcatgcaattagcctgccagtcatgttgtgagcagaagacacagagggaggtaggagagaagcagagagaagtgagactatgaggcctctgagtgtccacaaaggcccttgcaagaagacaaaacaacctttgctcctgaatttccagttccactgagatgccctgcaatttctgtcctcggattctgaaaatatgatacacccctctattatttgaactatcttaaatgagtttctattccttcactctgtcctgtagacttcaaagtataaaaaatgggccctgaagaggcacaataaattatattgatttcctaaagggcatatcacaatggagatacaactattttaacttcctgagaatctgaaatgtcataactctttatgaaatccctcactgaaggcataattttcccccctgggtattgtgttgtcctctttttgaggaaaactttcttttttctgatggatttttggtgccattgtcttgtttttgaactccaggcatttattttctcttctctccagctcttcagagaggaactgaattgtaatggtcattgtcattgtgaaagtcatcatctttgaactgcaggtgtcttttaaggtcagactttttgatcaagatctaacacaaaaacctcttaatattaagcaggaaaatgcatatctgctcccatcaagtcctttttcctgaatcgctcactgtcagagcacaccctgaaaccgtcttggcaccaccatagaaactgagagccctaatgaagactgtatgaaaatcctggtaagttagaacmaatgctccgcccctggactaggcggatcacatgaatgtggcttgaagcctagatttgctgctaacaaggactgtgactttggatattgaagtcgctttgcttctgtggtccttggagctgtgcagcatcaccaggctccacatctgttctatttctacagtcatcctcactcacatcctcaaagccaactctgaacttgggcccagagcatctgcgcttttactttattcctgagaacaagatcacccctgccccaaccccaaaacaccctcatgatatttctccatgcctgagccttttcttgctgatctgaatagaagccctggctctctaagacagagcctgccttgtcctgcaatgtcccctccccggacctgaaacccagccgaccccgagatacatggaggtggctgccagcagagtccacaatagtgctggtctccctgtctgcttaggcctcttaacacacaatcctgggctcactgttgccagggttggcccagctgatgggtgatagtccccattatttggtcttgctcctcacccccattctgcccagaatcccagtcatcttttgaagcatccctgctggatttttcatttctgctcaaaaagactccctgtacctgcatgggggctcaccacctgccccccacacctgccccattcc

SEQ ID NO: 56669 - DNA, 533 bp, Homo sapiens
cacagttccacatggctgaggaggcctcacaatcatggcagaagacaaaggaggagaaagccatgtcttacacagtggtgggcaagatagcttgtgctggggaactcccatttataaaaccatcagatctcacaagacttattcactaccacgagaacagtatgggggaaccaccccccatgatacaattatctacacctgtcacccttgacaggtggagattattataattcaaggtgagatttcggtggggacacagccaaaccatatcagctatcatcattcccatttttcagaaaagaaaactgagggacagaggaaggaaatcacctagccarggtttaccagctcatgacagtgactctggaatttggatcaggcagttcaactccagagcccactctctaagccactggaccaggagcccccacataagtgatggtcaacattgaacagccgtgaagggctccccacacatcttctcactcggtcctcccaacaggctgcagaggctggaaaaatgagtggtggtc

SEQ ID NO: 56670 - DNA, 1427 bp, Homo sapiens
gggataaagtggaaatgtccttatttcgcaagggcaacagcgaggtttccagccttcaggcccagcagtggttctccagcttccacaacccagaccttaagcactgtggttgcagcattcagaccccgggccacaactgtgcccagctatcaaggccgggattgaggggagctgactcagctgcccccatgacttggttcagaattgactcacgggcctatgaaagtgctctgggggtacctgtcaaagcttggtcttggccagtgaaagataagcattcaagttaatgggcatatgttagtactcaccagcaggaaaaaactagaggcttcagtgcatcctaggatcctgggggaagaattgtcatgtcctcctaagaaggcagaattggtccaaacaagggacagtgaggagggcagggtaaacaagccactccttgscacctacaagtgccaatttgccctaaattttcccagacagagcccacaggtcagattttgatgtttctgtatctggaccatgacccagtttgtattcatagccaatccctaatctcatcatcatctcagtttccagttcctcaaagaagtttacccttgaacccctaggcctggttctggctctgtggagggctcaggcagagcagaatgcatacagaggctttcccattctcccaggatgggcacaggacctagccctgagagcagcaggcaccctggacttctacaaaagtgtgccataggccaggcacggtggctcaagcctgtaatctcagcactttgggaggaggcgggtggatcacttgaggctaggagttcaagaccagcctggccaagatggtgaaactctactaagaatacagaaattagcccagtgtggtggtgtacacctgtaatcccagctacttgggaggctgaggcaagggaatcgcttgagcctgtggcggggtggcggaggttgcagtgagccgagattgcaccactgcactcctgcctgggcgacaggagactctgtccaccctctccctaccccacaaaaaaaaaaaaaaaaaaaaaagtgtagcatgctgttcaaccaccagagggcactgtgggcccctccagagacggaaaggaattgagctattaaagctcctgcaaggacaaggaactagcagaaagaagtagtgaaggctttgaaggggaggaagatgctctcagtggctcctatttcatgcagatggaggaaaaccaaccaagagcatgcgccaggtcctctccagatgagactggcaaagacgaagcagcaggcagtcacgtttaggcacatgcttgcgaggatttccttactgtgacaaaaggtcccttctgttgtttgtcacaagtgcaaaacctcacagctagcataatgaaacaactgagatgcactcagtaacgtgggctggaaaa

SEQ ID NO: 56671 - DNA, 1427 bp, Homo sapiens
gggataaagtggaaatgtccttatttcgcaagggcaacagcgaggtttccagccttcaggcccagcagtggttctccagcttccacaacccagaccttaagcactgtggttgcagcattcagaccccgggccacaactgtgcccagctatcaaggccgggattgaggggagctgactcagctgcccccatgacttggttcagaattgactcacgggcctatgaaagtgctctgggggtacctgtcaaagcttggtcttggccagtgaaagataagcattcaagttaatgggcatatgttagtactcaccagcaggaaaaaactagaggcttcagtgcatcctaggatcctgggggaagaattgtcatgtcctcctaagaaggcagaattggtccaaacaagggacagtgaggagggcagggtaaacaagccactccttgccacctacaagtgccaatttgccctaaattttcccagacagagcccacaggtcagattttgatgtttctgtatctggaccatgacccagtttgtattcatagccaatccctaatctcatcatcatctcagtttccagttcctcaaagaagtttacccttgamcccctaggcctggttctggctctgtggagggctcaggcagagcagaatgcatacagaggctttcccattctcccaggatgggcacaggacctagccctgagagcagcaggcaccctggacttctacaaaagtgtgccataggccaggcacggtggctcaagcctgtaatctcagcactttgggaggaggcgggtggatcacttgaggctaggagttcaagaccagcctggccaagatggtgaaactctactaagaatacagaaattagcccagtgtggtggtgtacacctgtaatcccagctacttgggaggctgaggcaagggaatcgcttgagcctgtggcggggtggcggaggttgcagtgagccgagattgcaccactgcactcctgcctgggcgacaggagactctgtccaccctctccctaccccacaaaaaaaaaaaaaaaaaaaaaagtgtagcatgctgttcaaccaccagagggcactgtgggcccctccagagacggaaaggaattgagctattaaagctcctgcaaggacaaggaactagcagaaagaagtagtgaaggctttgaaggggaggaagatgctctcagtggctcctatttcatgcagatggaggaaaaccaaccaagagcatgcgccaggtcctctccagatgagactggcaaagacgaagcagcaggcagtcacgtttaggcacatgcttgcgaggatttccttactgtgacaaaaggtcccttctgttgtttgtcacaagtgcaaaacctcacagctagcataatgaaacaactgagatgcactcagtaacgtgggctggaaaa

SEQ ID NO: 56672 - DNA, 565 bp, Homo sapiens
tttttaaatgtatgtgtatatattaaaatattataaatcttcaacatttttaatgaaaaagtgttattcaaaaagtaacatatgcaaaaagaaaagactaggagaatatttttgcacaaatcatcatctggagatagccatcctcatctgtggctatctccaatggtgatgtttcatatcattttattttctgaatttcctgtaaatatatttattctttataatcaggcccctgaaattttcaaaatttattttagccatggtctgaggacttccattcttctagacgatgaaggctaagtctcattttctaaatgattgtcaattttgaatcagtggatctaaatagtaagattttagagtcctaytgaaagttattaatttttaccaatcttgccagttgatgtggcttcctggttggtggatgtgacagctttgtttggaaagaaaaaaaagtggctgcgtgcattttaagaatggctgttttcaaattgaaaatttgtttggactcaatcattataacattttcatttaagtctgaatcattataacattctcatttaag

SEQ ID NO: 56673 - DNA, 435 bp, Homo sapiens
aaactctcacccccccctttaatatcccacctctgatctgsgtgtgcccctcgaacccccatctcctttctccttcctccttcctgactcagcctggataacgggctcctccagaccatgtagaaactgccgggaaaagtctcgctgcgccctgcgactccttcagtccccggcctgggggcagagcctgctggagaggagtcatccgtccccgagccatcatcgaccccaccggaccccgcgcggggccggccgactccctcccaccccggggtctgggcgcgatgggccgggcccgctgcccgcggaccgttacttggcgcaccgagaagcggccgggcgactccggcaagaaactttaagcctcgctgaggcgcagacccggttcccctctcctgccttcgcagtctctctgccacccccgcccccgccccg

SEQ ID NO: 56674 - DNA, 1768 bp, Homo sapiens
agccataatctgccaaaatctgcaccatccttgccaggtttgggagttctgtagagtagttaccactgccaggtctgactgccatagctcaggaaaagggtgcagtcatttctcttagcataatcttgagaagatgtctaagagacctatgtaatattaagtcacagaaagaaacaatattattggtggtttagacatggaatgtaatagctaacaattacggaatgcttacttgtttcaggaactgacgygttatctcatctaaacaatgctacagagcatgggtactgttattaaccccgttttacaggaaacctaggtttagcaaggttaaggaattgcttgagataacaaaggtagtaagaggcaggggtggaatttgaagccatatagtctggttcttcagggtgtatacatccgtgtatctataaccacaatgctgcaggggcactcgaacaggctggaaaagaattatttttctttaaagggcaaattaatttcctcaaaagtaatctctgttcactttatcccataccagatgcttattttcatttcatatcctaaaagttagattggcacttacatgccaacttaaaatacctttaagtctttaaaatttatagtattttagaatttatcatagtgaaacatgtacagtctgttagtccccaagacaataaaataaggatgatagtgactgatactccattcccttccgatgtaatgacaaacacgtagaaacactgtgtttcatttattggaattatttggatccaaaggattgcttttaataccttaacaaaataggtcattaaaaaaaatcaagtgcctttcagtattcttccaagtttcaataactgatcttttccattaaaaaacttttgattcattattccaaatcaacatatcatctaaatatttacacatagttagatgtagcttttccctaacctactcccttttatttattagtactcatttacatcttagtttgccacatttacagttctttgaaagtttcatctaatattcaccagaccattcacctcacaattttcctccctctttctaaataggtgaatttgtttactgcaaaatcgatggctacgctattaaaggttactatcacgattttaaaagacatgatcaccatcatttaccaagattcttaccacaaggaaatgatcacaaggttggacaaacaggctccaactcttaagggaaagggcttgcagttagatcacacagggcgggcagggaagcaagcggggaggggtaggtcggaaaaggcagtgcttgattcaattcaacattcactgcgccacttaccaagagccagaaaaagaaaaaaaaaaaaaaaaaaagccaaccagctgggcgttatttcgagcacggggccctgcaggtgggcctgtgggcggggacccggcgcccgggagggaaggggctggctcagagactatagacgggcggggaccgccccggcccgggcctccagcgcccggcgcccgcacactcgccagcccagctgccggcacgccggccagccagccgctgccgcttaccagtggcgcctcgctgactccccgggggcagctcttcaacggttcccgcagtcagagcaccaccccgcggtggggtacctccagcccgcccgcagctctcggtccccgccgcgccgccactctcgcgagaagccaggaagtccgcgaagtggggggaggaggagcagggaggggcacttaacggtggtggctggttctgcgcc

SEQ ID NO: 56675 - DNA, 1768 bp, Homo sapiens
agccataatctgccaaaatctgcaccatccttgccaggtttgggagttctgtagagtagttaccactgccaggtctgactgccatagctcaggaaaagggtgcagtcatttctcttagcataatcttgagaagatgtctaagagacctatgtaatattaagtcacagaaagaaacaatattattggtggtttagacatggaatgtaatagctaacaattacggaatgcttacttgtttcaggaactgacgtgttatctcatctaaacaatgctacagrgcatgggtactgttattaaccccgttttacaggaaacctaggtttagcaaggttaaggaattgcttgagataacaaaggtagtaagaggcaggggtggaatttgaagccatatagtctggttcttcagggtgtatacatccgtgtatctataaccacaatgctgcaggggcactcgaacaggctggaaaagaattatttttctttaaagggcaaattaatttcctcaaaagtaatctctgttcactttatcccataccagatgcttattttcatttcatatcctaaaagttagattggcacttacatgccaacttaaaatacctttaagtctttaaaatttatagtattttagaatttatcatagtgaaacatgtacagtctgttagtccccaagacaataaaataaggatgatagtgactgatactccattcccttccgatgtaatgacaaacacgtagaaacactgtgtttcatttattggaattatttggatccaaaggattgcttttaataccttaacaaaataggtcattaaaaaaaatcaagtgcctttcagtattcttccaagtttcaataactgatcttttccattaaaaaacttttgattcattattccaaatcaacatatcatctaaatatttacacatagttagatgtagcttttccctaacctactcccttttatttattagtactcatttacatcttagtttgccacatttacagttctttgaaagtttcatctaatattcaccagaccattcacctcacaattttcctccctctttctaaataggtgaatttgtttactgcaaaatcgatggctacgctattaaaggttactatcacgattttaaaagacatgatcaccatcatttaccaagattcttaccacaaggaaatgatcacaaggttggacaaacaggctccaactcttaagggaaagggcttgcagttagatcacacagggcgggcagggaagcaagcggggaggggtaggtcggaaaaggcagtgcttgattcaattcaacattcactgcgccacttaccaagagccagaaaaagaaaaaaaaaaaaaaaaaaagccaaccagctgggcgttatttcgagcacggggccctgcaggtgggcctgtgggcggggacccggcgcccgggagggaaggggctggctcagagactatagacgggcggggaccgccccggcccgggcctccagcgcccggcgcccgcacactcgccagcccagctgccggcacgccggccagccagccgctgccgcttaccagtggcgcctcgctgactccccgggggcagctcttcaacggttcccgcagtcagagcaccaccccgcggtggggtacctccagcccgcccgcagctctcggtccccgccgcgccgccactctcgcgagaagccaggaagtccgcgaagtggggggaggaggagcagggaggggcacttaacggtggtggctggttctgcgcc

SEQ ID NO: 56676 - DNA, 1768 bp, Homo sapiens
agccataatctgccaaaatctgcaccatccttgccaggtttgggagttctgtagagtagttaccactgccaggtctgactgccatagctcaggaaaagggtgcagtcatttctcttagcataatcttgagaagatgtctaagagacctatgtaatattaagtcacagaaagaaacaatattattggtggtttagacatggaatgtaatagctaacaattacggaatgcttacttgtttcaggaactgacgtgttatctcatctaaacaatgctacagagcatgggtactgttattaaccccgttttacaggaaacctaggtttagcaaggttaaggaattgcttgagataacaaaggtagtaagaggcaggggtggaatttgaagccatatagtctggttcttcagggtgtatacatccgtgtatctataaccacaatgctgcaggggcactcgaacaggctggaaaagaattatttttctttaaagggcaaattaatttcctcaaaagtaatctctgttcactttatcccataccagatgcttattttcatttcatatcctaaaagttagattggcacttacatgccaacttaaaatacctttaagtctttaaaatttatagtattttagaatttatcatagtgaaacatgtacagtctgttagtccccaagacaataaaataaggatgatagtgactgatactccattcccttccgatgtaatgacaaacacgtagaaacactgtgtttcatttattggaattatttggatccaaaggattgcttttaataccttaacaaaataggtcattaaaaaaaatcaagtgcctttcagtattcttccaagtttcaataactgatcttttccattaaaaaacttttgattcattattccaaatcaacatatcatctaaatatttacacatagttagatgtagcttttccctaacctactcccttttatttattagtactcatttacatcttagtttgccacatttacagttctttgaaagtttcatctaatattcaccagaccattcacctcacaattttcctccctctttctaaataggtgaatttgtttactgcaaaatcgatggctacgctattaaaggttactatcacgattttaaaagacatgatcaccatcatttaccaagattcttaccacaaggaaatgatcacaaggttggacaaacaggctccaactcttaagggaaagggcttgcagttagatcacacagggcgggcagggaagcaagcggggaggggtaggtcggaaaaggcagtgcttgattcaattcaacattcactgcgccacttaccaagagccagaaaaagaaaaaaaaaaaaaaaaaaagccaaccagctgggcgttatttcgagcacggggccctgcaggtgggcctgtgggcggggacccggcgcccgggagggaaggggctggctcagagactatagacgggcggggaccgccccggcccgggcctccagcgcccggcgcccgcacactcgccagcccagctgccggcacgccggccagccagccgctgccgcttaccagtggcgcctcgctgactccccgggggcagctcttcaacggttcccgcagtcagagcaccaccccgcggtggggtacctccagcccgcccgcagctctcggtccccgccgcgccgccactctcgcgagaagccaggaagtccgcgaagtggggggaggaggarcagggaggggcacttaacggtggtggctggttctgcgcc

SEQ ID NO: 56677 - DNA, 683 bp, Homo sapiens
cagaaataagcctctagaaagattccactttatttaacaggattttctgtgtcattagtggtttccgtcattgctaagttaactcatggattcattcaaaatttataaccatccagaacagccagcgacctagcttatttatccagaagaggcatctgaattagccactacttaacattctttagcaaggacgacttgttatttaggatgagttagaactctctttgcacactacacatacaattatttcacttaccaacagaatgttgagataatccaagccaaactctcatggtaatgttattattttccctcatcagtctgctcacaaatttattctcatcttcatcttttatggaaacgatagttgcagagtgatctgttgaaagaaaacacattctcaattagctttatggaaactagagaagtagtttattctcaactagccatttgaaaaatacatatattattaacaagatcattgataaattcaagccttacacagagacagtttttaaaaactggtatttaggtcaaaattttataagtacttcaaaaaaattacttccaaacaygtataaagaaattttgtgtttcttcaaaatatttatctggcaatatttttttggccctggaactgcctacccctgagacctctctgactgttcagatgagaaaagaga

SEQ ID NO: 56678 - DNA, 782 bp, Homo sapiens
tgcatttgccaaattcatctatacaatctataaaacttctcacaactcctcatcaatgctgctgttgaaaagaaatgttactagtaagttcttgtttttaccaccttatgaaaatagttggttgggcaaaggtatattgctgwttactcattgttgcactgggctcaattgttaatgcaaaacttgttgaacattgattattatggcatcattaggatagggaacttttctgaatggtttgacctttttttttttaacattacttcttgcactggcaacataaggaactgccttatctttggtctatttgtttctagtatagtctgcaactggggtctcttaggctgcgtacatttttttttcttcttgttcttcatgaagttttgcttccaactctttttttttttttttctgtaagggcttgcatcgtggtaagtgtgttacattcctgttcaagaagatccattttttttaattgtggtaaaatacacataacataaaatttaccatcttaaccattttggttttgttttgtttttagagacagggtcttattctgtcacccaggttggaatgcagtagtgcaatcatagctcactgcagtctcaaactcttgggtgcaatagatcctcctgcctcagtttcccaagtagctgggattacaggcatgtactactgtgtccagctaatttttacacgtttttgtagagacggagtccttactgtgttgcccaggctggtcttgaactcctgggctcaagccacccacctgtctcagcccc

SEQ ID NO: 56679 - DNA, 782 bp, Homo sapiens
tgcatttgccaaattcatctatacaatctataaaacttctcacaactcctcatcaatgctgctgttgaaaagaaatgttactagtaagttcttgtttttaccaccttatgaaaatagttggttgggcaaaggtatattgctgattactcattgttgcactgggctcaattgttaatgcaaaacttgttgaacattgattattatggcatcattaggatagggaacttttctgaatggtttgacctttttttttttaacatkacttcttgcactggcaacataaggaactgccttatctttggtctatttgtttctagtatagtctgcaactggggtctcttaggctgcgtacatttttttttcttcttgttcttcatgaagttttgcttccaactctttttttttttttttctgtaagggcttgcatcgtggtaagtgtgttacattcctgttcaagaagatccattttttttaattgtggtaaaatacacataacataaaatttaccatcttaaccattttggttttgttttgtttttagagacagggtcttattctgtcacccaggttggaatgcagtagtgcaatcatagctcactgcagtctcaaactcttgggtgcaatagatcctcctgcctcagtttcccaagtagctgggattacaggcatgtactactgtgtccagctaatttttacacgtttttgtagagacggagtccttactgtgttgcccaggctggtcttgaactcctgggctcaagccacccacctgtctcagcccc

SEQ ID NO: 56680 - DNA, 782 bp, Homo sapiens
tgcatttgccaaattcatctatacaatctataaaacttctcacaactcctcatcaatgctgctgttgaaaagaaatgttactagtaagttcttgtttttaccaccttatgaaaatagttggttgggcaaaggtatattgctgattactcattgttgcactgggctcaattgttaatgcaaaacttgttgaacattgattattatggcatcattaggatagggaacttttctgaatggtttgacctttttttttttaacattacttcttgcactggcaacataaggaastgccttatctttggtctatttgtttctagtatagtctgcaactggggtctcttaggctgcgtacatttttttttcttcttgttcttcatgaagttttgcttccaactctttttttttttttttctgtaagggcttgcatcgtggtaagtgtgttacattcctgttcaagaagatccattttttttaattgtggtaaaatacacataacataaaatttaccatcttaaccattttggttttgttttgtttttagagacagggtcttattctgtcacccaggttggaatgcagtagtgcaatcatagctcactgcagtctcaaactcttgggtgcaatagatcctcctgcctcagtttcccaagtagctgggattacaggcatgtactactgtgtccagctaatttttacacgtttttgtagagacggagtccttactgtgttgcccaggctggtcttgaactcctgggctcaagccacccacctgtctcagcccc

SEQ ID NO: 56681 - DNA, 1169 bp, Homo sapiens
acattgacttgtctcagaggggaaaacaaaaaagtaatagtaattgcagaggggaaaggagtcaaatgaacttgaaactatcaggaaaaattttgtggcatataaatggattctggagttagtgtgcaaaatggtagaagtatcacatgaatcctccaataatcattgtttctaatgggaaacaaattcaaattatcatattttgtcattgcacatctactcaccttgtctttcactcatagtaggyagatgtacagtcatgctatgttttggccaatgacaaatcacatatacaatgatagtcccattagattataatggagctgccctatataggtgtaccccttttcatctttcatactgtgttttttctgtacttttagaaaagctaaggtatgtttaggtatgtttgtattcacaactacttaacattgtgttataattgcctacagcattcagtacagtcacattctgtacaggtttgttgcctaagggcaacagaatgtgccatacagcttaagtgtgtagtaggctataccatataggtttgtgtaaatacattccatgattttctcacaaaaatgaaatcagctaatgacacatttctcagaacatatttctgcctttaagcaacacgtctttatttatttataactagaaggagatataaactaaagaagataatgaaatgttacaatggaagattgtatttgttttaactcatattaatgcctgctaattttacaaacctgaattctctccatctttaagcaacacatgtctggctatcataaaacttttatttaagtgtatcttcatgaatgtatcatatttctattgcagtagattcaaatgaacacaagaaaagtcatatggctgtgttaagaggagaatatgattgtcttaagcacttgttaaggagttgatataagcgggaagtaatttgtacatttaggaaaagcagcctatttctaatataaggctatgagttacttcatctgactagattctcagcttctttatatcaataactgcatggattatagtactgaggttctgagctggctgtagattgacaggtttcctagaagggaagggagagtagggaaagcacggaaagcagatcagtgaatgtgggtgaagatacaccagtacagaaaacatatact

SEQ ID NO: 56682 - DNA, 628 bp, Homo sapiens
taaattctgatgagtctgcttggccagtagaagcaccctttccatcgccatttcaggggattaattctgcattttttgaggaaactgtaatggcctctcttgagggagttaccttgctatgattctcctctgacccagtcaacgttacaccgctttgcttctggacctataactagactcaaatcccagcacatgcttaaagatgaggtaccaagtgtgactcaggaagaggtgcactatactccaaaagaactatttgagctttctaacatatacagacataaataggggaatatgtgtgtgaacggatattaagagtatgggataaagatagaaaaaacatcaagttggatcaggctgaatttattgatatagatccactaagcagagattctgcctttaatgctgcagcttgtggagttagggctttgataatttgtttcctttttatttatttagcattccttctaacttgcaaaaatgcmcggaagccaaatattggcctattgttgcatgtatgtgttgtgcctcattctttcagttttttgttgataaggtgttaatgtgcagttaacgtacatgcacattaaccctgatattttatagataagtatcaattgtgtatgca

SEQ ID NO: 56683 - DNA, 868 bp, Homo sapiens
tcctctctcctctcctctcctcttctgttttttctcctcacctctccttttctttctcctcttctcttcccttcctccctttcttcctccccgctttcctccctctttcttttttctttccttctctctccctctttttctgtctccttttctccttccttccttcattaattcattccacctttctctttttctctctctttctctttctcccttttttcctctcagtttctttgagtccttaaattggatcctgaaagtcaatattatcttttactattttattatatagtacactatcgaactattagcatatcattaaatcgtcacagcttcttcaactctgcccttatgcatttttgaataacttttattggtatataatttacatacaataaaatacacacatttataatatgcaatttggtattttgacaattgtatgyattcatgtaatttggtattttgacaattatatgcattcatatcatattcaagatacaaaatatttctatcatcagaagttctttcattctcttttgcaatcaattggcgactgccaaactaggcaaccattgattatttccatgaagatagatgagttgtgttcagtctagattttggactattcactatgtactcttctgtttctggcttttagattgtgtgtgtgtgtgtgtgtgtgtgtgtgcatatatatatatatatatatgtatatatatatatatatatattctaattcatcaatattctgccctggatggatggcttatttcattttattgctgagtgccattaaattgtatttatccatttccaattatctgatatttgggttgtttcttgcttgcggctattatgaataaag

SEQ ID NO: 56684 - DNA, 742 bp, Homo sapiens
aaatatgtgtgtatttgcttaattcagtgtattttgggaagattatctgggaaatcataaaaataatggaaataatctatgtatatcaaaagaaattaaaacaaaaacagaagcaaatttcagggatggttaaacttgacttcctctaatagtggagtaatgagtgctgcctttctactttggcgtatttttacaaaattaacaaatgagcaaatattatatatatctcttggaaaaaatactttcaaagacttgcaattcttaggagaaaatttgcagcaaaagcagaggaatgtaatcattatatataactaagataaacataaatccactgcactaaagaattcacagtttaaaaaagtgctctggaaacataaattctgataaaatctgttataataaaataaagcaattcatgagtacataagactttttaatttctttttgctttgaaaccactgtttcccattctgtacatgtcaaatcaagttagtgattcttgttaatgacaaatgcataatgtacatatatgtatttttaagtggataaatcattatttatgtttgtatagatgtatattatttccatttgtgtgcatacataatatttatatgtrcatattatgtataaaatataggcatatatatacatattcacaaaaacactaattataaatgtacatatatattcacactcattgtaaatgatcatatctgctaagatcaaattaaaaggctatttt

SEQ ID NO: 56685 - DNA, 742 bp, Homo sapiens
aaatatgtgtgtatttgcttaattcagtgtattttgggaagattatctgggaaatcataaaaataatggaaataatctatgtatatcaaaagaaattaaaacaaaaacagaagcaaatttcagggatggttaaacttgacttcctctaatagtggagtaatgagtgctgcctttctactttggcgtatttttacaaaattaacaaatgagcaaatattatatatatctcttggaaaaaatactttcaaagacttgcaattcttaggagaaaatttgcagcaaaagcagaggaatgtaatcattatatataactaagataaacataaatccactgcactaaagaattcacagtttaaaaaagtgctctggaaacataaattctgataaaatctgttataataaaataaagcaattcatgagtacataagactttttaatttctttttgctttgaaaccactgtttcccattctgtacatgtcaaatcaagttagtgattcttgttaatgacaaatgcataatgtacatatatgtatttttaagtggataaatcattatttatgtttgtatagatgtatattatttccatttgtgtgcatacataatatttatatgtgcatattaygtataaaatataggcatatatatacatattcacaaaaacactaattataaatgtacatatatattcacactcattgtaaatgatcatatctgctaagatcaaattaaaaggctatttt

SEQ ID NO: 56686 - DNA, 742 bp, Homo sapiens
aaatatgtgtgtatttgcttaattcagtgtattttgggaagattatctgggaaatcataaaaataatggaaataatctatgtatatcaaaagaaattaaaacaaaaacagaagcaaatttcagggatggttaaacttgacttcctctaatagtggagtaatgagtgctgcctttctactttggcgtatttttacaaaattaacaaatgagcaaatattatatatatctcttggaaaaaatactttcaaagacttgcaattcttaggagaaaatttgcagcaaaagcagaggaatgtaatcattatatataactaagataaacataaatccactgcactaaagaattcacagtttaaaaaagtgctctggaaacataaattctgataaaatctgttataataaaataaagcaattcatgagtacataagactttttaatttctttttgctttgaaaccactgtttcccattctgtacatgtcaaatcaagttagtgattcttgttaatgacaaatgcataatgtacatatatgtatttttaagtggataaatcattatttatgtttgtatagatgtatattatttccatttgtgtgcatacataatatttatatgtgcatattatgtataaaatataggcatatatatacatatwcacaaaaacactaattataaatgtacatatatattcacactcattgtaaatgatcatatctgctaagatcaaattaaaaggctatttt

SEQ ID NO: 56687 - DNA, 1847 bp, Homo sapiens
aacatacacatcagcatatttacttcaatttcccttgctttcaagtcccatgagagtaagttaatttttctgttattctaacttttgccttgaaattatatacattcctatccctagctcactacacttaaggcattaactcatgggatactcaaagtgtacaatatggatattggtgcctttagaattatcttaacttctctttcaacttccacctccaacattataaagccttacatttttttttccttttacatggtagaggttaaaataccgccattttgtatgtacctataataaattcttctgcatttttccgtaagttgaatctaaataatggagttaaaatctgtattcagtatataaatacaatatcatgtatacacatataataaagcattatttgtcaagtaacttatatgcaaagaagccgcaaagtgtggaaattctctattcttacaccacattacaaggcggtgttcttggataagtgagtactgcaataaacataccatgggaagaactccaggagagggacttactactgtatagcagtgtatataaaaatatttctagctgaggatataccttcagcataacctaaagttaaaagcaaataaacaaacaaacaaaaaaacaaaccaagggccttgtggagctcaaccagtagaatcagatggtggcatggcattgatccaattttattatatctttcaatgacacaaagcagatattatctactttgttaaattacatattgttaaatggatgttcttttcatgtgtttcataaatggatccaatttctaccacagtagttatcttyaaatttgaagtaagaatttctcatgcacatgtgttgttcgtagtgtagctataatttctttttgcttatcttaggtaagagaagaaaaagaaggcttcattgctatatatcttctggattagttcctatttgattattaccaatattattgctgatgacattgctggaagcctgctgactttccattctaaattttgtgcaaggctgtcatggtgggatatgttactgtaaatctcatgagttaattctacaatttctctgtgccttctttcgtattttttttttgctttgcgcatatttctaagttatattcttaaaatcaactgtttttaaaatgtaaataaaatgcattttgagtgtctcatatctaagaatatatttgccttgtatagatttggtataaattttgtatataaaaatctctaaactgatagatttattattatctttctgtacttcctgctagcatccaatcttggatttttaaggcttgttttattttgtttcccttcttggttatgaataatcactcagcctaataattatcatcttctctttaattttgtattacgatatttcaatagaaagtggtttcatgtaaattttccttctttcttcttgatatttggcaactccactaaatgaagaattcagggtcaaaggttcttttttttttttcttgcatatactcaacttttgtctttctgtggttctaattagttgactgttgtgtgccctagcagaagctctttgttttttaggtatgtcagtttgactcaatgttatttaagttttctaaaagtctatttttaagtccttttttttatttcagcaatatttttaatttccaagaggaattcatttttcctgggttattcttttccccattcatctactaattcattttattgcatactttgcgaattatcctgttgtacttttactttatagatggagatccctgattgtctcttcatatgtatctaacaaagctctgagatgatctctttcagtagctactc

SEQ ID NO: 56688 - DNA, 890 bp, Homo sapiens
ggggaaacggaagaaattgggctaggtgaggccaagtgcttagcaggttaatctaacttgttaccagcatggtggtggcagagttattgactgcagcaagagaaaatccaaactcctatgtgcaaggactttcatagtccctacttgaatcaccttggcttttgttctgttggccaaaactggtcatatgtgaagcccagagtcaatgtgggaggagactgttcaagtatccaaggactgggattctgagggggacacgaaagtgtgtggcgattgtgaccatttctataaaaaagtccaccaaactggccgagcacggtggctcatgcctgtaatcttagcactttggsaggctgaggtgggtggatgaactgaggtcaggggttcaagatcagcctggccaacatggcaaaatcccatctctactaaaaatagaaaaattagccgggagtggtggcacatgcctgtaatcccagctactcaggaggctgaggcaggagaatcgcttgaacccaggaggtagaggttacagtgagctgagatcacaccactgcattctgggtgacagagtgagactcagtctcaaaaaaaataatataaaagtccaccaaactatgtactgattgtgacttacacgtacccaccttggcaattttcaccattagaatagagtggctagaatatattcgccactcagtgcatacatgttaaattgataatagagtaacaataaattactaacaaatttataataacaacagagctgggcacttttctagttgcttactatgtatttttcccattaattctcacaacagctcatcttggtgacatcctttatgatcatcatggataatcatgggcatgcagagagtaaatggtatgacaac

SEQ ID NO: 56689 - DNA, 890 bp, Homo sapiens
ggggaaacggaagaaattgggctaggtgaggccaagtgcttagcaggttaatctaacttgttaccagcatggtggtggcagagttattgactgcagcaagagaaaatccaaactcctatgtgcaaggactttcatagtccctacttgaatcaccttggcttttgttctgttggccaaaactggtcatatgtgaagcccagagtcaatgtgggaggagactgttcaagtatccaaggactgggattctgagggggacacgaaagtgtgtggcgattgtgaccatttctataaaaaagtccaccaaactggccgagcacggtggctcatgcctgtaatcttagcactttggcaggctgaggtgggtggatgaactgaggtcaggggttcaagatcagcctggccaacatggcaaaatcccatctctactaaaaatagaaaaattagccgggagtggtggcacatgcctgtaatcccagctactcaggaggctgaggcaggagaatcgcttgaacccaggaggtrgaggttacagtgagctgagatcacaccactgcattctgggtgacagagtgagactcagtctcaaaaaaaataatataaaagtccaccaaactatgtactgattgtgacttacacgtacccaccttggcaattttcaccattagaatagagtggctagaatatattcgccactcagtgcatacatgttaaattgataatagagtaacaataaattactaacaaatttataataacaacagagctgggcacttttctagttgcttactatgtatttttcccattaattctcacaacagctcatcttggtgacatcctttatgatcatcatggataatcatgggcatgcagagagtaaatggtatgacaac

SEQ ID NO: 56690 - DNA, 969 bp, Homo sapiens
ggtgatataatcagaggaataatgctattacatcaagtgataaaaagtaattttgtgatttaatactcattctgaacctatattgtaatgctaatctcatcagatgattgacattcatatacttaatttccctttgagaaatcaggttcatgtattattctgtcttgtttataaaagctacttatttggtttaggaatattgttatttccctctccaacaccaatgtctgcctatgtaattgaaaggaaattgcagtgaatcttccaacaaggagtaactgcttccctgaaataatcacctgcagacataattctggcttctgtgcgttgtctcgatagcagggaaggcagagggcaactggggaatctgattatctccatcataatcccacaacttccctcctttctcttttgcttttaattactgcattgtggtgagttaagaaaagcctatactattttttcttctccactaccagaaagagagagagataactggcattctctctctaaggatttttaaaatacttttaataaaattttaaatagtgtaatgtgtgcccacaagcacattggttctaaagatacttcaaaaatacttcagaatcaaatctgtaagaaaaaaaaattcaattatttatgttcattatattacaagtgatttaaaaastggttatctgtgcatcaaaaaatgcaagcctatagcagctctgattcagtgaattccagttgcggggaggggaggagccctcagatatttttatatcatatttgaaaaaaatggctgattattatttttttaatttatggaatgtatggactttaccagagtttcaaaagtccactttagtacctataagatattttgaaatcagttggccaattcttgccatcaaaaaattgtaactttaaacttgcagaaaaactagttggctctagtcctaaaagagagttcttaattgcagtttc

SEQ ID NO: 56691 - DNA, 2772 bp, Homo sapiens
tcatggtacacttgatcaaaaggcacatgactctgaatttcagaagtatgaacttyaagttccaacaatacaatgccttataggtgaaaaagaaataataattaaagtgattttagaaaggtggactaaagtaaattgtgaggagtgttgaaagtttttgaaagacaagatccataaaaaccaaggtggccttgttaaggtcatggtgccagtgttcactgaatgtttaccacgtccattgccatattctaaggatgtttccctttgaacttgagaaatggtcgttcagggtgtgtgtgtatgtgtgtgtgtgtgtgtttcaatatgttaaggttgcaatctatctcctcattctttaatcccaagggctagaaactttcttttatcaaggtaatttaatttaatgtgaatgcacataaaatgagaatgataatcaaaaggaatgaaccatattctgttatgaatgctgaaatctccttctacataatcttgcaaaatgaaatcacattcaaatgtccatattaatatgactttatttgtttgctctttcaaacttctagtctttgttgagcatccgtggctccctattttcaccaaggcgaaatagcagaacaagccttttcagctttagagggcgagcaaaggatgtgggatctgagaacgacttcgcagatgatgagcacagcacctttgaggataacgagagccgtagagattccttgtttgtgccccgacgacacggagagagacgcaacagcaacctgagtcagaccagtaggtcatcccggatgctggcagtgtttccagcgaatgggaagatgcacagcactgtggattgcaatggtgtggtttccttggttggtggaccttcagttcctacatcgcctgttggacagcttctgccagaggtgataatagataagccagctactgatgacaatgtaaggaagttttaaatagttcaggcatggctggctcactattgctgcaccagccagtgtttctacagaacggcaaccttgagaatgattcctggttggtcacgctgtgaatgcacctgcatcttgtaatatctttaatagactaaccaactaaaacttaaaaccttagcagtctcctgcacaaacctgaatgcatttacttattaaaagtgctaaggattgattagacacaataattactgcctccagttggaggatttgctatatacccacactgaatttagatagcaggacattctccaaggctctggtatgaaagtaaatgaatgattctatgtttaagtgtcaagggtatgtaataaatctttccaatggattcttcaagatctctgctttagtttagattttcaaaaacactgcttaagtagatagcttcattgttaccttaatactcctagtactcatatttttcttactaaaaaatgctgatataggtcttctcaaaattaaatgaagagacacaaatacattattaatacagacagataaaataattgtctgtgtacaaaggtatgttatgtgtttgtggatgtatactcagatgaggaatttctaaacagatgctgcctcttcttagactgtttactcacttggaaatatatcagcatgaggaggcatgactaagtcagaattagatgacttattgctttggtaccctggatgaaactgttgtccatgcagcatgtgtgtgttctttttaacatagagtttgtgttgtcaatgaccatctacatcttgtgtccagaaaataagatggcagctaagtgtgttgcaatcatttatacttccttaaaattaaatagctaccttctcaaaaatcaagtgccttgatcacttgtaggacttttaagttactaggcttttactattagttcagaaataagggtaataactgttaaatatatctcttaagagttttatcaactatattaaaattattttgtattttataaaattatgaaatcaggaagttaacatcttggtttttgctgtatgactaaatggttaacagtttgaacattccaggctaatgatacaataagtcagaaatatctgccatcaccaattgaatatgaaagtgcatgatgcatgtgtttcatgaaattcactgtgtcaccatttggttgtttgcttgtcatattgctcaaattaattgtttaatgcattagcatttttttttacagggaacaaccactgaaactgaaatgagaaagagaaggtcaagttctttccacgtttccatggactttctagaagatccttcccaaaggcaacgagcaatgagtatagccagcattctaacaaatacagtagaaggttggtaacaaattctattttcgtttcaattattttcaccaaacttatattgtctcatttcaaacaaatatatttgtgagttgggaatagtgcattctaatgaaaagacagtctaattcaagagctgttatttcttatatctactcagatattctagaagccttaacaatttattttaaaatgagtgatattgggactaagaatgttttcctaactgtgtagcaactctttgaaaatgcagaacaaagcatttctgttaggggtttctaatctcattagtcatagtgaccctctttttgttccattagtttaagacttcagcagtacagcccttttcagcctcatcctaagtactctcaagattgtagaggaagagcaggtcattttcacaaaataaaaacaagctaaaaagatgattcttgggtcacatcaatccctattctagctctcatag

SEQ ID NO: 56692 - DNA, 1004 bp, Homo sapiens
ggattcatttctactctttcatatcaatatgttttctaacatttcttaagtgctgagaaaattttcctttttgttatcctcaatagcaggtggcagctgaaattgttcaattatatgctttgttaaaaccttataaataatttaaatactattattacagtcagctaaagcctatgctcaaattatattttcttttgtttaaattcccaaatatatctcacctgctaccctacattcacccccagtaaagtcccaaagcccgtgggctaggtagggcattattgttttagaatgttaccaagttggcctagaagagtacttgatttgttgcgacaactgttgttgttctctaggtagagtgttgcgtaaaggaaacagtgatgtccaaaggggctggactggcagattggaagtagggagacccaaggtcagcattatgacatggaggatatgagtaaccaccataatgatttaagatatctgaacagggttgccagaaaaaatacatgccacacagttaaatttgaatttcagataactgatttcttaaagcataagcatacctcatacaatttgttttatatttactatactttaagttctgggatacacgtgcagaacttgcaggtttgttacataggtatacacgtgccttggtggtttgctgcacccatcaaccygtcatctacattgagtatttctcctatccctcccctaggcccccacccctcgataggccccagtgtgtgatattcccttccctgtgtccatgtgttctcattgtctatatttggggcccactgctagtaaacattattcattgtttatctgaaagtcaaatataactggacagtttgtatgtttagtttccaaatgtagcagccctatatatgaagaaagtcttctctgctaaaaaaattattttcctgcttcctgaaattcaattaattagcattttcagttcagttagcaagcgcttccttttaaaagacaagtatctctgg

SEQ ID NO: 56693 - DNA, 1004 bp, Homo sapiens
ggattcatttctactctttcatatcaatatgttttctaacatttcttaagtgctgagaaaattttcctttttgttatcctcaatagcaggtggcagctgaaattgttcaattatatgctttgttaaaaccttataaataatttaaatactattattacagtcagctaaagcctatgctcaaattatattttcttttgtttaaattcccaaatatatctcacctgctaccctacattcacccccagtaaagtcccaaagcccgtgggctaggtagggcattattgttttagaatgttaccaagttggcctagaagagtacttgatttgttgcgacaactgttgttgttctctaggtagagtgttgcgtaaaggaaacagtgatgtccaaaggggctggactggcagattggaagtagggagacccaaggtcagcattatgacatggaggatatgagtaaccaccataatgatttaagatatctgaacagggttgccagaaaaaatacatgccacacagttaaatttgaatttcagataactgatttcttaaagcataagcatacctcatacaatttgttttatatttactatactttaagttctgggatacacgtgcagaacttgcaggtttgttacataggtatacacgtgccttggtggtttgctgcacccatcaacctgtcatctacattgagtatttctyctatccctcccctaggcccccacccctcgataggccccagtgtgtgatattcccttccctgtgtccatgtgttctcattgtctatatttggggcccactgctagtaaacattattcattgtttatctgaaagtcaaatataactggacagtttgtatgtttagtttccaaatgtagcagccctatatatgaagaaagtcttctctgctaaaaaaattattttcctgcttcctgaaattcaattaattagcattttcagttcagttagcaagcgcttccttttaaaagacaagtatctctgg

SEQ ID NO: 56694 - DNA, 1298 bp, Homo sapiens
cactgcctgctcttttccccaaatgtcctctataaggtaatccttttaattaggataattaaattcttattacaaagggcaccaaagtgcaagcattatcgtctgatttcctgtaaagagtattttcctatctcctgttccacatggtgtccatgaacagaagaagcacccagtgagtcagacattatggttacaggtttgtggctcatgtcagtgctgagaagagggaaatgagaaaggaaaacatgaattgggaaaccatgtcagagggcaggccaagataatggaagaaccagaaggcaaaggaaaagggtgttgtgtgggaaccaaaacgttgcttcaggtaggaaatgtcagagaaaaatagaataacatttaaaattaaggggcagggaagatctaagcagatttttttttttaagtttgaatttgatcatagaaactagtgggatgtacccattcctctagattcattacttcagtatgatcttcaactttttcagctccaggtttctggtgaaattgactaataattcccataatatacttaggtcaccatgatttgggaagggttttgggagttccatgggtaaggccagaggggagtaaggcaagtgatgtgcgttttgaaatattgctctggcagccaggtgcttaaaggtgggaaacggtgagaccaggtgctaggacgagttctcatgtgtgcccatgagctcttttctgccccattagtccatgcctgccactgcccgcccacccatgagtggacaacagaaaacacaggtaagaaagcgagggttggttcactacacatctctcatctctttgctagaaacacaatcccaaccctatgtcttcttcacagaggcccggcatgccatcctttatattttccttctagaagatagtataccgtcttgaaagcctagtttaaattgctttttctctaagctttgtggtattttttatatgccattagtcagttattacatgttactagcaataacagtcccacctaatgtatttaatttgttttgaaactcatagcacatctttacacatagaagaggcagcttttaattccattgataacttcctccttaaaagtactcttttaaattcctaaccacattcttcttggttttccttctacccactgaccaagatctactttttccactcagcccttaaatggtagcatttgccagggcccctctggggatctctgctctcctcattccaatcactgactttttcaacacccacagcttcagcttcaactcctacctatatrccaa

SEQ ID NO: 56695 - DNA, 652 bp, Homo sapiens
ctgaagtgtactaaggcctggggcttcataatgaaaattgtataatggcgcaatctatgttaacattcctagaggtaaaatcaccaatttcattgggtatggtataggccaatgttacgttgaagtgcaattcagtaaaaaatttttaaaacttccaaagtgttagaatcccagcaaatagctctttcaaggctgggcttgatctaagcattaaaaagttgaaattccagaggaattggttatctgcatattatttagacaaacctctacagataattatttttaaccctgagaagtcatacaatgctgtgtgtcaaagatagacttgaggtggaatcagtggttcatgaacactggggatgaatatattcaactgcctactcagtatcctcagttgactaataggttgcaaagtgtatctccaggtaacaaattgtcctttgatagtacagactgaatgtattcatgtattgatctggctgctacagatgtgagaaaaaaacattcttatgttgaaagcytaacctccaatgtgatggtattagaaagtgaggcctttgagtggtaattagggaataaaggtataccccttatgaataaggctgatgctcttataagaagagacgcaagagtgttctctctgccctctgcc

SEQ ID NO: 56696 - DNA, 652 bp, Homo sapiens
ctgaagtgtactaaggcctggggcttcataatgaaaattgtataatggcgcaatctatgttaacattcctagaggtaaaatcaccaatttcattgggtatggtataggccaatgttacgttgaagtgcaattcagtaaaaaatttttaaaacttccaaagtgttagaatcccagcaaatagctctttcaaggctgggcttgatctaagcattaaaaagttgaaattccagaggaattggttatctgcatattatttagacaaacctctacagataattatttttaaccctgagaagtcatacaatgctgtgtgtcaaagatagacttgaggtggaatcagtggttcatgaacactggggatgaatatattcaactgcctactcagtatcctcagttgactaataggttgcaaagtgtatctccaggtaacaaattgtcctttgatagtacagactgaatgtattcatgtattgatctggctgctacagatgtgagaaaaaaacattcttatgttgaaagcttaacctccaatgtgatggtattagaaagtgaggcctttgagtgrtaattagggaataaaggtataccccttatgaataaggctgatgctcttataagaagagacgcaagagtgttctctctgccctctgcc

SEQ ID NO: 56697 - DNA, 624 bp, Homo sapiens
cctctagcttgttgacttcctttcttaaggtttcaagggacttgctgggtttatagttctatacccaggtgctggagcaggcaggctggaaagaggggtgatgatggggtaggggatggatagtgtaacctccaaagtctcctgagagtggctggaggaggggtcttccaggtcgccccgtctcccagcccaatctgtcacagacctttgtgggatgtgtctgggatgtcctgggtcctagcaaagcctgtgtttctgcctgcgattatatagcttcaaaaataaaagtcttcatatgagtatctttggtacagcctagtgctgtattaagcattttaaaatgccctttgattcaatcatgaactgattatccatccatccatctcttcatcattcatttattcattccacacttattgagactctaytatgtgtcagccttgtgctgggcactgaccaaatgaggaaaggggaagggagacaatgaacaaatcccttatcgttccaaaaatgggagccatagaagtgcacctgacccactgcatgtcagggcgttagtgagccgcggaagccccaggtgctcagaggaggggacagtgcccaccaagtggtgagtctggagaa

SEQ ID NO: 56698 - DNA, 684 bp, Homo sapiens
ttcaccacagcgggataaagtggagagtggagggcagcgaaaggaataccactggggtatttaaaagtgatgagggctctctggcactagacagaacaagcccccagatgctgagaagccatgaggaatccagacctccaccagggttcaatcccagtccaggtggggtgtggagatggggcagccaaggatgaggcatggcaggacctctctgttgggatgacaggggcctgagtgggactggggaccagcacccagaggtaaggagcccggtttgagtttgactctgagtcccagctacttcttgtccctatggaaagcttctcattgcagctgtgggggagaagtttctatctcaagccaactgcctacccaaggacagttcttgtaggtggtgaccagtctgggacaagaagccacacgcacacatacctgcaagcaagtgggtgtgagggcggggagcctcagctaacttgcagcatcccctcctccccatcctccaaaacccctctctgttctggctccaaggaagaaactagaatgtcagaaaaactcgcaagmcaagctcctgtgatttcagcctctccctcagcacaggaaggggagcaagaggggccgtgctggtgagggccatgagtcagacgtggcccatctggggcactgacccgcccctgtctacaggct

SEQ ID NO: 56699 - DNA, 710 bp, Homo sapiens
ccaaataactgcttcaaattattgtgtcttatgccctctaggtccccccaaaatctaactggcattcctcttgatgcagctttaattcagtcccttgttggtagtgggtaggggagaaccatgtccactcttcctgcatgccatataagctgagagctttgaacccgtgcaagggtagggctcctggccacaatccctctctgtcccaggcctctgccctctctggggtctcctgttttccggtgcccctgacattcctcattagcaggggtcagccctcaaggcctgccaagctgtattctccacccaacgcagttcccacccagggaggctggggttgctctgggtcgggggtgaactccatttccggacccctggcccgcccagttgcagctgcaaaaggcattaagcttttttttggagaaagaatgggcttgggttgatgatgatgacagctggggagygttcctgagctcagcctggccctatcttgcttcccttccttggcccctgctcacctctgcccaatttctaggccatttctcatgtagaggtgggccttatctttaccccttgaccttgaccagacctggacaatcagctggtctccagccaccctgtatgggagcagtttttgtgttcagtcctgggcttggtgctgggttaggggataggggtggggaagagggcttcaggggaagcggaaagag

SEQ ID NO: 56700 - DNA, 639 bp, Homo sapiens
tgttgattggtgaccttacycccaaccctgtgctctctgaaacatgtgctgtgtccactcagggttgaatggattaagggcagtgcaagatgtgctttgttaaacagatgcttgaaggcagcatgctccttaagagtcatcaccactccctaatctcaagtacccagggacacaaacactgcggaaggccgcagggtcctctgcctaggaaaaccagagacctttgttcacttgtttatctgctgaccttccctccactattgtcctgtgaccctgccaaatccccctctgcgagaaacagccaagaatgatcaatttaaaaaaaaaaaaaattgttctatctgtaatataataagattctgtaataccacatttgacatctgcaacaagttccaagtaaaagactgcaatagaaaaaaatgttttgcacatttcagatcagatgttgcatatttaaaaatcaaatctcatttctaagaaaaggatgtagcttgttttgccaacagggcacaaaatagagttcaaaaggttcatgtcacagtttgaatcaccatccaaccaaagtgtggagagacgattcatacatcttgtgtctggcactaactagtggctatccaagcttcatcaacaacaataaca

SEQ ID NO: 56701 - DNA, 639 bp, Homo sapiens
tgttgattggtgaccttacccccaaccctgtgctctctgaaacatgtgctgtgtccactcagggttgaatggattaagggcagtgcaagatgtgctttgttaaacagatgcttgaaggcagcatgctccttaagagtcatcaccactccctaatctcaagtacccagggacacaaacrctgcggaaggccgcagggtcctctgcctaggaaaaccagagacctttgttcacttgtttatctgctgaccttccctccactattgtcctgtgaccctgccaaatccccctctgcgagaaacagccaagaatgatcaatttaaaaaaaaaaaaaattgttctatctgtaatataataagattctgtaataccacatttgacatctgcaacaagttccaagtaaaagactgcaatagaaaaaaatgttttgcacatttcagatcagatgttgcatatttaaaaatcaaatctcatttctaagaaaaggatgtagcttgttttgccaacagggcacaaaatagagttcaaaaggttcatgtcacagtttgaatcaccatccaaccaaagtgtggagagacgattcatacatcttgtgtctggcactaactagtggctatccaagcttcatcaacaacaataaca

SEQ ID NO: 56702 - DNA, 730 bp, Homo sapiens
atacttttggggaggggcacaaacattcagtccaaagcacatatattatgtaatctttcaaaatttgtttttttcactcagtgcaattctttgaaaattcatcaaagttttgcaaatatcaatagtccatttatattactgactactattctgtgttatggatatactatcattctatggtttctttagcagtgaartctaattcagaagaacatctgaatttttcccagtttttgggcactataaatgaagctgctatgaacaggttctgtgtagacacaagttatcatttctctagggtacattttcaagagtgtgattgctgaaccatatgctaagtgaatgtttagttattcaagaaaccaccatacaaatttccagagtggctgtgacattttacatttctactagccatatatgaaagatctagtttcttcacatatgaggcagcattggagtgagatcaattttgagggaaagtgagaaaacagggaatcctgtatttggtaaatgagttgagttgtttaaatgtggtatctagaactttaaaatattagtcaagaaaagacaagagggaaaagcttcatataaaagaaaagatcaccagaataaggaaagtctcaaaggcactttaccacaaatttttcctctgaactttataggtatattcacccgttctatggcttttaaacagggataagtaaaaggcataagtttctgcatggctctt

SEQ ID NO: 56703 - DNA, 1752 bp, Homo sapiens
tgtcctcttatagaaactaaagaccaaaaagttaggtgatttattcaaaactgaaaaggtgttaagtgacagtattagaaccatgtttttcttttttttctttttctttttttttttttttgagatggagtcttactctgtcacccaggctggagtgcagtagcgccatctcggctcactgcaacctccgcctcccaggttcaagtgattctcctgcctcagcctcctgagtagctagtagctgggattacaggcacatgccaccatgcgggctaatttttgtattttcagtagagatggggtttcaccatgttggccagtctggtctcgaactcctgaccttaagtgatccaaccacctcagcctcccaaagtgctggaattacaagcatgagccaccatgcctggccagaaccatgtttttcaatccagtatatttacagcatgatttcctcccttaatttgaacttkatattgtattctatttataagttaaattaaaatagcagttatttctgaaaaagctccatcaaaatcaatacgttgattacccattcttaaacgtgccactgtgggtttctgttgctatgtgacaggactgatattttaagtgcctggtaaagtgcaacacaccaagtggacattcagtttaaggctgttttatgatgcatatcatttgtgctttttacagttaaaatcaaatctaaaatgttgacaatgatggttcatatatcaactttactcctccattttatagcccatcttttattgatttagaactctgtacctctttattatattgtaaatttaaaaaatatgaaaacatcagagagaataataaatctttacatccaaacataataaggaggatgctgcatatacagaaatacacatgaacttttctctggaaagaatggcctattacaaaccaccactctcttctatttgcacatgaaggtagaaaccacagtggcattaagagcatttttccttaagacatgctcacatgatatctaggaggccaacagtaagaacgtgaaaacttaattctctgctaggaaacaaatacatcaaaagatctggtatttttagttttgatgaaactatactgttattatcaatttaaaatagttttctatttggcagattttatcatttgggcttaaattttgagaaaaaacactttcctaaaacaaaactgagatttttaaaaatatatttagattttaaatatatatagattttttaaaatataaaacatacacagaagcatgttgcaccaggagtccatatcaggagttacactctctagagtgaatcctagagattgtatacataaaaaagctacacccttattctgttggatggctcataaatgttgatctggttatagctttccacactaattttcactatttctcttaacaatcatcctttataatcattctttatatccaaatagtatatatcctttactatttgctctgattttgacagggaaaggtccttcataagaattttgttgttccatcagaagaaagcattttaacgcctctagctcattttcccctcaaatatcccaaatacagtaaagccacctaaattcccaaaccccatatcaaaaacagtacactgaaaaactccaaagactttgacagcgacaagaccgccattcatgtgttccttcagcaagtgccagacgctgttatgaaagtgataagacactgtcccaatcctcacagtgtgagacagt

SEQ ID NO: 56704 - DNA, 996 bp, Homo sapiens
ttcattcattcaaccaatatttactaagtctgtcacggtattaggagttatatgaggaggaagaaggaattagcttcagttatttattccacaaataattttattgtgtgctttctctgtgcaagacactaaagtgagtgatgaatttatagtaaattaaatagttttgtccttatgaagcttgcagtctgctggagaagagcttgataataccttgcccaggtttagcatatatagttgtcagtgctttcacacatcatatcatttgatcttaatgaaaaccctgtgaggttaacaaagcagacactttcatccccactttagattaagtgacttatccaaaatcacattgccaataaatatcaaagcccaaggactcaagacttctgactctactccagtgcttgctccttccaggacaccatagtaatcttattttatctttctttggtgttttaggacaatcaaataaagcttaaactccatggaggcaaaaagaaggtaaaaattatacaaggggacatcattgcttccaatgggcttctgcacatccttgacagagccatggacaagttagaacmcacatttgagagcaacaatgaggtgagtattcagataaaagtcacatcaggccaggtccatcttcctttgttccctggagagtcacatccagagcatgccagcactctgtgcttgtgcttcgtttgtgctaggatcctgagcagagagaagaagaggtggtttgtctgtttccaatagaaacctgggaatctctgcagaaagaaagcaagacgtacagtaacatatgtgggaaagatctggatttttttttacctcttttattactgcatcaggcaactcagtccatgaccaatcatcatgaaaatattttatagagggcagttattgctgcaataaaacttattacttctgacctagatgatgagggccaaaggatacttcagaacatgcagatctgaactactgtttcaacga

SEQ ID NO: 56705 - DNA, 387 bp, Homo sapiens
agcctgggtgacagtgagattccatctgaaaaaaaaaagaatcagattcactccctacctttcaggcagacctcttccatcagctcctttatttgcaaggcctgtggccttgggcaagttactctacttctctaggcctcagtttcttcatctgtaaaatggggatgatgaaaatagcaagtgtcttttaaagttagtacaacttataaatggaaaccgcttgccttagaacyatgcctagtacaaaacatgtgccacaaatattattatctcactatttttatctattgttgttgctgttagtctaagtacagtgacataaatatcaagaagcttgtagaacatgtagaaagttccaccacaataggcattgaaaaaaataaagtt

SEQ ID NO: 56706 - DNA, 866 bp, Homo sapiens
tggctaactttgtatttttagtagagacagggtttcaccatgttggccaggctggtttcaaattcctgacctcaggtgatctgcctgccttggcctcccaaagtgctgtgattacaggcgtgagccactgtgcccagccctatttctattattattacatactcactataatgtagaatcaatggaagccctgagcttgtttttctgcaactagatggtcccatctgggttgaagggagacagtgacagatcatcaggcatgagattctcatatggagtgtgcaacctagatccctcgcatgcacagttcacaatagggtttgtgctcctatgagaatctaatgccgccgctgatccgacaagaggcagagctctggcctggttcctaacaggccatggactggtactggtcagtggcccaggggttgggaatctctgctctgaagtatttatggggggaaatgatatgtaggattttttctaaaaatactccaggggaaaaagtgaggggaggtgtagatgaaacaagatgggcagaatcctgacaactgttgaagctgattgacgggaatatgaggcaggggagtgatgctattcattctattttcatgtatgcttgaaaatttacatactttaaagcttaaaaacatttttaaaaatcatggctcaataattacttaaaatagatgggctattagttagggtttgaaaagtctcgttacagagatttgttataacgcatatgaccttacacaaattcaacgatttaaacttttgtcagaaattttctttaacaagaaaattctggaccccgataatgagtgatacmaatcaaatcaaaggcacagggttttcaatagggatcc

SEQ ID NO: 56707 - DNA, 1454 bp, Homo sapiens
ggaaacacaagagattgccactcatacaagtttacacagccagaaaatagaaaagctacgagttgagctcagcccagtatgtctatgattttacagactcaaaattaattataagatttcctaatcttcgatttctgaaactctgccttgctctagaggaaaacaagaaaaamaatgaaaaataaatgtctcttttttacaaaaattaaaacagaacaaactgcaataaaacaacagaggatgaatccagaatgtgattgattttttttcttactaggaaaggatctagaggccagaaggctggatttttcaggatctcctttcaatcaatgaatctgtgatagaagcagatgaatcaaatctcatctttgtgtgattataaagctgtctgtggtattcacgccaccaggggtacatagaagatgcctgagtgaggtttggcaaaagtactaagggcctgtccacctatacatgcccttctcaggaaaaccaaggttcaagctctctattagctcaactggtaaggcgtaagacatggaaggttgaggcccaatgttagaaatagatggatacataaaacttcatcaagttaatgtcactttttctcctttatttataggaagtacatttgaagaacgcaagtagagggagtgcaggaaacaagaactacaggatgtaggaagaccctcctgaggagtgaagagtgacatgccaccgcaggatcctttgctctgcacgagttacctgttaaactttggaacacctaccaaaaaataagtttgataacatttaaaagatgggcgtttcccccaatgaaatacacaagtaaacattccaacattgtctttaggagtgatttgcaccttgcaaaaatggtcctggagttggtagattgctgttgatcttttatcaataatgttctatagaaaagaaaaaaaaaatatatatatatatatatcttagtccctgcctctcaagagccacaaatgcatgggtgttgtatagatccagttgcactaaattcctctctgaatcttggctgctggagccattcattcagcaaccttgtctaagtggtttatgaattgtttccttatttgcacttctttctacacaactcgggctgtttgttttacagtgtctgataatcttgttagtctatacccaccacctcccttcataacctttatatttgccgaatttggcctcctcaaaagcagcagcaagtcgtcaagaagcacaccaattctaacccacaagattccatctgtggcatttgtaccaaatataagttggatgcattttattttagacacaaagctttatttttccacatcatgcttacaaaaaagaataatgcaaatagttgcaactttgaggccaatcatttttaggcatatgttttaaacatagaaagtttcttcaactcaaaagagttccttcaaatgatgagt

SEQ ID NO: 56708 - DNA, 614 bp, Homo sapiens
ctgggagctgagccaatgccatctgttgtggctgtaatctgacacccacatcagggggggcctgatgctgctctgagcctggttggtggacatccctcttccatcaggcaacacaaaacaccctccgtaggggcaaaccccagccaggcagatgggacagagccagatgtgacaccccacatcacagttgacatactgctagctccatccttgccccagagtgagtggccttctggagatgaccagatgtttgggctcccagggataatcccaattcaaatggcagtcctgagccttccaagaactggaccctgaaggtcaggacagttcagggctgcagaggcttgccagggagacgtccactgtctgggragaggaaacagcttcctgggtgcaggctgagaggagaggggcccagacacacctgggaaggggcttcacacagaggcagaggtagtggcagtgaggcccaggagacagtagtcctgagagcagaggtgtccacaggcagaagtgagattaattagtacagggaaagtggccagggctagaaaggatggcttttctgggagagaaagggccttgaatgtaggatcaagggacataggcttttt

SEQ ID NO: 56709 - DNA, 614 bp, Homo sapiens
ctgggagctgagccaatgccatctgttgtggctgtaatctgacacccacatcagggggggcctgatgctgctctgagcctggttggtggacatccctcttccatcaggcaacacaaaacaccctccgtaggggcaaaccccagccaggcagatgggacagagccagatgtgacaccccacatcacagttgacatactgctagctccatccttgccccagagtgagtggccttctggagatgaccagatgtttgggctcccagggataatcccaattcaaatggcagtcctgagccttccaagaactggaccctgaaggtcaggacagttcagggctgcagaggcttgccagggagacgtccactgtctggggagaggaaacagcttcctgggtgcaggctgagaggagaggggcccagacacacctgggaaggggcttcacacagaggcagaggtagtggcagtgaggcccaggagacagtagtcctgagagcagaggtgtccacaggcagaagtgagattaattagtacagggaaagtggccagggctrgaaaggatggcttttctgggagagaaagggccttgaatgtaggatcaagggacataggcttttt

SEQ ID NO: 56710 - DNA, 807 bp, Homo sapiens
gcacaaaaaaatctgcaaaaacacaatcttgcacaaaggccatcacaaccttacacacacacacacacacacacacacacacacacactcacaccttctgtgaggaaatctacctagcaactctctatccaacctcaaactggtgccacccttgtcactgatccttgtatccaaagataattatctcaaaacaattaagtaatcctcatttttcctttaaaagcctttgttttcctttacctccctgaatattcatgcagattactgtgacacatgtattcccactgcaatgccctattcctgagtaaacattttcttttagagagcctctctctgtgtttgctatttaggttaatagaaccttgttcccttttctggtgcgctgggcaggaatttattcagactgtcacagtaattcagggacagccaggatgctttcaccaccrgtaatatattacaaagtggccacaattccccatccttcctgtatccctgctcttttcagtgtgactttgcagcttctcttgtcaagagatgaaatgtgtttctgcctcctcttgatgtagtctggacctgtgacttacattggccaaaagaatgtggcagaggggcatggtttgacttctgagcttaggcttcaagaaatcatgcaagcctctgattgttctgttggtaccctacccaaccaccatgtgtacaagcccaggctagcctgcaagaggatgaaatacatatggagcaaaaataagccctcccagctgaagccatcctttgccagccagccaaccagctaacccagaagttgac

SEQ ID NO: 56711 - DNA, 728 bp, Homo sapiens
gtctcagagtccccttttccaggaatgcttgagtactgcgatccacaaaccacccttttccatcagcctctgtccaatacagagcagtgactctcctgcataactacatgctgagagcaccagcatcagtgacctcgacctccctgcctgccacccctaaggacgctcaggctggtgaatacacaataaaatcaaccccggcctggctgtcacctgggcccccatgaggcacgaccttgaacgggggaacttcccgcagcctaactctctctcctatcaagaagtgaccactrtgtggctgtttataccctctggtccagaggatgtggccaaggagggcaccaacccccccttagtgcttctctgctggggttgggcacaagctctgtaccactcggcttatggtgcttaatgggggagagctgcccccttcttaggcccacccctccggactcaggggacaactggaccccttggccactatagaaacacgtctctctcttaaggcttctggtgaaggtctccgggtcgaatggcccatatgagatgagactcaggctctcccaagagataactacctgccccaccggcggtgtcactgggaagtgctccctcaccttcctcttccctatatcctaggagcttctccgctccacttccacccagggtcttgtaggagctgggggggggggggggcgccggggctctgggctccagtgcgccccagt

SEQ ID NO: 56712 - DNA, 728 bp, Homo sapiens
gtctcagagtccccttttccaggaatgcttgagtactgcgatccacaaaccacccttttccatcagcctctgtccaatacagagcagtgactctcctgcataactacatgctgagagcaccagcatcagtgacctcgacctccctgcctgccacccctaaggacgctcaggctggtgaatacacaataaaatcaaccccggcctggctgtcacctgggcccccatgaggcacgaccttgaacgggggaacttcccgcagcctaactctctctcctatcaagaagtgaccactgtgtggctgtttataccctctggtccagaggatgtggccaaggagggcaccaacccccccttagtgcttctctgctggggttgggcacaagctctgtaccactcggcttatggtgcttaatgggggagagctgcccccttcttaggcccacccctccggactcaggggacaactggaccccttggccactatagaaacacgtctctctcttaaggcttctggtgaaggtctccgggtcgaatggcccatatgagatgagactcaggctctcccaagagataactacctgccccaccggcggtgtcactgggaagtgctccctcaccttcctcttccctatatcctaggagcttctccgctccacttccacccagggtcttgtaggagctggggggggsggggggcgccggggctctgggctccagtgcgccccagt

SEQ ID NO: 56713 - DNA, 874 bp, Homo sapiens
aaatatgcacctcctaccagatagttgctacctggtgtagggttcactgagatcttctttccagatctaaaattagcatttttgccccctggaaaaccacagggctctaatccagactataaatggcttagcttgagttcctcccaccccctgaaagtagagcctaagacaaggaatcaggtatagatggttcatctgggatctgatcccaggaagcaagacactcaggagtgcgagagaaggaggaataggcaaataaggacccatcaacaaggtcacawgtgtgggtgtcggggcagatcccatcagaaccttctgcaaagtggatagcatgactcagagtggtccactaaagtacagcagccacggccacaactggaatcagaggtgaggctctgtggatgtgagtcaggaccccagaggtgtctgagcccactgagaaaggaacctttaatccgagatcagaaggatgaatcagaatcagaggaaaggaagcagggagagaaaggcgaatgttctgttcagaaaaaataggatgttcaagggtaggagagcagggcccttttgtagaactaggggaaaaaattacctgaggctggaatagagacagcaagagaggaggtgaacaaatggtgggaaatggagcttggggggcctataaagcaagttgaagcttcatctgaagggcaacaggagccactgaaaagtttttaataggggagagaatgctcagattttcatttctaaaaatggttatactgtcccctccgcaggtggaccccctgctgcttttccaaagaaaatgcaagcatcaaagtagcaaaccaaacttttatggcaacatatagcatatatggtctgcacacatggggcc

SEQ ID NO: 56714 - DNA, 633 bp, Homo sapiens
aggagttgttatagcgaattccaagtttctcttcaaagaatcagtatgtcaatatgttcagctctcttattctttgattttccattttaaagtttaacttcctggttctctttggcccccttgcctctagtttcagtaaacaactttcccgccagttctaatcagtagttcagatctgttcccctggtcacctgctttaacctaagtcaccctggttacctgctccatcttgagtcacccctggtcacttgctctgacccaaatcatcctgagtcacctgttctgtaaccacccttcccaccaaactactcaccccgccactcaggatcgtagtctgctctctttaaaacagccagttggaattagctcagactatgcagttgaaccccaggaaataggggaacgacacagcagtaggggctacctgcaacaggaataagaacccctgcccctcccctgtccaggtgtgctctcaccattactccatccacaagtcgcacgcttcartagaagtaaaaattgccttgctgagaaaattaaatttatgttcaagtgctatttcattgtggcactgaggaacaagcattttgtttctaacagagtggcaaatctaaataactgataattgtacaa

SEQ ID NO: 56715 - DNA, 1073 bp, Homo sapiens
atatactttgtagcagggatattgtacattgcactggggttataccccagtacacacccaacacacatttgccttattcacagtgtatggtgtactcatcacagtattctgtaattatctgcctccctgactatactgggaaatcattaagacagggacttgttttcttcgccactctatctgtgacatttggcttataatgcaaactttataaacatttgtagggaaggaagaagaggaaaggaaatcaaggatagaaatttcaactacggaaatgtcatgtttcaaagtatctgccctcagtaaaatagctattggctatattattggctattccccatgccctcattctggactttttttctgttcccttttcatttcttccctctttctttctcctaattctgcctagaatcacttaatatcctgttcatgtctggtcttgcttcttgtatcccatgggaaattttggtgggaatttagcgttttgtaaatgaggggccttcatgtaagacaatttgttttccatgtatgaraaaagcacctagtaggtattccctggtactttcacaaaaccttgcactgatctgtccaggagcccacctcatgacaaggaccatattctaaatgagtctcaatatccaactctttatgcaatgccttgaaccttcatgagctctctaaatgcctgatgtggatgctgaggatcaggcagaaatacaataccacttctaaggaagctcagtaactcttatgcacagtgccagatagcccatcacacaggacaggatcacagaaagaaagaggaaaaaaatctaggaagaaaacatttcattttagcttatagcttttaagttctctataatttttggaaataaaatttttattttacactttagtattgttctgtttgaattataaattggggtgagtgtgcacgataatcctttcaaggcttaaagattataaagccatagttcttaaagtgcagtctggacccagagcatcagcatcatgtaggaagttgtcagaaatacaaattcttggacacataccaaacctgtattttaagc

SEQ ID NO: 56716 - DNA, 1073 bp, Homo sapiens
atatactttgtagcagggatattgtacattgcactggggttataccccagtacacacccaacacacatttgccttattcacagtgtatggtgtactcatcacagtattctgtaattatctgcctccctgactatactgggaaatcattaagacagggacttgttttcttcgccactctatctgtgacatttggcttataatgcaaactttataaacatttgtagggaaggaagaagaggaaaggaaatcaaggatagaaatttcaactacggaaatgtcatgtttcaaagtatctgccctcagtaaaatagctattggctatattattggctattccccatgccctcattctggactttttttctgttcccttttcatttcttccctctttctttctcctaattctgcctagaatcacttaatatcctgttcatgtctggtcttgcttcttgtatcccatgggaaattttggtgggaatttagcgttttgtaaatgaggggccttcatgtaagacaatttgttttccatgtatgagaaaagcacctagtaggtattccctggtactttcacaaaaccttgcactgatctgtccaggagcccacctcatgacaaggaccatattctaaatgagtctcaatatccaactctttatgcaatgccttgaaccttcatgagctctctaaatgcctgatgtggatgctgaggatcaggcagaaatacaataccacttctaaggaagctcagtaactcttatgcacagtgccagatagcccatcacacaggacaggatcacagaaagaaagaggaaaaaaatctaggaagaaaacatttcattttagcttatagcttttaagttctctataatttttggaaataaaatttttattttacactttagtattgttctgtttgaattataaattggggtgagtgtgcacgataatcctttcaaggcttaaagattataaagccatagttcttaaagtgcagtctggayccagagcatcagcatcatgtaggaagttgtcagaaatacaaattcttggacacataccaaacctgtattttaagc

SEQ ID NO: 56717 - DNA, 1062 bp, Homo sapiens
ataaatggaaccatacgatatgtggtcctttgttactggcttccttcacccagcacgttttcaaggttgatccatgttgtagcatttatcagtgttttatttctttttattgacaaacaacatttcattatacaaatgtgccacattttgcctactcactcatcagctgatgaacactgggttgtctccactttctattatgaataatgctgctatgaacattcatgtacatatataaatgcttgttttcatttctcttgggtataaatttaggagtggaattgctaagtcacatggtaactctatatttaatctttgaagtaaattccagtctgttttccaaagaggctgcaccattttatactcccaccagcagtgtgtgaaggttccaatttttccacatctttgtcaactttttattaatttttattaaatactataaggagcttcatcattggagggtgttttccaaggagttctctaaatttgatctttgctgagaagtgatttcttaattttagcaaatcctgttgtcttgatgagattatctccaaaaccatgaagccctggatcctttttgtttaatggtctttcctatagtttttaatctctccttatatgttaccataatcaagaagccagatggcacctgcaacactcggtcaggaaatctctctagtgagatcatattaggcacatgttttactttcagtctgccactacgtaagttcttccttcctccagttttccaataacatttacctcactcttctagaagtcctcatctacagccttgtcagacatgatgctgctatagtttcttcaaagcacttgaggtttttaccagcrcatgcctacttaacacccactgccaagttccaaaacccctcccatattttgggttttcattatggcagctgcccacctccaagtaccaagttctgtatcagttatctgttgctgcataacaaattaccccaaaacctaccagttaaaacacgtactaacccagagtttctgggggttaagaagccagaagtgagtggtttagctaggtctttc

SEQ ID NO: 56718 - DNA, 519 bp, Homo sapiens
ccagggtcaaaggcttaggagacacagagacaggaagggggctgctgtcacccacccctttccctctctgtctgccctggagggtgggccacgtggggacccttgtggaaatwtctcctgcttggtgcctcctttgcacacacatggggaagccatcagggctccttgcagacccccagctgcttcccttccagccaaggagagatgccacctgtactgcgagtccagggagaccggggaggtggtgtccatgaagcgcatggtgcatgacgggacgcgctgctcctacaaggacgccttcagcctctgtgtgcgcggggactgcagggtgagtacacagaggccggcacggggggctaccgtgtcaagtctcagcttcctgggtactgacctcccccttttcggggtattggcaagatgcatgaggtgaagcatacgaagtgtcagaaacaatgcccggaccagggcaggctcttggcaaatgtctgtttacccctcccctgtgctgggagcctgaga

SEQ ID NO: 56719 - DNA, 519 bp, Homo sapiens
ccagggtcaaaggcttaggagacacagagacaggaagggggctgctgtcacccacccctttccctctctgtctgccctggagggtgggccacgtggggacccttgtggaaatttctcctgcttggtgcctcctttgcacacacatggggaagccatcagggctccttgcagacccccagctgcttcccttccagccaaggagagatgccacctgtactgcgagtccagggagaccggggaggtggtgtccatgaagcgcatggtgcatgaygggacgcgctgctcctacaaggacgccttcagcctctgtgtgcgcggggactgcagggtgagtacacagaggccggcacggggggctaccgtgtcaagtctcagcttcctgggtactgacctcccccttttcggggtattggcaagatgcatgaggtgaagcatacgaagtgtcagaaacaatgcccggaccagggcaggctcttggcaaatgtctgtttacccctcccctgtgctgggagcctgaga

SEQ ID NO: 56720 - DNA, 696 bp, Homo sapiens
acttcctatcattttcaggttctgtgtttgattttttttacatattaatttctttgatccacattaagctcagttatgtatttccattttataaatgaaaaaaaaaaaataggcacttgcaaatgtcagatcacttgcctgtggtcattcgggtagagatttgtgaagctaagttggtcttaatcaaatgtcaagcttttttttttcttataaaatatagattttaatatgagttttaaaataaaattaattagaaaaaggcaaattactcaatatataaaatgtattgcatttgtaataggtaggtatttcattttctagttatggtgggatattattcagactataattcccaatgaaaaaactttaaaaaatgctagtgattgcacatttaaaacaccttttaaaaagcattgagagcttataaaattttaataagtgatcaaaccaaatttgaagagaaaagaagaacccagagaggtaaggatataaccttaccagttgcaatttgccgatctctacaaatattaatatttattttgacagtttcagggtgaatgagaaagaaaccaaaaccgaagaytagcatatgttaagtcttcttaaggagccctcccttaaaagattgagatgaccaaatcttataccctcagcataaggtgaaccagacagacctaaagcagtggtagcttggat

SEQ ID NO: 56721 - DNA, 1417 bp, Homo sapiens
ttattttattaacataccttaaaaatgtaataggacaatgcctcaaagaacaatttcaaaataaaaacacagaaaacaaatgaccagcaaaattgctctgaagtcttaaaaacagaaataaatacttcaataatcataggtaatatggaaatccaatgtatgacttacctatagaaaacccttctggaatttcatttaaatctaacgtcaatatgagctatgtaggaagtccattaataaataagaatattatataggtacacatgtatatattaattttaagccatatgcagccctatttgaaaatgttaaaaaaaatcatcaggattagtccatactgattattaaaaaataaaattgtcactgctcattgtagaagataaatgtcagctgtgcagcagatgtgtttatagccacccagtaatcctatcgcctcaataatgcatttccctttttttagttaaaaacttaattacattaagaaactgtatgtgtttaggaatatgaatatagaaggagtaatcatcgtttagtaaaataagttttacttgcctattaaaatttactgtgtttgtgaagatgctgatagtacattacatatggagatccaagtgcacatagtcactaattctttaaactatgtttgatattagtaataatttactttacatatatatcggaatttaattgaaaaatagtaaatgactgctaatatacattattcttctgagttgcatttttgcttaatgaaatagaatttttaaaaaaattgtttatctttattcctactagattatacatttcatgagaaaagcattatctctttattagtatatttgtttacctgtattagaacttgactttgaaataaaccagatataataccattgttgtagatgtatttattgtagtaaaaataatattctgcatctgagttttgagcaaggagattttacagtctcctttcagttagaaaactacaagaccctcttaactgatgttggaaatgtaagtaaagaagataaaaattaaaatgataaagaaaagcatttggggtatagtakcactgtgtttcccaggagaatgagttgttaagtgctcactccgcatttttcagtaacatatacttaaagtaagcacacaggggctacagacgctattttttggttcaacatgacctgagcagttaattatttgtaaagggaagaagcaagaataggctcagggagggagacagagaaagactgggtagggcggggagggagggagagtttcacctgtatctaaaacagatcagaagcaatttcttcctccaactcctcacttgtctatttctactaataaagagcaaaaccagacaaaatagattattgtgtcatttttgttttcttattttgtaatacacagaaaaactcaa

SEQ ID NO: 56722 - DNA, 1417 bp, Homo sapiens
ttattttattaacataccttaaaaatgtaataggacaatgcctcaaagaacaatttcaaaataaaaacacagaaaacaaatgaccagcaaaattgctctgaagtcttaaaaacagaaataaatacttcaataatcataggtaatatggaaatccaatgtatgacttacctatagaaaacccttctggaatttcatttaaatctaacgtcaatatgagctatgtaggaagtccattaataaataagaatattatataggtacacatgtatatattaattttaagccatatgcagccctatttgaaaatgttaaaaaaaatcatcaggattagtccatactgattattaaaaaataaaattgtcactgctcattgtagaagataaatgtcagctgtgcagcagatgtgtttatagccacccagtaatcctatcgcctcaataatgcatttccctttttttagttaaaaacttaattacattaagaaactgtatgtgtttaggaatatgaatatagaaggagtaatcatcgtttagtaaaataagttttacttgcctattaaaatttactgtgtttgtgaagatgctgatagtacattacatatggagatccaagtgcacatagtcactaattctttaaactatgtttgatattagtaataatttactttacatatatatcggaatttaattgaaaaatagtaaatgactgctaatatacattattcttctgagttgcatttttgcttaatgaaatagaatttttaaaaaaattgtttatctttattcctactagattatacatttcatgagaaaagcattatctctttattagtatatttgtttacctgtattagaacttgactttgaaataaaccagatataataccattgttgtagatgtatttattgtagtaaaaataatattctgcatctgagttttgagcaaggagattttacagtctcctttcagttagaaaactacaagaccctcttaactgatgttggaaatgtaagtaaagaagataaaaattaaaatgataaagaaaagcatttggggtatagtagcactgtgyttcccaggagaatgagttgttaagtgctcactccgcatttttcagtaacatatacttaaagtaagcacacaggggctacagacgctattttttggttcaacatgacctgagcagttaattatttgtaaagggaagaagcaagaataggctcagggagggagacagagaaagactgggtagggcggggagggagggagagtttcacctgtatctaaaacagatcagaagcaatttcttcctccaactcctcacttgtctatttctactaataaagagcaaaaccagacaaaatagattattgtgtcatttttgttttcttattttgtaatacacagaaaaactcaa

SEQ ID NO: 56723 - DNA, 1417 bp, Homo sapiens
ttattttattaacataccttaaaaatgtaataggacaatgcctcaaagaacaatttcaaaataaaaacacagaaaacaaatgaccagcaaaattgctctgaagtcttaaaaacagaaataaatacttcaataatcataggtaatatggaaatccaatgtatgacttacctatagaaaacccttctggaatttcatttaaatctaacgtcaatatgagctatgtaggaagtccattaataaataagaatattatataggtacacatgtatatattaattttaagccatatgcagccctatttgaaaatgttaaaaaaaatcatcaggattagtccatactgattattaaaaaataaaattgtcactgctcattgtagaagataaatgtcagctgtgcagcagatgtgtttatagccacccagtaatcctatcgcctcaataatgcatttccctttttttagttaaaaacttaattacattaagaaactgtatgtgtttaggaatatgaatatagaaggagtaatcatcgtttagtaaaataagttttacttgcctattaaaatttactgtgtttgtgaagatgctgatagtacattacatatggagatccaagtgcacatagtcactaattctttaaactatgtttgatattagtaataatttactttacatatatatcggaatttaattgaaaaatagtaaatgactgctaatatacattattcttctgagttgcatttttgcttaatgaaatagaatttttaaaaaaattgtttatctttattcctactagattatacatttcatgagaaaagcattatctctttattagtatatttgtttacctgtattagaacttgactttgaaataaaccagatataataccattgttgtagatgtatttattgtagtaaaaataatattctgcatctgagttttgagcaaggagattttacagtctcctttcagttagaaaactacaagaccctcttaactgatgttggaaatgtaagtaaagaagataaaaattaaaatgataaagaaaagcatttggggtatagtagcactgtgtttcccaggagaatgagttgttaagtgctcactccgcatttttcagtaacatatacttaaagtaagcacacaggggctacagaygctattttttggttcaacatgacctgagcagttaattatttgtaaagggaagaagcaagaataggctcagggagggagacagagaaagactgggtagggcggggagggagggagagtttcacctgtatctaaaacagatcagaagcaatttcttcctccaactcctcacttgtctatttctactaataaagagcaaaaccagacaaaatagattattgtgtcatttttgttttcttattttgtaatacacagaaaaactcaa

SEQ ID NO: 56724 - DNA, 938 bp, Homo sapiens
aaatgggatggtacccacttcacagggttgggtaaggcgatgcactccmccccatcaatgttagctatagttgattatgactataagatggtggaggatattctgagacaccaaatacttcctcatattctgccaggcaaatttgtgtctgtcttaattgtatggctctggggcctcctgaaggatgagaggagaagttgggcttcttgccttagttttttagcttttctttctcagcctcagtttcctaatccataaatgagaataataacatccacctctgtttgacttgtgacatcttgggcatctcttaacataatgtatatggaaatactttatggagtatatggaaatactttatggagaataaggcctggtggtgaggactaacattttaagagatattcttgagtaaatgatgaccactctgaggctgtgttctccactttaaaatgtgaataataatacctgcttccaagagtgaggattaagatgataaagcccttggaacatggtaccagtacagaatctgcttctcccaccctttgcggtcccctacctatgatcatgtttcctagttaaggaatcctcatttggatttctgggttggcagtgtgagaggggagggtggttgtcgggtgaagtaagcccatgactaagcctcattctagccacctcagccagtttcaacctgcagtattatggttatttcatccatcctggagtcagagctactggttggatcctatccccctttcttcctgacctcccacactttgtgaatagtgagttttgcttacatatttgatttagagaatggcaggaagggatctgggatcctgaataaagcatttggggccaaatgatattcctgtgatcactaggcttctctcaagtctctttcttgctacttcctcaaagaagatgcagtcactcat

SEQ ID NO: 56725 - DNA, 2021 bp, Homo sapiens
ccacactctgagctctttatctgcagctcacagtgacctctgtactctgtgtggcttcccctccccgtgctggggtctggttagaggactcatctgcttgtttttctcctctctaggatcgtagctctgtactgcctgctgttcagcatctgaaagtatgtttttggccagtattttagttgtttgcagtaggtacagtcgctattagtacctttcttgtgacataaatccatatggcatacaaaaaatctttttcctctggtttcttgaggacaggaactatcgctctcctcctccctttttctacttctcctccttcactgtcttctttattatcttcatagctaccaccgagggagctctttctgcaagcttgtcactgttctatgcagtatttcatttagttcttataacaattctacaaggttgagtattgttttacagataagggacccaaggctcatatagaaataaaatgctcaaggtctcattgcaatatgtagcagagatgaaattcaagcctaagactttctcattccaaagccttaacagttacactagtagctctcattcactgatcacaagatattacatttatgaggatatacccagcagggttcttttaaacaaaataattaattaatgttaaaaattgacaaaatagtatatctttatggtgtacaatatgatgcttggatatatgtaaacaytgtagaatgcctaaattatgttaattaacacatgcattatctcacatagctttttgcactgagaacatttaaaacatactcttttggcaatttttaagtagaccgtatatttttagtagccatagtcaccatgctgtaccatcagagttcttgattggaaatgatgaaagccaactcgatcagcgggtattgggttcattcctagaatcaacaagagtagggagaacctggcttgaaagacgggcaggaatgaagcggggccaggtggcaggaaaggcgccagggacctgctccaggacaccgcgcccaggctgctgctgccattgcccttgcatgtttggccagtcccttgcacagcgggtgctgcagctgccactgccagagtgaactctgaactgctctgcctctttgcaattgttggtctagagtgagggctccagttgtctgtggcccagaggtcatgtgtcccagagaacaagcacctcaccttagggcttctgtggagggaactggggccctgccttctatcaagacatctacagtgatgaatttcccaagcacatgaaggtggtttagatgctgggaggccaagaagacaacagttgatggtcactccaaggatcatatacatatttgtagaatgactggtcagcttgaggctggcttctcttttagacttacaaggaaaagaaaaaaaattttttttaggtttgctttcttcttttctgacaaagccagcccagcacttacctcactttttcttctctttttaaagtgcttctcatgttgcaacattgtaagaaagcaatcccataaaaccaaagtcctcacattctttcagctacttttgtctctattatgttacaatagttagatttcaaaaatggtagctaccatatccttggcactgaaacaaagtactttacacacatgaccttgtttagtctttgcaatagccctaggaggtgtggtgattaatagtcttagcagctctcctttatacatcaggaccctgatactcagagaggattcaagatcctagctactaaacagtgcagctgaatttgtgacatgttttccttttgtttattttttttgcttaattttttttgagaaattaaaaaaattcagaaaagtccaaggaaaaatagaatagacacctgtatttctatcaacaagaattaactatgttaatttatatttgtcttctagctttcctttttaaagagataaaacattagaaagacagttatggttttttttcgtcatctcttttcctcttccggtgcactttcaaatacttttgcataa

SEQ ID NO: 56726 - DNA, 729 bp, Homo sapiens
agcttctggagtagctgggaccacaggcatatgccactacgtctaattttttgtacttttattagagacagggtttcaccatgttggccaggctggtcttggaacgcctggcctcaactgatctgcccgccacggtctcctgacgtgctgggattacaggcatcagccacagcactgggcctgtatcctttgctatttaaaaaaaaaaaaaaatcagccctgggcttttctcctagtgaattactgaacctgcaggtggacttgggaactgtccccaacacgcttgcccagcagagatgaaatatcttctagaggtaagtgggacccaaattgtggatttcctgtctagcacatggagaatccatttcagaattttgaatcttatcacaaagatgatctgggaagctaytttgattggtttgggtctgttttagtaaacagggagatgcagagatgggctagatgctcaccaaactgcttcctcttcccagctaaagaattagaatacaattctcagcttctcttgcattggtttggctgtaagacttagttcctaacccacaaagtatacagcaaatatggtatgtggcactttcagacctagctcacaaaacctcactcatgattctctgtttttgactatctgcccgatgaataaacccccaagacctagaggaggatgatgtcatgagatgacagacgaagggagacttcttgaattattgcaca

SEQ ID NO: 56727 - DNA, 729 bp, Homo sapiens
agcttctggagtagctgggaccacaggcatatgccactacgtctaattttttgtacttttattagagacagggtttcaccatgttggccaggctggtcttggaacgcctggcctcaactgatctgcccgccacggtctcctgacgtgctgggattacaggcatcagccacagcactgggcctgtatcctttgctatttaaaaaaaaaaaaaaatcagccctgggcttttctcctagtgaattactgaacctgcaggtggacttgggaactgtccccaacacgcttgcccagcagagatgaaatatcttctagaggtaagtgggacccaaattgtggatttcctgtctagcacatggagaatccatttcagaattttgaatcttatcacaaagatgatctgggaagctactttgattggtttgggtctgttttagtaaacagggagatgcagagatgggctagatgctcaccaaactgcttcctcttcccagctaaagaattagaatacaattctcagcttctcttgcattggtttggctgtaagacttagttcctaacccacaaagtatacagcaaatatggtatgtggcactttcagacctagctcacaaaacctcactcatgattctctgtttttgactatctgcccgatgaataaacccccaagacctagaggaggatgatgtcatgagatgacagaygaagggagacttcttgaattattgcaca

SEQ ID NO: 56728 - DNA, 1062 bp, Homo sapiens
ataatagtggttactttcaaagaaaaggcacagggtatgcctataaatttaagttctgcataaaatttagttccatataagaaacaaaatctacagcaatttccagaggtacctaatattgacaatatatatggaaaaatagcaaaaatcctacctatataatcaaatatttccaaattcaaagcaataattaaaggaaatataagaaccaactcttactttaatgtttctgtaggtctcattcagaaccatcttgttaaattcaggattcttcagcgtgtcaaggaagtttgaatacaggctatgaaagtttggctcaatactgactctcttcataaccagatactgtgaaacccaaggcataaattcttctttcaccgtttcctttagctcttcaacctagccggtcaatacgacatgggaagcacagaattacactatgataaaataacacttggtttctatgaaccatactatacagcacatggctccttgcaaaactaactagatgctaaagaatgactttccttcacaccagatagatgctatgaagaaaagtatgctcaattccrtagtcaatcacaactcaacccatacgtgattgggactgaaacatctatggctattttcagctttaaaattataaaacatgtagtaccccatctccacataaattactaatctataagctgccattaacatacctacagtgtaaccaagaatggggaaaattccagaactatgttttcctaaatttccatctacaggaatccttagctaactctggcgtttccaagtacagttagttgacccttgaacaaggatttgaactacatagagtaaaattaaatgtagattttcttctattaatacctccactacctcggagacaccaagacctcctcttctcctcctcagcctattaaatataaagttaaagacctgtatgataatccatttccacttaacagatggtaaatatatcttttcttccttataattttccttcatagtttttctagtttattttattcttttttctagtttattttattctaagaa

SEQ ID NO: 56729 - DNA, 741 bp, Homo sapiens
aacttaagttccaaggccagatgtccgtgggcaaggcacacatctctgagtgaaaccccgtctctactaaaaaatacaaaaaatacaggtggcgggtgcctgtagtcccagctacttgggaggctgaggcaggaggatggcgtgaatctgggaggcagagcttgcagtgagccgagattgtgccactgcactccagcctgggcaacagagtgagactccatctcaaaaaaaaaaaatatatatatatatattctcgataggacagcacagtccatctctccctgctttacagaagaggagactccatttctggtaggtgatgtgacttatgcaagaacacagagtgtgtttatgatcgagccaagatgtatgtgcatgtttaatttccagctcagtgttcttaacactcctttttgagatgttcagtgttttctgaaaccttcagctgcgttttggatctccaacagggacttgcacattatttccccaaatatcactgaggtcagcgtctgcaaatcagagtctcctggaaacatttacagtgagattaraaaaggaattgaacgaggttaggtggtctctgttgggcctgaaaatgtaacatgcagagtgggaaattaaaacagggtctttggggagagaaaagagggagaggaaaaacccggcttctcttatcttcctgtcacatgtgaactctgtcattggagcttccgtttttgataagctcagtgtgtcttatca

SEQ ID NO: 56730 - DNA, 2092 bp, Homo sapiens
gagggatggatagatgggtggattgagtgttatgcctgagtggagagatggaagggagggttgagtggaggaatggaaagataaataggtgggcagtgggatgggttgatgggggtgaatatatgaataagtgaatgggtgaatttatggaatgaatgatgagtgaataaaactatccctggtgagagtcagcagagtgcaaatagaactgatctgagggtctcccagttgttgggatcacccttaaacagagttggtggctaattcttgggtgaccagtcccaaatctgtgcatgtggctagaatgcctgaactttttacagaacgcagccacctgactgtgtcactcctggaaggggccagctgtctaaggcagcaggaaaaaattcaattgcattccattctcagacgattttcaatggcaggaaaaagccagactcttccttcccaaatcaccatccacaggccttcaggggcctctgcctaggtccaaggccaccaccagatagggaaaagaaaagcaggaccttggaggtgcttaacagcagtaggcacccttcacactgcagggtgaagtgatgccaacctcctaggagccagagccatggccagacctgaggcgtttccctctccaaggcaggaaaagcttggggaaaagaaagataggaaaaatttttaaaatagattgaattggatccgatcagccctggcctttggggcccctcctccccctcccagacacaccctgattagccaggtttggggtatttcctgtcctttttcagagttaactggttaaggaggggactgatgggtagctggagctggtgaacaggagcctgggtagtaatggccagtgagtaaggagtgcttgctgggtgcctggsgctgtctgtgcacataatctcactgcaaaatcctcaccatggtcctagtgagatgataactcacttgagcccaggcagcctgacctggcacccacaggctgccccgctgcacagcactgcccaggaagggagctggaggtgtcggggagacgcccctgggagccgccccgtgggctcaaggcagtgtccggcagacacgtacatggccacagtgggtgtcactcagacctggatgttgctcccctgggaaagctgttaggagaatcagaagagcaggaggctggaccttgtgtaagacacagagggacatcccgggatgagtcggacaagtggccacagttgaggaaagacacagcaggctagtggactgttctcactgtccaacaatgaggatcaaagagaaagttcagcatgaataaaacagatgtggaaagctcagcccacccagtctctgcaagtctccccagaagccagggactccccaaggagacaagccagaagcactcccaggccaggacgggcctgtcccacccctgcatcaccaacctgaggctgcagagtccagggctcctgcccagagcatgcccatcccctgcaagagaaacccaggtccccaagccctggaggatgccgggtagacccaggatggtcagtctgccgcctgcccctcgcacagcctggcccttgcccagctcctcccactcttttccagtcccctgtccatgctccttccagcctctgccctttgcctgggctcttccctctgccctgactgccattccctggccttctcgaaccgaaaaaaagccttccaggccccgctcaaaggctgcctccttatgggagcttgtctggcctctcctcacacctaccaggcagagctggataggtgtccccctcctctgtacctcctcggcattgcacccatgcctccctcagtgtcttggtcatggggtgattgtgctgcatccatgagagcagggcccacaggtgactcgtccccagacaggctcaggcctggaggaagcgctccatgggcaaggtaggagccactgtattttatcctcaaggcaaaagatgtagttgccccctttaaagactaggaaactagtcaggtgcggtggctcatgcctgtaatcctagcactttgggaggctgaggcggacggatcatctgaagtcaggagttcaagaccagcctggcca

SEQ ID NO: 56731 - DNA, 2092 bp, Homo sapiens
gagggatggatagatgggtggattgagtgttatgcctgagtggagagatggaagggagggttgagtggaggaatggaaagataaataggtgggcagtgggatgggttgatgggggtgaatatatgaataagtgaatgggtgaatttatggaatgaatgatgagtgaataaaactatccctggtgagagtcagcagagtgcaaatagaactgatctgagggtctcccagttgttgggatcacccttaaacagagttggtggctaattcttgggtgaccagtcccaaatctgtgcatgtggctagaatgcctgaactttttacagaacgcagccacctgactgtgtcactcctggaaggggccagctgtctaaggcagcaggaaaaaattcaattgcattccattctcagacgattttcaatggcaggaaaaagccagactcttccttcccaaatcaccatccacaggccttcaggggcctctgcctaggtccaaggccaccaccagatagggaaaagaaaagcaggaccttggaggtgcttaacagcagtaggcacccttcacactgcagggtgaagtgatgccaacctcctaggagccagagccatggccagacctgaggcgtttccctctccaaggcaggaaaagcttggggaaaagaaagataggaaaaatttttaaaatagattgaattggatccgatcagccctggcctttggggcccctcctccccctcccagacacaccctgattagccaggtttggggtatttcctgtcctttttcagagttaactggttaaggaggggactgatgggtagctggagctggtgaacaggagcctgggtagtaatggccagtgagtaaggagtgcttgctgggtgcctggcgctgtctgtgcacataatctcactgcaaaatcctcaccatggtcctagtgagatgataactcacttgagcccaggcagcctgacctggcacccacaggctgccccgctgcacagcactgcccrggaagggagctggaggtgtcggggagacgcccctgggagccgccccgtgggctcaaggcagtgtccggcagacacgtacatggccacagtgggtgtcactcagacctggatgttgctcccctgggaaagctgttaggagaatcagaagagcaggaggctggaccttgtgtaagacacagagggacatcccgggatgagtcggacaagtggccacagttgaggaaagacacagcaggctagtggactgttctcactgtccaacaatgaggatcaaagagaaagttcagcatgaataaaacagatgtggaaagctcagcccacccagtctctgcaagtctccccagaagccagggactccccaaggagacaagccagaagcactcccaggccaggacgggcctgtcccacccctgcatcaccaacctgaggctgcagagtccagggctcctgcccagagcatgcccatcccctgcaagagaaacccaggtccccaagccctggaggatgccgggtagacccaggatggtcagtctgccgcctgcccctcgcacagcctggcccttgcccagctcctcccactcttttccagtcccctgtccatgctccttccagcctctgccctttgcctgggctcttccctctgccctgactgccattccctggccttctcgaaccgaaaaaaagccttccaggccccgctcaaaggctgcctccttatgggagcttgtctggcctctcctcacacctaccaggcagagctggataggtgtccccctcctctgtacctcctcggcattgcacccatgcctccctcagtgtcttggtcatggggtgattgtgctgcatccatgagagcagggcccacaggtgactcgtccccagacaggctcaggcctggaggaagcgctccatgggcaaggtaggagccactgtattttatcctcaaggcaaaagatgtagttgccccctttaaagactaggaaactagtcaggtgcggtggctcatgcctgtaatcctagcactttgggaggctgaggcggacggatcatctgaagtcaggagttcaagaccagcctggcca

SEQ ID NO: 56732 - DNA, 617 bp, Homo sapiens
agtgtggggagctgccagactcatcatagaagcccctttttttccccaagatacctaaagggcagtgagtgtgggagggctgatcccagagttctctgaagccctcattccttgctactctccaccgcattttccatgcccagcccaactccacagctcaaagctccctgttcacaccacactcttctttcttatctccctccttggaaagctattcagttccctcctcccggccttcccctcttcccctggttaaatcctagacaagactcagctgtagcagcccctcctccaggaagccctccctgacttccagactggtcaggcctgcctttactcccacagtcccagtaggacctctaccaaagctcatgacacactgcctagtgccaggttatccccaaagcaggctgccaccaccttgggagctggccaggacagggccagctctgcttcctctctgtatccccatgcccaacacgacaatggcacccacattctggagctgtcactgatggatgaaggcagctgtgcttggtgaggagaggagtggtcaggtgrggaatcagagcctccatggccccaggtagacctacagacccataaggaccatccct

SEQ ID NO: 56733 - DNA, 417 bp, Homo sapiens
  misc_feature (1)...(417): n = A,T,C or G
cnnnnnnnnnnnnnnnnnnnnnnnnnnnnnnnnnnnnnnnnnnnnnnnnnnnnnnnnnnnnnnnnnnnnnnnnnnnnnnnnnnnnnnnnnnnnnnnnnnnnttaggataatggcctctggctgcatccatgtagctgtaaaggacgtgatttcattcctttttatagctgcgagtgaattttcagtttaaatgtatgaataaggcttcccaggaaaatctcccagagtagatcgagcccaggaagaaggcactcagcctgggagcccaggcccgttctctgagctcccggaagccaggccaggacaccyggagggaagtggaacagggtcacagagcagacaggaagagggaggtgggccctggagacaaatgcttgggggaccacatagctgcatctgcactgaccttggctccag

SEQ ID NO: 56734 - DNA, 1070 bp, Homo sapiens
gaactcttgacctcagatgatctgcctgcctcggcctcccagagtgctgggattacaggccgggtgagccaccgcacccggccgcttaaggcatttattaaagaacatttggagtttcttttttctttattgtgtaaaatatacataacaaaattttaccattttaaccatttttaaggatacaattcagtggcaaaagtacattcacatcgtcgtgcagccatcaccaccatccatgcaacaggactttttcatcttccctaaaagaatggaatttcttatttttaactgtaaagctgaattgaatattttacatgatttttggaaaaaattcttcccaaattaactgcgaggttaactgcttgtggcctgtatttttttttttttttaaagaaagggtcttattctgttgttcaggctggagtgcagcattgcagtctctacctccctgggatcatgtgatcctcccatctcagcctctcaagtmcctgctactacaggtgcacgccaccatacccagcctgtacttcgtttctgaggatcaagacctcacagaccgtgtgtgtgtgtgtgtatttgtgtgtgtgtgagtcctatttgggccccgcctttcagccctgtcttgcagcccaaactccagccacagctgtggccccgtgcagctcagaggaatcaggttggctcaggggcttttcctgctttaaggcagagggtgagaaggctgtagctgggcccggctaacatctcacctgctcctgggtcaagaggtgatatagttggaggtcagaccaggttgagccatttcctgggccaggagtatcttatagcatggcacagaacaccaggaggcctcaccttcttcctgctcagaaaagcccactccttgtctctggccctgtgccaggcactcatctgtcctttatttcatgcctggccctctaggcaatgttggagtccaagagggtaggggatggaagtggctgagtcaggatttgaacccagggcatggtgtttctcaacagggttggcaccgggattcttgttgagatgatttgtcactgggtaggact

SEQ ID NO: 56735 - DNA, 572 bp, Homo sapiens
cagaacaaggcacaccccactgcccacgagtcctgccagggcacaccccactgcccacgagtccctgcacaggtgagaagtgtggctgtttggcagcatctcaatctgtgagcatttggaggatgaaatgcgtctgcactccaaggttgctggagggctyggggcagacgggcgctgccccagcctgtgatgggcatggccttgaggatgccagcctcatgcagaagccagtctaggggattatacagggtgtgcacacccactcccctaccctcggactggagccacgaaaccctccctctaactgggtcgtggttttaggcagggccgtggcaccccaccactgcaggggccaccatccatatcaggcagactgtatgaaccgtgccccttggaattgtacagtgcacaacctgcacatcctcatggccaaaaagacccagagacttgtgtgtgtgtgtgagggggtcttgggaagtatcctgagaacattcctgtcctgtgggtggtgacgatctgataactgcccgaccacttcctgcctcaggcaggcacgcatagcattctggatc

SEQ ID NO: 56736 - DNA, 801 bp, Homo sapiens
tacatarattattttttctgaatcagggagtcaaaggagtaaaaatattaatacagatgcttgactgtttttattggaaacactaaagtgtatttttgacttatgatattttcaacttgcatgggcttatcctgacctaacctcatcataaaaaaggagcgtactgaatgctatattttaataactttcaacatcgactactaattggtttattttagtttttattatgtagttatggtattattgtgttatttaaaaccaagctaaagtgatatagctttcacaccattgtaaagttgaaaaattgtaagttgaaccattgtaagtcagggaccatttaaaattagaaacacatatggtgaaaaaatcatctaaaaaatggttaaaggtaactattgatataaataaaaatagcatatatatcatttataatgtactaattatatattatataatcctaatgacaaaatgtttttttaaaaagttaaaaaaagtataatcctaataacaaacaaaagaaaagagtaaagggaatgcaaaagcaaaagctgaaatgtctgcaatggcagatgacaaagcatatcattttgactataaaaataaatgacctaccttctattaaaaataaaatatcatcaaataaaattaaaaaatggaaaagatttaccagggaaatgtaaaccaaaggaaatcagggtgacaatataactttcacacaaagtagattgcagggcaaattgtgttacataggatataaagagtccttttataatgctggaaggtgaaatttacaatgaaaat

SEQ ID NO: 56737 - DNA, 634 bp, Homo sapiens
acaaggaatcttggcgttttcattagcccatgcagtaatactgaagatgaatgagtgtacaatttctgttaagctttttgaaatattgcaaatagctcatgtacccccatttctgcaatgaaaaccttacctgagacgattgctgcagggccatttgttcatgtagttcaattttcacttaagctttgaaagtttacacgttaggaccgtgtaggtacagaacccagggcctatgactttattggctcaggatatttgttaattgacattaaagtattaagtatcaaaattgaaataattgcttaagtatttagaaaatgaacagtatattagctagtcaactacaactcaacagttttgcagttgtatttaygttgtatttatttggggaggttttttctttttaatatctttgacacatgatatgaaatggggccttcaaaagtcaccttgtttagagcctgcttttttgtctaaagagctccaagaaaggagattgagtggtataatttaagatctaaaagcagatgaccctgttcttcctggaaagtagactggagatgcaggtcccttgggcaagacatatctgctatctcctattctattgtgtggataagccatcatttatataata

SEQ ID NO: 56738 - DNA, 634 bp, Homo sapiens
acaaggaatcttggcgttttcattagcccatgcagtaatactgaagatgaatgagtgtacaatttctgttaagctttttgaaatattgcaaatagctcatgtacccccatttctgcaatgaaaaccttacctgagacgattgctgcagggccatttgttcatgtagttcaattttcacttaagctttgaaagtttacacgttaggaccgtgtaggtacagaacccagggcctatgactttattggctcaggatatttgttaattgacattaaagtattaagtatcaaaattgaaataattgcttaagtatttagaaaatgaacagtatattagctagtcaactacaactcaacagttttgcagttgtatttacgttgtatttatttggggaggttttttctttttaatatctttgacacatgatatgaaatggggccttcaaaagtcaccttgtttagagcctgcttttttgtctaaagagctccaagaaaggagattgagtggtataatttaagatctaaaagcagatgaccctgttcttcctggaaagtagactggagatgcaggtcccttgggcaagacatatctgctatctcctattctattgtgtggataagccrtcatttatataata

SEQ ID NO: 56739 - DNA, 439 bp, Homo sapiens
ggccgaggtgggcggatcacttgaggtcaggagtttgagaccagcctggccaacatggtaaaaccctgtctttactgaaaatacaaaattaggcaggcgcggtggtgagcgcctgtaatcccagctactcgggaggctgaggcaggagaatcacttgaacccgggaggcagaggttgcagtgagccgagattaagccattgcgctccagcctgggcaacaagagtgaaactccgtctggaaaaaaaaaaaaaaggaaaagaaaagaaaccatcagggtttaatgctcrgcttctggcttaggaagtctggctcttaccgataatgataacctctgcatatatctttatccatagcactatggttataaaattctgcaattctcaaagtcgcttatgtgtcttagtctgtgctttgctgccttggcgtcatttctgagca

SEQ ID NO: 56740 - DNA, 1074 bp, Homo sapiens
ggctcttggcttgttttgttccctgctatatccccagtgccaagaatagtaccagatacacagtaaatgctcaataaatgtttgttgaatgaataaaataatgaatcttttctagtaataaaataagtctcaccrtgtgtcaaaatttattcatacttagtagggctcaaatctggctactaggatctataagagaccagtcaagtattagaactacgctggagtcagactacacagaaaagttaccaatagaaatgagccattagctgaagccaatccattccattccttgaagatttttgtttcatagcatggtaagctacaataaggttagacttaaatatttattctatgcagtttcttgcagtgagaaaagtggcattactaccctcatttcacttaggcctggagtttagtcatttatccaacataaccaacctttttgaagcagagataaaataaggacataaatccctgacggccaagcccacagttgtttattttcaatagtgacctaaacaagaacaaaaagatctgtacaggcataaatatgtgatatgtagggtaaaaagtgtagattaacatgagggactcttcccactgaacttctgaagcaactgcatgttccaaaagtttatcttatatactgtttattttatacactatcagtatatactgtgttgtttatcttatatactgtcatatccccaatacttggcacatgctcatttcatgtgtactgattaaatgaaagtatcagcctcatagtaaacagaggcctattaacaaacaggtgcccctccaccaccccaggtaataattactcttacctcctgcacaggccacagccttggagccactcacactcatgaacagcaacacacactcagcaccccttgaaggaaaagaaaaacaaatttccacatactgcatcacacctggctatgcaggtatttcctagtcagatgaggaaccaggacaaaattgccagcttacggcttgtttcagtacttctaggaccaccacaaagacacacatagatacatacacatctatgtgtatgtagagaaagac

SEQ ID NO: 56741 - DNA, 1074 bp, Homo sapiens
ggctcttggcttgttttgttccctgctatatccccagtgccaagaatagtaccagatacacagtaaatgctcaataaatgtttgttgaatgaataaaataatgaatcttttctagtaataaaataagtctcaccgtgtgtcaaaatttattcatacttagtagggctcaaatctggctactaggatctataagagaccagtcaagtattagaactacgctggagtcagactacacagaaaagttaccaatagaaatgagccattagctgaagccaatccattccattccttgaagatttttgtttcatagcatggtaagctacaataaggttagacttaaatatttattctatgcagtttcttgcagtgagaaaagtggcattactaccctcatttcacttaggcctggagtttagtcatttatccaacataaccaacctttttgaagcagagataaaataaggacataaatccctgacggccaagcccacagttgtttattttcaatagtgacctaaacaagaacaaaaagatctgtacaggcataaatatgtgatatgtagggtaaaaagtgtagattaacatgagggactcttcccactgaacttctgaagcaactgcatgttccaaaagtttatcttatatactgtttattttatacactatcagtatatactgtgttgtttatcttayatactgtcatatccccaatacttggcacatgctcatttcatgtgtactgattaaatgaaagtatcagcctcatagtaaacagaggcctattaacaaacaggtgcccctccaccaccccaggtaataattactcttacctcctgcacaggccacagccttggagccactcacactcatgaacagcaacacacactcagcaccccttgaaggaaaagaaaaacaaatttccacatactgcatcacacctggctatgcaggtatttcctagtcagatgaggaaccaggacaaaattgccagcttacggcttgtttcagtacttctaggaccaccacaaagacacacatagatacatacacatctatgtgtatgtagagaaagac

SEQ ID NO: 56742 - DNA, 1074 bp, Homo sapiens
ggctcttggcttgttttgttccctgctatatccccagtgccaagaatagtaccagatacacagtaaatgctcaataaatgtttgttgaatgaataaaataatgaatcttttctagtaataaaataagtctcaccgtgtgtcaaaatttattcatacttagtagggctcaaatctggctactaggatctataagagaccagtcaagtattagaactacgctggagtcagactacacagaaaagttaccaatagaaatgagccattagctgaagccaatccattccattccttgaagatttttgtttcatagcatggtaagctacaataaggttagacttaaatatttattctatgcagtttcttgcagtgagaaaagtggcattactaccctcatttcacttaggcctggagtttagtcatttatccaacataaccaacctttttgaagcagagataaaataaggacataaatccctgacggccaagcccacagttgtttattttcaatagtgacctaaacaagaacaaaaagatctgtacaggcataaatatgtgatatgtagggtaaaaagtgtagattaacatgagggactcttcccactgaacttctgaagcaactgcatgttccaaaagtttatcttatatactgtttattttatacactatcagtatatactgtgttgtttatcttatatactgtcatatccccaatacttggcacatgctcatttcatgtgtamtgattaaatgaaagtatcagcctcatagtaaacagaggcctattaacaaacaggtgcccctccaccaccccaggtaataattactcttacctcctgcacaggccacagccttggagccactcacactcatgaacagcaacacacactcagcaccccttgaaggaaaagaaaaacaaatttccacatactgcatcacacctggctatgcaggtatttcctagtcagatgaggaaccaggacaaaattgccagcttacggcttgtttcagtacttctaggaccaccacaaagacacacatagatacatacacatctatgtgtatgtagagaaagac

SEQ ID NO: 56743 - DNA, 1074 bp, Homo sapiens
ggctcttggcttgttttgttccctgctatatccccagtgccaagaatagtaccagatacacagtaaatgctcaataaatgtttgttgaatgaataaaataatgaatcttttctagtaataaaataagtctcaccgtgtgtcaaaatttattcatacttagtagggctcaaatctggctactaggatctataagagaccagtcaagtattagaactacgctggagtcagactacacagaaaagttaccaatagaaatgagccattagctgaagccaatccattccattccttgaagatttttgtttcatagcatggtaagctacaataaggttagacttaaatatttattctatgcagtttcttgcagtgagaaaagtggcattactaccctcatttcacttaggcctggagtttagtcatttatccaacataaccaacctttttgaagcagagataaaataaggacataaatccctgacggccaagcccacagttgtttattttcaatagtgacctaaacaagaacaaaaagatctgtacaggcataaatatgtgatatgtagggtaaaaagtgtagattaacatgagggactcttcccactgaacttctgaagcaactgcatgttccaaaagtttatcttatatactgtttattttatacactatcagtatatactgtgttgtttatcttatatactgtcatatccccaatacttggcacatgctcatttcatgtgtactgattaaatgaaagtatcagcctcatagtaaacagaggcctattaacaaacaggtgcccctccaccaccccaggtaataattactcttacctcctgcacaggccacagccttggagccactcacactcatgaacagcaacacacactcagcaccccttgaaggaaaagaaaaacaaatttccacatactgcatcacacctggctatgcaggtatttcctagtcagatgaggraccaggacaaaattgccagcttacggcttgtttcagtacttctaggaccaccacaaagacacacatagatacatacacatctatgtgtatgtagagaaagac

SEQ ID NO: 56744 - DNA, 659 bp, Homo sapiens
ccactgtacttgacacatagaaaagccccagtaaaccttcataaatgaatgaataaataaatgaccccacaaatatgctagggcttagagcagttaagtgactttttcaagtcatgctgtcaaaaccagagactttaacccagttactctaacttaattctttgtctaataatagtgatttatttatttgttcatttatttactttacttactcagcagtgggcatttttaagaaatamaattttatcctgaccactgaatcaaggtccgtccaaccttcccactctgagaagcttactcggaacacttgggcccaatatctacagaactagttcatcttttaggcccgtcccaaccctgcaactagccttaactccctcgacccccacctgactgagaatgaggtgcagcttcctggagccccaccgcaggagctgagaagttttctctgccctcctttgtactgaggcctgaaaaattgctgagaggattttcttgccctgagccctttgatgcctttcctgcttccaccgacacaaatcagattccctaaaaccccatacaaaccatagagctcctgaaaaggccattgaggatcagggcccctatgactccaacatgatagaaagaggtctgcattgtttaaaacctctacggag

SEQ ID NO: 56745 - DNA, 580 bp, Homo sapiens
atgaggctcggatgtctttactgtcacattaaatgttttgagtgaatacataatatctgaaaatagccaaagacctagcagggcaagcacctgccaaacrcccaggattacaaaaacaaaattatacaacaagtcaaatttttagagtaaaagaaaatgtgaagacctgtttttaagtttaacattcaactgcagaatggcagaagactgctggttatacaagctgaaatgggtatattgggttaattgtatatttcctctactgttgaatacatttaaaacttttcacagtaaaaaagtttagaatgaatctattacactagaagaaatgcctaggaaaaaaaataccaaaattgtaagaatgattatctctgaattaaaaagttatgaataatttttattttcttcctacagtatttatatatttttcaaatttctgcaaggggtgaatattatattagtaattatgaataagtgtaatgatattttaaaacttttctcagactttttgtttttgttttttcaacagaaaaatcaattgtacttatgttaaggaagtgatctagcttgtgaaaaaaaa

SEQ ID NO: 56746 - DNA, 580 bp, Homo sapiens
atgaggctcggatgtctttactgtcacattaaatgttttgagtgaatacataatatctgaaaatagccaaagacctagcagggcaagcacctgccaaacacccaggattacaaaaacaaaattatacaacaagtcaaatttttagagtaaaagaaaatgtgaagacctgtttttaagtttaacattcaactgcagaatggcagaagactgctggttatacaagctgaaatgggtatattgggttaattgtatatttcctctactgttgaatacatttaaaacttttcacagtaaaraagtttagaatgaatctattacactagaagaaatgcctaggaaaaaaaataccaaaattgtaagaatgattatctctgaattaaaaagttatgaataatttttattttcttcctacagtatttatatatttttcaaatttctgcaaggggtgaatattatattagtaattatgaataagtgtaatgatattttaaaacttttctcagactttttgtttttgttttttcaacagaaaaatcaattgtacttatgttaaggaagtgatctagcttgtgaaaaaaaa

SEQ ID NO: 56747 - DNA, 576 bp, Homo sapiens
ctgccttccttgcagataggggtgcccagatgtcagagatctggctgagagtctacaggacactttcctgaattagaaggcaaaaccttgacagatgaaggctttgtgccctttgctctccacccttttccctgcctgaaaggcagacttgccagaggtaccattttgtgaccatgaggatgaggaagcagaaacaaagaaacagyctggttcttggatgacagcgctgagcagccagttgtaccagtcctggatctcttgttatgcaatatttaataaatagatagagacagataagtgaatgaatccttacacttgtttgagttattgtttatcaagttttctgttttttttttttttttgcagtttatacatttctaaacagatatgcaggggataaaaatggcagtcacttcatgagttgtgaagattaaatgagaaaatgtgtgcacagtgcaacgtccaggcatttagccaatgatggcctatatgttgatgctgctaaagaagggaaaacctgccatccctttggtgagtcgccagatgaagcacagagggtgggaggctgggtgggac

SEQ ID NO: 56748 - DNA, 1080 bp, Homo sapiens
aagtgtccaccactgcccatcatttgcagaaagacttggccctgcctttagcaacttccctatctccttagagtagacaagaaagaaacagatttgtgcacattttacaaagtgccttcctctatttttttttaaagttttcattttgcaaggaaaaatgtattgattagaaagtaacatttgccttatagggattatatatatatatagatatagatatagatatgtatgaatggagagatgagaagaagccagaaagggcacaacaaaatggtctaagggccaaccagcaatgttcagtgaatgtttacgtattgtttaattgaatcaacacagagctgttgtgaatagtgtgacttactttgcctgataagaaattgaggctggctgtgatttggggataaacctgccaccctgtgatttgagactctccataccaaaacttattgatacatttttgaatgtcattggcttacatgcctaaacctgaagagaacaatgcatgcacattggaactttgtacacaaacagaaaaatataaatgactttgaattaccatcccaagcattgctaacgtagatgtgccattgaygaaagtctcatgtgttcttgagtgaacaaatttccttttcttcctttttggctcaagcacaataatgctgtcactgagacagtgactgagcactcaatgtccaagactaaatcacatcaccacgactaagtaggcactatgtcctgggatgagtcttttaaactctggccatcaggttccttacttgttaaataagtaggttggcctaaaaggtttctaagacctctcatgatctaggtaaaatccagggtttcaggtcagtgtccctggtgcagtgcaagaaagccttgctgacacacccttggcctgaagcagtgagcacatgagattgtgtgacaacgcttcagagaaaaacagagatctgttcctccaactcagattgatttaacatccttgcttctccttttccttcctggctttacatatttgtagggtttttactccttctccagagcctactattttcctaagagttagtagcaaccata

SEQ ID NO: 56749 - DNA, 1080 bp, Homo sapiens
aagtgtccaccactgcccatcatttgcagaaagacttggccctgcctttagcaacttccctatctccttagagtagacaagaaagaaacagatttgtgcacattttacaaagtgccttcctctatttttttttaaagttttcattttgcaaggaaaaatgtattgattagaaagtaacatttgccttatagggattatatatatatatagatatagatatagatatgtatgaatggagagatgagaagaagccagaaagggcacaacaaaatggtctaagggccaaccagcaatgttcagtgaatgtttacgtattgtttaattgaatcaacacagagctgttgtgaatagtgtgacttactttgcctgataagaaattgaggctggctgtgatttggggataaacctgccaccctgtgatttgagactctccataccaaaacttattgatacatttttgaatgtcattggcttacatgcctaaacctgaagagaacaatgcatgcacattggaactttgtacacaaacagaaaaatataaatgactttgaattaccatcccaagcattgctaacgtagatgtgccattgacgaaagtctcatgtgttcttgagtgaacaaatttccttttcttcctttttggctcaagcacaataatgctgtcactgagacagtgactgagcactcaatgtccaagactaartcacatcaccacgactaagtaggcactatgtcctgggatgagtcttttaaactctggccatcaggttccttacttgttaaataagtaggttggcctaaaaggtttctaagacctctcatgatctaggtaaaatccagggtttcaggtcagtgtccctggtgcagtgcaagaaagccttgctgacacacccttggcctgaagcagtgagcacatgagattgtgtgacaacgcttcagagaaaaacagagatctgttcctccaactcagattgatttaacatccttgcttctccttttccttcctggctttacatatttgtagggtttttactccttctccagagcctactattttcctaagagttagtagcaaccata

SEQ ID NO: 56750 - DNA, 1080 bp, Homo sapiens
aagtgtccaccactgcccatcatttgcagaaagacttggccctgcctttagcaacttccctatctccttagagtagacaagaaagaaacagatttgtgcacattttacaaagtgccttcctctatttttttttaaagttttcattttgcaaggaaaaatgtattgattagaaagtaacatttgccttatagggattatatatatatatagatatagatatagatatgtatgaatggagagatgagaagaagccagaaagggcacaacaaaatggtctaagggccaaccagcaatgttcagtgaatgtttacgtattgtttaattgaatcaacacagagctgttgtgaatagtgtgacttactttgcctgataagaaattgaggctggctgtgatttggggataaacctgccaccctgtgatttgagactctccataccaaaacttattgatacatttttgaatgtcattggcttacatgcctaaacctgaagagaacaatgcatgcacattggaactttgtacacaaacagaaaaatataaatgactttgaattaccatcccaagcattgctaacgtagatgtgccattgacgaaagtctcatgtgttcttgagtgaacaaatttccttttcttcctttttggctcaagcacaataatgctgtcactgagacagtgactgagcactcaatgtccaagactaaatcacatcaccacgactaagtaggcactatgtcctgggatgagtcttttaaactctggccatcaggttccttacttgttaaataagtaggttggcctaaaaggtttctaagacctctcatgatctaggtaaaatccagggtttcaggtcagtgtccctggtgcagtgcaagaaagccttgctgacacacccttggcctgaagcagtgagcacatgagaytgtgtgacaacgcttcagagaaaaacagagatctgttcctccaactcagattgatttaacatccttgcttctccttttccttcctggctttacatatttgtagggtttttactccttctccagagcctactattttcctaagagttagtagcaaccata

SEQ ID NO: 56751 - DNA, 1080 bp, Homo sapiens
aagtgtccaccactgcccatcatttgcagaaagacttggccctgcctttagcaacttccctatctccttagagtagacaagaaagaaacagatttgtgcacattttacaaagtgccttcctctatttttttttaaagttttcattttgcaaggaaaaatgtattgattagaaagtaacatttgccttatagggattatatatatatatagatatagatatagatatgtatgaatggagagatgagaagaagccagaaagggcacaacaaaatggtctaagggccaaccagcaatgttcagtgaatgtttacgtattgtttaattgaatcaacacagagctgttgtgaatagtgtgacttactttgcctgataagaaattgaggctggctgtgatttggggataaacctgccaccctgtgatttgagactctccataccaaaacttattgatacatttttgaatgtcattggcttacatgcctaaacctgaagagaacaatgcatgcacattggaactttgtacacaaacagaaaaatataaatgactttgaattaccatcccaagcattgctaacgtagatgtgccattgacgaaagtctcatgtgttcttgagtgaacaaatttccttttcttcctttttggctcaagcacaataatgctgtcactgagacagtgactgagcactcaatgtccaagactaaatcacatcaccacgactaagtaggcactatgtcctgggatgagtcttttaaactctggccatcaggttccttacttgttaaataagtaggttggcctaaaaggtttctaagacctctcatgatctaggtaaaatccagggtttcaggtcagtgtccctggtgcagtgcaagaaagccttgctgacacacccttggcctgaagcagtgagcacatgagattgtgtgacaacrcttcagagaaaaacagagatctgttcctccaactcagattgatttaacatccttgcttctccttttccttcctggctttacatatttgtagggtttttactccttctccagagcctactattttcctaagagttagtagcaaccata

SEQ ID NO: 56752 - DNA, 1192 bp, Homo sapiens
caacattctatcttatgaattagcataattttatttaaccataaggttggacatttatatttatttttctgtgatatacattcttaaagataagatctgtggaaactctgttcaagttatgtaattaacagaataaaactaagatttagctcagaaaataagaggcagcatcaaggtaagaaaatgttaattttttgttaagtatgttggaacgtttttcccactcattgtttatttttaatatgtttatggtatgtttttaaaataacatatattaggggtttggttagaatatatattcattgtcaaaattttggaaaacaaaaacaaaagaacatttaatatgctcatcatatctcttagaatcatattttagcagttttgtcaaaatatactcttaaaattcatatcatattaaacatactgtgttataacaattttcatttaattatatgtgaacattttctaagtattttaagtattttatttgtaagattatatatatattttaagtatttttttaaagtatcattttacaacctaatttgtaataaatgtataatttttggccattctataaactatccctattttataaactgaattgtctcttttatcactactataaaatcctttcacatacatcattgcacacaatgtttatttccttatataataaagacataaatctgtcatatatgttacaaatatttttcctagtttgctgttttcattttagttttatttatgttattttttgacttaaagaaattaaatctatcaatcctttccttaagggattattcccttgtctctatgtttcaaaagacctttagcaccctgaggttgttttttattgttttgttttgtttaactctttaccctggtgggatttattttggcctayggtatgacatttagcgaaccagctttatttgttttggaatagttgtggcttggtgaaacttcaataggcctttcttttctttattttgttattctgtcattcaggaatgatctgactactccttgaaaccatctgtaacagcgaaagtggtacttctattaacattccctactttggcataagaaactatgtccaatccatcagaaaactgatagatgacataagaaataaattgtttcaaggaaaagaaataagtacatataatttaaaaattttaatgagaca

SEQ ID NO: 56753 - DNA, 877 bp, Homo sapiens
tgcatgaatttcagttctaggcatagacatgtgtgaccagttttagtttgtaaaggtaaatcagatttgcattcaatctaaccccagaggtctagttccagaattagaggcaaagggggctttctggttttgttgcycaatgtgcacagcaaattaaatccatggaaacaccaggttgcagcagagaaaaaggtttaattgtaggccctgctgaatgaggagatgggaggaaacctcaaatccatctcctcaggagtctgaagctggagttttaggggttttggagtgggccaatgtgtggagattgttgattggttgaagagtgcaggttgaagccgtgggacaggaagatgaagaaactgtattctcatgctgattctgtttctctataggggtcttcaaactggttggcatcagctgtttcggctctttcgctagaatttagaatctgtgagacctcttaagcaactcttaaataaaagccttatgcttctaatgtcagaaatcctatctaccctaaacaaaagccttatgactctcttgtcagaaatcctatctataggatcagtgagggtacacacggtcagcatttagagttatgtgactttcagttacaaggaagtaggtcaacgtgcagcctgattattgtttagttataactacatttctatctagaattcctgttagccatgtgagggtggctttagtttgaggttctcaaactctgcctcaaaagactgtttcaatggcacactgttctctcctgactttaaatactttatgacactcaacttgtttgaaccaatgcttgaccaggctcccaagggacaacccttctgtcctgacttgcttgaaaggagtagaagctctgcagttg

SEQ ID NO: 56754 - DNA, 629 bp, Homo sapiens
tatacactgggcttgttcacaaaatctgaaaaccaggcagaaaaaaaaaacccaactaattggaagtgtttcaaatacctaggatttggcacaagttttggctcagtaggtattttggaatgagtgactactttagcaaatgatgaataaatgcttgaatggatggatggatkgatggatgacggatgactataattcttgattagttatataaaatattggattcttcatttcatagaaactaaattctatgaagcaggaggttgaacccttttcttaaaaaagatagtcactctagcaacccaagaattaaggaagttacttttatcaccatcagaagtttctggctcttaaccttcatgattccctcatgctgagtaaaatacacttttctattacatctcaccatcaaagttaggaaacttcttttattcctaagggattttgcaagctgattagcctctctgcagtaagacaggtgctcctgtggtccttaagccctgacattctgtggtcatttgtgacatgctttacttcaaagcttgttagtgaacaacaggttacattctttgagaggatgtccaccctggtgaactgtccatgtctttttcttggactgtctactactt

SEQ ID NO: 56755 - DNA, 629 bp, Homo sapiens
tatacactgggcttgttcacaaaatctgaaaaccaggcagaaaaaaaaaacccaactaattggaagtgtttcaaatacctaggatttggcacaagttttggctcagtaggtattttggaatgagtgactactttagcaaatgatgaataaatgcttgaatggatggatggatggatggatgayggatgactataattcttgattagttatataaaatattggattcttcatttcatagaaactaaattctatgaagcaggaggttgaacccttttcttaaaaaagatagtcactctagcaacccaagaattaaggaagttacttttatcaccatcagaagtttctggctcttaaccttcatgattccctcatgctgagtaaaatacacttttctattacatctcaccatcaaagttaggaaacttcttttattcctaagggattttgcaagctgattagcctctctgcagtaagacaggtgctcctgtggtccttaagccctgacattctgtggtcatttgtgacatgctttacttcaaagcttgttagtgaacaacaggttacattctttgagaggatgtccaccctggtgaactgtccatgtctttttcttggactgtctactactt

SEQ ID NO: 56756 - DNA, 1838 bp, Homo sapiens
cacctctattgctggccagctgtgatcttgtacaggatacttaacccctttctagctcagtttctttagctgtaaagccagcgcaatgttaccatggagctggtatgtgaaagcaatgcatgttaagtgtgtagtatgtgcctgatacattgttagtgcccagtaaatgttagttatcaggtgaggggtgggatgcggggttgagtagatttgcctcgtccactcatagaggcaggatgtgcaaggaggggtggagacatgcagcaagggattgggcatgaaggttttctccaggcccggggagaacactcggcctggagatattcaggagtccctggcccagaggagattacaactctgcagggatatgagccacgagtggagtgtagacataggcctaaggaagcaatcagacacttccagaatagaggacatttgctaagacagctggcctggatgcttcaaaaagtatcatgggaaaatatgtcggggttgttgtagactgaaagtgactagagttgaaaccaaaagaatgtatgaaccttgatgggacctggttgttgtcgttgtttttaaagacaaacattctggagacaattgttgaatactgattaagggctctgtattagaggctataaagaagttactgtttatatttttaggcatgatcatcttaatgtaatcatgtagaacggtgtctttgtgctcaggaaatctatgtggtaatactcaggggtcgaaatgtcattctatgtacacatgcatggggtggagagaatagtaaatctggcaaaatgttaacaactattcaatccaagtggagagtatgtatctgagtattcattgtgctagcctttcaactttttctggatgtgtggaatttttcaatataaaaaaataagaaaaaaaagaggcctatggaaaaactgggaaccagtatgcaacaggaaaaggaattctttgaaggaaaaacaggatccacctaccaagagagcaatttcaagggagagattaagcaaaatgaaggctgcaaatagatcatcatatttggtcactgggagattgtggcagcttggaaatagtcyggtgaagcatagaaaactgacatgcaccctagaacttaaagtattatatatatatatatatatatatatatatatatatatatgtatatatgtatatatgtatatatgtatatatgtatatatatgtatatatgtatatatgtatatatatatatataatatatacacacataaagaaaaaaagaaaagaaaactgacccagagtgagggagtaaaaactggggaggaaggataggcagccaggacttgttggcccttctgggttaagtctttcttttcagtaagaaagggagactgcacattgctgaggaagaagagcctgggggaaagggagggactgagacagcgaaagggggaatactacaggaggaaagacccagtaaacgtgggagaggaatgggatggaaaatgacaggtagatgtggccttaagcggagggatgctttccccttcagcccagaggtgagcactatgacgacatgtggggaagaagccctcttcctagtgacaaggggatgaggtgatgtcttgctaaggtggcagatgtgaggcctgaaagtggacatatgtgccacacttgtcattaggtctgaagcaagggaaggatggccgaggggagacagagtgcacctggtattggttgaataatatgggcagtaaaaaagcgggctctgggactgccccgatgagggctagagatgatgcgggtctacagcagtcatggaaactagaggggacgtccctcacccaccc

SEQ ID NO: 56757 - DNA, 1838 bp, Homo sapiens
cacctctattgctggccagctgtgatcttgtacaggatacttaacccctttctagctcagtttctttagctgtaaagccagcgcaatgttaccatggagctggtatgtgaaagcaatgcatgttaagtgtgtagtatgtgcctgatacattgttagtgcccagtaaatgttagttatcaggtgaggggtgggatgcggggttgagtagatttgcctcgtccactcatagaggcaggatgtgcaaggaggggtggagacatgcagcaagggattgggcatgaaggttttctccaggcccggggagaacactcggcctggagatattcaggagtccctggcccagaggagattacaactctgcagggatatgagccacgagtggagtgtagacataggcctaaggaagcaatcagacacttccagaatagaggacatttgctaagacagctggcctggatgcttcaaaaagtatcatgggaaaatatgtcggggttgttgtagactgaaagtgactagagttgaaaccaaaagaatgtatgaaccttgatgggacctggttgttgtcgttgtttttaaagacaaacattctggagacaattgttgaatactgattaagggctctgtattagaggctataaagaagttactgtttatatttttaggcatgatcatcttaatgtaatcatgtagaacggtgtctttgtgctcaggaaatctatgtggtaatactcaggggtcgaaatgtcattctatgtacacatgcatggggtggagagaatagtaaatctggcaaaatgttaacaactattcaatccaagtggagagtatgtatctgagtattcattgtgctagcctttcaactttttctggatgtgtggaatttttcaatataaaaaaataagaaaaaaaagaggcctatggaaaaactgggaaccagtatgcaacaggaaaaggaattctttgaaggaaaaacaggatccacctaccaagagagcaatttcaagggagagattaagcaaaatgaaggctgcaaatagatcatcatatttggtcactgggagattgtggcagcttggaaatagtccggtgaagcatagaaaactgacatgcaccctagaacttaaagtattatatatayatatatatatatatatatatatatatatatgtatatatgtatatatgtatatatgtatatatgtatatatatgtatatatgtatatatgtatatatatatatataatatatacacacataaagaaaaaaagaaaagaaaactgacccagagtgagggagtaaaaactggggaggaaggataggcagccaggacttgttggcccttctgggttaagtctttcttttcagtaagaaagggagactgcacattgctgaggaagaagagcctgggggaaagggagggactgagacagcgaaagggggaatactacaggaggaaagacccagtaaacgtgggagaggaatgggatggaaaatgacaggtagatgtggccttaagcggagggatgctttccccttcagcccagaggtgagcactatgacgacatgtggggaagaagccctcttcctagtgacaaggggatgaggtgatgtcttgctaaggtggcagatgtgaggcctgaaagtggacatatgtgccacacttgtcattaggtctgaagcaagggaaggatggccgaggggagacagagtgcacctggtattggttgaataatatgggcagtaaaaaagcgggctctgggactgccccgatgagggctagagatgatgcgggtctacagcagtcatggaaactagaggggacgtccctcacccaccc

SEQ ID NO: 56758 - DNA, 1838 bp, Homo sapiens
cacctctattgctggccagctgtgatcttgtacaggatacttaacccctttctagctcagtttctttagctgtaaagccagcgcaatgttaccatggagctggtatgtgaaagcaatgcatgttaagtgtgtagtatgtgcctgatacattgttagtgcccagtaaatgttagttatcaggtgaggggtgggatgcggggttgagtagatttgcctcgtccactcatagaggcaggatgtgcaaggaggggtggagacatgcagcaagggattgggcatgaaggttttctccaggcccggggagaacactcggcctggagatattcaggagtccctggcccagaggagattacaactctgcagggatatgagccacgagtggagtgtagacataggcctaaggaagcaatcagacacttccagaatagaggacatttgctaagacagctggcctggatgcttcaaaaagtatcatgggaaaatatgtcggggttgttgtagactgaaagtgactagagttgaaaccaaaagaatgtatgaaccttgatgggacctggttgttgtcgttgtttttaaagacaaacattctggagacaattgttgaatactgattaagggctctgtattagaggctataaagaagttactgtttatatttttaggcatgatcatcttaatgtaatcatgtagaacggtgtctttgtgctcaggaaatctatgtggtaatactcaggggtcgaaatgtcattctatgtacacatgcatggggtggagagaatagtaaatctggcaaaatgttaacaactattcaatccaagtggagagtatgtatctgagtattcattgtgctagcctttcaactttttctggatgtgtggaatttttcaatataaaaaaataagaaaaaaaagaggcctatggaaaaactgggaaccagtatgcaacaggaaaaggaattctttgaaggaaaaacaggatccacctaccaagagagcaatttcaagggagagattaagcaaaatgaaggctgcaaatagatcatcatatttggtcactgggagattgtggcagcttggaaatagtccggtgaagcatagaaaactgacatgcaccctagaacttaaagtattatatatatatatatatatatatatatatatatrtatatgtatatatgtatatatgtatatatgtatatatgtatatatatgtatatatgtatatatgtatatatatatatataatatatacacacataaagaaaaaaagaaaagaaaactgacccagagtgagggagtaaaaactggggaggaaggataggcagccaggacttgttggcccttctgggttaagtctttcttttcagtaagaaagggagactgcacattgctgaggaagaagagcctgggggaaagggagggactgagacagcgaaagggggaatactacaggaggaaagacccagtaaacgtgggagaggaatgggatggaaaatgacaggtagatgtggccttaagcggagggatgctttccccttcagcccagaggtgagcactatgacgacatgtggggaagaagccctcttcctagtgacaaggggatgaggtgatgtcttgctaaggtggcagatgtgaggcctgaaagtggacatatgtgccacacttgtcattaggtctgaagcaagggaaggatggccgaggggagacagagtgcacctggtattggttgaataatatgggcagtaaaaaagcgggctctgggactgccccgatgagggctagagatgatgcgggtctacagcagtcatggaaactagaggggacgtccctcacccaccc

SEQ ID NO: 56759 - DNA, 630 bp, Homo sapiens
aaagttatgattattttcaccaggagatacagcaagaatcctattaaactgtaagctatcattgcggcccagtcactttgttcttcttacaccragaaactagcaggcaaggaaaggagtcaccatcttggcagtggtaattgatccagttcttggggaagttacacaatgaggacagggaatactatgacacacaggtgattcactggagcatctcttggtattcctctggccaatcttcagtaaatgtactcaaatagcagctattgcctgagatgggcatggtgaccagtacctcaacactcaagaataaagactgattgccctctcagcttagccaccaagactatcagagatataatagagagtgaaaagaatctagaatgggtaatgacagaagatgaaggacaccagttttggcttcgagatcagctacagtggtggggctacagttcactctattaccatattgtaagttttcatataaagataaaccaaccaaaatcctgaggctatttccacatgtgtttaactccctctggaagaatattcaagtgttgtaatgatacgactgtagggatgctttgatatgcctctgagatcccctttcaggatcaaggtacttatttt

SEQ ID NO: 56760 - DNA, 525 bp, Homo sapiens
ttttttttttgtattttttgtatttttagtagagacggggtccccatgttggccaggctggtcccgaactcctgacctcaggtgatccacctgcctcagcctcccaaagtactgggattataggcgtgagccaccgcgcccggccctgcacttmgttttcttaaggaacactagagcttgaagaaaaagacgtgttgacaagttttaagggtcaaatttaaaaatcagtttccctgataaagtatgtgccatcacacgtggcaaatctgtaaggaacacttggtgttttcatgtaatgtaatcttataaggctaagctgtgttataggctaataaaatgtcatttgtgatattataaacagccataatgagaaggaacctttgaccagggtgaaaacccgtgtgaaaatgcttgtgactgtgaattctgcaaaatcgttctccgctcttcatggagatggtttcattctcttcaccaagaatcactgataaaagtaaattgccttctttgctcaaaattccgtga

SEQ ID NO: 56761 - DNA, 533 bp, Homo sapiens
aagaaatttgagagttggttggaatagatgaatggggccaatttttttgttgcttgaaattaccagtgctactaactgttcatgaatgtgtccatagtattgacagctggccatggctttgtttgggagtagttgtttcccagtggataagaaacttttccattaacccttggtaaagaaatgaccaagcacttcatatacagcagcactttcttcccctagactctagattcactcaccatcactcaccattattactctcactggtgctttccctacaatcaccatcaagatcaggaattctattctcattaaaatcacagagggatgagtttacttgtttcatgtggccagcatctcctgactggggcatctatgyagaaactgaatagatgatgggaaaaagaccatctcttgagttagaagagaaaccccactatagacttggagaagatgagctgtcatcaccaactattaatcaggcacctattcttaagaactaataacatcaagaatggcttggaaacagcttg

SEQ ID NO: 56762 - DNA, 1018 bp, Homo sapiens
atcccaacactttgggaggccgaggcaggaggatgacttgagaccaggagtttgagaccaacctgggtaacataaacaggaataatatttacatgagtctcttaataattcatatcatcaagtgtggtaatgtataaaacagtactaatggttcatagaaaaatccagtttttgtgttgaatacgggtactattctaatagccagaccccatctctttaaaaaacarttagctgggtgtagtgttgcatgtctgtggtcccagctactcaggtggcccaggagtaattgcttcacgttaagagtttgaggctgcagtgagcaatgatggttccactgcacgctagcctgggcaaagagtgagaccctatctcctaaaaacaaaacaacaacaacaaaactcaacaacagcaaactttttccataaggaaattaaataaattaaacaaaaaacacttcaggacatctgcccctgaccaatttccccaattttctttggggaaagaaacttgcagaaagaattggttacttctaaatgtgggatttctagaaagagggtctaaaccatgcagcatttcctgaaatatagacccttgatcgaaatataagagtcaggcaggccaaaaacccctgcacagcaaagggaaattacatgaccaacagtattcttgaatgcagtaaattttactgagtattttgtacatgccgggcaattttctagccacttggaatacatcagtaaataaattagatataggccctcactgtttgggaattgatattcaagagggagaaggcactgaaaaatactcataataaacaaatacattatacaacatgtataaaagggaattaaaggatagaataaggtaagagagatgtgaaataccagtgtagaggtggggcaaggttggtgcagacactgttgaagagagaagatttgagcagagaagtgcaggatgtgactagttagtcaaaaaggtacctctcagaagatgctcccataatgagaatggctca

SEQ ID NO: 56763 - DNA, 680 bp, Homo sapiens
tttctcattgtttatctttgctgtagtttttagagtcaggctgagtcgttcagtgaataaaaggtgtcagtagatacaaggctgctgtaatctaagctgcccagagaatcagaaggaacaaatacgaattgtggataggggtgggaaatatacaaactcactgaagaacagttttagacaaagtaccagataaaatgaaaaataatggcaactgacaaattatgaaaattaagttcttgatttamgaagccaaagagtggaaatagcaatgaaatctgacatcagctccagctgcaaatctttatgtgcatattatgaaataaaaacgtcacaagatgtctccttctggcccttcccattcccccaaatagaaattaacaatagtactattttagattccaggtttatacataaacacattatatatgtatagctctgtttcacagcctaatcccatcccaaatcccaaacccaaatatcttccgactaggttgttaactaacaaatctatatacaactcttctcaagagatcaaaatacaatgactcaatactagatccaagggaatagatttcccataatgaatctgtaggcttcagaataagtaaacaagggaatgtctagaaatgaaagcttctaatattccttcatattacattcatctgccattttttattttt

SEQ ID NO: 56764 - DNA, 701 bp, Homo sapiens
ttgtagtatctcatcaaggagcgatgacccactctggcacctgtttttcaaaagagcaatactgaaacactgagttggatagttttttcaaggcagagctataaagcaagggctttccaaatcagatcttttagtatatctagatggaaaatcgatgtaccagaagaaacagttgttctatctactaaagacagatgaagcagcatgtaaaataaaaataaaaagtgaaagaaagcaagcatgcaacaaaaagaaaaccaaacaatagattttttaaaaagaaaatgacaagtcactgttaagtgaaaaacttagcattgtgtacttacttgcatacaatatgcctccccaaaaattcacatagaaacccctactaatacagataataggggcctaggagataagagatttttagcgttttatatatataaataaataaaaattttatatatatatatatatatatatatgaagaagattaagcacagagagcagttctgatgtttgggactacaagccacagtcaggatctaaaatagaaatcaatccacctttcctttgcttaaactctctattgcagtgattctccaawggggattttatccagcaagggacattgggcactgactgaacacatttttggttgttacagctagaggggtactactggcacctagtgggtagaggccagagatgctatt

SEQ ID NO: 56765 - DNA, 635 bp, Homo sapiens
  misc_feature (1)...(635): n = A,T,C or G
gnnnnnnnnnnnnnnnnnnnnnnnnnnnnnnnnnnnnnnnnnnnnnnnnnnnnnnnnnnnnnnnnnnnnnnnnnnnnnnnnnnnnnnnnnnnnnnnnnnnnagtgactcctgggttttaacatcaggtcttagtaattttttcaagtctagattctaggcagtcagggcatgtgtggtgcaggcacttgtgtagacatagtgaaatgacagtgggcccacaggggatgggggatttggtacctactgtctcccaggggcaggacacgttccagcaatggttccagttttcaggatggcactgtgccatggcagcttaggccacaggggtgggggctatcccagaggttccttctctggggcaatgcagctgtgtacatgtgtgacaactgtctacacaagatttgtggcctttgaagactggaggaccctcttgyaggaattgctgccagtgtttgtggtggtgatggggaactgccaaggatctcctgcttaccatctccccataagaagtccccttggctccaggacaagcatggcagggtagacagtattggagaggtaggatgccttgctcccctctctgtggtgttacgctacacttccatgctccacagggatctgactgctcccctgg

SEQ ID NO: 56766 - DNA, 1564 bp, Homo sapiens
taattaacagccactgttaaaatcaatattgacaggacataaaacagtcctggaatagaatcaccagtgggggatctcccttctcctgagtaattgattttgcaagcaatagcaaataataaaagctaataggtacctggcatctggggaaagcagcattttgagaaagctgtttctaacgctctctggttcaagctgtattttgaagcagagtcagtgtaagaggtgaagtgctgagagtgggaaaacaacacaacccataaggtccatctcattatcaagatctctacctcaggggacactgttgagagtcttcaatgtagtcacattttaaaactgtacaaacaacgtagaatttggagaggcggacaaggccagtggtgggacaatttgctccagatcattttgatcctccactcagaactatgctgacaagtcagaaagcagaggtctctcctgacaatttttagcatgtggctggcctctttgattggaggctaaagtgactgatacagacccaaatatcattagagatgatatttgggctctaaacctgtattagatctgggatagctgtgtaatcctctagtcaccctgtcaatgtcatttatttcccctgtggagaaaccccacagatgtactatcatctgggcatatctggctaacatcatgttgcctgggggcagcaagggcaggctctgggaagaaatacagctcagctttaaaagaaacttcatggttgggcaccatgactcattctggtaatcctaacacttggtgaggcagaggcgggtggactgcttgagcccaggagttccagaccagcctgggccacatggtgagaccccgtctctacaaaaagtacaaaaagtagctgggcatggtggtacacacctatagtcctagctacttaggaggctgaggtgtgaggatcccttgggctcaggaggttgaagctgcagtgagctgtgattgattccaccactgcactccagcttgagtgacagagagaatccccatctcaaataaaataaagaaacttcattatacttgggataaaaactgatgtgcgagaagaaatatttccaagaaatctggaatacattaaaactcaggaaagagaggccatgggatcagtcttctctgcaggctgggctggtccctactcagtgctccttttctgccctcacgtgcttgtgttttgttgtaatccaccgtaccactggctgccagagaagctgcagcattatttagcaatgttttacagaggagaggggctaaaatgcatgactgtaatgtctctaacattaaagaactctgggaggctgtggtttycaaggatcatgatgaaatgagtacctgcaatggtgattacagtagagagaatcggatgttctctagcatgaaccttcctgaagacaggttggcctagcaaaaggacaggcagaaaaatcagcagaatggattgcattgatttgctatcagagctttgtggaattagtaagctaaacatcacacccagatgcacacatcacaagcaacgttagtttggggattcaatgat

SEQ ID NO: 56767 - DNA, 1480 bp, Homo sapiens
gtcagagtgaatttagtggcaaccctgttttccaggaaragatgaggggttggcagtactggtggcagaacagcaatggcggtgaaagtggagagaaaggagctcagctgaaatctagagccgtcctccaggagggggctccccaaagtcctgaactccaaaatggccttatcgtccagaaattcatggaggctttgcctcattactacccttgaccctttcttcctctttctgcaggttcacccaaaatctgtctgtattcagaagagatgtggcagaggcgttgcgcagtgatggcaacactgaaccatgcagtctcgacatgatgagctgacccgacttttctgaccatgtgcggagcagcctttatcaagagactcctgaaggtctgggtctcaggacagtgatgttggctagcccaggggaatgtatttttcaaaacatacaagcaacagcaaaagccctaacttcttatacgtctagcctaattataagaatttctaacagtaccagtgtaaattcagtcttttctctgaaaagcaaaggatgtgttttcagtctttctatcaaatattatctttgttctcctaatgctctgaaaggatgtagaaacaatatttaaccaaagaacgtaataaaccaggtttgcacctaagtgtgtactagtttatggttctgcagtcaaggttgtcaatttgttggagatgcagccttcaccttggatcctggattgagacgaatgccattggaacctgttaaatgagtagtttgttatgtgtctggaagaagcagcgttagggactttgggctgtgagcatttagaacgagcctggaagcactacagagcatcccacaggaccacacgcaggcctccctgcctcagctgcatctgataaagttgagagacagtaacacaattaaatgacttagaaacaatgtttgcttttcactggcataaatctgaagtggttcagtctagaagaattaagctgtgcaattactgcctgcagagatatttcttcaggaggagtcatgtagccccagtcagaagttctgggtggtgccagcacccagtcctctgcctccatttaatttttaagagaaggtgaaggtaactattagaatataatatttgaagcagctctgccttcttagggctacccaaaacagttctaggtgctaaaattcagattttcagaggatgagaaatagctggtttccaactctccacaaaaactcttattactgttgggacttgggattctgacttaccccaaacccagaacatgaagaagacctttacagtttgtgctctactgttactaggctattaatttgagatcgtccactgtcaagtgttttactatctcactgctgtttttatgattcaggcttataacaaatattgtatcctttatttctgataagacatgaaaggttggccttactgttgaacaataagtaaatccacaggctcctg

SEQ ID NO: 56768 - DNA, 1470 bp, Homo sapiens
tgaaaaaaattttgaaatttaaagccttgtaactgctcttttatgttttattctagaagatttatagtttgatcttccactttcagatatgcaatttgattgggattaatttttaagaatataataaagtagaagttaaattatttttcataagaccaggcagttgacttagaagaatttactgagaagtttcaactctttttcctatcaagagtccagatatgtttgaatgttttatttttttcttggcactcactcttctgcccagtttatttatttgttatccttgcaccttgctcttgttggtgagatttttctcttagtttgacctattgatgacctataagaaatatagatattattttattatttattttatgcagtcacattattgagcaccctaacgagggaattttcaggaaggctgtgctgccgtttgcaatggtgatattgttttctcatcctttacagtattcgtgactgtgcatgtgtgtgtgtacatgtgttattattttggctagaaaattcatatcaatgttaccacaagtggtgatggcacacaagcataaacaatttattatcttgaatgtaaatacagctattgtaatgattgtatatgatawtgaatttatcaagaaaagaataatatttccaggaaataatatttttaaacaaaataatagtgaatataataagggcaatactaaaaagaggattacaaagtaatcttaagagtgcttatttttgtgaacattattacacttcctgctcctcttgaaattatacaacaatagattgacgtgttgttcacttcttcatgggtacaggatttgtactttatttgtaacatattggatgcttaaatgttatttgatatgcatgtttgtttctgcttatatttaaatattttatatattatcttggattagtggctgtgactaaattggtagaatatatttagagtatatagataattttgccactaaacatttctctttttttcatcctaaatgcaataaaatacatatacaaattaaatgtaccagcttaagctgagggtatcattgtaggaaaacaggcaacggaagataaattcctgttttaaatataataacctgtggtagctggaaaattagaagcatgtcctaatatttgggataagagggccagtgaattgggggagtataagtctgagtaatgtgttagggccgctggggtgagtagttttcttcagttcaaataatataataaaaatagactcactgaatgtctccaaacaagaactaataaatagaactgttttcctttaaaaaatgtgttgtgctgagatagctgcaatatgcagccatacatggtagtgttaaagagactgaatgtaaaatctcttaaaaccctccattgactaagtgtcttactttggaaaagccatttaatctctataaaaattaaattcccttatatgtgtaagag

SEQ ID NO: 56769 - DNA, 869 bp, Homo sapiens
tatatacagaatataatatgctttatacacacacgtgtgtttgtgtgtatcacagatcaaaataataaacctaaaagcatacatttttagaagaaaggatatacaaagtatttgaaatcttgattaggcaaaattaaaaaaaaaaaactggcaccaaacgcatgatctataaagtaaaaatttgataaattgactaccaatgttaaaatatcttgaaagccttcagtgaagagaaaatatttgccaactacaagttttattaaaatatttgtatcttcaatatacaaaaamctcaataactaaacattttaaaaaacaagcagtgggtggatcacctgaggtcaggagttcaagacctgcctggccacattggtgaaaccctgtttctacaaaaatacaaaaattagccaggcatgatggtgggtgcctgtaatcccagctactcgggaggcacgagaatcgctgagccggggaggtggaggttgcagtgagctgagatggcgccattgcactccagcctgggtggcacagtgagacgccatctcaaaaaaaaaaaaaagagagagatagaaatagtatgaattttaagtaaacatgtgaaaagctgttggatatcattattcttaatcatatatttgattcataaatcataaacaaggtgatatatcagcacacgtgtattaaaatggctatgtttaaaaaaatggtataattaagtgctttcttcataattgacacaaactggaaagaacccaaattctattaactggtgaatgaaagaatagccagttatacagtggagcattgctcaacaatggaaatgaagtaactactggtatatgcaaaagggcgagtcaagcacaaatgca

SEQ ID NO: 56770 - DNA, 869 bp, Homo sapiens
tatatacagaatataatatgctttatacacacacgtgtgtttgtgtgtatcacagatcaaaataataaacctaaaagcatacatttttagaagaaaggatatacaaagtatttgaaatcttgattaggcaaaattaaaaaaaaaaaactggcaccaaacgcatgatctataaagtaaaaatttgataaattgactaccaatgttaaaatatcttgaaagccttcagtgaagagaaaatatttgccaactacaagttttattaaaatatttgtatcttcaatatacaaaaacctcaataactaaacattttaaaaaacaagcagtgggtggatcacctgaggtcaggagttcaagacctgyctggccacattggtgaaaccctgtttctacaaaaatacaaaaattagccaggcatgatggtgggtgcctgtaatcccagctactcgggaggcacgagaatcgctgagccggggaggtggaggttgcagtgagctgagatggcgccattgcactccagcctgggtggcacagtgagacgccatctcaaaaaaaaaaaaaagagagagatagaaatagtatgaattttaagtaaacatgtgaaaagctgttggatatcattattcttaatcatatatttgattcataaatcataaacaaggtgatatatcagcacacgtgtattaaaatggctatgtttaaaaaaatggtataattaagtgctttcttcataattgacacaaactggaaagaacccaaattctattaactggtgaatgaaagaatagccagttatacagtggagcattgctcaacaatggaaatgaagtaactactggtatatgcaaaagggcgagtcaagcacaaatgca

SEQ ID NO: 56771 - DNA, 869 bp, Homo sapiens
tatatacagaatataatatgctttatacacacacgtgtgtttgtgtgtatcacagatcaaaataataaacctaaaagcatacatttttagaagaaaggatatacaaagtatttgaaatcttgattaggcaaaattaaaaaaaaaaaactggcaccaaacgcatgatctataaagtaaaaatttgataaattgactaccaatgttaaaatatcttgaaagccttcagtgaagagaaaatatttgccaactacaagttttattaaaatatttgtatcttcaatatacaaaaacctcaataactaaacattttaaaaaacaagcagtgggtggatcacctgaggtcaggagttcaagacctgcctggccacattggtgaaaccctgtttctacaaaaatacaaaaattagccaggcatgatggtgggtgcctgtaatcccagctactcgggaggcacgagaatcgctgagccggggaggtggaggttgcagtgagctgagatggcgccattgcactccagcctgggtggcacagtgagacgccatctcaaaaaaaraaaaaagagagagatagaaatagtatgaattttaagtaaacatgtgaaaagctgttggatatcattattcttaatcatatatttgattcataaatcataaacaaggtgatatatcagcacacgtgtattaaaatggctatgtttaaaaaaatggtataattaagtgctttcttcataattgacacaaactggaaagaacccaaattctattaactggtgaatgaaagaatagccagttatacagtggagcattgctcaacaatggaaatgaagtaactactggtatatgcaaaagggcgagtcaagcacaaatgca

SEQ ID NO: 56772 - DNA, 869 bp, Homo sapiens
tatatacagaatataatatgctttatacacacacgtgtgtttgtgtgtatcacagatcaaaataataaacctaaaagcatacatttttagaagaaaggatatacaaagtatttgaaatcttgattaggcaaaattaaaaaaaaaaaactggcaccaaacgcatgatctataaagtaaaaatttgataaattgactaccaatgttaaaatatcttgaaagccttcagtgaagagaaaatatttgccaactacaagttttattaaaatatttgtatcttcaatatacaaaaacctcaataactaaacattttaaaaaacaagcagtgggtggatcacctgaggtcaggagttcaagacctgcctggccacattggtgaaaccctgtttctacaaaaatacaaaaattagccaggcatgatggtgggtgcctgtaatcccagctactcgggaggcacgagaatcgctgagccggggaggtggaggttgcagtgagctgagatggcgccattgcactccagcctgggtggcacagtgagacgccatctcaaaaaaaaaaaaaaragagagatagaaatagtatgaattttaagtaaacatgtgaaaagctgttggatatcattattcttaatcatatatttgattcataaatcataaacaaggtgatatatcagcacacgtgtattaaaatggctatgtttaaaaaaatggtataattaagtgctttcttcataattgacacaaactggaaagaacccaaattctattaactggtgaatgaaagaatagccagttatacagtggagcattgctcaacaatggaaatgaagtaactactggtatatgcaaaagggcgagtcaagcacaaatgca

SEQ ID NO: 56773 - DNA, 869 bp, Homo sapiens
tatatacagaatataatatgctttatacacacacgtgtgtttgtgtgtatcacagatcaaaataataaacctaaaagcatacatttttagaagaaaggatatacaaagtatttgaaatcttgattaggcaaaattaaaaaaaaaaaactggcaccaaacgcatgatctataaagtaaaaatttgataaattgactaccaatgttaaaatatcttgaaagccttcagtgaagagaaaatatttgccaactacaagttttattaaaatatttgtatcttcaatatacaaaaacctcaataactaaacattttaaaaaacaagcagtgggtggatcacctgaggtcaggagttcaagacctgcctggccacattggtgaaaccctgtttctacaaaaatacaaaaattagccaggcatgatggtgggtgcctgtaatcccagctactcgggaggcacgagaatcgctgagccggggaggtggaggttgcagtgagctgagatggcgccattgcactccagcctgggtggcacagtgagacgccatctcaaaaaaaaaaaaaagagagagatagaaatagtatgaattttaagtaaacatgtgaaaagctgttggatatcattattcttaatcatatatttgattcataaatcataaacaaggtgatatatcagcacaygtgtattaaaatggctatgtttaaaaaaatggtataattaagtgctttcttcataattgacacaaactggaaagaacccaaattctattaactggtgaatgaaagaatagccagttatacagtggagcattgctcaacaatggaaatgaagtaactactggtatatgcaaaagggcgagtcaagcacaaatgca

SEQ ID NO: 56774 - DNA, 793 bp, Homo sapiens
tcctttagccaccattggtcactaaaggaaaacaggatgaagctaacacccaggaactaaacatgcttttcttcagatccttgttctcccagtgtttggtggttctgcccacctgggctggggagtcaagctgcaggtctgttgcagacagagcatgacttcataaccacagagatcatgggcagccccaagagaaggaataaaagagagcaggccagaagcagtggctcatgcctgtaatctcagcactttgggaggccaaggtgggcagatcacaaggtcaggagttcgagaccagcctggccaacatggtgaaaccctgtctctactaaaaatacaaaaattagctggacgtggtggcaggcacctgtaatcccagctattcgggaggctaaggcaggagaatcgcttgaacccaggaggtggaggttgcagtgagccgagatcacgccactgcgctayagcctgggcgacagagcgagactcaatcttaaaaaaaaaaaaaaaaaaaaaaaaaaagagagagccgggggagtcagtatctttcactgaatgtttttttcctgaaccttctagggaagaactctttaatctatgctcttaagagcttggttacatgatcaatgaacaccaactgctaaagtgtaggggtggggatgagcactggctctaatgttgagcaaactgcaaagtaccgcaaaagagaagcgcagagccaaggttgctattcacctccgtccacctccttccctactgtggaagtatctgcagacacatgatgccatttcactcc

SEQ ID NO: 56775 - DNA, 606 bp, Homo sapiens
actcccatgatccaaacatctccctctgggccccacctccaacactggggatcacatttcaacatgagatttggagrggacgaatttccaaactatatcagtctattcgaggaacagaaggaaagctgttattgctggatcagggtaggggaagcacggaatgaaatgtgattggagagatggacagagatcagatcttgtgaattctggcaggtatcatgacattcgatgtaggccaaagagttacctcctagcccagctcctgatacatgcttaataagcgtagtgttggataaataaacgtttacgtggtaaaagtagatcacaagagctccacaggaggaggtggtggagctccaggtcttctcaatgaatgaaagaatggatgaatgtctttctcctaagtcatgtatgacctgtagaggcttccaggtcttctaatcttatccagtgtgcaacactgcctacaaagcacagtggtaacttctaactttcctttctccccaggctctactacccgaaggatagtgcccgaagttgctgcttggcatagatgagcctcagcttccagggcactgtgggcctgttggtctactagggccctga

SEQ ID NO: 56776 - DNA, 606 bp, Homo sapiens
actcccatgatccaaacatctccctctgggccccacctccaacactggggatcacatttcaacatgagatttggaggggacgaatttccaaactatatcagtctattcgaggaacagaaggaaagctgttattgctggatcagggtaggggaagcacggaatgaaatgtgattggagagatggacagagatcagawcttgtgaattctggcaggtatcatgacattcgatgtaggccaaagagttacctcctagcccagctcctgatacatgcttaataagcgtagtgttggataaataaacgtttacgtggtaaaagtagatcacaagagctccacaggaggaggtggtggagctccaggtcttctcaatgaatgaaagaatggatgaatgtctttctcctaagtcatgtatgacctgtagaggcttccaggtcttctaatcttatccagtgtgcaacactgcctacaaagcacagtggtaacttctaactttcctttctccccaggctctactacccgaaggatagtgcccgaagttgctgcttggcatagatgagcctcagcttccagggcactgtgggcctgttggtctactagggccctga

SEQ ID NO: 56777 - DNA, 2445 bp, Homo sapiens
aaatgatcttcccatctcagcttcctgagtagctagggctacaggtgcacgcccccatgcctggctaattgaaatatatatatatatatatatactgtagagatgaggtctccaacatctttctgtggcagagctgggattcaaagcctcatctaggcaccattttccttgccctctgagtcccgcagcccccagccccaaaggttactctctaacctcgcgaatgttgtctctaggtgggctggggagtgcgggtgatggcagaggcttactctttcccttacagaagatgttgtccctgtccaagctgacccttgctctgttgtgtgtctgggctgttagctgaggtcccattgggtctccaggccccaggggtcttctggaggggtcttctggagaggtcttgcaaccatttcttattgcctccttctcagaccatccgggctaccactgactactgccgccgccacaagatcccctttccccaagtagaagaggctgagctggatttgtggtccaaggcccccgccagctgctacatcctgaaaggagaaactggaccagtggtgatgcattttcccctgttcaacatagatgcctgtggaggtaggtgcaggggaggagcaggtgagaagccacctgtattagtccatgctcacactgctaataaaaacatacctgagactgggtaatttacaaaggaagaaggtttaattgactcacagttcagcatggatkgagaggcctcaggaaacttacagtcatggtggaaagcgaaggccaagcaagtcaccttcttcacaaggcggcaggaaggagaagtgagtgccagcagggcaattgccagatgcttataaaatcatcagatcagccgggcgcggtggctcatgcctgtaatcccagcactttgggaggctgaggcgggcggatcacaaggtcaggagattgagaccatcctggctaacacagtgaaaccccatctctactaaaaatacaacaacaaaaaaaaataaattgctgggcttggtggtgcgtgcctgtaatcccagctactcaggaggctgaggcaggagaatcgcttgaacctgggaggcggaggttgcagtgagctgagatcgcgctcctgcactccagcctggggacagagcaagactccttctcaaataaataaataaatacataccatcaggtctcgtgagaactcaactcactgtcacgagaacagcatgagggtaaccacttccatgcttcaattacctcccacgacacttggggattatgggaactacaattcaagatgagatttgggtggggacacagccaaaccatatcaccaccaggccaggccgaatggagctgtgctgtgccctggggacatcttgttacgctccaacatctgatggttgagtgagtcatcctgtccacccttgggcctggaggatgccaggctgcctctctcggtcttgcatgtttatgcatgttgctgcctctctctgcagccttcttgtcctacctgaatatccaaccccttccacctgggcatcccacattcctcatccagtctcaggtgagcagctgcttggaaggcctagcatccaggatgggtggtcctccggggcctgattgtgccacttcccacagtgggctccttttagcttgtcaatcgtgtctcctgcgatgagactcccattagggataaattgtgtctgttttcttccttcatttaacgaacatttattggttacctatgctgcatcagccatggttccaggagaggcaggctagagtagtaaagaagacaggaagcagggggccaggcgcggtggctcacgcctgtaatcccagcactttgggacgccaagccggggcagatcacctgagatcaggagtttaaggccagcttggccaacagggtgaaaccccgtctctattaaaaaatacaaaaaattagccaagcgtggtgatgcacgcctgtaatcctagctacttgggaggctgaggcaggagaatcgcttgaatctaggaggtggaggttacagtcacccaagattgtgccattggactccagcctgggagacaagagcgagcctctgtctcaaaaaaaaaaaaaaaaaaaaaagaaaaaaggaccggaaggggcatggatcataaaaatatagataaatccataacctcatgtgtcaataaaactttatttataaagccaaagtagtgggccgactggatttggtccacaactgtagtttgccaagccctgatgtaaatagacaaaaatctgcagaattaattgtccaaactcatgatgccttttctttgttggtttggttatgcttcaggtgatattgaggcatggagtgacacatacgacacattcaagcttgctgacacctacactctagatgtggtggtgctactcttggcattagccaagaagaatgtcaggga

SEQ ID NO: 56778 - DNA, 2445 bp, Homo sapiens
aaatgatcttcccatctcagcttcctgagtagctagggctacaggtgcacgcccccatgcctggctaattgaaatatatatatatatatatatactgtagagatgaggtctccaacatctttctgtggcagagctgggattcaaagcctcatctaggcaccattttccttgccctctgagtcccgcagcccccagccccaaaggttactctctaacctcgcgaatgttgtctctaggtgggctggggagtgcgggtgatggcagaggcttactctttcccttacagaagatgttgtccctgtccaagctgacccttgctctgttgtgtgtctgggctgttagctgaggtcccattgggtctccaggccccaggggtcttctggaggggtcttctggagaggtcttgcaaccatttcttattgcctccttctcagaccatccgggctaccactgactactgccgccgccacaagatcccctttccccaagtagaagaggctgagctggatttgtggtccaaggcccccgccagctgctacatcctgaaaggagaaactggaccagtggtgatgcattttcccctgttcaacatagatgcctgtggaggtaggtgcaggggaggagcaggtgagaagccacctgtattagtccatgctcacactgctaataaaaacatacctgagactgggtaatttacaaaggaagaaggtttaattgactcacagttcagcatggattgagaggcctcaggaaacttacagtcatggtggaaagcgaaggccaagcaagtcaccttcttcacaaggcggcaggaaggagaagtgagtgccagcagggcaattgccagatgcttataaaatcatcagatcagccgggcgcggtggctcatgcctgtaatcccagcactttgggaggctgaggcgggcggatcacaaggtcaggagattgagaccatcctggctaacacagtgaaaccccatctctactaaaaatacaamaacaaaaaaaaataaattgctgggcttggtggtgcgtgcctgtaatcccagctactcaggaggctgaggcaggagaatcgcttgaacctgggaggcggaggttgcagtgagctgagatcgcgctcctgcactccagcctggggacagagcaagactccttctcaaataaataaataaatacataccatcaggtctcgtgagaactcaactcactgtcacgagaacagcatgagggtaaccacttccatgcttcaattacctcccacgacacttggggattatgggaactacaattcaagatgagatttgggtggggacacagccaaaccatatcaccaccaggccaggccgaatggagctgtgctgtgccctggggacatcttgttacgctccaacatctgatggttgagtgagtcatcctgtccacccttgggcctggaggatgccaggctgcctctctcggtcttgcatgtttatgcatgttgctgcctctctctgcagccttcttgtcctacctgaatatccaaccccttccacctgggcatcccacattcctcatccagtctcaggtgagcagctgcttggaaggcctagcatccaggatgggtggtcctccggggcctgattgtgccacttcccacagtgggctccttttagcttgtcaatcgtgtctcctgcgatgagactcccattagggataaattgtgtctgttttcttccttcatttaacgaacatttattggttacctatgctgcatcagccatggttccaggagaggcaggctagagtagtaaagaagacaggaagcagggggccaggcgcggtggctcacgcctgtaatcccagcactttgggacgccaagccggggcagatcacctgagatcaggagtttaaggccagcttggccaacagggtgaaaccccgtctctattaaaaaatacaaaaaattagccaagcgtggtgatgcacgcctgtaatcctagctacttgggaggctgaggcaggagaatcgcttgaatctaggaggtggaggttacagtcacccaagattgtgccattggactccagcctgggagacaagagcgagcctctgtctcaaaaaaaaaaaaaaaaaaaaaagaaaaaaggaccggaaggggcatggatcataaaaatatagataaatccataacctcatgtgtcaataaaactttatttataaagccaaagtagtgggccgactggatttggtccacaactgtagtttgccaagccctgatgtaaatagacaaaaatctgcagaattaattgtccaaactcatgatgccttttctttgttggtttggttatgcttcaggtgatattgaggcatggagtgacacatacgacacattcaagcttgctgacacctacactctagatgtggtggtgctactcttggcattagccaagaagaatgtcaggga

SEQ ID NO: 56779 - DNA, 2445 bp, Homo sapiens
aaatgatcttcccatctcagcttcctgagtagctagggctacaggtgcacgcccccatgcctggctaattgaaatatatatatatatatatatactgtagagatgaggtctccaacatctttctgtggcagagctgggattcaaagcctcatctaggcaccattttccttgccctctgagtcccgcagcccccagccccaaaggttactctctaacctcgcgaatgttgtctctaggtgggctggggagtgcgggtgatggcagaggcttactctttcccttacagaagatgttgtccctgtccaagctgacccttgctctgttgtgtgtctgggctgttagctgaggtcccattgggtctccaggccccaggggtcttctggaggggtcttctggagaggtcttgcaaccatttcttattgcctccttctcagaccatccgggctaccactgactactgccgccgccacaagatcccctttccccaagtagaagaggctgagctggatttgtggtccaaggcccccgccagctgctacatcctgaaaggagaaactggaccagtggtgatgcattttcccctgttcaacatagatgcctgtggaggtaggtgcaggggaggagcaggtgagaagccacctgtattagtccatgctcacactgctaataaaaacatacctgagactgggtaatttacaaaggaagaaggtttaattgactcacagttcagcatggattgagaggcctcaggaaacttacagtcatggtggaaagcgaaggccaagcaagtcaccttcttcacaaggcggcaggaaggagaagtgagtgccagcagggcaattgccagatgcttataaaatcatcagatcagccgggcgcggtggctcatgcctgtaatcccagcactttgggaggctgaggcgggcggatcacaaggtcaggagattgagaccatcctggctaacacagtgaaaccccatctctactaaaaatacaacaamaaaaaaaaataaattgctgggcttggtggtgcgtgcctgtaatcccagctactcaggaggctgaggcaggagaatcgcttgaacctgggaggcggaggttgcagtgagctgagatcgcgctcctgcactccagcctggggacagagcaagactccttctcaaataaataaataaatacataccatcaggtctcgtgagaactcaactcactgtcacgagaacagcatgagggtaaccacttccatgcttcaattacctcccacgacacttggggattatgggaactacaattcaagatgagatttgggtggggacacagccaaaccatatcaccaccaggccaggccgaatggagctgtgctgtgccctggggacatcttgttacgctccaacatctgatggttgagtgagtcatcctgtccacccttgggcctggaggatgccaggctgcctctctcggtcttgcatgtttatgcatgttgctgcctctctctgcagccttcttgtcctacctgaatatccaaccccttccacctgggcatcccacattcctcatccagtctcaggtgagcagctgcttggaaggcctagcatccaggatgggtggtcctccggggcctgattgtgccacttcccacagtgggctccttttagcttgtcaatcgtgtctcctgcgatgagactcccattagggataaattgtgtctgttttcttccttcatttaacgaacatttattggttacctatgctgcatcagccatggttccaggagaggcaggctagagtagtaaagaagacaggaagcagggggccaggcgcggtggctcacgcctgtaatcccagcactttgggacgccaagccggggcagatcacctgagatcaggagtttaaggccagcttggccaacagggtgaaaccccgtctctattaaaaaatacaaaaaattagccaagcgtggtgatgcacgcctgtaatcctagctacttgggaggctgaggcaggagaatcgcttgaatctaggaggtggaggttacagtcacccaagattgtgccattggactccagcctgggagacaagagcgagcctctgtctcaaaaaaaaaaaaaaaaaaaaaagaaaaaaggaccggaaggggcatggatcataaaaatatagataaatccataacctcatgtgtcaataaaactttatttataaagccaaagtagtgggccgactggatttggtccacaactgtagtttgccaagccctgatgtaaatagacaaaaatctgcagaattaattgtccaaactcatgatgccttttctttgttggtttggttatgcttcaggtgatattgaggcatggagtgacacatacgacacattcaagcttgctgacacctacactctagatgtggtggtgctactcttggcattagccaagaagaatgtcaggga

SEQ ID NO: 56780 - DNA, 609 bp, Homo sapiens
gatgccgtttccaatccagccttctctgcagctacacttgaagcttcctgggatattcagacatgaggcatgcatgtcgcagttatgagcaccaatttcacactcatccacatctgataaaccataattcataagaagaaaatcaaaatacaaactaattaattctacttccaagtatatttttgtataggtaacattttaaagtaaagatgcaaccgtatggagaaaagagtagcctaactaacttttatttttaatttttgtaggctccaagaggacttggaaaattcatgatcctaataaaacaagttcttccctagaaacaactktcagccactttccagtagaagagagagagacacagcagtgttgctccctggcaggtatgtgtattatcctggggccttcttccctgcccagattcagacacaacaccataaagaggacattcgattacagatcaagagaaatcttatttccaataatagatggtgctattccttcctattgatatttattacatatttttcatgaagataagaatctaactttttaaaaaaagtaatagtttattctctttaaaattacatgatcatttgtcatttaaaa

SEQ ID NO: 56781 - DNA, 1055 bp, Homo sapiens
tttaagccactcagtctttggtattttgttgtaacaccctgaaaaaacaaaaagcccaagccaactaagacatatctacatacattaatttcaaggaatgctcccatgaaaaggaaaactggggtatcatatatattacactgtcatcctgtttctttttttaaaaaagagataaagaatactatatctgtgatatattattgtattatatatatagtattattgtagtatatatgaacacagaaaaacttttggaagcaaacacaacgtactcttaacgctaaatatctaaaggtatgggtagggaagtacaggtgtgaggytacctggaacgggggcagagattaacttttgctttaaacacagttcattttgttgaaatacctagattaagaaaatgcacatcttcctaatcctttttttattaggcatttttaaattaaaaatgtactttagattttatctaattcttcagcaacaatcaatgaaatcacaatttcaaaaatattgaactaaattgtatttctataaaatatagtactaactcataaaacatgatgatagattttgtgggccaggatactacttagaaatattacagttatattcataagattagtctgtttatatctatgtgttattgtcaatttttgatattatgctacattcataaagtaaatggggagcgttctttgttttttccatgacctgtgttagtaaacttggattcaagtttcatatctgccactaattatctatgtaacccagtaagagaagtgagttcacagttaagaattcaataaagaatggatggaagtagggaggcagagaactccatgtcaagatctctaataaccctttttaaattatccttttgcatataggaagatcatagttcctattatatcctattctatcacacaaaatcatacacccaatggaagcaaatgttccttcaagttaactcaagttctatttgtaaatactatctacaacctcagagataagcctcctagctgtgaggggtacacagcaccctaaaacagaagccaaaa

SEQ ID NO: 56782 - DNA, 689 bp, Homo sapiens
atggttgctggcatgacaatgaatatgatcatggacctaaactcaaccatgccatctttggaaaaaagcagccaagtagaaaggcaataaataaacatcaagcagggagggccaggcgcagtggctcatgcctgtaatcccagcattttgggagggcgaggtgggggtatcacttgaggtcaggagttcaagaccagcctggccaacatggtgaaaccccgtctttactaaaartacaaaaattagccgggcatggtggtgtgtgcctgtaatcccagctatccaggaggctgaggcagaagaattgctggaacacgagaggcagaggctgcagtgatccgagatcgtgccactggcaccccagcctgggcaacagagcaagactctgtctcaaataaaataaaataaaataataaaataaaataaaataaaataaaataaaataaaataaagcagggagaagtgacagccaccaatacagcctctcgacagcataaaaattaatgtgacaaattttaaaggcagtccaaataccactcagactcagttagcttaaactcagagtaactgagtattttacaactcttgtaggtatgtgtgcatatttgttataagtgtgtgcatgtgtatatatacatgttcatgcctgtgtgttgtgcacatgtgtatgtgtgcatgcccttctgtgt

SEQ ID NO: 56783 - DNA, 689 bp, Homo sapiens
atggttgctggcatgacaatgaatatgatcatggacctaaactcaaccatgccatctttggaaaaaagcagccaagtagaaaggcaataaataaacatcaagcagggagggccaggcgcagtggctcatgcctgtaatcccagcattttgggagggcgaggtgggggtatcacttgaggtcaggagttcaagaccagcctggccaacatggtgaaaccccgtctttactaaaagtacaaaaattagcmgggcatggtggtgtgtgcctgtaatcccagctatccaggaggctgaggcagaagaattgctggaacacgagaggcagaggctgcagtgatccgagatcgtgccactggcaccccagcctgggcaacagagcaagactctgtctcaaataaaataaaataaaataataaaataaaataaaataaaataaaataaaataaaataaagcagggagaagtgacagccaccaatacagcctctcgacagcataaaaattaatgtgacaaattttaaaggcagtccaaataccactcagactcagttagcttaaactcagagtaactgagtattttacaactcttgtaggtatgtgtgcatatttgttataagtgtgtgcatgtgtatatatacatgttcatgcctgtgtgttgtgcacatgtgtatgtgtgcatgcccttctgtgt

SEQ ID NO: 56784 - DNA, 689 bp, Homo sapiens
atggttgctggcatgacaatgaatatgatcatggacctaaactcaaccatgccatctttggaaaaaagcagccaagtagaaaggcaataaataaacatcaagcagggagggccaggcgcagtggctcatgcctgtaatcccagcattttgggagggcgaggtgggggtatcacttgaggtcaggagttcaagaccagcctggccaacatggtgaaaccccgtctttactaaaagtacaaaaattagccrggcatggtggtgtgtgcctgtaatcccagctatccaggaggctgaggcagaagaattgctggaacacgagaggcagaggctgcagtgatccgagatcgtgccactggcaccccagcctgggcaacagagcaagactctgtctcaaataaaataaaataaaataataaaataaaataaaataaaataaaataaaataaaataaagcagggagaagtgacagccaccaatacagcctctcgacagcataaaaattaatgtgacaaattttaaaggcagtccaaataccactcagactcagttagcttaaactcagagtaactgagtattttacaactcttgtaggtatgtgtgcatatttgttataagtgtgtgcatgtgtatatatacatgttcatgcctgtgtgttgtgcacatgtgtatgtgtgcatgcccttctgtgt

SEQ ID NO: 56785 - DNA, 689 bp, Homo sapiens
atggttgctggcatgacaatgaatatgatcatggacctaaactcaaccatgccatctttggaaaaaagcagccaagtagaaaggcaataaataaacatcaagcagggagggccaggcgcagtggctcatgcctgtaatcccagcattttgggagggcgaggtgggggtatcacttgaggtcaggagttcaagaccagcctggccaacatggtgaaaccccgtctttactaaaagtacaaaaattagccgggcrtggtggtgtgtgcctgtaatcccagctatccaggaggctgaggcagaagaattgctggaacacgagaggcagaggctgcagtgatccgagatcgtgccactggcaccccagcctgggcaacagagcaagactctgtctcaaataaaataaaataaaataataaaataaaataaaataaaataaaataaaataaaataaagcagggagaagtgacagccaccaatacagcctctcgacagcataaaaattaatgtgacaaattttaaaggcagtccaaataccactcagactcagttagcttaaactcagagtaactgagtattttacaactcttgtaggtatgtgtgcatatttgttataagtgtgtgcatgtgtatatatacatgttcatgcctgtgtgttgtgcacatgtgtatgtgtgcatgcccttctgtgt

SEQ ID NO: 56786 - DNA, 589 bp, Homo sapiens
cagcaatgaatcaagctatctggagctctgtgatgctccaagcagaggtgtctgggcagagagcagagaagagctcatgctggagatggtttcctcgagaagacatcttttgaaatgggtcttgagtgatgtgtgtggcttaaacagaagagaaaatgggattccagacagccaggccagtgtgagcaaaggcactgaggagcaaacattccaggaacacaagaagaccctgtgggactttaaacagcctttggctttataatgaacgtgaagcttaatttgctttgcctaccagtggccacggaggccgaagacagctgttctaagtggttttctgtttgtttttattgaccattgagatgctcagaccatggcagactgcagttrcttcccaaaaccaaatccagcattttttcctctttagattgtttttcatttgctttaaaagtaaattagaggtgcacttggtctctcatggcacccactcggccctcttccaagtgtactttccttcctttcattactgctctaaagctttttaataaactttcaccctgatcaaaaaaaaaaagtaaattagaatttagag

SEQ ID NO: 56787 - DNA, 1832 bp, Homo sapiens
tgttcccactaatccctcagaattgagaaaaaatcttatgaaagtacttaataaaggttataagctcacaaatgatatgcaaacttaagtataatgattccaatagaaaataagtgcatatatagatctatctaaaaacctttttaaaaaatggggacaccaattaaggactaaattcctttacatttaatggttgtttttatgatgttatttccatgaagtcagtaagaatttttcttctaactataagaatgtaattttaatcatgccagcaatcacatttaattagctgtaacaagcctacaattataaaagtgggactcttcttcagatgtaaaaattctatcagcaaagactgcccagaaacagtggccagtgcctcatggcctgtgggatcccagtcttataattgcaaaaaaaatctcttcctggcagtgtgggaacattgacaattttgtaacctcagaaaaagtagatacccttaaacttaaaggtttatgcaaggaaaatacagtagcagcaaattagatgcttcttcatgtctgtcctaatagattaactaattgatgcaataaagtaattctgacagagaagctacaagttagagtttataagcttcaagaaagacattaattcttagtcttattggtgtacagcactagtttttaaaattatacaataagagagtatttatataataataaacatctcttgtgacacttaagtcagtaacaacagtaactaaaaccgtaaaactaaccatatgtgataaaaataacaaagcctatgctcaaatccataccttcaaggctgtggtagactgcaatacagtcccaaattcttcacccctctatgcatccacatcttccatgacctcatcatgaagagagtgcatttccctgcccttctctttggacttggcaaatgccctgttttggttgattgcatcctttcactatctcaaatctttgccattgcctagagaagaacttcccaagagtagctgctgtccctacagccttggctttgaggtcagatgtatggggtagacctggaccacagatatgctgtgtgaggtagagccattgctgatgagcccagtttaggtcagcagaaccttagaagacccacagataacgtgagcaaagacagagcactgtttctgacatattggagttggggatggtggttatacagcaatagctggctgatacagaggtgcatgactgaccacaggtgaaaccatgggacatgagcagcaccttgtcctgccatcattgtccgccagcacccacaacacattctgcattcagagacaataatactttgaatcttgagataaagtaaaaataacaatgtcactctgtagagcacttgtctcataaataagtaatactttgaccccttcttaaaagttactgtttccttaattaaaacaattttgttcaccactatggtaatattgatctctgaagatgtgttcatgaggctatggtaatcatgttaaaaattgctgtttattcaacataattagatgataatgaattctataatcttagcagttttgaatctttctttctaatgtctgtatttttaaattaattttataatgagggattcctatgttctgracttctttgttcctctttgcaagcgaagttattttctctctgaacatactttgtgtttgattttccctttatgattaatgccctcccccatctgccccccttagctcactccaagtagcagcatttcttttcatctctaccccaatcttctcccttctaggaacccccagagggctttatacttcttttacaacatgcatc

SEQ ID NO: 56788 - DNA, 1832 bp, Homo sapiens
tgttcccactaatccctcagaattgagaaaaaatcttatgaaagtacttaataaaggttataagctcacaaatgatatgcaaacttaagtataatgattccaatagaaaataagtgcatatatagatctatctaaaaacctttttaaaaaatggggacaccaattaaggactaaattcctttacatttaatggttgtttttatgatgttatttccatgaagtcagtaagaatttttcttctaactataagaatgtaattttaatcatgccagcaatcacatttaattagctgtaacaagcctacaattataaaagtgggactcttcttcagatgtaaaaattctatcagcaaagactgcccagaaacagtggccagtgcctcatggcctgtgggatcccagtcttataattgcaaaaaaaatctcttcctggcagtgtgggaacattgacaattttgtaacctcagaaaaagtagatacccttaaacttaaaggtttatgcaaggaaaatacagtagcagcaaattagatgcttcttcatgtctgtcctaatagattaactaattgatgcaataaagtaattctgacagagaagctacaagttagagtttataagcttcaagaaagacattaattcttagtcttattggtgtacagcactagtttttaaaattatacaataagagagtatttatataataataaacatctcttgtgacacttaagtcagtaacaacagtaactaaaaccgtaaaactaaccatatgtgataaaaataacaaagcctatgctcaaatccataccttcaaggctgtggtagactgcaatacagtcccaaattcttcacccctctatgcatccacatcttccatgacctcatcatgaagagagtgcatttccctgcccttctctttggacttggcaaatgccctgttttggttgattgcatcctttcactatctcaaatctttgccattgcctagagaagaacttcccaagagtagctgctgtccctacagccttggctttgaggtcagatgtatggggtagacctggaccacagatatgctgtgtgaggtagagccattgctgatgagcccagtttaggtcagcagaaccttagaagacccacagataacgtgagcaaagacagagcactgtttctgacatattggagttggggatggtggttatacagcaatagctggctgatacagaggtgcatgactgaccacaggtgaaaccatgggacatgagcagcaccttgtcctgccatcattgtccgccagcacccacaacacattctgcattcagagacaataatactttgaatcttgagataaagtaaaaataacaatgtcactctgtagagcacttgtctcataaataagtaatactttgaccccttcttaaaagttactgtttccttaattaaaacaattttgttcaccactatggtaatattgatctctgaagatgtgttcatgaggctatggtaatcatgttaaaaattgctgtttattcaacataattagatgataatgaattctataatcttagcagttttgaatctttctttctaatgtctgtatttttaaattaattttataatgagggattcctatgttctgaacttctttgttcctctttgcaagcsaagttattttctctctgaacatactttgtgtttgattttccctttatgattaatgccctcccccatctgccccccttagctcactccaagtagcagcatttcttttcatctctaccccaatcttctcccttctaggaacccccagagggctttatacttcttttacaacatgcatc

SEQ ID NO: 56789 - DNA, 549 bp, Homo sapiens
caggatggtatggtggcccaggtctgatgcaacggtcgaggctgtccatcaccacccataggcatgaagggataaggggaggcagtggttattggaagttggaaatagatgataatacagcaatggccatcttgagaagtgatgtgtcgtttatttgaggattgcagcaggcaaagctgtcccaccccccagcaccatgaggaatgccaagggtatcaaaaccttgccttcatgcctctctgcccctcrgatctccttctggggtacctttctggctgactccaacaggaagtctggggactttaactatagtccacagaagaccacctccggggatagggaaccaggcaagaagaatagcagttttggaggggaagatagaaaatgcccaggctacgtaagtctttaccgagcaccaacaatgttgcatataaatataatttaccctttaaagggaattctattgggagcaaaagtaaaaatgttccaggttgatattttctagtgatgtgtttaatatagtaaagcaaaaattatcttgagaaaata

SEQ ID NO: 56790 - DNA, 760 bp, Homo sapiens
cactatacccttagataaccaaacttgcagatgttcagtttccttacataaaatggtacattttcagcatacaacctatgcacttctcccacatacttaaaattatctctagattacttaaaatatgtaattctacttaaatgctgtataaaaagctgttktactccgttgtttttatttgtgttattattgttactgtattattattattttttaatattttcaatctaccattggctgaatctgtagatggcaattatgaatatttcattaggattttatctaaataatctattattatacttgaaacaaattttaaaaatctcttttcttcagtctatatgtatgaaaacaccagcagaattccgttaatattctggggctgtactgtaaaataaatgttatcagctcaataataaaaatttcttggcaccaatgccaatttaaatgttactatagcaatcaccatggtaatgctttcaattagtctccagcataacatgagtctaatgtaccatttggcaacatcataatggatctacagattatttgtacaagccaaataaaatctacaagacccaaaaaatcaaacaagaaacaattaagaaagtatcccttggtttcaaagtgtaaaaatgtactctaacttaacttcaaaaatattttcgtgtaaaaacacattagcatgttttcctttgccaatcacttattagaactcagtaaaattacaaggaatatttccttaatatcttgatgccaa

SEQ ID NO: 56791 - DNA, 760 bp, Homo sapiens
cactatacccttagataaccaaacttgcagatgttcagtttccttacataaaatggtacattttcagcatacaacctatgcacttctcccacatacttaaaattatctctagattacttaaaatatgtaattctacttaaatgctgtataaaaagctgttgtactccgttgtttttatttgtgttattattgttactgtattattattattttttaatattttcaatctaccattggctgaatctgtagatggcaattatgaatatttcattaggattttatctaaataatctattattatrcttgaaacaaattttaaaaatctcttttcttcagtctatatgtatgaaaacaccagcagaattccgttaatattctggggctgtactgtaaaataaatgttatcagctcaataataaaaatttcttggcaccaatgccaatttaaatgttactatagcaatcaccatggtaatgctttcaattagtctccagcataacatgagtctaatgtaccatttggcaacatcataatggatctacagattatttgtacaagccaaataaaatctacaagacccaaaaaatcaaacaagaaacaattaagaaagtatcccttggtttcaaagtgtaaaaatgtactctaacttaacttcaaaaatattttcgtgtaaaaacacattagcatgttttcctttgccaatcacttattagaactcagtaaaattacaaggaatatttccttaatatcttgatgccaa

SEQ ID NO: 56792 - DNA, 760 bp, Homo sapiens
cactatacccttagataaccaaacttgcagatgttcagtttccttacataaaatggtacattttcagcatacaacctatgcacttctcccacatacttaaaattatctctagattacttaaaatatgtaattctacttaaatgctgtataaaaagctgttgtactccgttgtttttatttgtgttattattgttactgtattattattattttttaatattttcaatctaccattggctgaatctgtagatggcaattatgaatatttcattaggattttatctaaataatctattattatacttgaaacaaattttaaaaatctcttttcttcagtctatatrtatgaaaacaccagcagaattccgttaatattctggggctgtactgtaaaataaatgttatcagctcaataataaaaatttcttggcaccaatgccaatttaaatgttactatagcaatcaccatggtaatgctttcaattagtctccagcataacatgagtctaatgtaccatttggcaacatcataatggatctacagattatttgtacaagccaaataaaatctacaagacccaaaaaatcaaacaagaaacaattaagaaagtatcccttggtttcaaagtgtaaaaatgtactctaacttaacttcaaaaatattttcgtgtaaaaacacattagcatgttttcctttgccaatcacttattagaactcagtaaaattacaaggaatatttccttaatatcttgatgccaa

SEQ ID NO: 56793 - DNA, 691 bp, Homo sapiens
ttgttttaagctcactgagatttcaaggctctgtcttaccattttaactgtagtttttaatttattacttacacctattttaaattatgtaayagtgtctaaattcactcgaggaaggtcctgttattcccattctatatcccatacaaaatgaaaattcagatcaattaaatatatttcctgagataacacatctataaggtgataaagaagaaagcagaaataagctttgagaactgatatctggcacatgccctggcaactaggaactagggttggttttctttgctgaacactaacaacttaacagaatatcatcatcagctgagctcattcaacagctgtgattgaacagacaaaagcaaggccactgtacatctcaaatatgaccagatatcttcctttcctggttactgcttcattatcaatcacatcaaactgtgtttttccagcctcctaaatagaaattaatatacaagtacagaattacccccacttcctgacagtacccaatcaaggatagatcaagctttttgaagcactccttaggtgcccccagcatttctgaagctctaatatttctatattaaccccttccgaccaagtatctgaagagttcccatgatggcagtaagccttgctgcaggaagttaatgcaccgaactgtggttgactatagctgtgttcctag

SEQ ID NO: 56794 - DNA, 691 bp, Homo sapiens
ttgttttaagctcactgagatttcaaggctctgtcttaccattttaactgtagtttttaatttattacttacacctattttaaattatgtaacagtgtctaaattcactcgaggaaggtcctgttattcccattctatatcccatacaaaatgaaaattcagatcaattaaatatatttcctgagataacacatctataaggtgataaagaagaaagcagaaataagctttgagaactgatatctggcacatgccctggcaactaggaactaggkttggttttctttgctgaacactaacaacttaacagaatatcatcatcagctgagctcattcaacagctgtgattgaacagacaaaagcaaggccactgtacatctcaaatatgaccagatatcttcctttcctggttactgcttcattatcaatcacatcaaactgtgtttttccagcctcctaaatagaaattaatatacaagtacagaattacccccacttcctgacagtacccaatcaaggatagatcaagctttttgaagcactccttaggtgcccccagcatttctgaagctctaatatttctatattaaccccttccgaccaagtatctgaagagttcccatgatggcagtaagccttgctgcaggaagttaatgcaccgaactgtggttgactatagctgtgttcctag

SEQ ID NO: 56795 - DNA, 691 bp, Homo sapiens
ttgttttaagctcactgagatttcaaggctctgtcttaccattttaactgtagtttttaatttattacttacacctattttaaattatgtaacagtgtctaaattcactcgaggaaggtcctgttattcccattctatatcccatacaaaatgaaaattcagatcaattaaatatatttcctgagataacacatctataaggtgataaagaagaaagcagaaataagctttgagaactgatatctggcacatgccctggcaactaggaactagggttggttttctttgctgaacactaacaacttaacagaatatcatcatcagctgagctcattcaacagctgtgattgaacagacaaaagcaaggccactgtacatctcaaatatgaccagatatcttcctttcctggttactgcttcattatcaatcacatcaaactgtgtttttccagcctcctaaatagaaattaatatacaagtacagaattacccccacttcctgacagtacccaatcaaggatagatcaagctttttraagcactccttaggtgcccccagcatttctgaagctctaatatttctatattaaccccttccgaccaagtatctgaagagttcccatgatggcagtaagccttgctgcaggaagttaatgcaccgaactgtggttgactatagctgtgttcctag

SEQ ID NO: 56796 - DNA, 2287 bp, Homo sapiens
  misc_feature (1)...(2287): n = A,T,C or G
actaggggcagaatggcagggctcaaaaacagaacatatatacatttctcatatattacaatatattacaattaatttctcatatattacatnccctgaaaaactcaatggactttcagggtatgctcttgtagaaaagtgtggctcattggacacaaaamcccannntaaaatanntanntntntntnangnanantnanangangncnctttcntaanngaatccaagatattccnntcaaaagtttattcagatatgaaaaaataacaaattnngaatgttgcaaagcttaaaatgtttcccttttgctcaactcatcaaatcctttaatttattggacaaacataaaacnattaaatggannngcttctannatntccccncacatanggctaccatttggagcattacaaatgaaattctaattgatctgaaatcactaatatccttaaccacctaaaagctaaagaactggctttttttttttttttttgtctttgtttagtgaggcatcctgaaagtggaaaatagctaacttgaggaattttggtaaacctcttcaaactcccaaaacaaccaaatcaggttatttattcaggcccaaatatttttgtagcacctaggatttcagaaactaaagaaagctgcaggctcatcccatataaatcgtggatgcacttaaggtgataaattttaagtgcattctgtgccgatccaaaattaacgatgcagatttcttgagaaaatatcacaaaataagttgtgatgtcagaagattaatgagtccccacattatcaaatggaagagtagagcagcacagtccactagaaatgtccatggttatgaaaatactctatgtctgcagtcaccaaaattatatctgctcaccacaaattgagcacttgaaatgtgattagtatgaatgagaatatagtttttagtttcacgtaattttaattttattttaatagctatacaactagtagacatcacaggtttagaactatgggacaaaggttctactaagtgatgtaaagcatggaaattgaaaaagatactaaagattaaataacgacttttttcaacaaaaatactgttttaaatatcaagacttatttcaagtaagaaataaaacttcgaatttacttaagtgaatagttacgctatttaaaggtgatcaaaaactagagcaaaccaaagcataccaatgcattttgtatttggaatgcagatccacaatattagattaaacatatttttgtttcatgacataatcttttcatatatccatgcctgattccttttatattattcctaaattcattcataagactttaggaggaaaaaaataagaaaaaatggcaacctaccaccacctaacataaaacctttcacaatcagtttcattaactttgtggtcttctttcctcataacatcttcccacaactacatcttcacagaataatattaacttcataagaaaaatgaaagtcagacatttaaaataacccagatgttctcctcaaggccaccagagagggaagctttgcattttcaagttagattaaaagatttgttgtgcaactaatacaagcaaatgagcaaaataagaaatatactgggaaaatgcactctaaagtggcttgcttactgggtttacagtcacaggttctttagaaatttgtgtgtgggggctgggtgcggtggctcatgcctgtaatcccagcactttgggaggccgaggcaggcggatcacgaggtcaggagattgagaccatcctggctaacatggtgaaaccccgtctctaccaaaaatacaaaaaattagctgggcgtggttgcgcgcgcctatagtcccagctactcgggaggctgaggcacaaaaatcgcttgaatccgggaagcggaggttgcagtgagcagagatcaggccactgcactccagcctgggtgacagagcgagactctgtctcaaaataaataaataaatacaaattaaaaaaaagaaagaaatttgcaggtgtgtcacttgaggtcaggagttcgagtccagcctggctaacatggagacaccccatctctattaaaaatacaaaaaattagctgggcatggtggccgacaatcgcccatatgaattctccagcnttacttgggaaaggctgagacaggataatcacttgaacacaggaggcagagttgcagtgagccagaatgtgccattacactccagcctgggggtgacagagcagacttcatatcagaaaaaaaaaaaagaagaagaa

SEQ ID NO: 56797 - DNA, 663 bp, Homo sapiens
ggacttcattcccagcaaaaagttatctgtattttgtacattgtgcaaagactaggggatgaagaaattacatcttctaaaaacttatcrcttgtataataaatatattgtttttcttttcttttcttttcttttttttttttttttttttttgagacagagtctcacccttgttacccaggctggagtgcagtggtgcgatctcggctcactgcaacctctgcctcccaggttcaagccattcttctgcctcagcctcctgagtagctgggattacaggtgcctgccaccacgcctggctaatttttgtatttttagtagagacagggttttgccatgttggccaggctggtcttgaattcctgacctcaggtgatccacccaccttggcctcccaatatattgtttttctaattagtataatggggtgtgtgggatgtagtttttttgaggaccaatatagtgtttgcaagctatcaagaaattaacaattaacaaataaagcaacacacataatttcatgagggcaaaatcatcttcgtttttttttttctcaagtttcttcacatattgataaaaattcagaatgaactgactctgaagaatgtgattttttgtgtcttggttatatttttatatttccgtatcatatttttggttgaa

SEQ ID NO: 56798 - DNA, 598 bp, Homo sapiens
tactgggcattctgattattattgtggtaatcctggaactctaactctcacactcctcaaggattgtggatttttgcttgttaaggatggagccatccatctgtgatttttttccagattatttttacaaattgtgattgcttattgcatgtggtccttgaagttcctgttccgttgtctctgtcagtcaatgacctgacaaagatttccttaaatgtttggctcccaaaattgttgaggtgaggggagggaacagggaagtcatgtctctttaaatcccctcacagcagaaaagctgctctagctcttgtgatctgaaacaatggctggactctgtgccagtcccccagaggtcaaaaggatcagcaatcaaaacacacaactctaatttttggaggataaggtycttattccccaccctggcaccagcaagtcacaccaggaatgcaggccactgtccccacagctgtttgccacggggctggcaggtgggggatggtagccagtacgcaaacatggaaatgtattaaaattcaccagcttctccattaagttttctcttggatgccgaacgtgttcaactagactgcagagttcc

SEQ ID NO: 56799 - DNA, 598 bp, Homo sapiens
tactgggcattctgattattattgtggtaatcctggaactctaactctcacactcctcaaggattgtggatttttgcttgttaaggatggagccatccatctgtgatttttttccagattatttttacaaattgtgattgcttattgcatgtggtccttgaagttcctgttccgttgtctctgtcagtcaatgacctgacaaagatttccttaaatgtttggctcccaaaattgttgaggtgaggggagggaacagggaagtcatgtctctttaaatcccctcacagcagaaaagctgctctagctcttgtgatctgaaacaatggctggactctgtgccagtcccccagaggtcaaaaggatcagcaatcaaaacacacaactctaatttttggaggataaggttcttattccccaccctggcaccagyaagtcacaccaggaatgcaggccactgtccccacagctgtttgccacggggctggcaggtgggggatggtagccagtacgcaaacatggaaatgtattaaaattcaccagcttctccattaagttttctcttggatgccgaacgtgttcaactagactgcagagttcc

SEQ ID NO: 56800 - DNA, 1063 bp, Homo sapiens
cccagcactttaggaggccaaggcgggcagatcacctgaggccaggagtatgagaccagcctggccaacatggcaaaaccccatctctactgaaaatacaaaaattagctgggagtggtgttgggcgcctgtagtcccagctactcgggaggctgaggcaggagaatcgcttggagccgggtggcggaggttgcagtgagctgagattgtaccattgcactccagcatgggtgacaaagcgagactccgtctcaaaaaaaaaaaaaaaaagatcctaccgagggctggtggaaacacagtcccygccccccacagtggtgctgtctccccttccatccagcaagcgtttactgagcacccaccaccggacacacccaggacgacacctggggatccaaggaagactgggtgagcatggaggagaagactcattggtgcagcaagatgaacttgtgcatgtgagtgagcaactgggggatgggggtggggcaccgagctgaaaggtgaacatggcccttcccgcttggctctacagagagggaaacaatgtaagggacagataggaatccctggtggatgagacaggaggagcgtgccggtgaaccgcagcctggaggtgtggaggaacatgccgcccaagttcctaaatccagccagcgcaggatttgaggctggggaggagaggacacgaggctggtggcagatgtgggcttggcagggaggcctgagacaaagcgcttaaatgtatctggaggatgagggactaaggcatatgtacaaaaggtcactgctattcctgggatggtgggggagaggggctggagctgagaacatcctggaggatcagagagaaatgggcctttcccagatgagaagactcgctattgtaaagattcaagttctctccaaatttatctgtgggtttttttttttttttttttttttttgagatggagtctcactctgttgcccaggctggagggcagtggcgctgtttcaacttctgcctcccgggttcaaacgattctcctgcctcagcctcccaagtaactgggattacagg

SEQ ID NO: 56801 - DNA, 1063 bp, Homo sapiens
cccagcactttaggaggccaaggcgggcagatcacctgaggccaggagtatgagaccagcctggccaacatggcaaaaccccatctctactgaaaatacaaaaattagctgggagtggtgttgggcgcctgtagtcccagctactcgggaggctgaggcaggagaatcgcttggagccgggtggcggaggttgcagtgagctgagattgtaccattgcactccagcatgggtgacaaagcgagactccgtctcaaaaaaaaaaaaaaaaagatcctaccgagggctggtggaaacacagtccccgccccccacagtggtgctgtctccccttccatccagcaagcgtttactgagcacccaccaccggacacacccaggacgacacctggggatccaaggaagactgggtgagcatggaggagaagactcattggtgcagcaagatgaacttgtgcatgtgagtgagcaactgggggatgggggtggggcaccgagctgaaaggtgaacatggcccttcccgcttggctctacagagagggaaacaatgtaagggacagataggaatccctggtggatgagacaggaggagcgtgccggtgaaccgcagcctggaggtgtggmggaacatgccgcccaagttcctaaatccagccagcgcaggatttgaggctggggaggagaggacacgaggctggtggcagatgtgggcttggcagggaggcctgagacaaagcgcttaaatgtatctggaggatgagggactaaggcatatgtacaaaaggtcactgctattcctgggatggtgggggagaggggctggagctgagaacatcctggaggatcagagagaaatgggcctttcccagatgagaagactcgctattgtaaagattcaagttctctccaaatttatctgtgggtttttttttttttttttttttttttgagatggagtctcactctgttgcccaggctggagggcagtggcgctgtttcaacttctgcctcccgggttcaaacgattctcctgcctcagcctcccaagtaactgggattacagg

SEQ ID NO: 56802 - DNA, 1596 bp, Homo sapiens
tcccacagagggaacctatgagaggctctctgagtatgaggcactttagaggaccatgtttgagaaggggcaagaacctaacaggacttgggaggattgagcagcagggaaccctgcaatggcctcatggaagtaagagtctggcttgtctcctggttggtctaccatcaactcttcttctctccctgcatttgttctagactcaaagtcccaaaagacaactagctaagcctaggctgcaggtctgtgccctggttgttttgtaactggaggggaatcctctggtgacttcagcttttgtgctggggggtgggtacctggaattattttcccatgattatacatattggtgtggtaaattcccaaaaggaaatatattagagtgttattaggatgggggaaatggatataggcatgtgtagcatgtaaaatgacaaggttgatgacttattagctaagaatcaacttgttttattgttcctttgaggtttgtttaaatgttgctttcctttctgggtttctccaggtagctcctcatcttcagtgttctcattgcactttgtattctcttagcttttaattctcagggacaaggactgacctggttcaactctgtattcttagggcctagcaaagtgcttaacacatagaagacatttgctgacttacagttgaatagaaaaagtatgtgtggatatcgtactagaaacgcaattgtaagcagctgggaatttcaatgggtaacttttctgtgtagaaaacattaaaaaattattttgtagcccgtgtgtgtgtaaaacccattccccaaaggcaaaacggtgtagcgtcagagacaataaagcatcctgtcaatttcaacttttattcacttgatttttgaagaatattttcttttgcaaaagcctccttcacttaagaagttttcttgtcttgttaggtaccagccaaaccagccaaacattttctctttaatgtggagacctgggatccttttccctaagatattttgattgctgcaaacccytgggctctgctggaatccagctccctgtttctaagatgaaacccggaccatttagggcatgtaggggccaagggcccttgaaggtttgctgaaaaccactgacatgaggcagattaattagaaaaaaggcatacacatttatttaacgtgtatgcaagagagcctttagaatgaagacccaaagatacaggggaaactgtccatttttatgcttaggttcaacaaagtgtggacagccgtgtggaaataggattggacaaaacaggcatgaccgagtagtgaaactcagcgaggcctgtctgtctaggttcttcttggcctgtccgagtggctttccttccttctaggtatggggcaggaccctctctggaaggggggtcttatgactcacagacaaacaaaacaggtcagatcatttctttatggccagttttcacacagaaaaatgggggaaagttagaataatatttttaggttttatggctggcattaaggaaagggcgttctggttcctatgacctacattggggaagagagattctagtttctctggctagccttgtaggtga

SEQ ID NO: 56803 - DNA, 1596 bp, Homo sapiens
tcccacagagggaacctatgagaggctctctgagtatgaggcactttagaggaccatgtttgagaaggggcaagaacctaacaggacttgggaggattgagcagcagggaaccctgcaatggcctcatggaagtaagagtctggcttgtctcctggttggtctaccatcaactcttcttctctccctgcatttgttctagactcaaagtcccaaaagacaactagctaagcctaggctgcaggtctgtgccctggttgttttgtaactggaggggaatcctctggtgacttcagcttttgtgctggggggtgggtacctggaattattttcccatgattatacatattggtgtggtaaattcccaaaaggaaatatattagagtgttattaggatgggggaaatggatataggcatgtgtagcatgtaaaatgacaaggttgatgacttattagctaagaatcaacttgttttattgttcctttgaggtttgtttaaatgttgctttcctttctgggtttctccaggtagctcctcatcttcagtgttctcattgcactttgtattctcttagcttttaattctcagggacaaggactgacctggttcaactctgtattcttagggcctagcaaagtgcttaacacatagaagacatttgctgacttacagttgaatagaaaaagtatgtgtggatatcgtactagaaacgcaattgtaagcagctgggaatttcaatgggtaacttttctgtgtagaaaacattaaaaaattattttgtagcccgtgtgtgtgtaaaacccattccccaaaggcaaaacggtgtagcgtcagagacaataaagcatcctgtcaatttcaacttttattcacttgatttttgaagaatattttcttttgcaaaagcctccttcacttaagaagttttcttgtcttgttaggtaccagccaaaccagccaaacattttctctttaatgtggagacctgggatccttttccctaagatattttgattgctgcaaacccttgggctctgctggaatccagctccctgtttctaagatgaaacccggaccatttagggcatgtaggggccaagggcccttgaaggtttgctgaaaaccactgacatgaggcagattaattagaaaaaaggcatacacatttatttaacgtgtaygcaagagagcctttagaatgaagacccaaagatacaggggaaactgtccatttttatgcttaggttcaacaaagtgtggacagccgtgtggaaataggattggacaaaacaggcatgaccgagtagtgaaactcagcgaggcctgtctgtctaggttcttcttggcctgtccgagtggctttccttccttctaggtatggggcaggaccctctctggaaggggggtcttatgactcacagacaaacaaaacaggtcagatcatttctttatggccagttttcacacagaaaaatgggggaaagttagaataatatttttaggttttatggctggcattaaggaaagggcgttctggttcctatgacctacattggggaagagagattctagtttctctggctagccttgtaggtga

SEQ ID NO: 56804 - DNA, 1165 bp, Homo sapiens
atttgaaggtattatactggaagagaattttccaagtctctatgatttttctcctcattttgtgagcatagatagacactgataatctttgctctgggttaaattttaaaggatattgtatactgggcaaccttggaagacagagatggtgtctgcctctagagcagagaggagtttgtctytgctcagtataataaacccatttcatctggtagtttcctaaactcaagactccttagcttgttgcaactttactaccctcacagcctccacttgggctgctcctcattacccctgtgagatttggggccaagtgtaattgatgtgaacataaagcttatgctgcttgttgtaccataagtaagaaagttctttttctgacccaggcatctaaggtcttctgccagcacacatgaaactacagccaagttctcttgtaattttgcaagtagggtaaaatatctgacccttcatagttcctgacagattttggagatgaggattggatgctgagagagatgtggttttgtagaaggatagggcaagagcccccttgggtcaggttacagaatgtgagaagactggtagtgaatgttcttgtctaagcagtggacaaggaggggaggtaagggaattctactgtcttacctgttaataaatatttagagactgatcacgtggtaaggttgaaacaagcaacccaaataatgctttggcttttactctcctctgtgtgagaagaagaaaagatatgattatgataatgaggtggcaagtcccatggctccagctgaattgccatgtggaggtagcttcttagttaaggagtccccagtgattatgtaaatggtgtcacaatgacaatatagagctttgagaggataaaaagtattagaatttcaaattggttgagctaaaatcaaccagtgggccattaacaattcagacaatatgtatcttcccactcttctctctaaaggggactgacaaccatgtatgctcatctgagtattctggggaaaattagatggaggagggcttcagatttctattgctttcttggaaacatttggttaattcaccatccttagttccagattcagctggggatgtggcattcaatttcagcttaagggcatttgggcagagttcacagcatgaaacg

SEQ ID NO: 56805 - DNA, 1828 bp, Homo sapiens
tactaaaaatacaaaaaaattagccgggtgtgctggcggcctcctgtggtcccagctactcaggaggcagaggcagcagaatggcatgaacctaggaggcagagcttgcagtgagccgagatcacagcctgggtgacagagcaagactccgtctcaaaaaaaaaaaaaaaaatatatatatatatatatatacatagattaaactatttatataataaactacatattatatgtagtgaaatacataatgtttatgctctattatatataatgtgatatatatcatatatattttttacatatgttgtaatatacatataagtgcatatacttatatatacactcacttatgctacttgaaacaaagtttatttcgcgttctggtataatattacattaggttctttctatgttgtcttcaaattttgctatgtagcaattaacaatagcatttagataggtaagatacctcaaagtggatatccagaatgttaaaagtgaagaaataagtaaataaaattgaaaatctggtcagggattcataagtgagaagataaagtaagatcggctatgtgaaaacaactgatgaagctgagtttgccagatgttcaggttttgcccatttgagcttatttcattgcagcactgttttctgtgctgatagagcactgatagagacactgcctcacactgtgacaccttggcagtaaagcagctgcccccttttcattttacagcacctctgtacctgtagcttaatacaagcaagcttaaaatggcacactagacatatgaacatggtgcaaggttgtatattcttataaagcattatttcttcggacattaatgcattatcagttttcaggcatcactgcaaagaacaatattccaacacagattttcacagcttttcaccaaggtggatatttgcttaaatgattttttcattgaatatgtacaattcttatattgtgaactatgtattttttcttcttattttagtacaaaaattatttgtgtcatttatgtgacatgtgtagataaggacagttgcttttagaaaaatacttaaagtagaaaaacatataggactatattagtcccttgcaacttggaatttgccctgatcaggtttgaaaatctgacagtttccacctcttctaatcactgtaaacgttatgaaaagagcagaaagagaagattattagaaggctcagaataaaaaggcattttaacagtttatgtttttatagaaagtatgggcataaagttagataccagtaaagtgcggtatcttgtactacgatcttgaacaaaatttcaagaatgcaaaaacacagtcttcaggaaaataagccataacaactctatacatcttatttcctacttcaaaaatgggggtaaaaagcattgtattcacacatgccattgcctactaaaatattgccagatctacctaggtttttatttctaagataaatgtgctgttataagtgaatcttcgcatgaatatttgcaaaataggattaaataatcagctatttcaggggctcatgtatcttgattgaggaaactttgtggaatgggatactctgatcctttctgggttaaatagcctaggacgagcataggaaaaactagaattaacatagaaatgctttctttatataacatgggagctagaagtgcccccaggccttaatttgtattcatttgtttccaaaaagatgtgtgaatttagtatacatctaacagttcagagaataagacattgatttggattgcgtcttatgtaaaatatrcagaaattacctttaaacctcagcaa

SEQ ID NO: 56806 - DNA, 660 bp, Homo sapiens
tggtggctcatgcctgtaatcccagcacttactttgggaggccaaggtgggtggatcacctgaggtcaggggttccagggcaccctagccaatatggcgaaaccccatctctactaaaaatacaaaaattagcycggcatagtggtgcatgcctgtagttccagccacttgggaggatgaggcaggaaaatcacttgaacccaggaggtggaggttgcagcgagctgagttcgcaacacttgcattccagcctgggcaaaagagtgagactcaatctgagaagaaagaaaagaaaagaaaagaaaaaaagggggaaaaaagaagaaaattatgaaaagagcaagagaaagaaatgggaaaagtttgtggcttgaacaactgggtggatgactatgtcggggactgccatgaacatttaaggaaagtgaatgactgcaaatgttgttaagtatgatgaactggacttcaaaaataaatattaaacaactaaagaatatttaggacttacaatgtactaggcactattttactcactttgtattagtatagttaactcttaagaagccctgttttcacagatactattgttatcttcattttatagttgaaaaatttgaagcacagataagttcagtaactttccaacgattatatagcaaa

SEQ ID NO: 56807 - DNA, 660 bp, Homo sapiens
tggtggctcatgcctgtaatcccagcacttactttgggaggccaaggtgggtggatcacctgaggtcaggggttccagggcaccctagccaatatggcgaaaccccatctctactaaaaatacaaaaattagctcggcatagtggtgcatgcctgtagttccagcyacttgggaggatgaggcaggaaaatcacttgaacccaggaggtggaggttgcagcgagctgagttcgcaacacttgcattccagcctgggcaaaagagtgagactcaatctgagaagaaagaaaagaaaagaaaagaaaaaaagggggaaaaaagaagaaaattatgaaaagagcaagagaaagaaatgggaaaagtttgtggcttgaacaactgggtggatgactatgtcggggactgccatgaacatttaaggaaagtgaatgactgcaaatgttgttaagtatgatgaactggacttcaaaaataaatattaaacaactaaagaatatttaggacttacaatgtactaggcactattttactcactttgtattagtatagttaactcttaagaagccctgttttcacagatactattgttatcttcattttatagttgaaaaatttgaagcacagataagttcagtaactttccaacgattatatagcaaa

SEQ ID NO: 56808 - DNA, 660 bp, Homo sapiens
tggtggctcatgcctgtaatcccagcacttactttgggaggccaaggtgggtggatcacctgaggtcaggggttccagggcaccctagccaatatggcgaaaccccatctctactaaaaatacaaaaattagctcggcatagtggtgcatgcctgtagttccagccacttgggaggatgaggcaggaaaatcacttgaacccaggaggtggaggttgcagygagctgagttcgcaacacttgcattccagcctgggcaaaagagtgagactcaatctgagaagaaagaaaagaaaagaaaagaaaaaaagggggaaaaaagaagaaaattatgaaaagagcaagagaaagaaatgggaaaagtttgtggcttgaacaactgggtggatgactatgtcggggactgccatgaacatttaaggaaagtgaatgactgcaaatgttgttaagtatgatgaactggacttcaaaaataaatattaaacaactaaagaatatttaggacttacaatgtactaggcactattttactcactttgtattagtatagttaactcttaagaagccctgttttcacagatactattgttatcttcattttatagttgaaaaatttgaagcacagataagttcagtaactttccaacgattatatagcaaa

SEQ ID NO: 56809 - DNA, 660 bp, Homo sapiens
tggtggctcatgcctgtaatcccagcacttactttgggaggccaaggtgggtggatcacctgaggtcaggggttccagggcaccctagccaatatggcgaaaccccatctctactaaaaatacaaaaattagctcggcatagtggtgcatgcctgtagttccagccacttgggaggatgaggcaggaaaatcacttgaacccaggaggtggaggttgcagcgagctgagttcgcaacacttgcattccagcctgggcaaaagagtgagactcaatctgagaagaaagaaaagaaaagaaaagaaaaaaagggggaaaaaagaagaaaattatgaaaagrgcaagagaaagaaatgggaaaagtttgtggcttgaacaactgggtggatgactatgtcggggactgccatgaacatttaaggaaagtgaatgactgcaaatgttgttaagtatgatgaactggacttcaaaaataaatattaaacaactaaagaatatttaggacttacaatgtactaggcactattttactcactttgtattagtatagttaactcttaagaagccctgttttcacagatactattgttatcttcattttatagttgaaaaatttgaagcacagataagttcagtaactttccaacgattatatagcaaa

SEQ ID NO: 56810 - DNA, 1533 bp, Homo sapiens
tcttttcatgaatcttggaggattatcccttcctgctcccactgccaacagttaaggattgcttaattctcgcaaatggattgtgagaacaagtgacttatgtcatatctgagctgaagcatttaatgaacactgtgagatcctcctgctcaaacttcctgttgtgttataactgaggaagccatgtgctccaaaatgtgtagctgcagaataatggaacttcatcaacctggaaaactgtcatcacatacattacttgggayctggaatgttgctgtgagcttcaggaattttaacaagaaaggaataagcttttgctgtgttaaagcattggaatcttgggattctttttactgcaataattctaacttatgtttacaatataatgagaaatgctgggaggttatagagagtttagagcgttcttcacgagatgggagtaggatggctttaaaagtggaattggtatggacctgatacagtaaagtaagtggggcaaggctgtgagctaaggacagcagaaggatggtgaattcaggtccagaataacatctgcagtgctcaacaagtacttcattccattatgctaggttgtcatttattcattacatacaaataataaaagaatggactgaatagagactgtggtgggctgaataatggtctccccaaatcgcccataatcctaatctcctagaatttgtgaatgttaggttactttaggggaataagattacagatcatattaggttgctaatcagctgacttcaaaataggtttatcctggattatctcagtgggaccagtgccatcacaggatccttaaaagtgaaagagggaggcaggagagaaggtaggagtaatgtgatgtgggcaggactcctcctgacactcactgttggctttcaaagatggaggaaggagagcatgagccaaggattgcaggtgggttcaaaaagatggaaaagacagggaaatggatgctctttgggagctgctagaggaaatggcagccaggccaacatgttgactttaggccagtaatatccatgttggactcttaaccaagacaactgtaaaataatatgtatattttttaaaccattacatttgtgatgtttgttgcagcaacaatgggaaaaaatgcaagcagttatacaggctgagagaaagaacagtggaagcaccaccacatgtcactagacagatacctctaggacttaggggtacccccacctccacgctaactgacagccagcaagaaaacagacacctcagtcttagaaccacaaataaattcaagtggacacaaacttgaataggcttggaagcacattcctcctcagggcctccagaaaggtatgaagcacagccaatagtttggtttagtcttgaacctgaaggagagggccagctgagcacactgggacttctgacctaccaaactgtgaaataatatattattatttttttgtcactgtttgtagtaaattgttatggcaacaataagaaaaatcaagacaacatgcacag

SEQ ID NO: 56811 - DNA, 1254 bp, Homo sapiens
acttacaacaaaacatatgcaaaacaacaccagatgcttcactgcactgagagctcattctagctgcagcatttatataatgttcctctctggagtaatctcgtctgactgcactatgtttcttagcaccataagaattctcaattgtttgtactttttctattagtcttcattcacatccatctgataactggaytccagctatgaagagagaaggtctgagcagaggccaggccataacatggaaggaacacttggctcatattcttctgcaaagcagaggactcattgtctgattccatggtcaattccaggtctccatttacacctagaatggccaggagctcacatgggcctagtaaaaggggctgtatggccaacttttcttgttcctataaccaaagcttaaaaattatattttgggaaaatgggtttccatagacttaaacatttaacaaacctttttgtattcatgctatttattttactttttcagctgctttctatagaaagaaagccttgggaaccaaaaaatcacttttgtttttcattttaattttgatgtagtaaaaaatttcagaaactgtgctataaatgctgtagccttttacagaggctttgggtgtttttcttattaacttatgtcaggcggcctttgactttgtctctgtttagtgggggaagtaactcagggagtgtgtagtacatttattaaatgacattttaaaattataccaggattcttggcattcagagcacaatatttatttgttatctcaaaatatcccacaagccaattatacagtggtttatcattatacattttcattaatatttattccttcaggattcttacttgtagatagtagaacccactcatttctagaagctggggatttactacggatattaattttgttacacactcaccaggagaggagagaactaggcagggattctgcatatttgggaactatacacaaacaaaagaaatcagaaacatttatgaacaattatatgcagacattattgtagtggaaatgcttctctactctcactgtcacctaaagtaatagggaataaacccaaaaaccctgcttctgctttcccccaaaaccagttatgttcactgacaggcttgctagcagatagggtctcctgtggtcaattactgtcttatttccacttttgagcatcataaagacacatttgattggcagacacaaaaacacaaaacaatttagctgaaagcaa

SEQ ID NO: 56812 - DNA, 699 bp, Homo sapiens
aattacatcccatcacatccctccctggayatgtggggattacaattcaagatgagatttgggtagggacacagagtcaaaccatatcacatacatacatacacacacacacacacacacacacacacatatgtgcatatatacacacagtacaagatagagatttgccacaggcctttcaaccaagcatactgaaaaaacaatttatttgttttaaactttctctcttcttgcaaatacaatattttgctattattgggaaacagaaattgataaaccactagaagtcaagtgatagtccttgatggctaggtgttatgacattatttgcttgtgtttgatggaagatggagtttctggtattcctacacacgctgtctatcaaaacacagagatggcgctagtgaaaaatcagaaaactaaaacaagaaacaaatttaccaaaggtgaaaaaaatcaccacgctttaaaactgcatttatttaaggaacataaatttaaatttaccgattcaatttatgttagaaagtgagatttaaaataactgctaaagggaaaacagtgatatataaaatgacaagcaatataggctagaatgttgaaaataaaactaaaacccaagatactaaaagaatcgaactggccaggcatggtgctcatgcctggaatcccagcactttgggaggccgagtcgggcgg

SEQ ID NO: 56813 - DNA, 699 bp, Homo sapiens
aattacatcccatcacatccctccctggacatgtggggattacaattcaagatgagatttgggtagggacacagagtcaaaccatatcacatacatacatasacacacacacacacacacacacacacatatgtgcatatatacacacagtacaagatagagatttgccacaggcctttcaaccaagcatactgaaaaaacaatttatttgttttaaactttctctcttcttgcaaatacaatattttgctattattgggaaacagaaattgataaaccactagaagtcaagtgatagtccttgatggctaggtgttatgacattatttgcttgtgtttgatggaagatggagtttctggtattcctacacacgctgtctatcaaaacacagagatggcgctagtgaaaaatcagaaaactaaaacaagaaacaaatttaccaaaggtgaaaaaaatcaccacgctttaaaactgcatttatttaaggaacataaatttaaatttaccgattcaatttatgttagaaagtgagatttaaaataactgctaaagggaaaacagtgatatataaaatgacaagcaatataggctagaatgttgaaaataaaactaaaacccaagatactaaaagaatcgaactggccaggcatggtgctcatgcctggaatcccagcactttgggaggccgagtcgggcgg

SEQ ID NO: 56814 - DNA, 699 bp, Homo sapiens
aattacatcccatcacatccctccctggacatgtggggattacaattcaagatgagatttgggtagggacacagagtcaaaccatatcacatacatacatacacacacacacacacacacacacacacatatgtgcatatatacacacagtacaagatagagatttgccacaggcctttcaaccaagcatactgaaaaaacaatttatttgttttaaactttctctcttcttgcaaatacaatattttgctattattgggaaacagaaattgataaaccactagaagtcaagtgatagtccttgatggctaggtgttatgacattatttgcttgtgtttgatggaagatggagtttctggtattcctacacacgctgtctatcaaaacacagagatggcgctagtgaaaaatcagaaaactaaaacaagaaacaaatttaccaaaggtgaaaaaaatcaccacgctttaaaactgcatttatttaaggaacataaatttaaatttaccgattcaatttatgttagaaagtgagatttaaaataactgctaaagggaaaacagtgatatataaartgacaagcaatataggctagaatgttgaaaataaaactaaaacccaagatactaaaagaatcgaactggccaggcatggtgctcatgcctggaatcccagcactttgggaggccgagtcgggcgg

SEQ ID NO: 56815 - DNA, 416 bp, Homo sapiens
tactttcttaagcaaaaacatgggtaaatgatttcataagtgcaaattttttacaaatacatgtgttttagcttttataaaaattgcagaatataacacatccaaaaaagagtctaaaatataaatatacagtatcaaaaaaattctycaccactacccaggccatgaaaaagcagaacgccttccagagtccttcctttctccccaggctctgaactcctaaaattacaatactcatttcctttcataatatatatatatatacacacacatatatatacatacatgtgtgtatatttacatatatacacacacacatatatatattttttgagacaggttcttgctctgtctcccaggctggagggcagtggtgcaatcacagctcacagcagcctcaacttcccaggctcaag

SEQ ID NO: 56816 - DNA, 1336 bp, Homo sapiens
agaatcagattatagattacaatgaaacatatatatatatatttctctttatcccctctatttctcctttttagacaggatcttgctctgtcgcccaggctggaaggccaaggggtgatcatagctccctgaagcctccgcctcccgggcccaagtgatcctcccacctcagcctcctgagtagctgggaccacaggcatgagcctccatgcccagctcacttttttcttttctgtagaaacagggtcacagtctgtttcccaggactgtctgaagctcctggcctcaagccatcacccgccacagcctcctgaagtactgggattccaggcatgagccaccacggtagaccctgcatttctctgtgctcactgctacacgcagctcagcctggactacacagccaggtgtcaggtgcgtctctgctgatctgagtctgcctgcagcatggacctgggtcttccctgaagcatctccagggctggagagacgactgccatggtaaggaccccgtaacgctgagctgatggacgggctgaaggagggagggagaccccatggggaggctctgagagggaggaggagcccacggtcaccctcgcctgaaaggggctgactcaggaaggcaccaggtctatttgcggctgtgtccccgtcctcagtgagataaagataaatcaggcagacagtggcccgggggcagggagaccccatttctctctgaaatgcctgcagagagcctggtgcctgcccccacttcagccctggggaaatcagagccaggttcctggggtggcagttcctcttcctgtgggctgaggatgagacaaccccatgacaagaaggacccagcctccgagcggccacaccctgtgtgtctctctgtcctgccagcactgagggctcatccctctgcagagcgcggggtcaccggraggagacgccatgacgcccgccctcacagccctgctctgccttggtgagatttcaagatggggagggggagatccgagtcttggaggaaccccaccccacacacaagccctggtccatcaggagacctcaaaagctcaggaggcacccgggcggggacctgctcaggcttcagggcaaatgcctcacagggaactctcttccagggctgagtctgggccccaggacccgcgtgcaggcaggtgagtctgtccccagctgtcccaggtccctactcctcactgggacagggggccacccatgggcagctgggggaggagacagtagttctgggtgactgatggggatgatggggaagtcctggggctgggagctgggatctgagcgtggggatgtcttggga

SEQ ID NO: 56817 - DNA, 1336 bp, Homo sapiens
agaatcagattatagattacaatgaaacatatatatatatatttctctttatcccctctatttctcctttttagacaggatcttgctctgtcgcccaggctggaaggccaaggggtgatcatagctccctgaagcctccgcctcccgggcccaagtgatcctcccacctcagcctcctgagtagctgggaccacaggcatgagcctccatgcccagctcacttttttcttttctgtagaaacagggtcacagtctgtttcccaggactgtctgaagctcctggcctcaagccatcacccgccacagcctcctgaagtactgggattccaggcatgagccaccacggtagaccctgcatttctctgtgctcactgctacacgcagctcagcctggactacacagccaggtgtcaggtgcgtctctgctgatctgagtctgcctgcagcatggacctgggtcttccctgaagcatctccagggctggagagacgactgccatggtaaggaccccgtaacgctgagctgatggacgggctgaaggagggagggagaccccatggggaggctctgagagggaggaggagcccacggtcaccctcgcctgaaaggggctgactcaggaaggcaccaggtctatttgcggctgtgtccccgtcctcagtgagataaagataaatcaggcagacagtggcccgggggcagggagaccccatttctctctgaaatgcctgcagagagcctggtgcctgcccccacttcagccctggggaaatcagagccaggttcctggggtggcagttcctcttcctgtgggctgaggatgagacaaccccatgacaagaaggacccagcctccgagcggccacaccctgtgtgtctctctgtcctgccagcactgagggctcatccctctgcagagcgcggggtcaccggaaggagacgccatgacgcccgccctcacagccctgctctgccttggtgagatttcaagatggggagggggagatccgagtcttrgaggaaccccaccccacacacaagccctggtccatcaggagacctcaaaagctcaggaggcacccgggcggggacctgctcaggcttcagggcaaatgcctcacagggaactctcttccagggctgagtctgggccccaggacccgcgtgcaggcaggtgagtctgtccccagctgtcccaggtccctactcctcactgggacagggggccacccatgggcagctgggggaggagacagtagttctgggtgactgatggggatgatggggaagtcctggggctgggagctgggatctgagcgtggggatgtcttggga

SEQ ID NO: 56818 - DNA, 864 bp, Homo sapiens
ttgtatatacacagattacagatagatctatgcttattcgttttttgtatgtactgttgacttattcacagtagcatctcatcttctccatttggggttcattattccactccctgatttacattgtttagtattgctttcagaaagagcccagatgcaaacatgtctgcagccttgcagctcaagcgatgcctgcttctctgtctctgtctctctccgtgtgtgtgtgtgtgtgtgtctccctctccctctctctctctgtctcaatctctctctgtctctccgtctctctctgtctgtctcaatctctctctttctctgttgttatcatagtacctgataaaaggacactgaaaacgccctccttattcctcataaggccaccgcctgacctgacgggtcacgagtgccccgagtctccttatgttctaggatttatccacagctgacactgcaactcggtcctttaataataactaggccaggttgcggtgagccgagatcgcgccattgcactccagcctgggcaacaagagcgaaattgcatctcaaaagataataataataataataataaataattataatagtaataattaggcccagcacagaactctctcctcacagttaaacgcttgtggttgtttctcctgtatcttctggggctgctgtttgctctttggaactccagtcccgaygagcttgtcattcattcaagggtaatttacattttctctggtagttttatgattattttaaattaatgcctcatggttttcactttaccatgatcgagatattcaatttagttataaactgatgttttctcttcagttctgtaaaaatttcaaccattagctcttc

SEQ ID NO: 56819 - DNA, 864 bp, Homo sapiens
ttgtatatacacagattacagatagatctatgcttattcgttttttgtatgtactgttgacttattcacagtagcatctcatcttctccatttggggttcattattccactccctgatttacattgtttagtattgctttcagaaagagcccagatgcaaacatgtctgcagccttgcagctcaagcgatgcctgcttctctgtctctgtctctctccgtgtgtgtgtgtgtgtgtgtctccctctccctctctctctctgtctcaatctctctctgtctctccgtctctctctgtctgtctcaatctctctctttctctgttgttatcatagtacctgataaaaggacactgaaaacgccctccttattcctcataaggccaccgcctgacctgacgggtcacgagtgccccgagtctccttatgttctaggatttatccacagctgacactgcaactcggtcctttaataataactaggccaggttgcggtgagccgagatcgcgccattgcactccagcctgggcaacaagagcgaaattgcatctcaaaagataataataataataataataaataattataatagtaataattaggcccagcacagaactctctcctcacagttaaacgcttgtggttgtttctcctgtatcttctggggctgctgtttgctctttggaactccagtcccgacgarcttgtcattcattcaagggtaatttacattttctctggtagttttatgattattttaaattaatgcctcatggttttcactttaccatgatcgagatattcaatttagttataaactgatgttttctcttcagttctgtaaaaatttcaaccattagctcttc

SEQ ID NO: 56820 - DNA, 800 bp, Homo sapiens
ttgaccaggcacagtggcttacgcccataatcccaacactttgagaggctgaggcgggaggatccctggagcccaagagttcaaggttgcagtgagctatgattgtgccactgtgctccagcctgggcgacagaatgagaccctatctcaaaaaataataatataataataactgtatttatgaataacttttatttaaattaaatttatcaaaatctttcttggacaggcactgtggctcatgcccgtaatcccagcaatttgggaggctgaggcgggggaatcacttgaggtcaggggttcgagaccagcctggccaactggcgaaaccccgtctctactaaaaatacaaaaattagctgggggtggtggcgggcgcctgtaatcccagctactcaggaggctgaggcaagagaatttgagcccaggaggtggaggctgcagtgagccgagatcgcgccaatacactccagtctgggcgacaggtactgtgtctccaaaaamaaaaaattcttaaagtgactttatgcaaaattacatacattaacgatataatagatatcgtgccttttttaagagaaatttgaatgttttcaaagaaaaaactttttggaaaatgatatgaaaaataattttaatatgtgctttagcctcgggctaccagaagagccccagatagggtcgagggaggcctcagtcccacaccgtccccttctgccccgcccagatggatttccaggctcagggaagtcccctctcgggtccaaccatatcctgcgaagagacacagcacctgtccc

SEQ ID NO: 56821 - DNA, 3167 bp, Homo sapiens
ggcccacccacccagagcccagggagaccgggccacggcagctagggcccatcctgaagatgagggcaccacggtcaagccagagaagctgggtacccctcctgcacattcccaacgacagcgggagacaagggggcttggtggcctgcactcgggaaccgtaaccagccctgccttgtagtccctgggggaccccaggcatgtcacctctctctaggcctcagaagggggcaggtaggaagcagactacctcccaggactgtgacggtcccctgagacaatgcatggggtacactaggtgacccctgacagatgggaggcaccccatgggataggaggcattgttgcccgtgggtttggttcagatccccactcccctgctggcctggcagtcaccacagcatgggggcctatttccccagccatgacacactcgcccccacttcctggacaggagggtgggaatgggcccagcagccaggaaatcctggcccacggggcctcctgagtccctgctgtcaactccaggcactgcctggccttgtggcctctaggggaaggttactgaactcctccaagccacagcgataacaaggccaaagagctggcacatggaggggmcagaaaaaaagagctcggtcacaccacgcaggacgttgggccccaccaaggggatatgtaggatagggacagaggacacggggcgggatccacgggaaagggttagcacagcagggccctgggcgggcacggggcctgccctgtggctgcaggtatattaatagttcctgggccccaggcaggcagtgcccacatgcttccaagcccgtgtggcctgtaggaaggcagcctagcgtccacagggagagaaggcctccgagttcctgctgaaccactcaacagcttaaaatacaaccagcccctctccctgtccagccagctgctagtgggaggggtgaaatcgtaccctgctccccccaacctgggcaccaaaccagggcccaagagggagagtacggccatcggggtcccggctagctgctgggagaggacgccgggctgcggcaggagggggtagcgagagaggggccacgctcacagctgcagcagtggtgcccaggccagcctgaggcccaaggagaggagacgcccaaacctgcaaggaggtaagcccgggctgcaaggcagcacctaggggcccctacagacaagaaatgcccaaggctagggccacctgggcaggatgagtcctcagtgggacggccgtccgtctcccatttcctgccccaaatccccagctcgtcggccatctcctcctagagagaggactgaaaggctctggggggagcaggagacctctccatactattcttgcaattccctgtgtctctataatttttttttttttttgagacagagtctcactctgtcgcccaggttggagtgcagcagtgcgatcttgactcactgcaacctccgccccccaggttcaaacgattctcctgcctcagcctccagagtagctgggattacaggcacacaccaccacatccagctaattttttgtattttaggagagatggggtttcaccatgttgcccaggctggtctcgaactcctgagctcaggcaatccaccacctcggcctcccaaagtgctaggattataggcgtgagccacctggcccggcctataattatttctaagtaagaaagttaaataagatattccaggtggggtaaaagaaataagttacgctaggaaacaagccagacacaaaggtcccatatctatgcaaaatacccagagcagacagacagaaaagcaaattggaggggccaggggctgggcggggggaatggggagtggctgctgctgggtacccggtctcctttcagagtgaggaaaatgttctgggacgagacagaggtggaggctgcacaatgatgcacgtgcactcaatgccactgttcacttttaaatggttagtttcatgttacatgaatttcacctcaataaattattgtttaaaggggtgaggggtaacaaacaggccccacatacccatcaaaataaaaacagtcgggtgggaggagcaggagaggttccccacccctcagagggagggcctaatgtgagacctcatcgagggctccgcgccccacaccccactgccaccccaatctctgctctgtgcctgccacacacacacacgcctgcccaggcctgaggccaacagggggcaggggctcccaggggaagcccagggctgcagagggtacaggcagctgctgaacagagccccaggcaggggatcctgagcacagacggggaggtggcaggctctggccccatctccaggagaagcggtgaggcagggaggacagacaggaccttctgaggaagcccacggagccactcggaggggctgggaggggctgagatgctctgggtggatgaagggatacctgtgggaggggggctactggtgtcagcgaggtcccagcactggccacgggcaaggggtgagaccacatagcctcaggcacgacgggcagggagagggcaggaacgggcagacaggcaggcactctggcctggggcacaggctggtggctctgccggcctgtggctctgtgatgacagttccactagcctgagaggaattctcaccaggaggcccaagattcccggggcccagccaacagcaactcgtcgcagcacgaggtcagggcagagccaagagccaggacacacggtgcggcgtgaagcgcaccctgcaagagggagcaggggcgaggtttgtgcctcccaagcccagaggggagtgccgcaagcaacagagcccgtcttcactgtctttgtggtcatgaagatattactaatgggggcaggaggagtgaaaaggggggctctcgttgtctaagcacttgtcacagctcctgggaacccgcccgcctggtgggtgaacaacccagagaagcagacctgcccatttcctggctgtgtggccctgggcaagttacccaacctctctgaacttccatctactcatggcaaagtgggctgtccccagctgccatctgacagggttaccgtaatcatccccagtttaggataaatcttattaaggataaatataggccgggcgtggtggctcacgcctg

SEQ ID NO: 56822 - DNA, 995 bp, Homo sapiens
cgtctctaaactttgatggaagggacacttcaatataattgtaaaagctcatcttgatgagaacaaagagaaaaaaattatggctagtccactgcttttgaaatgtcagacaggatactagtaggcagggagcgtggttcattcaacatatttcatctttagacagataagtacttaacagggccaccaaaaatatgcaagcacatgagtctagtagtttacagatatctacatacacatatacgtatatacaaatgagcacgagtctagtagtttagatatctacatacacatatacctatatacaaatgagcacatatacatatatgtgaacatatatgtttgtctttgaacagaatccttctaatgtaaagtttccctgctgtttaattggatcaattaacattcaaattaaagtgcacctaatccctgagctgtactggttttgcagagttctgtcccatgaaagctttcaaactggcaaccttgggctgactctgtagatgacagatttgctcctggctcatcagctgtaaataaaggggaaaagtctttctagtcctttaattttatttatttatattcagttatttccaatattactattggtagtcaagactgactcactttttcttaatataaagtcttgtccagaagaattattggagtcattataatactttagaaatrcatatgctggttgatagttgcttgtccttacactaaattccagtcttgctgggaaatatatatacacttgtccttccaaaaaggatgaaacatatgaagtactttccaccatggcttggtacaagtagaccttacttcttccaaaaagaaaatacttcttaaatattgaaaaatgaaatagaaattgagaaatgaaatattttcttttacacatactgctgcaaatcatattgtcaaaatattcacaataaattactgagtgcaactttaattatataaggtcatttcattttatttttgacact

SEQ ID NO: 56823 - DNA, 749 bp, Homo sapiens
attctggagttgcaaagtacaacaactgaaatgaattcactagaggacttcaacagcagatttgagcagagagaagaaatattcagtgaatgtagagatagattgagcatatgtattcaagaaacagaaagcrtagtacatacaagagacacatcatggctataagattaatgatagctctaaggtccactcaaacatctcatggggcctacatcatgtgtcacttagtggtatggcacgacctgacctggggactactaaccctagcccagagatttctaggtgacaagaccacctcagcacagatgtaaccctcataaaccttaaaacaaaccttatccttacaagaatagtttaacttcctttatgaaagaaacatctgttaatgagtgtaaagtgaatacatgtgtaagaaaggggagtaattcccaaaactctgggaatggtctccagacacagaccttcctggtcagtccgtcacctgaccccttgactgtatctggcccgtaccactaacctgctcccactttccattatgtacaagcgctgccagaataaactgcttgaacatcagacggtatctaagactcacctttggcccaaactgaactgaagtggaaaattcatccctgggaaagctggttggctaggatcacccaagatccctgaatatgataaaaaggaaaaaatatgataaaaagaaaaaaatgaacagaatctaagagacctatggaaaaccatcaagttta

SEQ ID NO: 56824 - DNA, 749 bp, Homo sapiens
attctggagttgcaaagtacaacaactgaaatgaattcactagaggacttcaacagcagatttgagcagagagaagaaatattcagtgaatgtagagatagattgagcatatgtattcaagaaacagaaagcgtagtacatacaagagacacatcatggctrtaagattaatgatagctctaaggtccactcaaacatctcatggggcctacatcatgtgtcacttagtggtatggcacgacctgacctggggactactaaccctagcccagagatttctaggtgacaagaccacctcagcacagatgtaaccctcataaaccttaaaacaaaccttatccttacaagaatagtttaacttcctttatgaaagaaacatctgttaatgagtgtaaagtgaatacatgtgtaagaaaggggagtaattcccaaaactctgggaatggtctccagacacagaccttcctggtcagtccgtcacctgaccccttgactgtatctggcccgtaccactaacctgctcccactttccattatgtacaagcgctgccagaataaactgcttgaacatcagacggtatctaagactcacctttggcccaaactgaactgaagtggaaaattcatccctgggaaagctggttggctaggatcacccaagatccctgaatatgataaaaaggaaaaaatatgataaaaagaaaaaaatgaacagaatctaagagacctatggaaaaccatcaagttta

SEQ ID NO: 56825 - DNA, 761 bp, Homo sapiens
gatcctaaataaaaaggacgtttaaatcaccaaaataacacaattttccaatttgtctagcctgattctgttcatcttctctgtttttggtgtttcaactgaaaaaaaatacaaattatcatccatcaacgtattgttttcccatttactgaatatgctctttattccaggcactgtgctagatgttgcagatactgaagtgattaacataatacttctgtctttcaaaaatttcagttttgcaaaggaaacttyttaaaaatccattttgatagtctatgatcagggcaggaataagcaaacatttgaagtgctatgaaatttctgctagagaatgattaaagttgaggtggtgagactccatggacaaaggagatgaggcttgttttgggtagacattttccaagaggttttagagtgaagtatttgagggtaatttacgcaaagggaacaacagatgcaaaggccaagaaatgaagagtagaggacacaggggacaccaggattgaagaagaaaaagcagtgtattagtttgctctcatgctgctatgaagacatacctgagactgagtaatttacaaagaaaagaagtttaattgactcactgttctgcatggctagagaggcctcaggaaacttaaaatcacggcagaaggcaaaacaggcacgtcttacatggtggcaggcaagagaagactgagagccaagtgaaggggaaagcctcctataaaaccatcatatctcacgagatctcattcact

SEQ ID NO: 56826 - DNA, 1702 bp, Homo sapiens
  misc_feature (1)...(1702): n = A,T,C or G
tgcatgtgccctgccacagccgcagcctctttggggacactgctgtcgcgatggtttctgcagagccagcccggggtccccaccgtgcctgcctctccagtcactcagtcctttctcctggaaccgggtcaagtccctctgcgtgtctgaaccgggacaaggccctgcctgcttccatacctgaagctgggccccagggcaccttcccatccacatscgagaccaccttcttaacggccaacggccactcaagcccccacaggcaagacttctacctgtcgctttccaagactgaacattttcagcttcggcattaaaaaatacaccagaaagccggcatagtggtcagcnnnnnnnnnnnnnnnnnnnnnnnnnnnnnnnnnnnnnnnnnnnnnnnnnnnnnnnnnnnnnnnnnnnnnnnnnnnnnnnnnnnnnnnnnnnnnnnnnnnntttgactgcttgctaagcaccaggcatccttataaaggtctttgtatatggcatgtcatttaagcttcattacaatactatgaagggggatgctattataaaatggatgctctattttatagtccgggaaacagaagtttgttaacatgtttttaacaacaacatggccaaggccaaccagaaggcgtggtttgtacctcacccagatcctgtctatgggcaggtgcccatccccaaactgctggaagtgttggatgctcaagcctcagagtcatccctttccatagagaattttgctcagtcagatagaagccacttctgcttgagaggctcaatgtccccacttagaaagtagctcacagccaatgacacacaaggctccctctgttccttgcttcaaggtgagactgactctgcagtgggatccagctaagaccacatctttgcttaactccttcctcttccctagcctgcttcccttgctcccatagttctaaaagcacactttcaataaaccacctgaaaaaggatccctgcgtcaggttctgcctccaaggagccagacctaagacatccagttagcaagtatcagagctgggactcatgtctaggaagctctcttaatcactaagcagatgtgacatgatattgcctatattatatacatgattaaaatgatggcctccaagttgtaggtcaccaagcagcatatatcacattggtttagatatggcaacaacgacagtcacaatgaatcctacttattgaatgctgacaacgcggcagtgtctttcttgcatctgatcctttcaacaataccatgaagttcattttattatccccactttgcagataatgtatgggaagtttggagacactgagacacatcccccaggggcatatggataggaagagatgaggcttaagcttatattcaagtccctctctcttcaagggccacatgctttttccacctggtcacttaaacctcttgttgcgtaaagtattccatgaataattggtgaaatccatctgccatcaaaactgacattttaaaaaacaatttagacagaagactctgctatcattccaaccctgaccccagcaacagttctttttgagctgcatttgaccaaaatgtctctactttctggagaaagccatactactttggaaatagctagagaatattctcttaagccagacacaaaaagagcaaaggaaccatcttcggtggagaaaggaaagaaag

SEQ ID NO: 56827 - DNA, 706 bp, Homo sapiens
cacactggtcggtcattctgtaccccsaaagctgcttggggaggcagctaacctggaggcaagtccactgccatcaacgtcggaaacaacctcactgccatcaacatcagaagcaacctcactgccatcaacatcaaaagcaacctccgactccagtgatggggctcctgccctcccacccactaggctgtggcaccttctcctacaggatgccaagagccgggcaagcagggatgtatgtggaccggaccccagggggaccccacaacaccactgcacacctttccagagtgtcagcctcagcctcttgcccagaggtcccagcactgggggcagttgtgatgggcacggggaggaggcagagggggcagctgactcggaaccacccgggcaccccaatgcgaaccacactggggggaaaccctgtggcttgctccacacccgaacgcccttccaggctggggttgtgaggaggaaactggaactaggctcggtgggtctcagggggtggccctttaccaaggccagacccgcccacacagtggccttcccatggccagtccaagctggacacaggctgccatcacagggaccctcaccccaagactgcaccctcagcgactgccccttccgtgccagggctgtggacagggttgtcacatcaaacacaggacgcctggtaacatctgagtttcagatgaacaac

SEQ ID NO: 56828 - DNA, 899 bp, Homo sapiens
  misc_feature (1)...(899): n = A,T,C or G
atcctctcctacttggcctcaaatccgagttgcagggttcctaatcttggtttatcctaaactaagacacytgcacatcaggcatcattgcaccttcactggtaaagtgaatctttacatgttgcattgcaagtatgttaggggattggcagaattgcctgaatttgctctcacacctaccatacaagtgaattgatttcccagcctaacaaactaagggtataagagcaattgctacccagaaaaggggcggatatagcatggtttggtgcagttcctctgggccccaaagcccctaacaggagcatagacgcagatggcactctccacatagggtttcatttttctgcagctgttacatcctcaagcttgtatcatgatcccagaagaacttaccataacaattgacatgctgctattaaagtaaatgttgcaaacaccttgtttcgtggttgttgaatgaaatgcagcatcattaaaggccatatctcctcttggagagggatagggggatagggtcagcacccaaacatcactaaacaacattctgtctctacctctctaggatcacagaaaggaacccctttcgccctagaaatgtacctgcttgagaagctctgcagtgtgttgaggaaagaagcaatgataccatgtgagggaagtacaatagactagaagttgtgtcccccactccaaatttatatgaaatcttcatccccaaggtgatggtatcaggaggtggtgcctttgggagatgattaggtcaagaggtcagagctctcttgagtgggattagtgcccttataaaagaggcctgaaggccgggcgtggtggctcatgcctgtaatctcagcactctgggaggccaagncagacggatcatctgaggtcgggagttc

SEQ ID NO: 56829 - DNA, 613 bp, Homo sapiens
tttgagctcaggagatcgaggctgcagtgggctatgatcgtaccactgcactccagcccgggggacagagcagaacaacaccctgtcacaaaaaataacaccctgtcacaaaaaataaaattatttgttttgtaaccagggagacagaggctcagcaaagtgaagccattttccctggtggccacgcagggaggccggagggcctggcaggctgcgcgcctcgaatatgcagcccaagggccctggcgggrgtggcgggaaggcccaggaagcccacagcggcagactcggctctcccatctccgcggttactgccgatgcagggtctgaccctgccagaccttcaaggagaaaccaagcagagccccactcgagacactcgactcccaggcgctgcccactgaccccaggcaaactggcccctggctaaggaaacttgccgggccatgcccccgggggactgcaacaaagaggagctggtttgcggtgacagcgttttcccggagccgcactccggcagggatttatcacacgttcttgtcgaaggccaccaggtgaccagtggacatgcgtggttacgccgggccgagtggtcgctggttcctgtgagaag

SEQ ID NO: 56830 - DNA, 556 bp, Homo sapiens
agctgggaagtccaagatcaaggtgctggcatctggtgagggctgctctctgcttccaagacaatgtcttgaaggccacagtgtccactagaggagaggaatgctgtcctcgtatggaagaaggcagaagggccaaaggaagtggaaaccctccaccagaaccttttgtaacagctttaatctattmatgagggcaaagccctcgcagcctaaacggcgcccgaaggccctagctcctgacaccattgcactgggaattaagtttccaatgcctgaatttcgggggacacattcagactggagcacttggggcatttcctatgccttttaccacacagtaggacaccctcccccatacctcccttccagaaggttcacaagccgacgtcagagggttactgctggtggatgacatcttagagaagcagacagcgcccagctcttgtacttaccaactagtgaccacgggtgtgccctttccctttgggggcctcagtttcactctctggaaaatggatgggccgggtaggggcgggtcagaaaaagtcatcctcaa

SEQ ID NO: 56831 - DNA, 695 bp, Homo sapiens
aaaagcccgaaagatgccaacaggacgagttttcccatygtgtcatctctgctttattcagtgatggttttatctccagacaggttctcaagagttctatctaggatgacatcctcctggcatagcaactccaacagaaagaaagcacctctttcccagggattctagcaaaagttccaggactcactgtcattggacagaattgggtcacatgccaattcttgagccattcggtgtggccagggcactatggtgctctaaagaggcctgggtcacatacccgcccctggactgagagtaggctgggagcaggatctctaaaaggcagtcttgatactgttgcagaggttagaggagagggtatgagaagcaaatgtccggccccagaagacagtgtgtcctcatatttaatactgtgtctgtgacaatttaagatatttgggtcaggcatggtagctcacacttgtaatcccagcactttgaaaggccaaggcaggaggatctcttcaggccaggatttcaagaccagcctgggcaacatagcgagaacttgtctctacaaattttttctttttttctttttaattagccaggcttagtggcacatgcctgtggtcctagctacttgggaggctgagttgggagcatcacttgagcccaggaagtcgagactgcagtgagctatgattgcacca

SEQ ID NO: 56832 - DNA, 505 bp, Homo sapiens
caattcagtgaaggataatatgataatatattggatgacttttggcaaattagtcatgaacagcacccacaaaacaaaacaaacaaacaacaacaacaacaaaaaacaagctgccaggaggaagtatgagccacaaaatttgcaccagagataatactttgcattccacctgaatctaaatttacttgaaaggatagaactgagagtgtttgtaggtcttttatttctaattactccgcaagagcattgcacaatgaccatggaaaatcactttttgggccaggcttggtggctcacacctgtaatcccagcactttgggaggctgaggcgggtggatcacatgaggtcaggagctcgagaccagcctggccaacatggtgaaaccccgtctctactaaaaatacgaaacttagccgggaatggyggcatgcgcctgtagtcccagctactttggaagctaaggcagcagaatcacttgaacccaggaggtggagattgtagtga

SEQ ID NO: 56833 - DNA, 2250 bp, Homo sapiens
caccttgctttttatcctgttaccaaattggaaaagtaagattttattgttgggtacattgaaatattgtaatatagtaagtagaaagatggaaagtctcatttctggtgttctttttctctacttctcaaataaagaacaacctgactttaatatttgaaatttcagtttgttatagtaataaaaatgactggaaatcaacaacaacaacaaaacctgtggctacgtaatcagctattgcttttactagcaaagccatttggaattttgcagcaaactctgccctaaatgtgctgaaggttaaaggttgttgcattttgatcaggttccagacaaattgattcaatctcttctttgtggatttggctgagaacctaatttctttttttattctcctgtctcctctcttcttttcctcttcccatcatgggccctaaagatgctgaactgctgttccctcatttggcccttctcagtcataagcattccccattggtcacacacattgctaatgcagtcagtgacctcataaaacaaataaattcaaagatgaaaatggatgtccctatttaaaagaggtcaagcagcaagtgggaatcaagtgtgaatagcaagcagacggcaattgcatttcaatgagactagtacttccaaaatgctgggctgccaacacaattactatatcattgtttttaaagaaaagacatttataaagaatcattaatgtaaagcttattttaaaatgtaaaactttatatagctaattattttaaatgaaaagcagatttatttcaaaatttaatactagattgacaattaaatttctaggatcatttgatttcaaggagtatatgtataataaatgttcattacctccctatatgccagggttgtgctaatttatttcacacaccgatttgcatgtagtcttaataacccagaggcaaaataagtagattgtaaccacatttcagatgaagaaccaaaggctcagagagaacaaactactttccacagttaaagttacaaagttggctaggtcgtcactcaaatctaattgtcattagattgtatcacgtctctcaagtattagctacatttaataggataagaaagtttatagagattaattgtgagtagagaatatggtaaaggccaatgatgaattgcttttctatagactttgaaagatgcatgtcgagtaataccaggttaaagaagaacatgaacaaagacatgcaaatgagggctttcagggaatgctrgttgaattctgaggactagctagagactaacggtatgagttgaggggtttttactgagacgagaaagctgtcagacccaccccaggctttcaaaattttaccactgaacagcttggtagagaaaaaaaaaaaataatgataataacataatgataagaagagtctatattcatttacatttcttggctcccctgtttcttcattcgtttatttgtccattaattggccaaggttttatccaaagctgactctatgccaaaacaattataatattcagggatgggatgaggcatagtacaggaaggtaggctgaggatcctgagctatggtaacacagaaatatgtatctacttaaatttggggaacagatgaggcttcctttcgacctaactgaaacttgaaacaacagtatgagctggacagataagccagggatggacacatggagatctacaaagataagggagaaataaatttaagcaaacatacatcccaaataataacagtataaaatacacccagatgcccagagagctccaagtgattgagttgaattgaacatgaggctataaatgtattttgaggtcatgctgagtaacctgtattttatcctgtcaacaatggaaacaaatgttaagctgaggagaagatccttggtttcggaacatgactcaagctttgttgttaccgggattgtgccctgggttcttataatctcccaggttagaatcagaaagatcaccagatatggcagcaaagtgaaagttaaattgtattgagcttgtgcacaagggagccagcaccacaaaaggaaaaggatgggctgttctctgaggatagtaggtggtttagttttaagtggcctttctacaggaaagggtttcatcaacgtttttataggaggggtttctttagcgcttgcacggtagctccacaggcttctgcatactttgcatgtaacattggcattttatttattcattca

SEQ ID NO: 56834 - DNA, 580 bp, Homo sapiens
tgctcaggctggttccaaactcctggactcaagggatccacctgccttggcctcccaaagtgctgggattataggcatgcgccattgcaccaggccctaataaaacttctgataacttttttgaggattaattaatttgaataatataaataaaatgtgggcacaatatctgacatataataatagttcatacattagttgctcttcaccccctaaaatctaaaaaacatcctcccatcaccaccaagagaaaacatttatacccttccaatcatagtcctatcaaaatacctatgatctaagcaccttttggtcctactgcattgtaaagaccgaggactggttccattgtttctagattgcgttgtctccaatgacctcctcattttgtaatgaggaattgtttcaactacatagaattttctatggttttctaatttaattttgaataaaaaggttatcaatttcttgagattgagagtgtcatcatrtgtccaacaataataaagattggatggtgtgagggagagtgaaggtctggagaagtggcagggtggtggaggataacatatttaaatta

SEQ ID NO: 56835 - DNA, 567 bp, Homo sapiens
gtctctctttgtgtttctccttagctccagcccttctctgagacggggaccaggggatggcagccatgcacctgacagcctggccccaggtgagctgtggggtccttcagctcttcctctgggcagtttcagattgaaaaacattgagaaggggagctggtgagcctcgggatgacagctgcttccacctgctggactggaacttgtgggaaagaggtgttgtgcagggagggcggcagagaccaggacagtagcgagtggaggaagcgggagagtgagcaggagagcaggagggtggtggtcttctgcacactgagggtctctgctcctctctacaggagcacccccagcatagggctctgggtgaatggggacgtggaaaccgcccctgtgggatgtactgtgcaggggtgtcagtggagcacagtcgcagaggattggactatctgtggtggggatgtasagaagaggaatagcaggacctgatcagagaaggatggccgtgcctctaattcaggggtaagggaaggtcacagggagtggagtcaagggagggggaagacagtc

SEQ ID NO: 56836 - DNA, 567 bp, Homo sapiens
gtctctctttgtgtttctccttagctccagcccttctctgagacggggaccaggggatggcagccatgcacctgacagcctggccccaggtgagctgtggggtccttcagctcttcctctgggcagtttcagattgaaaaacattgagaaggggagctggtgagcctcgggatgacagctgcttccacctgctggactggaacttgtgggaaagaggtgttgtgcagggagggcggcagagaccaggacagtagcgagtggaggaagcgggagagtgagcaggagagcaggagggtggtggtcttctgcacactgagggtctctgctcctctctacaggagcacccccagcatagggctctgggtgaatggggacgtggaaaccgcccctgtgggatgtactgtgcaggggtgtcagtggagcacagtcgcagaggattggactatctgtggtggggatgtagagaagaggaatagcaggacctgatcagagaaggatggccgtgcctctaattcaggggtaagggaaggtcacagggaktggagtcaagggagggggaagacagtc

SEQ ID NO: 56837 - DNA, 652 bp, Homo sapiens
acccaccttggcctctcaaagtgatgggattacaggcatgagccactgtgccccgcctggactgtaaatttttaaagaaatacaactctggtttatttatctctacatccccagagtctcctgttccccatatctagtartgaataaattattgtggaatgaaataactttttcttttttagagacagggcctagctctgtggcccaggatggagtgcagtggcataatcacagcacactacagcctcaaactcctgggttgaagcgatcctcctccttcaacctcccaaagtgctgggactacaggcacgcaccaccaagcctgtttaagcttttgtagagatagggtctcgctgtgttacctgttcttgaactcctggcttcaagcaatcctccctgctcagcctcccaaagtgttgggattacaggtatgagctatcacacccagccttgacataactttaaaggaccaatgaccatttttttctgtataggtttatactgccttgagacagagtcaataattaagatcagcaaacctgtaacatctcattatctcttgtcattcatagctcctctttgattggcctttcaaatgaacttcccaaatctggatcatttactagtagcccaaatgcaacctgccctccct

SEQ ID NO: 56838 - DNA, 790 bp, Homo sapiens
attctctgagaaggaccctctccatgccctcacctctttcaagctgcatgcagaccaaaaacaccatttaaagtccctcacagaatagaaggaaaaaaaagtgaattatccctgaaagccctccagccttactaacttccttacttggctcaactaatatcaaaggcttaagccacttaagtgctttaactggactaaccggtttggaagctttctattttctccctgttacatgcaaactgcagacaactcaaatgcatagagaaaacttccacactgagaaagcaatttaaaaaataataataatgggcatcctatattgagacaaacactttgtctcacatagcctgtcatcttcctattcagagtgacaaggacaaaaatctagaagaattctttataacaaaacaagaattttacagtgctagatattaaaaaagaaaagtattatttttctgctttagtttgatagaaaaccttggaatctaaccaaataaatacattttattgcttaaaaatataaacccaatacacccaaaagaaaccatctgtttatttgtggagtgtttaaagcattttgagatatcgaaaacaagcaaagtctggcttrgtaacagtgaatgagacagatctgtggtctcccgtggcctccaattcaatgggggaaccaggggctaaaccagcaaatatcacaaatgggaatgaaatattattcctctgtataaagtgtaaagaaaaagacggggtttcaccacattggtcaggctgatcccgaactcctgacctcagg

SEQ ID NO: 56839 - DNA, 1279 bp, Homo sapiens
tgggcatactgttataatgtgaaggcctctgggttctgttacattcctctgaggaacaatgattttattttagcagataattcattagatcagacccaaagtataagctctgtttcatttactgtggttattagttcaaatttcaatttaattctttaaggctttgctgtgatgctttgagttttcccacacatgcatggtgttctccagstcagagatttatacgaaattcatattcaggattaggaaatgccctttttttacatcgcccatttaggtgggattcctccctttttatctgggagcctgacctgatatttggggttcctttccttagttctttcatccagaaattctatggggattctagcccctctcatccagatgctgtgctgtgtgtataaactgccctcaagataaagccataaataagaaaaaagaaaagagagaagaaagaaaactttttgcactttacttctccacacttgacttttctcaacatttctgcttatatttactttctagaatttttaggtaggtttcttccccccccccatgttttagctaaactttatctgtttaggagtaggtttgcaggaagcttctaccatcaaatagtaagtagcagccacagacaatatctaaatagatcatattattgacttgttattttaaaagttggcttcttctacttcctttctaagtagaaagacctttactttagcctgaaaaactaaattctaaacctagttacatcatttattttctgtgtgattttaagtgaattatttaactttactgaacttcattttcctcctacttaaaagggaggaaattataataagggatttgatatgagaattaaaggaaagagtacagataaagtgcctaggagagtatctgggcccataattggggcttagtaagtgtcagccctctttttttgtgtggaaaggaattaagctagctggtgattatttggctactgcatttgaaggcagtaaaaccaaagtctgaattatctgggttgataagattatctagatcactgctaaatctccctgccactttatcctgttgatactgagacacctaactctcaaatataatcttccaaaaagcaatcctttacaaggcgactctgaaagactctttgtgctagcaaacaatacccaaagtgtgccttccagagagacaatatagtaaagcagcatattaatcttgccccaaatcctatttcatgtcttccggacattgcagaggggagatgggtggaaac

SEQ ID NO: 56840 - DNA, 1279 bp, Homo sapiens
tgggcatactgttataatgtgaaggcctctgggttctgttacattcctctgaggaacaatgattttattttagcagataattcattagatcagacccaaagtataagctctgtttcatttactgtggttattagttcaaatttcaatttaattctttaaggctttgctgtgatgctttgagttttcccacacatgcatggtgttctccaggtcagagatttatacgaaattcatattcaggattaggaaatgccctttttttacatcgcccatttaggtgggattcctccctttttatctgggagcctgacctgatatttggggttcctttccttagttctttcatccagaaattctatggggattctagcccctctcatccagatgctgtgctgtgtgtataaactgccctcaagataaagccataaataagaaaaaagaaaagagagaagaaagaaaactttttgcactttacttctccacacttgacttttctcaacatttctgcttatatttactttctagaatttttaggtaggtttcttccccccccccatgttttagctaaactttatctgtttaggagtaggtttgcaggaagcttctaccatcaaatagtaagtagcagccacagacaatatctaaatagatcatattattgacttgttattttaaaagttggcttcttctacttcctttctaagtagaaagacctttactttagcctgaaaaactaaattctaaacctagttacatcatttattttctgtgtgattttaagtgaattatttaactttactgaacttcattttcctcctacttaaaagggaggaaattataataagggatttgatatgagaattaaaggaaagagtacagataaagtgcctaggagagtatctgggcccataattggggcttagtaagtgtcagccctctttttttgtgtggaaaggaattaagctagctggtgattatttggctactgcatttgaaggcagtaaaaccaaagtctgaattatctgggttgataagattatctagatcactgctaaatctccctgccactttatcctgttgatactgagacacctaactctcaaatataatcttccaaaaagcaatcctttacaaggcgactctgaaagactctttgtgctagcaaacaatacccaaagtgtgccttccagagagacaatatagtaaagcagcayattaatcttgccccaaatcctatttcatgtcttccggacattgcagaggggagatgggtggaaac

SEQ ID NO: 56841 - DNA, 849 bp, Homo sapiens
ttaaccagcatcaggatcatcttctgaatgtaaaactgctctcacaattctagttgaccatgaataaaactgtaaagtttctgtatttacttaatatcagatgaaaacattaacagaaacactgcaggaaagcatactatttattcaaaaatactgtggaaataaggaaagcatagtatttattcaacatgtgtgaaatgttgtgttaagttgaacacagggttccaagaacagctgtatgacttagctgcraaagttaaaaaaaaaaaaaaaaaaaaagcaaagactagaaagatcttcaaaataaaagactcctaagactttgatttcaagatttttttttattggccaactgataactgggcatttgttcatgtaatggtactacctgttgtgttttgtattgatttggttttggatgggggaacacagatccatctattaacatttgattatttctaggaggcatcgagatttgttttgttgctctacaaactgatgtgtacaccatggaatcttaagagttagtcataatactcctggagacatttaagccagtagcaaaatagaagtcattttgtaccatcctaaagagtgatctggtgaaatgaagggccttgaacagctgccacccaccaaactctaatggaggtgggatcccacccgagggagacagagccaggggttcctattttttaactggcaatcagctttgcctcttgggcatgaatgcccagttctagtggtaaagaattttccacaagattcatggagtgggaaagaaccagctatttatattcatgctttcagcttggaaaagaaaaaagaagaaagaggagtagtaagagg

SEQ ID NO: 56842 - DNA, 686 bp, Homo sapiens
caaggggcagggacatggcatgaggagaggaccccccggccctctgctcatgtcttcttgccccagtattgggctgttgggagcctgtagccccagatgtgtatgtatgatggggtgagggtgggggtgtcaagagcaccatagggggatctgtgccaccccaacttccagaaggaatcagttctaagggagcataggctctccggtagctatttaaacaggcaggtgggaatggggaagtgtgggtcacggttctatccattctgcaatagtacacgtggtgtaagggktcagtaagatggggggaggggaatagggcacctcctttgcaacatctcttttttttcttttttcccagagacagagtctcagtcttgcccaggctccagtgcagtggcacgatcctagcttactgtagccgcaaactcctggtctcaagtgatcctcctgcctcagcctcctgagtagctgggactacaggtgcacaccaccacacccagctaatttttgtatttttagtagagacaaggttttgtcacgttggccaggctagtattgaattcctgggctcaactgatccacctgcctcagccctccaaagtgctgggattacaggtgtgagccaccgcgcccagctactttgcaatatcttattgaaacaacctctttctgtaatatctggatcc

SEQ ID NO: 56843 - DNA, 686 bp, Homo sapiens
caaggggcagggacatggcatgaggagaggaccccccggccctctgctcatgtcttcttgccccagtattgggctgttgggagcctgtagccccagatgtgtatgtatgatggggtgagggtgggggtgtcaagagcaccatagggggatctgtgccaccccaacttccagaaggaatcagttctaagggagcataggctctccggtagctatttaaacaggcaggtgggaatggggaagtgtgggtcacggttctatccattctgcaatagtacacgtggtgtaagggttcagtaagatggggggaggggaatagggcacctcctttgcaacatctcttttttttcttttttcccagagacagagtctcagtcttgcccaggctccagtgcagtggcacgatcctagcttactgtagccgcaaactcctggtctcaagtgatcctcctgcctcagcctcctgagtagctgggactacaggtgcacaccaccacacccagctaatttttgtatttttagtagagacaaggttttgtcacgttggccaggctagtattgaattcctgggctcaactgatccacctgcstcagccctccaaagtgctgggattacaggtgtgagccaccgcgcccagctactttgcaatatcttattgaaacaacctctttctgtaatatctggatcc

SEQ ID NO: 56844 - DNA, 580 bp, Homo sapiens
caggcaggggatcaagaggcacaaatagggctgagggacaggcagatttggatttgagtcccagttctgcttattggctgtgtgaccttggagaagtgacttcacctctctgagcttcagtttccttatctggaaatcaagactcgtcatgtatgactctcgaggtatatgaggatttaattacatcatgcaggtgcactgccgggcatgggacctgtgcttgctgttattattactattgtttttacctgcaagcacagatttcacaggcgagtccttgctcacagagagtgggaagcttcaggcccttcagacacagtttttaaaccttagcactattgagatgtgaggtccaataattctttgttgtgggctctcctgtgccctataggatgttcagcarcatcccagatctctattcattcgatgccagtagcagcacccctcacccgcagtcatgaccaccaaaaatatctccagatatttccaaatgactcccaagggtgaaaatcacccccagttggaaaccactgccttagagaaagtgagatgggtccactctgccctcagaggcagcctc

SEQ ID NO: 56845 - DNA, 1380 bp, Homo sapiens
gcatggggacagaatgttctctgttctccatgaggtcgagcccacattctagggtctgctcctttagcacccaactcctggcactggtatttctcttctggttcttcttggtgattataacctaaaagtaggctcattaaaggacaaagggaaggccttggagcctctggagaaccagaaaggcaggcctggggctttggcatcgaggaccaccgccaccacctcgctcccaacagatccagccaagatgccacggctgtgtgagcatctgctcgtggggacaggctgcaccgtaggccccaccaggatgggacctgggcagtccctgcttcttactccaagtctgattggcagagcccagatccttgacctacattaagctgcaggggccctgggaagccagcactgcactgtgagccactacagcgggaaggggcagcccgacactggccacagccacagttcccacgtgtggaaaaactgaggtggattgccggtgaggaaggctaacggtgcaagtgctcctgccctagatgcccagagccgggggcagacagtggcacccctgctccaccctgggcaagcaacactgacaatctctacattcttcccagatgacctcaggcaactgagatgaagctaagcagggaccagtgtgagcaaagccgctaaatgcatgaggacaaggaggactaactgagggccaatccagcaggcagcggacaggggttcagggacaactgcagtgacaggcacttcaggagggccctcgctgctatgttcacattacctgtcccagaaatgcccgggccagggggactgccggctggtcgaagaactccaaccccagtcgggtaaggtggccctttgggcttgagaaatagatgctgcggtatgggcccggagtggtgggcggtcccaagcagcgctccctggggcaaggtgcctgggctgcatcggacgagctgtgtggctgctctgcaggtgcctgggctgcgtcggacgagctgtgtggctgccctgctctagctggtcgctgcttcttttgccccatccgtcggcaaaactgtaatgggaaaaaaaataaataagcatccgaataggagacagctgtgtggtaaggtcaggctcaggaagtgcaaggactggatctgaccacctgctttggtttcttcatctgcaaagcgggggtgaccatcctgtgggttgttaygaggcacaaaacaccctgacacactcgaggcctcaggaaatgatcacgtctgacaatggacggctgctgctgggggcagggtggctgctctgccccacatatgtgcgagctgcacggcatgggggcccaggctgcatgacctggggagcagatgggggcctgagcct

SEQ ID NO: 56846 - DNA, 1282 bp, Homo sapiens
taatagtacagtgtgagccttgtgaatcacagggaaaaggtaactgaaaatacagcagggcttgacttgtgcaacttgactcygaagaaaccagccaatattggaactgtgggtctcaggtttaaccttattctgagtcaaacatttgagaacctgatgagggctatgggacccatatgacctaaaaaatgaccatatgaacaaaaagatataaagacaacatcttgcaaattatttcaggggcagtttagagactccctgaagccagcggaccccatgttaagaactttgacatcagaggagatcccgtggggataacgctataactgcctgcggtacaggatggattacatcaagcccttgggctgtttcttgaacacagttgttggaacacaactacgccagttcatttctgtattgcctctgcttgcttttgagctctaaatgcagagctgagtagttatagcagagaccttccgacctgcaaagcctgacctgtttcctgcctggccctttacagaaaaggtttctgactcctggaacagtgtgcaagcggtgtgaccagagaggagacgccatgcgtgtgcaggtccagtgggttttctacacgtacattctgcctttggcaaacgagtgaaagagagggagagaggaagaaaagaaagagaagtctttatgcattttaaactgcttttccttttccaggctaaagccaaataaacataaaccaatgaaacccagaaaagcctggtgccaaatagtgacatggtcatttaaaattttaagaccagacatttaaaattatataagtattttacgatgggtgtggtggctcacgcctgtaattctagcattttgggaggctgaggtaggaggttcttttgaacccaggagttccagaccagcctgggcaacatggtgagaccctgtctctacaaaaaatttaaaaaattagtggggtgtggtgacgcatgtctgtagtcccagctcctcggaagtttggggcagaaggattgattgagcccaggagattgaggctgcaacgagctgtgatcacacaactgcattgtagcctggacaacagagcaagaaactgatttaaaaaggaaatatatatatgtttatatatataatatatttatatataattataaacatatataattaattgaattaaaagactaagatctaagatctggccttttcccattatttctggcaaagaagtgtaaaattttaaattgtaatttaagttggcttgaaggaccaaagatcttggatc

SEQ ID NO: 56847 - DNA, 1282 bp, Homo sapiens
taatagtacagtgtgagccttgtgaatcacagggaaaaggtaactgaaaatacagcagggcttgacttgtgcaacttgactctgaagaaaccagccaatattggaactgtgggtctcaggtttaaccttattctgagtcaaacatttgagaacctgatgagggctatgggacccatatgacctaaaaaatgaccatatgaacaaaaagatataaagacaacatcttgcaaattatttcaggggcagtttagagactccctgaagccagcggaccccatgttaagaactttgacatcagaggagatcccgtggggataacgctataactgcctgcggtacaggatggattacatcaagcccttgggctgtttcttgaacacagttgttggaacacaactacgccagttcatttctgtattgcctctgcttgcttttgagctctaaatgcagagctgagtagttatagcagagaccttccgacctgcaaagcctgacctgtttcctgcctggccctttacagaaaaggtttctgactcctggaacagtgtgcaagcggtgtgaccagagaggagacgccatgcgtgtgcaggtccagtgggttttctacacgtacattctgcctttggcaaacgagtgaaagagagggagagaggaagaaaagaaagagaagtctttatgcattttaaactgcttttccttttccaggctaaagccaaataaacataaaccaatgaaacccagaaaagcctggtgccaaatagtgacatggtcatttaaaattttaagaccagacatttaaaattatataagtattttacgatgggtgtggtggctcacgcctgtaattctagcattttgggaggctgaggtaggaggttcttttgaacccaggagttccagaccagcctgggcaacatggtgagaccctgtctctacaaaaaatttaaaaaattagtggggtgtggtgacgcatgtctgtagtcccagctcctcggaagtttggggcagaaggattgattgagcccaggagattgaggctgcaacragctgtgatcacacaactgcattgtagcctggacaacagagcaagaaactgatttaaaaaggaaatatatatatgtttatatatataatatatttatatataattataaacatatataattaattgaattaaaagactaagatctaagatctggccttttcccattatttctggcaaagaagtgtaaaattttaaattgtaatttaagttggcttgaaggaccaaagatcttggatc

SEQ ID NO: 56848 - DNA, 622 bp, Homo sapiens
tgcctcctgaccactctgctgcaggcctcagcacaacctgaccccccaggacctctgctggccccaggtgggaagagctccacggggctgaggggccctcacagagagcccaggtagcagtggcagggatagggtgccttagtaggcagccagcaagaaaggacacatgcagacacattctagtggcccctcagcaagccctgggttgactgggagggactgtaagaggaagasttgagttcccatggatgcagggggccaagaggaatcggaatttgtacttcaatgtgatatacgaccttgtttgtatccataggcaaaagaggcctaggattgtccttcactctgaccatggatattttacatcttgaaccaaaatagccatcccccaacccccagaggactggccagtccccggaggactggccctgctcacagtgtttctcacatagagcatgagacctgttggctcagactggattaaaaacagtttctctgtatgacaacccgagatgtcattaccactcaggcagcagaacaagaaggtgaggagagaaatgatttcaagtggctcagacaagagaaccgttgcattggatttagacatgcggttgaaactaga

SEQ ID NO: 56849 - DNA, 724 bp, Homo sapiens
ggtcctttaagtggacagaccccccaagagagttcaagcccaaaaatacccaatgtgttgagttctgctgaatcatgacagcctgctgcatgcagccagggtttgaaaactatggggagagggggacatgcaaataggaacatgccaatcaggtagcctgtgggcccacctgcacccggagctagcgctctcactcaccctgttgtcttcaggagtaggaggaagaggcttctttgaagctgaaaagagaaaaacaggaaaagaaaaaatgagcatgaaaactaatggacccaaccggaagtgagcagccagggggtttttctgagaaaaagggcccagggaaaacaacagaagaaagggggccagaaggagcaataagacacagtgaaacctgacttggccttgtcagaagctgtcttttatctccttgggcctgctggtttctgattcccttttctagtacacacyagaagcttccagaagtccatattcgggggccctctctttctgtattcccaggaaaagcctgccagtggggttagacttgcacccttccctgtaggcatagagacttccgggaatgtctctgccacctgctaagctcaggagtgggaattggtgactcagggggacagtgactcactagcttcctgatatggttgtgggcttgaggagggggtggctgaggtgggaggtcattgtgctgctttttgagtgggctggg

SEQ ID NO: 56850 - DNA, 724 bp, Homo sapiens
ggtcctttaagtggacagaccccccaagagagttcaagcccaaaaatacccaatgtgttgagttctgctgaatcatgacagcctgctgcatgcagccagggtttgaaaactatggggagagggggacatgcaaataggaacatgccaatcaggtagcctgtgggcccacctgcacccggagctagcgctctcactcaccctgttgtcttcaggagtaggaggaagaggcttctttgaagctgaaaagagaaaaacaggaaaagaaaaaatgagcatgaaaactaatggacccaaccggaagtgagcagccagggggtttttctgagaaaaagggcccagggaaaacaacagaagaaagggggccagaaggagcaataagacacagtgaaacctgacttggccttgtcagaagctgtcttttatctccttgggcctgctggtttctgattcccttttctagtacacaccagaagcttccagaagtccatattcgggggccctctctttctgtattcccaggaaaagcctgccagtggggttagacttgcacccttccctgtaggcatagagacttccgggaawgtctctgccacctgctaagctcaggagtgggaattggtgactcagggggacagtgactcactagcttcctgatatggttgtgggcttgaggagggggtggctgaggtgggaggtcattgtgctgctttttgagtgggctggg

SEQ ID NO: 56851 - DNA, 641 bp, Homo sapiens
actaaaaatacaaaattagccaggtgtggtggcgcatgcctgtaatcccagctactcaggaggctaaggcaacagaatcacttgaacccaggaggcggaggttgcagtgagctgagatcaagccattgtactccagcctggacaacaaaagcgaaactccgtctcaaaaaaaaaaaaaaaaaaaattagctgggcatggtggcgcatgcctgtaatcccagcaacttggsaggctgaggcaggagaatcacttgaatctggggggcgaagtttgcagtgagccgagatcgcgccattgcactccagcctgggcgacaagagggaaacttcgtctcaaaaaaaaaaaaaaaaaaagactgccttaaaggctgctttgcctatggagtagccattcttttattcctttactttcttaatgaagttgcttttatttaaaaagactgcattaagatgtcaacacatgaataaacagttataaattgaattgggcaggaataagcctgtcaagtatttttctttctaaaataattttttatttttatatattttttgagacagagtctggctctgttgcccaggctggagtgcagtgacacaatcatggctcactgcagccttaacctcctgggctcaagggatcc

SEQ ID NO: 56852 - DNA, 641 bp, Homo sapiens
actaaaaatacaaaattagccaggtgtggtggcgcatgcctgtaatcccagctactcaggaggctaaggcaacagaatcacttgaacccaggaggcggaggttgcagtgagctgagatcaagccattgtactccagcctggacaacaaaagcgaaactccgtctcaaaaaaaaaaaaaaaaaaaattagctgggcatggtggcgcatgcctgtaatcccagcaacttgggaggctgaggcaggagaatcmcttgaatctggggggcgaagtttgcagtgagccgagatcgcgccattgcactccagcctgggcgacaagagggaaacttcgtctcaaaaaaaaaaaaaaaaaaagactgccttaaaggctgctttgcctatggagtagccattcttttattcctttactttcttaatgaagttgcttttatttaaaaagactgcattaagatgtcaacacatgaataaacagttataaattgaattgggcaggaataagcctgtcaagtatttttctttctaaaataattttttatttttatatattttttgagacagagtctggctctgttgcccaggctggagtgcagtgacacaatcatggctcactgcagccttaacctcctgggctcaagggatcc

SEQ ID NO: 56853 - DNA, 641 bp, Homo sapiens
actaaaaatacaaaattagccaggtgtggtggcgcatgcctgtaatcccagctactcaggaggctaaggcaacagaatcacttgaacccaggaggcggaggttgcagtgagctgagatcaagccattgtactccagcctggacaacaaaagcgaaactccgtctcaaaaaaaaaaaaaaaaaaaattagctgggcatggtggcgcatgcctgtaatcccagcaacttgggaggctgaggcaggagaatcacttgaatctggggggcgaagtytgcagtgagccgagatcgcgccattgcactccagcctgggcgacaagagggaaacttcgtctcaaaaaaaaaaaaaaaaaaagactgccttaaaggctgctttgcctatggagtagccattcttttattcctttactttcttaatgaagttgcttttatttaaaaagactgcattaagatgtcaacacatgaataaacagttataaattgaattgggcaggaataagcctgtcaagtatttttctttctaaaataattttttatttttatatattttttgagacagagtctggctctgttgcccaggctggagtgcagtgacacaatcatggctcactgcagccttaacctcctgggctcaagggatcc

SEQ ID NO: 56854 - DNA, 483 bp, Homo sapiens
aggtgctgctgaccctgctggagcccaggaggccgaggtgagggatacgggccacagaccatgcatgctgcccatccccaggggctctccggcccctcagaggcgggtctcggtgtccaccaagagaaatccccgccygtggcaccttgctctgtggctgcctgtgctccctgcacagtggacagtacggggccgagggaggaatcttcttgtctgctttgacaagtgagggcactgaggctgaggccactgctgcagcttgtgttgggagggaccccaggcccccgtgcccctgccttaccacacaggccgctagcctgttgggtttgccttcccgcctccacccctcacccgtgctctcacagtggactgccaatgctgccgcctggcgggctccccaccccagccaggtgttgtctgaagggcctcagaagagagcggcgctgggggcatgtggctcctcgttttcctccagaccctgca

SEQ ID NO: 56855 - DNA, 701 bp, Homo sapiens
cgcccatccaaaaccctgttgtgaaacatgtgagctgggactccctggtccccctccttctgggcccatcccctgtgggcgcaccctctccagaggcctacccctcactccttcctcccacaagtgtttgttgggtagtgttaggtgccagcgcccagatggggtgtgggaggcatggccagggagaaacgcggatgaaacatgcaggtgcagggagcagtgggctcctgacttgagctgaagagctaggggtgggcgggagcagacctgcgagcagctgagtgtgcatgagtgcrcacacgtgcgtgtgtgagcatgtgtcagtgcaagcgtgtgtgagagcatgtatgtgtgtgagtgcacacgagtatgtgaacatgtatgtgtgagcatgtgtgtgtccgttagtgcatgcatgtgtgtgtgtgtgtgtgtgtgtgtgtgtgtgtgtgtgtgtgtatgcaccacatattcttttgtagaaagaccagagagacttgggtggatgccagggtcccaagccccagcttgcatccctccttcccatccccgtctctggatgagcgggggcctggtgaagcatctgctgaggaagggacccctgctgcagtgcagagctccccacatgtgtgcagaccacccctccaggccatcctgtcccgctctcccgcagctgctgcagcagtgccgcctggtggagc

SEQ ID NO: 56856 - DNA, 648 bp, Homo sapiens
gtggaggttgactttgaatagaacgggaggcaggttcgccctgtgcagtttccagtttgacttttaacttttagcgcagtgattttgggggcccaagatattttcctttcacaccaccttgggcacatgtcrtcaggacctccagaggctgtgtcacgggcatgtgtcctcaaccttagcaaaataaactttctaaattaactgagacctgtctcaaatattcagggttcacaattccacaaacattcattgcaacattactgcattattaaatgcaaataattaaattaggatttccaccttaacagctatccagttgaggggttgatgttctctcagtggaatacatcaatatttaaaaaaaaaacacaaaccccagaaacctaaccctccagtatatgggcttctcaaaagcctttaaagcatagcttattccagagctagatcctgagacaggcagaaagtcaaagtaaatgtgaaggacaagaagtttccagaagggccactactatggcttacccccctaaccactgctttgtttacaccattgcttgagcccagcagttcaaggctgcagtgagccacgaagccatgatcacactagtgagtagctactacaccccaccctgaggaacatagtgagacctc

SEQ ID NO: 56857 - DNA, 531 bp, Homo sapiens
actatctggagttcattttgcacatgttgctatagattgaaaaagtcaagtgtaacttaagaagcaattttaacaacttcatgtaaatataaattcataawacaaaacaagaacttcaggcaaccttattagagctctatagataaaagaaatgtttatgagacatataagaatgcctaagaaatctgaacaaagaaagtatctgaaggagattttggcccagtttttcaagtatggaagtcttgcctcttagccataaatcaattttcgtttataccaaatgcctgtaaactagttcttgtatagtacacctaattatgtcacatcagggatttccatgtttctttgacttagaatacgtagtaaacagatagaacagatcaatcacctaaactaatcaaaactctgcaatatctccctactctactgaaataaggctaataccttttagtatgactcccgaagcacagcaaactcgtacaatgaatttgaacacatccctccagcaacctttactctagtcatgatttt

SEQ ID NO: 56858 - DNA, 586 bp, Homo sapiens
aggttgtggtgagccgagatggcaccattgcactccagcctgggcaacaagagcgaaactcagtctcaaaaaaagaaaaaaaaggatttaatgaatgaatgatgagactgttggttacatctacccaccttctccctctcactgccactgcagccacacggggctcctcactgttcccgtagcagcaggcatgtgcccccacagggcctctgtactggctgttcccactgcccgaacaccctcatgcaccatctgcactgtccaatacggccgcctctggccacacatggctactgagcagttgaacatggctggtccaaaccaagatttccaagacgtcgtatggtaaaaaataacataaaatcttgcaaaaatgtttctattgattatgttaaaattatgatgttttaggtatattaggttaaatcagctattttatcaaaatgaatctcacctgtttgtttttgctttttttttttktttttttttttttttgagatggagtctcgctctgtcgcccaggcgagagtacaatggcgtggtctcggctcactgcatcactgcaacctctacctcccaggttcaa

SEQ ID NO: 56859 - DNA, 586 bp, Homo sapiens
aggttgtggtgagccgagatggcaccattgcactccagcctgggcaacaagagcgaaactcagtctcaaaaaaagaaaaaaaaggatttaatgaatgaatgatgagactgttggttacatctacccaccttctccctctcactgccactgcagccacacggggctcctcactgttcccgtagcagcaggcatgtgcccccacagggcctctgtactggctgttcccactgcccgaacaccctcatgcaccatctgcactgtccaatacggccgcctctggccacacatggctactgagcagttgaacatggctggtccaaaccaagatttccaagacgtcgtatggtaaaaaataacataaaatcttgcaaaaatgtttctattgattatgttaaaattatgatgttttaggtatattaggttaaatcagctattttatcaaaatgaatctcacctgtttgtttttgctttttttttttttttktttttttttttgagatggagtctcgctctgtcgcccaggcgagagtacaatggcgtggtctcggctcactgcatcactgcaacctctacctcccaggttcaa

SEQ ID NO: 56860 - DNA, 586 bp, Homo sapiens
aggttgtggtgagccgagatggcaccattgcactccagcctgggcaacaagagcgaaactcagtctcaaaaaaagaaaaaaaaggatttaatgaatgaatgatgagactgttggttacatctacccaccttctccctctcactgccactgcagccacacggggctcctcactgttcccgtagcagcaggcatgtgcccccacagggcctctgtactggctgttcccactgcccgaacaccctcatgcaccatctgcactgtccaatacggccgcctctggccacacatggctactgagcagttgaacatggctggtccaaaccaagatttccaagacgtcgtatggtaaaaaataacataaaatcttgcaaaaatgtttctattgattatgttaaaattatgatgttttaggtatattaggttaaatcagctattttatcaaaatgaatctcacctgtttgtttttgctttttttttttttttttttktttttttgagatggagtctcgctctgtcgcccaggcgagagtacaatggcgtggtctcggctcactgcatcactgcaacctctacctcccaggttcaa

SEQ ID NO: 56861 - DNA, 738 bp, Homo sapiens
ggtgcgcaccactatgcccagctaatttttgtatttttagtagagacggggtttcaccatgttggccagcctggtctcaaactcctggccttaagtgatctgccctcctcagcctccaaaactgctggaattacaggtgtgagccactgcacgcagcatgttttaaaactccactgtgtcagtctgcacattgccataaagaactatctgagaccaggtaatttatgaagaaaaggggtttaattgactcatagttatgcaggctgtacaggaagcatggctggagaggcctcgggaaaattacaatcatggcagaaggcaaaggggaagcaggcacatcttcacacggtggagcaacagaaagagaaagagagagaaaaggaggaagtgctacatattttcaaacaaccagatatcctgagaactctatcacgagacagcactagggcgatggtgctaaaccattagaaaccacccccacgatctaatmacctcccaccaggcccacctgcaacactgaggatcacaattcaacatgagatttgggtggggacacagccaaaccatatcagccatcaatcaccttgagaggatatcactggaaagtaagcagcaaaactcaaatgggaaactatatgatgaacaatccagtttattcaacaaaacatatagcaaaggaaaaacaaaagtaggtgtgatgtagattaaaagatctttaggacacgtattaaataatga

SEQ ID NO: 56862 - DNA, 738 bp, Homo sapiens
ggtgcgcaccactatgcccagctaatttttgtatttttagtagagacggggtttcaccatgttggccagcctggtctcaaactcctggccttaagtgatctgccctcctcagcctccaaaactgctggaattacaggtgtgagccactgcacgcagcatgttttaaaactccactgtgtcagtctgcacattgccataaagaactatctgagaccaggtaatttatgaagaaaaggggtttaattgactcatagttatgcaggctgtacaggaagcatggctggagaggcctcgggaaaattacaatcatggcagaaggcaaaggggaagcaggcacatcttcacacggtggagcaacagaaagagaaagagagagaaaaggaggaagtgctacatattttcaaacaaccagatatcctgagaactctatcacgagacagcactagggcgatggtgctaaaccattagaaaccacccccacgatctaatcacctcccaccaggcccacctgcaacactgrggatcacaattcaacatgagatttgggtggggacacagccaaaccatatcagccatcaatcaccttgagaggatatcactggaaagtaagcagcaaaactcaaatgggaaactatatgatgaacaatccagtttattcaacaaaacatatagcaaaggaaaaacaaaagtaggtgtgatgtagattaaaagatctttaggacacgtattaaataatga

SEQ ID NO: 56863 - DNA, 1580 bp, Homo sapiens
tacaattactcaccaccatggaaagccatggtgtctggctacccataccagattcctttttctgtcttcatttctgtaagatttgtgttcctcattcctttcttcatctttgtctattcatttgggatcattttctttctgtttgaaaaaatcatttttagaattttattttggttctcctaatagtgagtctttttaaatttttgtttgtttgaaaatctttcttcaagctatttctactgactatatgatcctgtattgacaacaattttcttacagctcactgaaactattgttcaaccatcatagctttcattgttttggttgacacatcggctgtatattgaactatagatcctatgaaggtaactttttcctagctgattttgagatttttatctccattttcagttttctgcggcttcactataatgtgttcagctgtggatttctttttacctatcctccctggaatttgttggtttcctgaatctggatattggagtcttacttttgttttgaaaactcccagccattatctactcaaatagtgtacatgcattattttcttactggttttctgttcattcttttgtttctgatacctgttgattactactgccttttttgaggtcgactatgtacttatcattttaaagtttttgttgttgttgtttgtttgtttgttttttaaaaaggcagagtcttactcggtcacccaggctggagtgcagtggtacaatctcggctcgctgtcacctctgcctccgggattcaagcaattctccacctcagcctcccaagtagctgagattacaggcgcccgccaccacgcccggttaatttttgtatttctagtagagatggggtttcaccatcttggccaggctgatctttaactcctgacctcrtgatccacccgcctcggcctcccaaagtgctgggattacaggcgtgagccaccgcgcctggcttaaagttttttttatatagaatttctaagtgcttgtaacaggaggttttcaactttgacttagtttgcaatctttctagaattggaccccattcacttaccgctcattaccgttgaacttcagctctcacaatatacaaaatgagctcccaatttcccactctgatagctctttttcaaatgttatcagacacggccatactgcaggatttaacacggtaattattctttttttttgaaattttctcctctcatgaagtcagagaaaccactcttacataattcttgtatctcacttttctttttcttccttttttttgggggggtgttggggggctatctccctctcttacctacgtaatgttgacactcttttcattttacctacacttatctgtctttaattttgacatttatactgagatcttccaatcagtatcttcaatccagacccctgccctaagtatgtctaactgcctcctggtcatctccccttgaatgtctcataagatgttcaaactcaaaatgtccaaaggtgatccttaattattcatgatccctatatcaaacctcctgctcttttgcccttgccagcctcttcagttat

SEQ ID NO: 56864 - DNA, 1580 bp, Homo sapiens
tacaattactcaccaccatggaaagccatggtgtctggctacccataccagattcctttttctgtcttcatttctgtaagatttgtgttcctcattcctttcttcatctttgtctattcatttgggatcattttctttctgtttgaaaaaatcatttttagaattttattttggttctcctaatagtgagtctttttaaatttttgtttgtttgaaaatctttcttcaagctatttctactgactatatgatcctgtattgacaacaattttcttacagctcactgaaactattgttcaaccatcatagctttcattgttttggttgacacatcggctgtatattgaactatagatcctatgaaggtaactttttcctagctgattttgagatttttatctccattttcagttttctgcggcttcactataatgtgttcagctgtggatttctttttacctatcctccctggaatttgttggtttcctgaatctggatattggagtcttacttttgttttgaaaactcccagccattatctactcaaatagtgtacatgcattattttcttactggttttctgttcattcttttgtttctgatacctgttgattactactgccttttttgaggtcgactatgtacttatcattttaaagtttttgttgttgttgtttgtttgtttgttttttaaaaaggcagagtcttactcggtcacccaggctggagtgcagtggtacaatctcggctcgctgtcacctctgcctccgggattcaagcaattctccacctcagcctcccaagtagctgagattacaggcgcccgccaccacgcccggttaatttttgtatttctagtagagatggggtttcaccatcttggccaggctgatctttaactcctgacctcatgatccacccgcctcggcctcccaaagtgctgggattacaggcgtgagccaccgcgcctggcttaaagttttttttatatagaatttctaagtgcttgtaacaggaggttttcaactttgacttrgtttgcaatctttctagaattggaccccattcacttaccgctcattaccgttgaacttcagctctcacaatatacaaaatgagctcccaatttcccactctgatagctctttttcaaatgttatcagacacggccatactgcaggatttaacacggtaattattctttttttttgaaattttctcctctcatgaagtcagagaaaccactcttacataattcttgtatctcacttttctttttcttccttttttttgggggggtgttggggggctatctccctctcttacctacgtaatgttgacactcttttcattttacctacacttatctgtctttaattttgacatttatactgagatcttccaatcagtatcttcaatccagacccctgccctaagtatgtctaactgcctcctggtcatctccccttgaatgtctcataagatgttcaaactcaaaatgtccaaaggtgatccttaattattcatgatccctatatcaaacctcctgctcttttgcccttgccagcctcttcagttat

SEQ ID NO: 56865 - DNA, 1492 bp, Homo sapiens
attcacctgggatacctgctaaagatacaaattcccaaatccatccgtttctctgaatcaagtcttaggggaagaggcctagaaagtaggtgaatgatatcatctgggagttgggaaacaccgcccacagttcctcaaatgttacctgaaaaccttgcttttcytcagttacctgaaaaccttgtttttaagaagtaaagattgccaggcagatccaccctaactcaaagaattttgagaaccctggagtgagacttggaattttcacttctacctagcactcaaagaattttaatttgagaaccctggagtgagacctggaattttcacttcgacctagcaccctcggttgacccccaagtctgctactccataagaaatgctgctccaaacctctggaatggcaccagagaatggaggatgattcctaagtactgccagctcacacctcctatgcctgaaccagacacttgcttgaacttccttgtggctattaaaaagggttgactaattatacaaagggacagccctgagccatttcaagcctggggagtgaaagctgtaaagtaaggtaggtggcctgaggtgctgagacaagcctgggcaggcaagccagtgtccagagaagttgcattcctagggctgctttccggggctccaccccctttaagctgtgaaacaactcatatgcgccgctgcccccaaggaagtgctccttcaccctggtgctgtagacgtgtacaagggtctggccactagtgacagacctggcgaatctccctttggcatccattctcggggctcctgccgccatcttggatcccatccccacggggtctgcagactcatcactaaggacagaacctctctgggcacatgatgtagtctcctctcgagtatatttctgtctccaagcaaggagccattaattatggaaaatgtgaggaaggggggcattttcttccttccctaaagttcctgtcagcatgcaaacaagaatttctgtcctctccaatgtactgaagcaaaagctgctacttcccagccacctctcattggtttctccctaagtgataacagggggtcagtctagcagtgtaggaaggttgttcttgctgggtctctgccctcagctgcaggaatttatccaagggacagcttgtgcccccctgttactgtgtactctggagatcctgtggcttgtccctttggcaatatgaatgttaaggtatggattcagaaatacagtaaagaaaagcttgcttcaaagtataagaggacctggggattcactatttgtctttaaaagatgaaggggtaaacttatttctacccttccatcacccatctgttttaatctctcttttgaaaccactatcatataagagtgcgggacgaacacagagcatgagtccctgagcatggggtgctgacgggcagactgactggctaaccaactacagagactcccaattgaatccacagcccatct

SEQ ID NO: 56866 - DNA, 567 bp, Homo sapiens
ccttacactagcttttcctccttccttgcctcactgtcaccatccctcactcctgcttcctaagaacatttcctcagtaaagaggcatcccgaaagactactcaagtccttgtctcaggctccgcctcagggagaacgcacactgagacagcctggctcatgaactgaatctgtcaacttggaattccatcacagagctttgcctgcatcatgtaccaggggagtgaacagaggatgaaagagagaagaaagggcagtctcagctcrctgtgccagagtgcttagctcagcgtataacagggactccataaatatggaatgaatgaacaaatgaatgaaagaattgaacatagcaagttcatcttcaacaatgataaatgtaacaataactaccaataactactctgtatgcaccttcttatgtaaaatgtacaaccattgtacagcttaggtttcagaatcagagctgggttggaatccaagctccttgacttggattaactttcagcgtttttacttaacctcactaggccttaattccctcatgaacaaaatacgtgtaataat

SEQ ID NO: 56867 - DNA, 1183 bp, Homo sapiens
taatacatttgaatgctaatagcgtgtcaggtatggcgacaagccctgggaatacagtggtgatgaaactctgtccttgtggaatttataaacacatttgacaacatagatattgatgacttccgaacggcacaaaaagaaaaacaaattaaagacaaaaacagaaagtcacaataaaaataaragacagcaaatggagaagaaaaatgtgcagtgcacaatctaaagggtctaattttcataccatatacggagttcttataaatcaataagaaaaagacaaatagcccattgaaacatgtaggcaaagaaaaagaatagacagtctacaaaaaaataaaaatagccaattaacaaaagcattttccaactgcaatgataatttgacaaatacaaactataaaaagccagattattaatatttattgctggtgtgagtagaaacttgaaaaaacttcttggggagtaatttttttttttttttttgagatggagtcttgctctttcgcccaggctagagtgcagtggcatgatcttggctcaccacaacctccgcctcccaatttcaaacaattctcctgcctcagcctcccaagtagctgggattaccagtgcccaccatcacgcccagctaatttttgtatttttagtagagatggggtttcaccatgttggcctggctggtctcgaacttctgacctcttgaaccacccacctcggcctcccaaagtgctgggattacaggcgtaagccaccgcacccggctcttgggaagtaatttagaaatgtctatcaaaatgtgcacaggtagatttggtgaactgttaaccccgtggcccgcctgaggggtgtgctgtcccttctccgcctcggtatagtcacagactgcgagcatgtgacctacagttccccaagaaaatgtctttttctgagactttagatcttaaccgttaggatagaagaaagagttggagtttactcatcgctcagtgacccttggcccaagctggccctgctatgaagggcattcctttgctttgtgattctgggcccccactgctgcagtggttcttgcccatcttcacggctgattctccacatttttttagcatctgtgagtcccaactgtccttccagtatgttcctttttgcttacgttagcaagaaggtgtatcgttggatt

SEQ ID NO: 56868 - DNA, 1183 bp, Homo sapiens
taatacatttgaatgctaatagcgtgtcaggtatggcgacaagccctgggaatacagtggtgatgaaactctgtccttgtggaatttataaacacatttgacaacatagatattgatgacttccgaacggcacaaaaagaaaaacaaattaaagacaaaaacagaaagtcacaataaaaataagagacagcaaatggagaagaaaaatgtgcagtgcacaatctaaagggtctaattttcataccatatacggagttcttataaatcaataagaaaaagacaaatagcccattgaaacatgtaggcaaagaaaaagaatagacagtctacaaaaaaataaaaatagccaattaacaaaagcattttccaactgcaatgataatttgacaamtacaaactataaaaagccagattattaatatttattgctggtgtgagtagaaacttgaaaaaacttcttggggagtaatttttttttttttttttgagatggagtcttgctctttcgcccaggctagagtgcagtggcatgatcttggctcaccacaacctccgcctcccaatttcaaacaattctcctgcctcagcctcccaagtagctgggattaccagtgcccaccatcacgcccagctaatttttgtatttttagtagagatggggtttcaccatgttggcctggctggtctcgaacttctgacctcttgaaccacccacctcggcctcccaaagtgctgggattacaggcgtaagccaccgcacccggctcttgggaagtaatttagaaatgtctatcaaaatgtgcacaggtagatttggtgaactgttaaccccgtggcccgcctgaggggtgtgctgtcccttctccgcctcggtatagtcacagactgcgagcatgtgacctacagttccccaagaaaatgtctttttctgagactttagatcttaaccgttaggatagaagaaagagttggagtttactcatcgctcagtgacccttggcccaagctggccctgctatgaagggcattcctttgctttgtgattctgggcccccactgctgcagtggttcttgcccatcttcacggctgattctccacatttttttagcatctgtgagtcccaactgtccttccagtatgttcctttttgcttacgttagcaagaaggtgtatcgttggatt

SEQ ID NO: 56869 - DNA, 1183 bp, Homo sapiens
taatacatttgaatgctaatagcgtgtcaggtatggcgacaagccctgggaatacagtggtgatgaaactctgtccttgtggaatttataaacacatttgacaacatagatattgatgacttccgaacggcacaaaaagaaaaacaaattaaagacaaaaacagaaagtcacaataaaaataagagacagcaaatggagaagaaaaatgtgcagtgcacaatctaaagggtctaattttcataccatatacggagttcttataaatcaataagaaaaagacaaatagcccattgaaacatgtaggcaaagaaaaagaatagacagtctacaaaaaaataaaaatagccaattaacaaaagcattttccaactgcaatgataatttgacaaatacaaactataaaaagccagattattaatatttattgctggtgtgagtagaaacttgaaaaaacttcttggggagtaatttttttttttttttttgagatggagtcttgctctttcgcccaggctagagtgcagtggcatgatcttggctcaccacaacctccgcctcccaatttcaaacaattctcctgcctcagcctcccaagtagctgggattaccagtgcccaccatcacgcccagctaatttttgtatttttagtagagatggggtttcaccatgttggcctggctggtctcgaacttctgacctcttgaaccacccacctcggcctcccaaagtgctgggattacaggcgtaagccaccgcacccggctcttgggaagtaatttagaaatgtctatcaaaatgtgcacaggtagatttggtgaactgttaaccccgtggcccgcctgaggggtgtgctgtcccttctccgcctcggtatagtmacagactgcgagcatgtgacctacagttccccaagaaaatgtctttttctgagactttagatcttaaccgttaggatagaagaaagagttggagtttactcatcgctcagtgacccttggcccaagctggccctgctatgaagggcattcctttgctttgtgattctgggcccccactgctgcagtggttcttgcccatcttcacggctgattctccacatttttttagcatctgtgagtcccaactgtccttccagtatgttcctttttgcttacgttagcaagaaggtgtatcgttggatt

SEQ ID NO: 56870 - DNA, 1183 bp, Homo sapiens
taatacatttgaatgctaatagcgtgtcaggtatggcgacaagccctgggaatacagtggtgatgaaactctgtccttgtggaatttataaacacatttgacaacatagatattgatgacttccgaacggcacaaaaagaaaaacaaattaaagacaaaaacagaaagtcacaataaaaataagagacagcaaatggagaagaaaaatgtgcagtgcacaatctaaagggtctaattttcataccatatacggagttcttataaatcaataagaaaaagacaaatagcccattgaaacatgtaggcaaagaaaaagaatagacagtctacaaaaaaataaaaatagccaattaacaaaagcattttccaactgcaatgataatttgacaaatacaaactataaaaagccagattattaatatttattgctggtgtgagtagaaacttgaaaaaacttcttggggagtaatttttttttttttttttgagatggagtcttgctctttcgcccaggctagagtgcagtggcatgatcttggctcaccacaacctccgcctcccaatttcaaacaattctcctgcctcagcctcccaagtagctgggattaccagtgcccaccatcacgcccagctaatttttgtatttttagtagagatggggtttcaccatgttggcctggctggtctcgaacttctgacctcttgaaccacccacctcggcctcccaaagtgctgggattacaggcgtaagccaccgcacccggctcttgggaagtaatttagaaatgtctatcaaaatgtgcacaggtagatttggtgaactgttaaccccgtggcccgcctgaggggtgtgctgtcccttctccgcctcggtatagtcacagactgcgagcatgtgacctacagttccccaagaaaatgtctttttctgagrctttagatcttaaccgttaggatagaagaaagagttggagtttactcatcgctcagtgacccttggcccaagctggccctgctatgaagggcattcctttgctttgtgattctgggcccccactgctgcagtggttcttgcccatcttcacggctgattctccacatttttttagcatctgtgagtcccaactgtccttccagtatgttcctttttgcttacgttagcaagaaggtgtatcgttggatt

SEQ ID NO: 56871 - DNA, 1183 bp, Homo sapiens
taatacatttgaatgctaatagcgtgtcaggtatggcgacaagccctgggaatacagtggtgatgaaactctgtccttgtggaatttataaacacatttgacaacatagatattgatgacttccgaacggcacaaaaagaaaaacaaattaaagacaaaaacagaaagtcacaataaaaataagagacagcaaatggagaagaaaaatgtgcagtgcacaatctaaagggtctaattttcataccatatacggagttcttataaatcaataagaaaaagacaaatagcccattgaaacatgtaggcaaagaaaaagaatagacagtctacaaaaaaataaaaatagccaattaacaaaagcattttccaactgcaatgataatttgacaaatacaaactataaaaagccagattattaatatttattgctggtgtgagtagaaacttgaaaaaacttcttggggagtaatttttttttttttttttgagatggagtcttgctctttcgcccaggctagagtgcagtggcatgatcttggctcaccacaacctccgcctcccaatttcaaacaattctcctgcctcagcctcccaagtagctgggattaccagtgcccaccatcacgcccagctaatttttgtatttttagtagagatggggtttcaccatgttggcctggctggtctcgaacttctgacctcttgaaccacccacctcggcctcccaaagtgctgggattacaggcgtaagccaccgcacccggctcttgggaagtaatttagaaatgtctatcaaaatgtgcacaggtagatttggtgaactgttaaccccgtggcccgcctgaggggtgtgctgtcccttctccgcctcggtatagtcacagactgcgagcatgtgacctacagttccccaagaaaatgtctttttctgagactttagatcttaaccgttaggatagaagaaagagttggagtttactcatcgctcagtgacccttggcccaagctggccctgctatgaagggcattcctttgctttgtgattctgggcccccactgctgcagtggttcttgcccatcttcayggctgattctccacatttttttagcatctgtgagtcccaactgtccttccagtatgttcctttttgcttacgttagcaagaaggtgtatcgttggatt

SEQ ID NO: 56872 - DNA, 1183 bp, Homo sapiens
taatacatttgaatgctaatagcgtgtcaggtatggcgacaagccctgggaatacagtggtgatgaaactctgtccttgtggaatttataaacacatttgacaacatagatattgatgacttccgaacggcacaaaaagaaaaacaaattaaagacaaaaacagaaagtcacaataaaaataagagacagcaaatggagaagaaaaatgtgcagtgcacaatctaaagggtctaattttcataccatatacggagttcttataaatcaataagaaaaagacaaatagcccattgaaacatgtaggcaaagaaaaagaatagacagtctacaaaaaaataaaaatagccaattaacaaaagcattttccaactgcaatgataatttgacaaatacaaactataaaaagccagattattaatatttattgctggtgtgagtagaaacttgaaaaaacttcttggggagtaatttttttttttttttttgagatggagtcttgctctttcgcccaggctagagtgcagtggcatgatcttggctcaccacaacctccgcctcccaatttcaaacaattctcctgcctcagcctcccaagtagctgggattaccagtgcccaccatcacgcccagctaatttttgtatttttagtagagatggggtttcaccatgttggcctggctggtctcgaacttctgacctcttgaaccacccacctcggcctcccaaagtgctgggattacaggcgtaagccaccgcacccggctcttgggaagtaatttagaaatgtctatcaaaatgtgcacaggtagatttggtgaactgttaaccccgtggcccgcctgaggggtgtgctgtcccttctccgcctcggtatagtcacagactgcgagcatgtgacctacagttccccaagaaaatgtctttttctgagactttagatcttaaccgttaggatagaagaaagagttggagtttactcatcgctcagtgacccttggcccaagctggccctgctatgaagggcattcctttgctttgtgattctgggcccccactgctgcagtggttcttgcccatcttcacggctgattctccacatttttttagcatctgtgagtcccaactgtccttccagtatgttcctttttgcttacgttagcaagaaggtgtatygttggatt

SEQ ID NO: 56873 - DNA, 2741 bp, Homo sapiens
cctttaactactttttgcaacaaatatttttacaagatgaaatttattttaaagtgtccctttttatgattcttctaaatatgtaatcaaatttagattctgcaaaataataggtcttctcaatttccatccattctagactgtaacataaacttataaaattaaaacgaaaatcttcatcaaaagatttttcccatatgttaacctatttcaccacttgagctctcatcgattattttttttgcttcttctcttgcttctatgtatttgaaagctttgtttttaataactacaatttgctatgcacttaaaaataagtttttagttgtttctgtcactgaataatttcattaaatattttcaactgattttgaacaagatgcaaccaaaatgaagagaactttcttcatcattatggttgatgtttaggttgatttcccaagtaattcttcaaaaagctcaaaccttttttttcttttttttttttaagttccgggatacttgtgcagaacgtgctggtttgttatacagatatacatgcgccatggtagtttgctgcacctaccaacccgtcaccctggttttaagccccacatgcattggctatttgtcctgatgttctctctcccttcaccccacccccaccccacagacctcagtgtgtgttgttccccttcctgtgtccatgtgttctcattgctcaactcccacttatgaatgagaagatgtggtgtttggttttctgttcctgtgttagtttgctgaggatgatggcttccagcttcatccatgtccctgcaaaggacatgatctctcattcctttttatggctgcatagtattccacagtgtatatgtaccacattttctttgtccagtctataattgatgggcatttgtgttagttccaaatctttgctactgtgaatagtgctgcagtaaacatatgtgtgcatgtatctttataatagaataatttatattcctttaggtatatacccagtaatgggattgctgggtcaaatgatattctagttctagatccttgaggaatcgccacactgtcttccacaatggttgaactaatttacattcccaccaacaatgtaaaascattcctatttctccacacccttgccagcatctgttgtttcttgactttttaataatcgccattctgagtgatgtgaggtggtatctcactgtggttttgatttgcatttctgtagtgatcagtgatgttgaaaaaagcccaaacatttttaaggtctgattgatgatgcatggcaaagagaaagtatatactgccatctgaagttttttgtttgttttttaacatcagctttatcataaaaaaatcagttactctatatacacataaaaatatgtgtaaaatttaaccactagcaattcctatttaaattggtaaaacaccaaaatctgcttggaggcaattaggaattgtgtgtgcaccactgtcaatccaagtacacttctgttttatagatatcatgattagaacatagtttttaccatggtgctatgctctgccaaaatttatattcatgtcaccacagacacaaataatttcattttcaatgttgaacttttccttgaattcatctcagtatgcataatggtgtcagatgttttgctttcaacaaacaaacttccaaaagcataacttgatttcatgaattgtcaggtgaaaagaaagttaagtcattaactggaatgagcttgatcaattttctatttgaaacatctgatgactttgatatacaattggaattatttaactgtttgcaaagttcttctattgttaatggagccaacagttcagcatggctttgcacatgcacaagaaatgttggtactgaaaatgattgaaattaacttagaagaacagacatttaatctaaatgaaaagtcacttcaaagaatgatgtagaaataaacctttccacagctgcacatattaaattgttttctctgaccacaatcctcttaagataacttccaactttgaagtaggtgctgttgctttttcggcagatgcgtgtcatctgctttttataggtttagtgatatcactaaaaccctttgatggatagtaaatgtcaacatttttgtgcaagttctatattcatcatcagctatcttgaaaaatgaacatttaagacctaatttttcattaaatatgctctttcgggttgttggttttgttttgtgtttgttatcatcattgttgttgattttccttttgttttttagctcattgctgctgaaagtactttttacaaaatttttaaatagagttacaaaatagtaatgaccaaaccattatagcaagaaagtttatattattttctgaatatgacacttgtatcactactattgagctttatatccaccacatatgtctcatatacccatcctgtaatttcctgtatttcctactgatagacaatcttgtggttgtgagtcttcccagccatggctgggtacatacagggcacaactgactggtagaccaagtggccagtagagacagcagcgtcaaagcgcagaaggggcgagctgtcgctattcactcaagtgtgagtctttccagctagctgcctgcatgctgttcttggaaggagaggttaatttcattgcatctgaaaagaggtggagaaaagaatatgagttatcattggtcctctttccaatttaaccacatgttagggtaaaaactct

SEQ ID NO: 56874 - DNA, 2741 bp, Homo sapiens
cctttaactactttttgcaacaaatatttttacaagatgaaatttattttaaagtgtccctttttatgattcttctaaatatgtaatcaaatttagattctgcaaaataataggtcttctcaatttccatccattctagactgtaacataaacttataaaattaaaacgaaaatcttcatcaaaagatttttcccatatgttaacctatttcaccacttgagctctcatcgattattttttttgcttcttctcttgcttctatgtatttgaaagctttgtttttaataactacaatttgctatgcacttaaaaataagtttttagttgtttctgtcactgaataatttcattaaatattttcaactgattttgaacaagatgcaaccaaaatgaagagaactttcttcatcattatggttgatgtttaggttgatttcccaagtaattcttcaaaaagctcaaaccttttttttcttttttttttttaagttccgggatacttgtgcagaacgtgctggtttgttatacagatatacatgcgccatggtagtttgctgcacctaccaacccgtcaccctggttttaagccccacatgcattggctatttgtcctgatgttctctctcccttcaccccacccccaccccacagacctcagtgtgtgttgttccccttcctgtgtccatgtgttctcattgctcaactcccacttatgaatgagaagatgtggtgtttggttttctgttcctgtgttagtttgctgaggatgatggcttccagcttcatccatgtccctgcaaaggacatgatctctcattcctttttatggctgcatagtattccacagtgtatatgtaccacattttctttgtccagtctataattgatgggcatttgtgttagttccaaatctttgctactgtgaatagtgctgcagtaaacatatgtgtgcatgtatctttataatagaataatttatattcctttaggtatatacccagtaatgggattgctgggtcaaatgatattctagttctagatccttgaggaatcgccacactgtcttccacaatggttgaactaatttacattcccaccaacaatgtaaaagcattcctatttctccacacccttgccagcatctgttgtttcttgactttttaataatcgccwttctgagtgatgtgaggtggtatctcactgtggttttgatttgcatttctgtagtgatcagtgatgttgaaaaaagcccaaacatttttaaggtctgattgatgatgcatggcaaagagaaagtatatactgccatctgaagttttttgtttgttttttaacatcagctttatcataaaaaaatcagttactctatatacacataaaaatatgtgtaaaatttaaccactagcaattcctatttaaattggtaaaacaccaaaatctgcttggaggcaattaggaattgtgtgtgcaccactgtcaatccaagtacacttctgttttatagatatcatgattagaacatagtttttaccatggtgctatgctctgccaaaatttatattcatgtcaccacagacacaaataatttcattttcaatgttgaacttttccttgaattcatctcagtatgcataatggtgtcagatgttttgctttcaacaaacaaacttccaaaagcataacttgatttcatgaattgtcaggtgaaaagaaagttaagtcattaactggaatgagcttgatcaattttctatttgaaacatctgatgactttgatatacaattggaattatttaactgtttgcaaagttcttctattgttaatggagccaacagttcagcatggctttgcacatgcacaagaaatgttggtactgaaaatgattgaaattaacttagaagaacagacatttaatctaaatgaaaagtcacttcaaagaatgatgtagaaataaacctttccacagctgcacatattaaattgttttctctgaccacaatcctcttaagataacttccaactttgaagtaggtgctgttgctttttcggcagatgcgtgtcatctgctttttataggtttagtgatatcactaaaaccctttgatggatagtaaatgtcaacatttttgtgcaagttctatattcatcatcagctatcttgaaaaatgaacatttaagacctaatttttcattaaatatgctctttcgggttgttggttttgttttgtgtttgttatcatcattgttgttgattttccttttgttttttagctcattgctgctgaaagtactttttacaaaatttttaaatagagttacaaaatagtaatgaccaaaccattatagcaagaaagtttatattattttctgaatatgacacttgtatcactactattgagctttatatccaccacatatgtctcatatacccatcctgtaatttcctgtatttcctactgatagacaatcttgtggttgtgagtcttcccagccatggctgggtacatacagggcacaactgactggtagaccaagtggccagtagagacagcagcgtcaaagcgcagaaggggcgagctgtcgctattcactcaagtgtgagtctttccagctagctgcctgcatgctgttcttggaaggagaggttaatttcattgcatctgaaaagaggtggagaaaagaatatgagttatcattggtcctctttccaatttaaccacatgttagggtaaaaactct

SEQ ID NO: 56875 - DNA, 2741 bp, Homo sapiens
cctttaactactttttgcaacaaatatttttacaagatgaaatttattttaaagtgtccctttttatgattcttctaaatatgtaatcaaatttagattctgcaaaataataggtcttctcaatttccatccattctagactgtaacataaacttataaaattaaaacgaaaatcttcatcaaaagatttttcccatatgttaacctatttcaccacttgagctctcatcgattattttttttgcttcttctcttgcttctatgtatttgaaagctttgtttttaataactacaatttgctatgcacttaaaaataagtttttagttgtttctgtcactgaataatttcattaaatattttcaactgattttgaacaagatgcaaccaaaatgaagagaactttcttcatcattatggttgatgtttaggttgatttcccaagtaattcttcaaaaagctcaaaccttttttttcttttttttttttaagttccgggatacttgtgcagaacgtgctggtttgttatacagatatacatgcgccatggtagtttgctgcacctaccaacccgtcaccctggttttaagccccacatgcattggctatttgtcctgatgttctctctcccttcaccccacccccaccccacagacctcagtgtgtgttgttccccttcctgtgtccatgtgttctcattgctcaactcccacttatgaatgagaagatgtggtgtttggttttctgttcctgtgttagtttgctgaggatgatggcttccagcttcatccatgtccctgcaaaggacatgatctctcattcctttttatggctgcatagtattccacagtgtatatgtaccacattttctttgtccagtctataattgatgggcatttgtgttagttccaaatctttgctactgtgaatagtgctgcagtaaacatatgtgtgcatgtatctttataatagaataatttatattcctttaggtatatacccagtaatgggattgctgggtcaaatgatattctagttctagatccttgaggaatcgccacactgtcttccacaatggttgaactaatttacattcccaccaacaatgtaaaagcattcctatttctccacacccttgccagcatctgttgtttcttgactttttaataatcgccattctgagtgatgtgaggtggtatctcactgtggttttgatttgcatttctgtagtgatcagtgatgttgaaaaaagcccaaacatttttaaggtctgattgatgaygcatggcaaagagaaagtatatactgccatctgaagttttttgtttgttttttaacatcagctttatcataaaaaaatcagttactctatatacacataaaaatatgtgtaaaatttaaccactagcaattcctatttaaattggtaaaacaccaaaatctgcttggaggcaattaggaattgtgtgtgcaccactgtcaatccaagtacacttctgttttatagatatcatgattagaacatagtttttaccatggtgctatgctctgccaaaatttatattcatgtcaccacagacacaaataatttcattttcaatgttgaacttttccttgaattcatctcagtatgcataatggtgtcagatgttttgctttcaacaaacaaacttccaaaagcataacttgatttcatgaattgtcaggtgaaaagaaagttaagtcattaactggaatgagcttgatcaattttctatttgaaacatctgatgactttgatatacaattggaattatttaactgtttgcaaagttcttctattgttaatggagccaacagttcagcatggctttgcacatgcacaagaaatgttggtactgaaaatgattgaaattaacttagaagaacagacatttaatctaaatgaaaagtcacttcaaagaatgatgtagaaataaacctttccacagctgcacatattaaattgttttctctgaccacaatcctcttaagataacttccaactttgaagtaggtgctgttgctttttcggcagatgcgtgtcatctgctttttataggtttagtgatatcactaaaaccctttgatggatagtaaatgtcaacatttttgtgcaagttctatattcatcatcagctatcttgaaaaatgaacatttaagacctaatttttcattaaatatgctctttcgggttgttggttttgttttgtgtttgttatcatcattgttgttgattttccttttgttttttagctcattgctgctgaaagtactttttacaaaatttttaaatagagttacaaaatagtaatgaccaaaccattatagcaagaaagtttatattattttctgaatatgacacttgtatcactactattgagctttatatccaccacatatgtctcatatacccatcctgtaatttcctgtatttcctactgatagacaatcttgtggttgtgagtcttcccagccatggctgggtacatacagggcacaactgactggtagaccaagtggccagtagagacagcagcgtcaaagcgcagaaggggcgagctgtcgctattcactcaagtgtgagtctttccagctagctgcctgcatgctgttcttggaaggagaggttaatttcattgcatctgaaaagaggtggagaaaagaatatgagttatcattggtcctctttccaatttaaccacatgttagggtaaaaactct

SEQ ID NO: 56876 - DNA, 2741 bp, Homo sapiens
cctttaactactttttgcaacaaatatttttacaagatgaaatttattttaaagtgtccctttttatgattcttctaaatatgtaatcaaatttagattctgcaaaataataggtcttctcaatttccatccattctagactgtaacataaacttataaaattaaaacgaaaatcttcatcaaaagatttttcccatatgttaacctatttcaccacttgagctctcatcgattattttttttgcttcttctcttgcttctatgtatttgaaagctttgtttttaataactacaatttgctatgcacttaaaaataagtttttagttgtttctgtcactgaataatttcattaaatattttcaactgattttgaacaagatgcaaccaaaatgaagagaactttcttcatcattatggttgatgtttaggttgatttcccaagtaattcttcaaaaagctcaaaccttttttttcttttttttttttaagttccgggatacttgtgcagaacgtgctggtttgttatacagatatacatgcgccatggtagtttgctgcacctaccaacccgtcaccctggttttaagccccacatgcattggctatttgtcctgatgttctctctcccttcaccccacccccaccccacagacctcagtgtgtgttgttccccttcctgtgtccatgtgttctcattgctcaactcccacttatgaatgagaagatgtggtgtttggttttctgttcctgtgttagtttgctgaggatgatggcttccagcttcatccatgtccctgcaaaggacatgatctctcattcctttttatggctgcatagtattccacagtgtatatgtaccacattttctttgtccagtctataattgatgggcatttgtgttagttccaaatctttgctactgtgaatagtgctgcagtaaacatatgtgtgcatgtatctttataatagaataatttatattcctttaggtatatacccagtaatgggattgctgggtcaaatgatattctagttctagatccttgaggaatcgccacactgtcttccacaatggttgaactaatttacattcccaccaacaatgtaaaagcattcctatttctccacacccttgccagcatctgttgtttcttgactttttaataatcgccattctgagtgatgtgaggtggtatctcactgtggttttgatttgcatttctgtagtgatcagtgatgttgaaaaaagcccaaacatttttaaggtctgattgatgatgcatggcaaagagaaagtatatactgccatctgaagttttttgtttgttttttaacatcagctttatcataaaaaaatcagttactctatatacacataaaaatatgtgtaaaatttaaccactagcaattcctatttaaattggtaaaacaccraaatctgcttggaggcaattaggaattgtgtgtgcaccactgtcaatccaagtacacttctgttttatagatatcatgattagaacatagtttttaccatggtgctatgctctgccaaaatttatattcatgtcaccacagacacaaataatttcattttcaatgttgaacttttccttgaattcatctcagtatgcataatggtgtcagatgttttgctttcaacaaacaaacttccaaaagcataacttgatttcatgaattgtcaggtgaaaagaaagttaagtcattaactggaatgagcttgatcaattttctatttgaaacatctgatgactttgatatacaattggaattatttaactgtttgcaaagttcttctattgttaatggagccaacagttcagcatggctttgcacatgcacaagaaatgttggtactgaaaatgattgaaattaacttagaagaacagacatttaatctaaatgaaaagtcacttcaaagaatgatgtagaaataaacctttccacagctgcacatattaaattgttttctctgaccacaatcctcttaagataacttccaactttgaagtaggtgctgttgctttttcggcagatgcgtgtcatctgctttttataggtttagtgatatcactaaaaccctttgatggatagtaaatgtcaacatttttgtgcaagttctatattcatcatcagctatcttgaaaaatgaacatttaagacctaatttttcattaaatatgctctttcgggttgttggttttgttttgtgtttgttatcatcattgttgttgattttccttttgttttttagctcattgctgctgaaagtactttttacaaaatttttaaatagagttacaaaatagtaatgaccaaaccattatagcaagaaagtttatattattttctgaatatgacacttgtatcactactattgagctttatatccaccacatatgtctcatatacccatcctgtaatttcctgtatttcctactgatagacaatcttgtggttgtgagtcttcccagccatggctgggtacatacagggcacaactgactggtagaccaagtggccagtagagacagcagcgtcaaagcgcagaaggggcgagctgtcgctattcactcaagtgtgagtctttccagctagctgcctgcatgctgttcttggaaggagaggttaatttcattgcatctgaaaagaggtggagaaaagaatatgagttatcattggtcctctttccaatttaaccacatgttagggtaaaaactct

SEQ ID NO: 56877 - DNA, 2741 bp, Homo sapiens
cctttaactactttttgcaacaaatatttttacaagatgaaatttattttaaagtgtccctttttatgattcttctaaatatgtaatcaaatttagattctgcaaaataataggtcttctcaatttccatccattctagactgtaacataaacttataaaattaaaacgaaaatcttcatcaaaagatttttcccatatgttaacctatttcaccacttgagctctcatcgattattttttttgcttcttctcttgcttctatgtatttgaaagctttgtttttaataactacaatttgctatgcacttaaaaataagtttttagttgtttctgtcactgaataatttcattaaatattttcaactgattttgaacaagatgcaaccaaaatgaagagaactttcttcatcattatggttgatgtttaggttgatttcccaagtaattcttcaaaaagctcaaaccttttttttcttttttttttttaagttccgggatacttgtgcagaacgtgctggtttgttatacagatatacatgcgccatggtagtttgctgcacctaccaacccgtcaccctggttttaagccccacatgcattggctatttgtcctgatgttctctctcccttcaccccacccccaccccacagacctcagtgtgtgttgttccccttcctgtgtccatgtgttctcattgctcaactcccacttatgaatgagaagatgtggtgtttggttttctgttcctgtgttagtttgctgaggatgatggcttccagcttcatccatgtccctgcaaaggacatgatctctcattcctttttatggctgcatagtattccacagtgtatatgtaccacattttctttgtccagtctataattgatgggcatttgtgttagttccaaatctttgctactgtgaatagtgctgcagtaaacatatgtgtgcatgtatctttataatagaataatttatattcctttaggtatatacccagtaatgggattgctgggtcaaatgatattctagttctagatccttgaggaatcgccacactgtcttccacaatggttgaactaatttacattcccaccaacaatgtaaaagcattcctatttctccacacccttgccagcatctgttgtttcttgactttttaataatcgccattctgagtgatgtgaggtggtatctcactgtggttttgatttgcatttctgtagtgatcagtgatgttgaaaaaagcccaaacatttttaaggtctgattgatgatgcatggcaaagagaaagtatatactgccatctgaagttttttgtttgttttttaacatcagctttatcataaaaaaatcagttactctatatacacataaaaatatgtgtaaaatttaaccactagcaattcctatttaaattggtaaaacaccaaaatctgcttggaggcaattaggaattgtgtgtgcaycactgtcaatccaagtacacttctgttttatagatatcatgattagaacatagtttttaccatggtgctatgctctgccaaaatttatattcatgtcaccacagacacaaataatttcattttcaatgttgaacttttccttgaattcatctcagtatgcataatggtgtcagatgttttgctttcaacaaacaaacttccaaaagcataacttgatttcatgaattgtcaggtgaaaagaaagttaagtcattaactggaatgagcttgatcaattttctatttgaaacatctgatgactttgatatacaattggaattatttaactgtttgcaaagttcttctattgttaatggagccaacagttcagcatggctttgcacatgcacaagaaatgttggtactgaaaatgattgaaattaacttagaagaacagacatttaatctaaatgaaaagtcacttcaaagaatgatgtagaaataaacctttccacagctgcacatattaaattgttttctctgaccacaatcctcttaagataacttccaactttgaagtaggtgctgttgctttttcggcagatgcgtgtcatctgctttttataggtttagtgatatcactaaaaccctttgatggatagtaaatgtcaacatttttgtgcaagttctatattcatcatcagctatcttgaaaaatgaacatttaagacctaatttttcattaaatatgctctttcgggttgttggttttgttttgtgtttgttatcatcattgttgttgattttccttttgttttttagctcattgctgctgaaagtactttttacaaaatttttaaatagagttacaaaatagtaatgaccaaaccattatagcaagaaagtttatattattttctgaatatgacacttgtatcactactattgagctttatatccaccacatatgtctcatatacccatcctgtaatttcctgtatttcctactgatagacaatcttgtggttgtgagtcttcccagccatggctgggtacatacagggcacaactgactggtagaccaagtggccagtagagacagcagcgtcaaagcgcagaaggggcgagctgtcgctattcactcaagtgtgagtctttccagctagctgcctgcatgctgttcttggaaggagaggttaatttcattgcatctgaaaagaggtggagaaaagaatatgagttatcattggtcctctttccaatttaaccacatgttagggtaaaaactct

SEQ ID NO: 56878 - DNA, 2741 bp, Homo sapiens
cctttaactactttttgcaacaaatatttttacaagatgaaatttattttaaagtgtccctttttatgattcttctaaatatgtaatcaaatttagattctgcaaaataataggtcttctcaatttccatccattctagactgtaacataaacttataaaattaaaacgaaaatcttcatcaaaagatttttcccatatgttaacctatttcaccacttgagctctcatcgattattttttttgcttcttctcttgcttctatgtatttgaaagctttgtttttaataactacaatttgctatgcacttaaaaataagtttttagttgtttctgtcactgaataatttcattaaatattttcaactgattttgaacaagatgcaaccaaaatgaagagaactttcttcatcattatggttgatgtttaggttgatttcccaagtaattcttcaaaaagctcaaaccttttttttcttttttttttttaagttccgggatacttgtgcagaacgtgctggtttgttatacagatatacatgcgccatggtagtttgctgcacctaccaacccgtcaccctggttttaagccccacatgcattggctatttgtcctgatgttctctctcccttcaccccacccccaccccacagacctcagtgtgtgttgttccccttcctgtgtccatgtgttctcattgctcaactcccacttatgaatgagaagatgtggtgtttggttttctgttcctgtgttagtttgctgaggatgatggcttccagcttcatccatgtccctgcaaaggacatgatctctcattcctttttatggctgcatagtattccacagtgtatatgtaccacattttctttgtccagtctataattgatgggcatttgtgttagttccaaatctttgctactgtgaatagtgctgcagtaaacatatgtgtgcatgtatctttataatagaataatttatattcctttaggtatatacccagtaatgggattgctgggtcaaatgatattctagttctagatccttgaggaatcgccacactgtcttccacaatggttgaactaatttacattcccaccaacaatgtaaaagcattcctatttctccacacccttgccagcatctgttgtttcttgactttttaataatcgccattctgagtgatgtgaggtggtatctcactgtggttttgatttgcatttctgtagtgatcagtgatgttgaaaaaagcccaaacatttttaaggtctgattgatgatgcatggcaaagagaaagtatatactgccatctgaagttttttgtttgttttttaacatcagctttatcataaaaaaatcagttactctatatacacataaaaatatgtgtaaaatttaaccactagcaattcctatttaaattggtaaaacaccaaaatctgcttggaggcaattaggaattgtgtgtgcaccactgtcaatccaagtacacttctgttttatagatatcatgattagaacatagtttttaccatggtgctatgctctgccaaaatttatattcatgtcaccacagacacaaataatttcattttcaatgttgaacttttccttgaattcatctcagtatgcataatggtgtcagatgttttgctttcaacaaacaaacttccaaaagcataacttgatttcatgaattgtcaggtgaaaagaaagttaagtcattaactggaatgagcttgatcaattttctatttgaaacatctgatgactttgatatacaattggaattatttaactgtttgcaaagttcttctattgttaatggagccaacagttcagcatggctttgcacatgcacaagaaatgttggtactgaaaatgattgaaattaacttagaagaacagacatttaatctaaatgaaaagtcacttcaaagaatgatgtagaaataaacctttccacagctgcacatattaaattgttttctctgaccacaatcctcttaagataacttccaactttgaagtaggtgctgttgctttttcggcagatgcgtgtcatctgctttttataggtttagtgatatcactaaaaccctttgatggatagtaaatgtcaacatttttgtgcaagttctatattcatcatcagctatcttgaaaaatgaacatttaagacctaatttttcattaaatatgctctttcgggttgttggttttgttttgtgtttgttatcatcattgttgttgattttccttttgttttttagctcattgctgctgaaagtactttttacaaaatttttaaatagagttacaaaatagtaatgaccaaaccattatagcaagaaagtttatattattttctgaatatgacacttgtatcactactattgagctttatatccaccacatatgtctcatatacccatcctgtaatttcctgtatttcctactgatagacaatcttgtggttgtgagtcttcccagccatggctgggtacatacagggcacaactgactggtagaccaagtggccagtagagacagcagcgtcaaagcgcagaaggggcgagctgtcgctattcactcaagtgtgagtctttccagctagctgcctgcatgctgttcttggaaggagaggttaatttcattgcatctgaaaagaggtggagaaaagaatatgagttatcattggtcctctttccaatttaaccacatgttagrgtaaaaactct

SEQ ID NO: 56879 - DNA, 728 bp, Homo sapiens
atacccctgcacaatcctgtctttctttgaggaaaacattctacatggtcttttcagttccagtactttcaaatcacagatacccaggcattccccccctgagctttgggagatgaggtccataaktagatcagagttttaggtgttagctctcaaattgcacatccccaatttgtaatgccaactgaggtctaaactttttgctctttccccttattttgtatcttctaagttcttttatgctatttcaaaattccctgatttcagttcttgagagcttttttttccaaccagctattatcagtcattcatctttaagagcctatttcctactagcttgaatgtttacatccctgctttctggtttccaaaatcaaattctaaggcatctgaatttagcatcaagaacaccccgatatgtgagccttacagtctctagagccaggtctttcctgcattaaactgaaaacactcataaaatcacactaagaggaaaaatacaaatcaaaaaagctgaacttatgcccagattgtaggacagtttgctaatgtctattttagcttagtaataattttcatttaattaccttgagaagcagtagagcatagcagaaagtgcatagacatcataaaaaaaaatgactagagttcaaattctggccaagtttgaaacccaccgctacggcttactaattctctgaacttgggtagttttcttaactatcaaa

SEQ ID NO: 56880 - DNA, 728 bp, Homo sapiens
atacccctgcacaatcctgtctttctttgaggaaaacattctacatggtcttttcagttccagtactttcaaatcacagatacccaggcattccccccctgagctttgggagatgaggtccataattagatcagagttttaggtgttagctctcaaattgcacatccccaatttgtaatgccaactgaggtctaaactttttgctctttccccttatttygtatcttctaagttcttttatgctatttcaaaattccctgatttcagttcttgagagcttttttttccaaccagctattatcagtcattcatctttaagagcctatttcctactagcttgaatgtttacatccctgctttctggtttccaaaatcaaattctaaggcatctgaatttagcatcaagaacaccccgatatgtgagccttacagtctctagagccaggtctttcctgcattaaactgaaaacactcataaaatcacactaagaggaaaaatacaaatcaaaaaagctgaacttatgcccagattgtaggacagtttgctaatgtctattttagcttagtaataattttcatttaattaccttgagaagcagtagagcatagcagaaagtgcatagacatcataaaaaaaaatgactagagttcaaattctggccaagtttgaaacccaccgctacggcttactaattctctgaacttgggtagttttcttaactatcaaa

SEQ ID NO: 56881 - DNA, 566 bp, Homo sapiens
tggagctctgatgcccaaatccaatgctggagcccacatgccaggcgtgggaatgccaaaggacacgaagccaggggaagtmtgctcagaaaatgttcataatgtaaaaagtcttcatttcatgcctaaattgtctgttagaattaaatgtaagctcatatcaaatttagcacaaatgtataggcctaattatttttagtttaatgtagagattatgtagaattttgtaactcaactagtttgggaaccacttgaaaggatacagcaacaacaggccaattaaacaggaaattcttgtcctcttcaaagaggagaagatgagaacagagactaagaaggataaaggagagaataagaccaggaaatacttcccagaaagaggaggcaggatttcgcgttcaacagatgagaaagaggacagagaagagcagaaaactattaaaaggtaggattctgattcgatgggcagaaatgatttttacaatgagaaaagttgcccataattcttgactggcaatgtattttacaatgctgtaagcatttatttcaatttcttctgactgtac

SEQ ID NO: 56882 - DNA, 566 bp, Homo sapiens
tggagctctgatgcccaaatccaatgctggagcccacatgccaggcgtgggaatgccaaaggacacgaagccaggggaagtatgctcagaaaatgttcataatgtaaaaagtcttcatttcatgcctaaattgtctgttagaattaaatgtaagctcatatcaaatttagcacaaatgtmtaggcctaattatttttagtttaatgtagagattatgtagaattttgtaactcaactagtttgggaaccacttgaaaggatacagcaacaacaggccaattaaacaggaaattcttgtcctcttcaaagaggagaagatgagaacagagactaagaaggataaaggagagaataagaccaggaaatacttcccagaaagaggaggcaggatttcgcgttcaacagatgagaaagaggacagagaagagcagaaaactattaaaaggtaggattctgattcgatgggcagaaatgatttttacaatgagaaaagttgcccataattcttgactggcaatgtattttacaatgctgtaagcatttatttcaatttcttctgactgtac

SEQ ID NO: 56883 - DNA, 1040 bp, Homo sapiens
ctgtgtttagggyttctaccaggtcagctcatgttcacattgaatttataaccattagcagctcaacattgtaataaaaaaatttcacagtaaaataaaatgaagtagtgaactgagttctgtcttcacttgctagctttcaaatctctctgcatatctattatgttcatttccttcctgtttctcacaacttcctgctactcacaacttcctgtagatcacaacttcttccttctcacaattttctgtgttttacaatgagtggcttgaaagacctaggccttgttttggctttgtgtccacaggatgtcactaagataccatgagcttcattggacatctattttagcaaatacctgccacattggagcccctctgcctaatccatcctttgtccttcgggcttgggcttttttcttgtgccacccaagacttttaggataatgccctaatacttggttattgtagtacagaacccacaacaacaaaaaaagctttgaagttttaaaagttgttgagaaacaaacttccaatctctcttagctgcaataaaccttctacagagaaacaaattctaccacctaaaagggaagaaaaacataaccacctaaaaggtggttactcaatccgtttttaaatgtgtaatcaataaaacctactaacttattgtttctgggttacctttaaaatggtaccaaggaaagggcctatgtacattaatgtatgcaaataattcaggatttaacaacagcatgaagtttttctcaaaggaagaaacacaaacagatgctttctcatatgctctccaatttatcactgtattctcttaaactctggggtgttgcattttagggtcctattaaataaatcaaaagggaatattatctggaattaggaaccaggcaggaccacggctaaaattaattcaccatagtaatctcctcctaagaaactcccctgagggaaaacattatgcgcccatttctgtgggcagagatttaaatatatctcccctattagttttacatgcctaaatcccc

SEQ ID NO: 56884 - DNA, 587 bp, Homo sapiens
ttttaagctattggcctttaaatatagaattggaatgcagacgagttgttaagagcaggtacttgtggtttatgtgctcagtttcacacctgtcttggctatttttgctgtgtaacctttgaaaagttacttaatatctctgagtcaaatgaaaatggtaatagctcccactgcgtggggttgttgtgagaattaaacaagataacattagcagataacaagtgctcaataaatatttttgatggccattgttatttcttacgtaaggtagataaggagaacaatcttagattcaaaaaagaatacctgacaaaggacaatggtgtgaaggctygcagagcaaacttatttagagtcgttgcttctttgcacagtatacaatggtaaactgggccaatatgaagtcagaaccacaccaataggattgctggaactgcaaggggctgtggccaccgttggttccttcctgcagagttcctaggcagtgaggtggaattcctactctcaggagacatcatctactctggatggatccaggtgttatgtttttcaattgtttgcggcatagaaagtgcccacatagaact

SEQ ID NO: 56885 - DNA, 1323 bp, Homo sapiens
ccagttatagccaagatgacacttctgaagggtggggctgccccagctatgtgaagcccctagagatgaagaataaagagggctggctgcacacagagaagaaaaacaccacccaggaacctcagttactttgcccttctgccttctgaacggaagccgccagttctgccaggcaacatgctgtttcccctgagtctttttttttcacttcagaaactatgggagatacatgtaaacactctaaatgtataggctcattttccagtaagtacaaaagtggatgggtgggtggatggatggatggatggatcggttaatggaagaaaggaagggtgagaggagggaaggaaggaggaaaggaaggagggagggagagaaggagggaggaggaaagggaaagatatgctgtatagtaaactttccaatctaattgaacccaaaacttacaataacttcagtttcccaactgtgaaattaaactgcttctttctataggctttatctttgccttataaaatttggtttagataaattagacaaaacttctgatcttctaccaccaaatccctacaggaagcccctggaaacttcctttacactaccacgttgtctactgcatttttcccagttgaactcaagaagagcagggcttgattgtggccggtgtccagattcacgcctcatcgtttctcccaccgatgtccccaccagtcagtgacaccatcattgtccttgggtcccagtccaaacatctcaaagccatgttttacctctgtgcccttcactccacccactccatgttcaatagcgatggagcaggcttgggcgcgtacatctctgaaatgacataaacgatgtaaaagagctttttgaaaaagcaattgtaagaacgaacgtctcctcttcccctccatttccattggagtttatacaactgaatgggctaaagttttctgcaaaatccctcctccaggttccctctcctcattcctcagggccccccaagggaagggcaattattgckttagtacctgcttgcaaaatgattttccaaggatggatttcaagttcagcttctcaagcttgcaaatgtggcatctcaaggagacccaccaacccgcctgcccccatctgcccacctgccgaggcttgctcagtgccagccctctctgctgcggcagctccagcctccgcatcctccagtgtccagcacaagcacagtttccccacctggaccccattgctggccttcccatgctgatttggagtgacatcaagacactcacacagtggccaaggagaagttgaagggaggtttctgaa

SEQ ID NO: 56886 - DNA, 681 bp, Homo sapiens
tggatctggggccagtcagtggctggagctgagaatggcagaactggacaggaccagctttccctctcttttgtcctccctgtctctctcttcctagggtgtcaggcctctctgtgtggtctttctgcatgggctacttgggcttcctcacagaattactgtctcagggcagccaagctgcttacatggcaggagaagctttcaagagttgcttattccagggaagcagcattggcttttatgacagcctgggaggtcatgcagtgttacttctgggcattttattggttccactagactgaatgtttgtgtccccccaattcatgtgtttaagctctaacccccaagaggataataataggaggtggggtctttgggaggtaattagygttaaaaaagttcatgcgagtgtagcccccatgatggaatcagtgtccttatgaggagaccagagctcccctctctctgccatgtgaggatacagcaagaagatgggcctctgtaaaccaggaggagggctctcactaagaacctaaccctactggcaccctgatctttaacttccaacctccagcactacaagaaataaatgtttgttgtttaagccccccagtctatggtattttgttatagcccaagtgaaataaagaggcaagttagaagtgagtgaggaggctgcct

SEQ ID NO: 56887 - DNA, 677 bp, Homo sapiens
tccagggtctccgggaactcctccccggccacctcctcggggggaagctcctcttctgggtcttctggtcccagctctgcattgtccaggtcctggcgttcggggtctgtgacccgccggctctcgtacacagagctctggaggccacgggggtcgccgtcctgctccctttccgacctgcccgcagcctcagagctgggctggttcccgagtgaccttcgcctgctgtcccccatacaccggtcccttcccagcccccgcggcctcactctcycggcacccaaatgtgtctgtggtggccgcggcaacaggagagcgtccgtcacattccccacggtccacattctaacccgtgcgccgtctccaatgctggtcacctgggcttgcgctgggatcaggactcagtcctggtggtcacggctcactcaggacctcccaggattggtttaggaaggagacctgacgggaacctgcaggggcatctagctatggattccctctctcaaaaggagacacaaggaagagaccgcgtctcctgttcctgtccctgtggggcccgtcggtaatgtccagagcccaggcagccttcttgtgaccatgaggcctgccatctgagggcagatgaactgaaaggtgggcctttgatgtggctgtcgagcctctgaacttagcagcct

SEQ ID NO: 56888 - DNA, 504 bp, Homo sapiens
tccatatgctgaacgctggttccccgggtccccttatttctttctctatactttgtctctgtgtctttttcttttccaagtctcttgttccacctaacgagaaacacccacaggtatggaggggcaacccaccccttcacaggtcaaattggctttaaggtcccagtaagaactctgtgtgtccttcacctggtcacccgctgtgaacgacctgccgccctgtgttatcctcctgtcggttttttcctgaacatttgaagctaagttgtagatgtcatgcacctccacccctraaaatttcagtatttatgtatttctttatttttgaggcagtgccttgctctgtcatccaggctggagtgcaacagtgaatctccacacactgctgcctcaacttcctgaggtcaagcgatccccccaacgcagactcccgagtagctgggaccacaggggctctgagtctcagcgtcggccgtgtgtcctcgagtacacatcagggtctca

SEQ ID NO: 56889 - DNA, 722 bp, Homo sapiens
agtgtgtcgctatgaagaggtccctgaggctgggtcgttcataacgaagagggttcatttgctcacggttctgcgggccgtacaggaaatgtgacaccggcctctgggccgcttctggggaggccggggaggtttacccatcaaggaaggtgaagagggagctggtgtgtcacgggtgagagggagcaagagggaaggtgccgcactcctaaatggctctcaggtgagcaacaggcaggacgggggacggtgccgcactcctaaatggctctcaggtgagcaacaggcaggacgggggayggtgccgcactcctaaacagctctcaggtgagcgagagttagcaagggggaaggtgccgcaatcgtaaacagctctcaggtgagcaagaactcaactcacgtgtcaccaagggcatgggctaagccctgcaggcgggatctaccccgtgagccagcacctcccaccaggcctcacaccaactctgggcgtcacatttccgcatgagatttggagggacacatgtgtccaaacatgtcacagagcacgtagtcagtgacgttcacacatgaatattcatcccagatttactcatggtaatgaaaccctcaacacgacagcagagtttgggtgtgttcctaagagcgggtggtttgcagatgttcacctcatccaaaaacatcctcacagacctgcccagaatgatgtttgaccaaacttctgg

SEQ ID NO: 56890 - DNA, 722 bp, Homo sapiens
agtgtgtcgctatgaagaggtccctgaggctgggtcgttcataacgaagagggttcatttgctcacggttctgcgggccgtacaggaaatgtgacaccggcctctgggccgcttctggggaggccggggaggtttacccatcaaggaaggtgaagagggagctggtgtgtcacgggtgagagggagcaagagggaaggtgccgcactcctaaatggctctcaggtgagcaacaggcaggacgggggacggtgccgcactcctaaatggctctcaggtgagcaacaggcaggacgggggatggtgccgcactcctaaacagctctcaggtgagcgagagttagcaagggggaaggtgccgcaatcgtaaacagctctcaggtgagcaagaactcaactcacgtgtcaccaagggcatgggctaagccctgcaggcgggatctaccccstgagccagcacctcccaccaggcctcacaccaactctgggcgtcacatttccgcatgagatttggagggacacatgtgtccaaacatgtcacagagcacgtagtcagtgacgttcacacatgaatattcatcccagatttactcatggtaatgaaaccctcaacacgacagcagagtttgggtgtgttcctaagagcgggtggtttgcagatgttcacctcatccaaaaacatcctcacagacctgcccagaatgatgtttgaccaaacttctgg

SEQ ID NO: 56891 - DNA, 674 bp, Homo sapiens
tgttgtttctttataatgatcttggcagttttcatgtatccaagcgagttttccaaaatgccctccaatttaggcttgtccgtatagagtataaaacaatcataatataattttacaggttttcttccactgaccctgcacatttctccactaaacattttttgaaaactttctgaaacatggctagtattacaccgtatgaatgccatttctttatcccccacctccagccatttagctagaaattgagcaacaggtgtatgcagtccctgtacattcctatttctgtatgtccaggagactctctgataacagrcaggccctgcatgatgcaaatcaccttaatcgagggaggtgccggggtacagtgtgggacatgataattccatctacacgcagaaggcctgtatgacctagtggaggaggctcccaatgtgcatactgactcgggttacacctccctactcctaccacagtcagatcatcacagggggactttaaaaattctatcagctctgggccgggcatggtggctcacgcctgtaatcccagcactttgggaggccacagtgggagaaccactaaagcccaggaattcgagaccaacctgggcaacacagtgagtccctgttgctataaatgaaaaatttttttaattaaaaaaatttacatct

SEQ ID NO: 56892 - DNA, 555 bp, Homo sapiens
gctgggattacaggcatgagccactgcgcccagcctcccatgatcttttcttatctcatatatatatacacatacgcacacacacataagtattgtacctaggtggatgcgttcccccttagtttagggaatgccctactctgtctatggaatggctgtactttcaccactttacttttttaataaacttgcttttgctttgtactatggactcaccctgaattctttcttgcatggggtccaagaaccctctcttggggtctggatcaggacccctttctggtaacatcaccacatgagactgtgcttttgtttcatagatgaagaaactgaggctaagaaaagttaaccaactcaccctggttctacagccagctacatgataccaggattcagatccaagctgtatgcctccagaaactatgttcttggccactatcaaccactaagctgggttgccccaaggaaagtaaaagaggcaacccacttggtgggttgccamgtgaaaaacagaatatgcagttatattggaatttcacacaaacaatgggggaa

SEQ ID NO: 56893 - DNA, 568 bp, Homo sapiens
agcctggcggcctgtctggattcctatggctcgcccgctcccggctcttacttcactgcagccacactggtctttgcgctgttcccaaacctctcccagaatgttctcaactcaggatctctgggattcccttcactggaaaacattcccttaagtattttgcaaagaatgcccatgcttcattcaggaatgttcaaatgtcccctcctctaaaagagggatgctcccatcactccttttccccatcttcctttacattatagyatttattattactggacataatactgtatatgtatgtttgtctttctgtaagctccataaagccaggaactttgtctcgtttgttttctacctggcacttagtaggtgttcaataaatatttattaaaccaatcaatgaagtaagtgtatatgtgtgtgtgggatgcatagttacccatcatcagctcaaccacacacagtgtttcagtcaggattcctgccaaacacccactgaactctcacactgggtggcttgagaagaatttgattaagggattacttacaaaggagtagggctcttttt

SEQ ID NO: 56894 - DNA, 966 bp, Homo sapiens
gttatttatagacatggagggcaaaatggaagaaggaaaggcttggctgcacacactgacatgctactatgcttaactttttgtgatgagaaaatgtgtgtgttcgtgccgttgtccagagcccttactggaataataaaaaataaaatccattagaaagtgaaagtgaatctgagaactggatagaaatgatggattcagaaaagaaggactaaggggcacatttgagggctcgatccctcagactaaattgaaacaaagctaccaggcaggcatgcaaagacccccaccacctgccaatcaaacttattccttgtgcagatatcctccagtgaagttgattgatctgtctatccccttttccgcagaacccaaaagcagtctttagctgcttggctggtaaaattatgggatagtggtgctgatggggtggttctatctggaaatgaggaaaaaaggttagcaatgttaccgcacatccgtgcatcaggcaacacctatgtgatctccctgctattgcagagaatcattccttgatggactggaccatactagcctatagggaaggctgaccattggaggragatatgcctgggtatcctgaatcttggaagacaatcaatttgtggtgtgagttggcagtgagggtgaccatctacgtccttgctttccaggggcctgataatgccctttcacagctggaatgcacaacgagatcctaaaggctgttccaccatgttggaaggacactggtccctatcttaggtcttttggtggggccttcacaatatcatatcccatgagggaactaagatataatagctattattcaggaactagagagggtgggacttgtgcctcttgcacagagcccattcaacagccagatatggcccatgtgaaaacccaacagcatctgaagaatgacggttgatgactgacaactaaataaggtgactccagcca

SEQ ID NO: 56895 - DNA, 966 bp, Homo sapiens
gttatttatagacatggagggcaaaatggaagaaggaaaggcttggctgcacacactgacatgctactatgcttaactttttgtgatgagaaaatgtgtgtgttcgtgccgttgtccagagcccttactggaataataaaaaataaaatccattagaaagtgaaagtgaatctgagaactggatagaaatgatggattcagaaaagaaggactaaggggcacatttgagggctcgatccctcagactaaattgaaacaaagctaccaggcaggcatgcaaagacccccaccacctgccaatcaaacttattccttgtgcagatatcctccagtgaagttgattgatctgtctatccccttttccgcagaacccaaaagcagtctttagctgcttggctggtaaaattatgggatagtggtgctgatggggtggttctatctggaaatgaggaaaaaaggttagcaatgttaccgcacatccgtgcatcaggcaacacctatgtgatctccctgctattgcagagaatcattccttgatggactggaccatactagcctatagggaaggctgaccattggaggaagatatgcctgggtatcctgaatcttggaagacaatcaatttgtggtgtgagttggcagtgagggtgaccatctacgtccttgctttccaggggcctgataatgccctttcacagctggaatkcacaacgagatcctaaaggctgttccaccatgttggaaggacactggtccctatcttaggtcttttggtggggccttcacaatatcatatcccatgagggaactaagatataatagctattattcaggaactagagagggtgggacttgtgcctcttgcacagagcccattcaacagccagatatggcccatgtgaaaacccaacagcatctgaagaatgacggttgatgactgacaactaaataaggtgactccagcca

SEQ ID NO: 56896 - DNA, 744 bp, Homo sapiens
tcctgcctgtgtccactgcctcttgggagaagctctgcacggggtccaggctgggtggctcatctgccaagatgccacgcagcaccatcaccaggtagccggcactcggtgggctcttcactgagaaaacgatgtctgctggcggcactgcctcctgggctacctggttaacagaggtcatgaggactcacaagggaatgcagaggggtctcagaggggcccactgtggccctaagcagccagaacagccttgatcttgctccacttatttccccagataccactgctcatttagtgacacacacacatgtgggttcacacacacagcagccagacatgcagctggtcacattttttgtttttttgagacagggtcycactctgtcacccaggctggagtgctgtggtgtgatcacagctccctgcagcctcaacgtcctaggctcaagggctcagcctcccaagtagctggggaccacagtcatgtgccaccatgcctggctaatttttaaatgttttgtgtagagatggggtttcactgggttgccccagctggtcacatgttaatacccaccccacacatggttacggggtgtcggtcaacagcttgagatgcactccctcagggaggtgcataatcacatgtccccagactcagtgacacagacatatgagttcatcagatgctgacgcagtcacacaggtacaggtacacatgcgtgtgtgcacacgcacacaggcccc

SEQ ID NO: 56897 - DNA, 702 bp, Homo sapiens
cctgcctgtgtccactgcctcttgggagaagctctgcacggggtccaggctgggtggctcatctgccaagatgccacgcagcaccatcaccaggtagccggcactcggtgggctcttcactgagaaaacgatgtctgctggcggcactgcctcctgggctacctggttaacagaggtcatgaggactcacaagggaatgcgcagaggggtctcagaggggcccactgtggccctaagcagccagaacagccttgatcttgctccacttatttccccagataccactgctcatttartgacacacacacatgtgggttcacacacacagcagccagacatgcagctggtcatattttttgtttttttgagacagggtctcactctgtcacccaggctggagtgctgtggtgtgatcacagctccctgcagcctcaacgtcctaggctcaagggctcagcctcccaagtagctgggaccacagtcatgtgccaccatgcctggctaatttttaaatgttttgtgtagagatggggtttcactgggttgccccagctggtcacatgttaatacccaccccacacatggttacggggtgtcggtcacacagcttgagatgcactccctcagggaagtgcataatcacatgtccccagactcagtgacacagacatatgagttcatcagatgccgatgcagtcacac

SEQ ID NO: 56898 - DNA, 702 bp, Homo sapiens
cctgcctgtgtccactgcctcttgggagaagctctgcacggggtccaggctgggtggctcatctgccaagatgccacgcagcaccatcaccaggtagccggcactcggtgggctcttcactgagaaaacgatgtctgctggcggcactgcctcctgggctacctggttaacagaggtcatgaggactcacaagggaatgcgcagaggggtctcagaggggcccactgtggccctaagcagccagaacagccttgatcttgctccacttatttccccagataccactgctcatttagtgacacacacacatgtgggttcacacacacagcagccagacatgcagctggtcayattttttgtttttttgagacagggtctcactctgtcacccaggctggagtgctgtggtgtgatcacagctccctgcagcctcaacgtcctaggctcaagggctcagcctcccaagtagctgggaccacagtcatgtgccaccatgcctggctaatttttaaatgttttgtgtagagatggggtttcactgggttgccccagctggtcacatgttaatacccaccccacacatggttacggggtgtcggtcacacagcttgagatgcactccctcagggaagtgcataatcacatgtccccagactcagtgacacagacatatgagttcatcagatgccgatgcagtcacac

SEQ ID NO: 56899 - DNA, 714 bp, Homo sapiens
atgagtgggcaccagctctagaggcacacaccactcccaggaggatgggtgtacagcaagctccccagaaactcttgggaacacaacatatatgggagcatatctgaggcacgtgcacacacgcaagctgggaccaccacaggtacagcccaagtcacatgtgttcccggcatggaggctgggaggaaggccctctacctggtccacaccccgctcaccacctccagctcctcacctccagctggtcccttctgatctcagctgcctctccctggaagatgtagatcttcttgtgctgggccagcttcagtggggctactgggccctctagggcaatggtcacttgtagggtggcatctgtgtgcactggtcccacatccattgagaaggccagggtgttgcrggagctgaggctgccattgtggccatagggaacagccccaaccagcaggtcctgctgagagaaggctgtggctggctgagtggcttggagcaactgtccccagtgagggctgtctgtgacgtggtagtgggcctcatccctactgcagatgttgaggttggtgcccaggtggagctcggccatgttgatggtaccctggcctccttgaggaaccatgaggccggagccattggccacacagaggtaaggctccaaggcctgcacctccagcaccgtgatggcctggtgctgcccatcggacacctgcagcg

SEQ ID NO: 56900 - DNA, 714 bp, Homo sapiens
atgagtgggcaccagctctagaggcacacaccactcccaggaggatgggtgtacagcaagctccccagaaactcttgggaacacaacatatatgggagcatatctgaggcacgtgcacacacgcaagctgggaccaccacaggtacagcccaagtcacatgtgttcccggcatggaggctgggaggaaggccctctacctggtccacaccccgctcaccacctccagctcctcacctccagctggtcccttctgatctcagctgcctctccctggaagatgtagatcttcttgtgctgggccagcttcagtggggctactgggccctctagggcaatggtcacttgtagggtggcatctgtgtgcactggtcccacatccattgagaaggccagggtgttgcaggagctgaggctgccattgtggccatagrgaacagccccaaccagcaggtcctgctgagagaaggctgtggctggctgagtggcttggagcaactgtccccagtgagggctgtctgtgacgtggtagtgggcctcatccctactgcagatgttgaggttggtgcccaggtggagctcggccatgttgatggtaccctggcctccttgaggaaccatgaggccggagccattggccacacagaggtaaggctccaaggcctgcacctccagcaccgtgatggcctggtgctgcccatcggacacctgcagcg

SEQ ID NO: 56901 - DNA, 510 bp, Homo sapiens
actctgcctctggctggcacctgatctgagccccaggctcacayctctgcccacaggccccagcagctgtttcacctccgactccatcccccaccaagcactgcccctcaccagctactggggtgccactagtgcccctacatggttctccctctccagacccttgggtccagctctaacttccttctggaaaccacaccccaagaccccagccctgctctagggccctgtatccccgacttcctgcatccttctccctccttctgggaacatgaacttgccccgccagcctgatgactcctggagggcaggacgccagggccctggaccatggcaggcccgggagtgtctgctgccagtgatgctggagctggtgcccatgtccacatgatgtccatggcacagtggccacctgaggctgggcgcatctgagtggtgactgcagagtggggcccttacctctccctgagtgaagttcaccaggtcctcccctgtgaactgcccccaaac

SEQ ID NO: 56902 - DNA, 602 bp, Homo sapiens
tgactagtgtttggtcaaggacagagtctttgtcaggtaataaaaagttttaaaagaagttgcaggattaatgacaggtttagggctaagaatcaacaggttctaatcatgcaaatattggcattatatattcaatttcagatttcaatgtgaatttcatttaacctaaaatctgtgacttcattccacagataggattagaaagagacacttcagtactgagaaaaccrtgacacttgaaataagctaaaagcattgtaacaatttttttttctttacctcctgggcacaatgacatttctttacagtaattctctggaaaaagaatgtcagttgaactaaaatggggcaaatactttgaaatgactgctgttttaagatgcttatgattatgggtgaacaaacatatttggaggaaccaagagctgaatctattttttttcttcaaaataataccaaacttgaattgaattgttagagaaaacagttcatacaatcattttccttttcttattactgtagcttctttgatggtgacaaattatatgaagaagagttgacccatataaagcttttaaaaatgtagaaatgtttttaaaagc

SEQ ID NO: 56903 - DNA, 613 bp, Homo sapiens
atttcttgctctggctgtgttcatcttctaaccacttatctaaaacattctgcggattctctaggtggtttttcacagtgggaaaggcaaacaagggctttagattatgatatttcaactctaattgtgtaacttacattcattctttatgtgaccctaggcaggttacataacactgtggagcttcagttttctcatttttcaagtaatgttgcccattttaaccatttcttgcttatagcatgttgtaagagtagcgtgaaagacttgttactgtgccgcacatccattgggtgtttaaagaagtatcgcttcccatccacttttctagattcttagtctgagtccacaggaaacttagaagtctatggatagaattgaagagattcaggaactttgtttgggaaaatattatagcattattttaacttctaactgaaagttagcatatctttccattgtgaatgtatggcacagaccaccaaagtcattagcagcaactatgaatttgctgatagaagtaatagatatattcatatcacattatagttgccgcacatatctcaaaatatcacatgttcaggcttggaaacccrctactaattcaataatg

SEQ ID NO: 56904 - DNA, 776 bp, Homo sapiens
  misc_feature (1)...(776): n = A,T,C or G
cacatcgcagcctcagtggcactgtcctctctgcactggctttgtctgactcattgatctgcctctaggcccagtgttgactattgaaggtcactggggccttcatctcaactggcgnnnnnnnnnnnnnnnnnnnnnnnnnnnnnnnnnnnnnnnnnnnnnnnnnnnnnnnnnnnnnnnnnnnnnnnnnnnnnnnnnnnnnnnnnnnnnnnnnnnncctagtaaattataaatacaccctatcctttgacccagaaattccacttctaagaatatatcctacatatagcagtacacatgggaaataatatatgttcaaaatgatctaatgagacctcattgtaactgcaaaagaatgtaaacgacccatatccatttgtagggattgattgaatatatcatagtgcagtcacacaatgcaactacaaaaagaacaaggcttccgtatggaccgatgaggaaatctctaagatttattgtgatgctagctatggacrgtgcaggcaatattcaagtgggggaaatagatatctgtatttgcttttacaagcacaaagaaaatctctgagaggatatacaagaaaccaataattatggtgacttgttaattgtgttctaatttggagatgaaggaatctgagtagatggagaatgtggtaggaggaagatcttgatcataattttttacattttctgatttgtaaccttgttaatgtgttacctggtcaaaatgtttagactattaaagtggacttgtcatttcctgggctaactcc

SEQ ID NO: 56905 - DNA, 741 bp, Homo sapiens
cttccctgagtcctcagcccatcttagtcagttcccttttgtctccaacttccaaaatgtacattgcattcatcctcccaactctttatttaaatagttctacgaggttataaattgaagagttctttagaaacacagcagtgcacgcaggcagcattctgttcctaggatttggtgtggraactgtccattccaacccctgtagcactttcaggcaggaatgagccttggggctacatcctctagaggttcccccctccctgggttgattccccatagatgagaatcttgcctttgcaagtctattaggggacacaattccatacaaaacagtgcagtctaggagaaggcagcgagcacagcatgcgtcctcaccctctttagacacttgcatcctaacgaacccctctgggcctcagtctcatgcaactgttaaaaaattgagataacgataactatagtacctcatggggtcggggattaaatgaggtgaaattgatgagctccttatcagtgtttgtcactaatcagtcttatggccccaggactgaatgcaaggacagagcttattgacactgattgtacccatcttctacaaggagaagtagataccatttctatatctacttacatacaacaaagtataaaggctacatagtagattcatgtgttaatctccaactcctcactgagaaactgttgatcacccttagcaatcatggccaagagaatcattccgga

SEQ ID NO: 56906 - DNA, 690 bp, Homo sapiens
gatccccatgtgagaagytcccgtattccgttcaccactgtatcctcagagcctaggcaggcctctgatgggaagaagtctgtccccagacacttgctgagcagggaccagaacaggactgtgactcacgttaagaatctcaggaagtggctctgggaagggatggctctggggtagagggaaagctaatagccatgagttttagagctttccgtttgtcaacgttgtgttttgagcccaagccagtccagttaagtccagcttgacttgctttcgaggcagggccccgcagcagcagtgtgaacacatgctgcagaacctgcggcaacccaagtcagcctcatggaaggaaagtgttccatgttctgggaataacgtggggcactaggtgccacgctcaccttgtcatcagaagagaaaggaccatgactgacctgcggtgcttatggaagcaatgccctgtctgaactctggtctatactatgaggtcctttcttccgtgttcttttgcatctgaggacaaaatctgcttttagaacccttattcatgcagaagcaaagctacgcaattgccagaaatgccccttttctgaaaacatggaccctcctcctttgtctcatcaggataaccatggtttcctaactgtcaggatgcaaactcctttttcctggtccccaggctgtgcaggc

SEQ ID NO: 56907 - DNA, 973 bp, Homo sapiens
  misc_feature (1)...(973): n = A,T,C or G
ttgagcttcccnnnnnnnnnnnnnnnnnnnnnnnnnnnnnnnnnnnnnnnnnnnnnnnnnnnnnnnnnnnnnnnnnnnnnnnnnnnnnnnnnnnnnnnnnnnnnnnnnnnngaattcctacagcaaaggcacctgccaaggtacttacaaactagtttagctaaaccagactttcaacaattggttactaaagaccactcaaagtctgtcaacactctgtcatctctatgtaatgacagaaacatagaaattcagggtaaatgtttagaaatttctatagaaacttgacattctcccagcatctgtatgtgacatcaggggacttgtctcaatgagcagttacagaccaactcaggttttgtcagactcgatggaaagatgcagaggctgtgagctgcaaacgagtcacatacacaaggaccacattgcaagctgtgttctttaaggttagtttgtcaactatagtataatctcacacatctgaaaaatgggaacatctattctataaagtcttatttttgcaataattttaattttaaatcaagccaatgttagcattattagtgaaaacaaaagaaagttgtgttatttattattaaacctaatttgagagtgaaataaattgtattaatttttttaaccaataaaagatgcaccttgtaaaccaagagatgattatgaaagtgattctgaggacatgaagaccaaaggagtttgtcctcgttttactcagaagtactatttctaatggacagatgatccctgacatacaatggtttgacttataattttttgactttatgatggtgtgaaagtgatacgcattcagcagaaaccatacttcagtattcaataaattacatgagatattcaacactttaaagtgggtttgtgagagakaatttttgcccaatggaaggtgaatgtaaattttctgagaatgtttaaggtaagctaggctaagctatgatgt

SEQ ID NO: 56908 - DNA, 1195 bp, Homo sapiens
tgtgtcaggaccaccttcatgaatattcacagctcctcctgtaacttgttgaatatgtgtgtttagtcaacctattcagaatgaagcttctacaactcaaccccttctccttcaaagtgcctgtctccgggcttcagccagaggcatgcttcccagcctgcaggttggccaccttgcaggatgtaaccctttataagaaaaaagtctcctttccgtttctaaatttaaaaattgtggatttttttttttcagttaacaatatccatttaaacttttcaaatagatggtttgcaaatgtttggcatgggaaaatgcaggcatatttcatgagtagttgtcagaaattaggatcaattttacgaggtgactatccaacagggaccaaggaaggaatctctgccattttcatagagccactgattggcccactcattgaaaatgctgagcaagacctcaccctcactcgcycggtcctgaaccagcctggcagagttcttgtcccactcagagatagcgttctacatcctatctgagtgacaggatcagccctgcccttatcagccctccgtagattccataatgaggctcctacgagtctctctcatcttctcattatctcaactacgatccctctcccttttatagcacaaactcctccagtcctgtgacatctgtgatcatcaggaacttttattttacccatggctttttcctcctacactgcttccctccacttatccagaaacccatcaatctctaaatgctctgctcatgtataatatcttccctaaacttctgcacatctctaacccattaatatcacatagtttatgcttagttcctcctcattcattttatgagattttgtttagccctaaagattttttccatctggcttgaaattcttacttcttttttttaaattttttgccaaattcaatctttaaaataggggaacgatcctctttccttcaagagattttgatgtcagaaagcactgactcacgcaaaggtccacattttcagattcactggcaagctggttggtgaggacaagcttttgactgaatcaaagctcagtggttttaaagtggagttgggcagagcctaggctttttgtgagggtgcttaggtgtcactatgaaggccagacgagggagagggtgagtgtgagttgagtgagtgagaccggagc

SEQ ID NO: 56909 - DNA, 884 bp, Homo sapiens
gcggaaaagcccaccctgctcccaaccccagcttatatccacacaaacacacacatacacttcacacttctgggtaatatctattcatttctaagaccctaagtgtcatgtccttcaaaataccttcccctcagcttgtctccaggtgggttgagcccatcttctatgctttatcagcccgtgcttgggaataattccttatctcattgctttataattattgtctcttactgtctgcctaatccttggtacagggaatactcaaagcatttatgaaagtttaccaacatgttaacagacaagatagagaaaagtgatgagtgaaataaacctcttaatcccacaacagcagaacaacggcaaaataaaccccacttcaaccagtagctactgagctaaaattcctcaatgtcctctgcagggtaygctctgcactcacctaggtcttaatgaatgtgaaataacaggccctaaatgatcaatcatgggaaaaagaggaaacaaattagaaaataaatctttgcaggaagaaggatgaaaaaggaaaaaatgggctagaggatttcattctgaaacaaatgagaatattcctaactgcaatctgtctctcatttggcgaatgagagtgacagtctcaactggagctttaaaatgaaactctttgagtcaaagagataattaaccatttataaacagatatgataaaccctttaaactgcactacttgatccaatcaaataattaattccataattttaaaattattttaaaaagctgctctctaaagaaatttaaattagattttattaatattttctctgtgttacaaaagccatcatttgtaaaatgctggtaggccagatttcaattagacaataccatgt

SEQ ID NO: 56910 - DNA, 821 bp, Homo sapiens
tggacagcaggactcaaacccaaactttgggacttcagtccaaccctcttcccacgtttcctccataaatcctgcttccacatgcctctgttgtttcagttttgcattctctccctctccatttaatgatagggctaaaaatagtttgcaattaaatacacaaatctattaacttgaaacaaaaaaggtaatgtgcttatakaaaataatttctatatcacaagccaactgtcaaagcaaaatgaatgagccagcaaagaggtcatttgcacctgtaaataattctacatggaattgccaatgtacagtgatggaaacactgtcagggcagagggggactctatgctgaaaacatacatgacaggtatccttcctccccactccaattttggtggctgttggtcatctaaacagtacattccaacatgttctgctctctgtgccctggattttgtaggataattcttattttacatggtgtaacagtccccttgccagagtagcggaagctagaaggcccttgacattcattggtccttagagcaactgaaggtcagaagcctgcccctgggtgggtgtgacaatgagaaactctcaccttggccaggggaggagagatagtggagggcatgaccaggagccccagcttcatggcttctgaagagtgtaaactagggtatgcactgaaatacagaccaacatgtgtcttcacgcacactggcacgtccctgcacactcttgggcaaatattttatttgtctttcacaagataactaacacacaatgctacaaattataaagtttttttaaataaatcaaat

SEQ ID NO: 56911 - DNA, 821 bp, Homo sapiens
tggacagcaggactcaaacccaaactttgggacttcagtccaaccctcttcccacgtttcctccataaatcctgcttccacatgcctctgttgtttcagttttgcattctctccctctccatttaatgatagggctaaaaatagtttgcaattaaatacacaaatctattaacttgaaacaaaaaaggtaatgtgcttatataaaataatttctatatcacaagccamctgtcaaagcaaaatgaatgagccagcaaagaggtcatttgcacctgtaaataattctacatggaattgccaatgtacagtgatggaaacactgtcagggcagagggggactctatgctgaaaacatacatgacaggtatccttcctccccactccaattttggtggctgttggtcatctaaacagtacattccaacatgttctgctctctgtgccctggattttgtaggataattcttattttacatggtgtaacagtccccttgccagagtagcggaagctagaaggcccttgacattcattggtccttagagcaactgaaggtcagaagcctgcccctgggtgggtgtgacaatgagaaactctcaccttggccaggggaggagagatagtggagggcatgaccaggagccccagcttcatggcttctgaagagtgtaaactagggtatgcactgaaatacagaccaacatgtgtcttcacgcacactggcacgtccctgcacactcttgggcaaatattttatttgtctttcacaagataactaacacacaatgctacaaattataaagtttttttaaataaatcaaat

SEQ ID NO: 56912 - DNA, 765 bp, Homo sapiens
cattctcaaaactgaaggataagtttgctgtttcccacatctctaccaatagggtctagtatctttctcaaaatcttttacctatgtgggggataaaaaaagtaatctcttgtcattgttttattttgaaatacagttattatgagaatagttgtccatctcttcatgtgtttcatatcactgttaaagttaacagtgatggccataagattatgtcttgcagacctccaactacaaggggcacaactgaccaagagtcctagttgctgtcctctgctccctgcccattactgagcatggcagagatattaggcaggcccattcctgagagacacaagactcctcagagggttacattggctcaagggtcctcaacaacctcgcagaagtttccttagactgtacccttggtctgaaatgctttyactcaatgttccttccctctctctttcacttagggtcagatttgcatcgtggtctaagaaccttcccagcctttaacagattcctccccatttcctctcaattccccttgcacatttaatcccctattggcatctatttctcactagacccagactaacaacacattagctgttctttgctcatcattttattgtcccattgcatgtttccttgttgatttataggcattcctaatataataatgattgggaccttttctgtcacatgtgttgcaattatctttccttagtcggtttaaatctttggcttactttgtgatgtccttcccatttagaaaca

SEQ ID NO: 56913 - DNA, 765 bp, Homo sapiens
cattctcaaaactgaaggataagtttgctgtttcccacatctctaccaatagggtctagtatctttctcaaaatcttttacctatgtgggggataaaaaaagtaatctcttgtcattgttttattttgaaatacagttattatgagaatagttgtccatctcttcatgtgtttcatatcactgttaaagttaacagtgatggccataagattatgtcttgcagacctccaactacaaggggcacaactgaccaagagtcctagttgctgtcctctgctccctgcccattactgagcatggcagagatattaggcaggcccattcctgagagacacaagactcctcagagggttacattggctcaagggtcctcaacaacctcgcagaagtttccttagactgtacccttggtctgaaatgcttttactcaatgttccttccctctctctttcacttagggtcagatttgcatcgtggtctaagaaccttcccagcctttaacagattcctccccatttcctctcaattccccttgcacatttaatcccctattggcatctatttctcactagacccagactaacaacacattagctgttctttgctcatcattttattgtcccattgcatgtttccttgttgatttataggsattcctaatataataatgattgggaccttttctgtcacatgtgttgcaattatctttccttagtcggtttaaatctttggcttactttgtgatgtccttcccatttagaaaca

SEQ ID NO: 56914 - DNA, 1016 bp, Homo sapiens
ctccaattcttcttgcactgtatgtcttccttccaggaagttttttaaatgaagatctattggttataaactgagagtttcatttctctactaatgtctttatgtcacactcattctcaaatgacaattaagcttggtatatactactacatttgaaagttattttctctcaaaacttggaaaacactttttctactgtcttttgacttctgcttttactgtttaaaaaccagctgttcagtttgttatccttttgtgaaaaatttgtgttttgtcactggctatttttaagatcttctctgtgtctttggagttctgctattctgccagtatatctaagtgtggctgtctatttatcttgatttgtataataggttgctgatgtggccaaaaaaaattcttccctccttgcatccatatccttgcaatgtgatatcatggagcagcccttcragagatgaagtctatttatttacattttgactctggagttggccatatgacttgctttgggcaataaaacattagcaaatgtgatcaagcaaacaaagccttgaaaatattagtactttagggattgcactcttccgatacttggaatcccagggatgacatgtaaataagctgagctaggccattggagatgagagaccatgtgaggacaactgaggaacaagagtcaacagccagccaacccccagagaggtgaagaggctctcagatcatcctgccacctgctagcatgccaattaaccacagacatgggagacagcctaacaagtatcagcttagccaggtcaaagcagaaaaaaattggtttttgagctaaataaaatggctgttctgatgcctctatgttttctatgatttctatgtgaaatcaacaacatatacttttatttcattgttctttcagtaatgagaattaatgtcttttattaagtttagaaaattcttacccgttatacttataatagtgcccataacctttatctctgtttactatctggaatttt

SEQ ID NO: 56915 - DNA, 741 bp, Homo sapiens
cacttataaatgagaacatgtggtatttgtctttctgtgtcttaattgtttcacttaggrtaatggcctccagttccatccatgttgctgcaaaagacatgatttcattcttttttatggctgagtagtattccatagtgcatatatatatatatatatatacatatatatatatatatatatacacacacacatatctgtatatcccacattttctacatccaatcatccattgatggacacttaggttgattccatatctttgttattgtgaatagtgctgtggtaaacatgcaagtgcaggtattttttggatataatgatttcttttcatatgggtagatacccagtactgggactgctagattgaatggttctttgagaaatatccgtactgttttccatggaaattgtacgaatttacattttcaccaaacagggtagcacaagggagagggtaagaaaggagtattaaaattttcacctgttatcggtgaaaggagaacccctgtcctaaggactcaaatctaggttctttctctggagaatatttcagaagtcttctagcaaatctaggtaatctaggtggtatgtgtgtaagtgcatgtggggcagggtgtgtggatgtttactgtgaatatcccagggagttaagcctgcaattgaggaatatttcactctcggaaaacaagcacaaagagatcctcactttatattaaatttgccttgtggatttctcaa

SEQ ID NO: 56916 - DNA, 741 bp, Homo sapiens
cacttataaatgagaacatgtggtatttgtctttctgtgtcttaattgtttcacttaggataatggcctccagttccatccatgttgctgcaaaagacatgatttcattcttttttatggctgagtagtattccatagtgcatatatatatatatatatatayatatatatatatatatatatacacacacacatatctgtatatcccacattttctacatccaatcatccattgatggacacttaggttgattccatatctttgttattgtgaatagtgctgtggtaaacatgcaagtgcaggtattttttggatataatgatttcttttcatatgggtagatacccagtactgggactgctagattgaatggttctttgagaaatatccgtactgttttccatggaaattgtacgaatttacattttcaccaaacagggtagcacaagggagagggtaagaaaggagtattaaaattttcacctgttatcggtgaaaggagaacccctgtcctaaggactcaaatctaggttctttctctggagaatatttcagaagtcttctagcaaatctaggtaatctaggtggtatgtgtgtaagtgcatgtggggcagggtgtgtggatgtttactgtgaatatcccagggagttaagcctgcaattgaggaatatttcactctcggaaaacaagcacaaagagatcctcactttatattaaatttgccttgtggatttctcaa

SEQ ID NO: 56917 - DNA, 579 bp, Homo sapiens
acagccaagaggaaacacagccactgtaagtgaggccacaggaagggggaagaaggcaagaaatgaccacgattcgcgcccctctgcacccccagtgctctctcagggccccccattggtgtacacctgcctgaaggctggaaggagaggggccctggaaagaacaggaatgaatctgggggcactggcaggcaggcaggcagcacatcctcctcctacacagctgccaccacgcccacacctccctcctcctcatcctggcaggccctggccctcccagatgaccatcagacatctctaacattccctcctgaccttgacctccactgcatcagcactgtccttgctgccccaaccctctctggcctctctcttgagctgccaaacactgaggagaacagtcgcagggctgtgctgactgaagccactgacacgggctatcgagcstgcagatgaccctcacggctgctggacaatcctttggacaagattcatgaattttcaggcatctctcagattggctccccaagtctttcccattctcctcaagtccccacccaagcctcattccctcaggtt

SEQ ID NO: 56918 - DNA, 579 bp, Homo sapiens
acagccaagaggaaacacagccactgtaagtgaggccacaggaagggggaagaaggcaagaaatgaccacgattcgcgcccctctgcacccccagtgctctctcagggccccccattggtgtacacctgcctgaaggctggaaggagaggggccctggaaagaacaggaatgaatctgggggcactggcaggcaggcaggcagcacatcctcctcctacacagctgccaccacgcccacacctccctcctcctcatcctggcaggccctggccctcccagatgaccatcagacatctctaacattccctcctgaccttgacctccactgcatcagcactgtccttgctgccccaaccctctctggcctctctcttgagctgccaaacactgaggagaacagtcgcagggctgtgctgactgaagccactgacacgggctatcgagcctgcagatgaccctcacggctgctggacaatcctttggacaagattcatraattttcaggcatctctcagattggctccccaagtctttcccattctcctcaagtccccacccaagcctcattccctcaggtt

SEQ ID NO: 56919 - DNA, 1035 bp, Homo sapiens
catgtcaaccttcatcacatttttcactgaatgttacctatctcctggctaattttcctacctcttagttgatcttcttgccattgcatgtacttttttagtatgcgatcaggtctcttcactgctcaacagtcttcagggactccccgtccactactgaatcaattcccttggcattctctgcttcaccaagtcccttaatttctctgaatcccagcttccttatctgtaaaataggagtgacgatacccatcttacagtattgtttttaaggatcaagcgagacaatcctgtaacatgcttacaatggggtctgacacatagtaggaagcacagtatgttggagctcttattattattattatttttattactcctccstgagccgttattttttttcatgattattactcctccatgaacttttcccttagacatagcacagtgccctgaacacagtgaatgttcaggaaacatttgttgaatgtgaaataaactgatctccatcaactcacgtgcaagttggtaatgcccagaaaaggagctcttattaatgggtctttgaagaacccccagagggaggccaatattgcctattttggaaggagaggggaggacattgatactttctcttgctaaggagagtaaataagatgtaatggggtctttaaaacatttttatagcagtgtgtgggcatgggcttggtctgagctgctcccagctggcttttgtcaagcgttggctgcctcaaagcagagcagcctgctcgggaggaccgcaggattcgctggggccccagctggagggagggaacccattcctctgatgtgcacagttgtctcaagcctggaacccattccttgctcagatgccaaaaaactattttggatcctgtagagctggcaggagtccctagtatgccatgtctccgtgtgtgaagtgcttgtcacttgcttcttcccttggggctatttcaaagaagatggaagaaattaatggctgtaaatgactaaggccctcgagttatggtttta

SEQ ID NO: 56920 - DNA, 524 bp, Homo sapiens
tacctttttatttttaactaagtcattgtgatagatgagtatggttttttaaaaataatattcatatcgtggcaaaatttaaaaatagagggatttttttaaaaaatcaaaaagtttagggatcactggcatagttaaaagagtgctgctttagaaagtaggagacctgcattttagttctatttagcccgcaagctctttctgtaaccccaagtatgatctcttggaccaggtgtggctcacacctgtaatcctggcactttgggaggccaaggtggttggatcacctgaggtccggagttcaagaccagcctggccaacatggtgaaaccctgtcyctactaaaaatacaaaaattagctgggtgtagcagcaggcacctgtaatcacagctactcgggaggctgaggcaggagaatcgtttgaacctgggagacaggtccagtgagcggagatcatgccattgcactccagcctggacgacagagtgagactccatctcaaaaaaaaaaaaaatacataca

SEQ ID NO: 56921 - DNA, 524 bp, Homo sapiens
tacctttttatttttaactaagtcattgtgatagatgagtatggttttttaaaaataatattcatatcgtggcaaaatttaaaaatagagggatttttttaaaaaatcaaaaagtttagggatcactggcatagttaaaagagtgctgctttagaaagtaggagacctgcattttagttctatttagcccgcaagctctttctgtaaccccaagtatgatctcttggaccaggtgtggctcacacctgtaatcctggcactttgggaggccaaggtggttggatcacctgaggtccggagttcaagaccagcctggccaacatggtgaaaccctgtccctactaaaaatacaaaaattagctgggtgtagcagcaggcacctgtaatcacagctactcgggaggctgaggcaggagaatcrtttgaacctgggagacaggtccagtgagcggagatcatgccattgcactccagcctggacgacagagtgagactccatctcaaaaaaaaaaaaaatacataca

SEQ ID NO: 56922 - DNA, 605 bp, Homo sapiens
tcctcacctccctatctcatcggcctaggagacaggacctcacttgactggcccacagccaggccctggctgtgttgacaaatgggtccttccccctggcctggtgagctgagatgtggcattgttaagctgcaagtgagtcacagaacttttccttccctttcttcctctctgccctgcttgtcccacaccctgctcattttytttttctctctctctctctctctctcacacacacacacacacacacacacttgcctttcagaacctgtgaactataaataagtgctttatcaccataaatgacttgatccaggctagggtcgtgaggggcttggctcaggttcctgggcatgtggatacctgcagagtgggttcctgagcacgtgagggcacaagcgtgcagtctcggacaaggtggagtctcaatgtgtgagcttgctgaggccagggcagtgtctgggaagggagtggaggcatctttgtgtctgtggggttgtggtgggagggaggtttcgggggctgtgaggcgagcacaggcgtgtgtgctgtctatgcccccaagggacagggcgtgggtggagaacgtatttgtgcccgaggtg

SEQ ID NO: 56923 - DNA, 605 bp, Homo sapiens
tcctcacctccctatctcatcggcctaggagacaggacctcacttgactggcccacagccaggccctggctgtgttgacaaatgggtccttccccctggcctggtgagctgagatgtggcattgttaagctgcaagtgagtcacagaacttttccttccctttcttcctctctgccctgcttgtcccacaccctgctcattttttytttctctctctctctctctctctcacacacacacacacacacacacacttgcctttcagaacctgtgaactataaataagtgctttatcaccataaatgacttgatccaggctagggtcgtgaggggcttggctcaggttcctgggcatgtggatacctgcagagtgggttcctgagcacgtgagggcacaagcgtgcagtctcggacaaggtggagtctcaatgtgtgagcttgctgaggccagggcagtgtctgggaagggagtggaggcatctttgtgtctgtggggttgtggtgggagggaggtttcgggggctgtgaggcgagcacaggcgtgtgtgctgtctatgcccccaagggacagggcgtgggtggagaacgtatttgtgcccgaggtg

SEQ ID NO: 56924 - DNA, 605 bp, Homo sapiens
tcctcacctccctatctcatcggcctaggagacaggacctcacttgactggcccacagccaggccctggctgtgttgacaaatgggtccttccccctggcctggtgagctgagatgtggcattgttaagctgcaagtgagtcacagaacttttccttccctttcttcctctctgccctgcttgtcccacaccctgctcattttttttytctctctctctctctctctctcacacacacacacacacacacacacttgcctttcagaacctgtgaactataaataagtgctttatcaccataaatgacttgatccaggctagggtcgtgaggggcttggctcaggttcctgggcatgtggatacctgcagagtgggttcctgagcacgtgagggcacaagcgtgcagtctcggacaaggtggagtctcaatgtgtgagcttgctgaggccagggcagtgtctgggaagggagtggaggcatctttgtgtctgtggggttgtggtgggagggaggtttcgggggctgtgaggcgagcacaggcgtgtgtgctgtctatgcccccaagggacagggcgtgggtggagaacgtatttgtgcccgaggtg

SEQ ID NO: 56925 - DNA, 605 bp, Homo sapiens
tcctcacctccctatctcatcggcctaggagacaggacctcacttgactggcccacagccaggccctggctgtgttgacaaatgggtccttccccctggcctggtgagctgagatgtggcattgttaagctgcaagtgagtcacagaacttttccttccctttcttcctctctgccctgcttgtcccacaccctgctcattttttttttctctctctctctctctctcwcacacacacacacacacacacacacttgcctttcagaacctgtgaactataaataagtgctttatcaccataaatgacttgatccaggctagggtcgtgaggggcttggctcaggttcctgggcatgtggatacctgcagagtgggttcctgagcacgtgagggcacaagcgtgcagtctcggacaaggtggagtctcaatgtgtgagcttgctgaggccagggcagtgtctgggaagggagtggaggcatctttgtgtctgtggggttgtggtgggagggaggtttcgggggctgtgaggcgagcacaggcgtgtgtgctgtctatgcccccaagggacagggcgtgggtggagaacgtatttgtgcccgaggtg

SEQ ID NO: 56926 - DNA, 1184 bp, Homo sapiens
tgcatgctctccacacaggccacgaggtcatcactctctcccaacagccatcccagcaggatgggcagtccaggggccaactggtcccactgctggagcagatcacacaggacggccagggccagggccagagcgatggaggcatccacctggcagaaggcaaactctgcaaagacaggagaaaggtgagcaatgaatatactgctcagggccgaccccagggcagcctgcaggaccctgggaacaataaaggcctcaggtaaaatcgctgccaccagcctggcagggaagctggtagggtgggctcactggagacgattaatcaccttctgaatcctgctatttatactgttagaatgagtcataggcctgaacccactgtttccatgccccctaactcagtgtggacagaagcagttccatctgcaggattagagagttatctcccctctgctcctccagtgtcaccagaaggatcaggaaggcttccctgtccagtgtctcctctgcacatctgcctggatttgactggtttgccctttccttggaaagcagatctcttgggcacaagacacatcctagagcagggcatcggcaagcttttccttaaagggccagagagtcaatattttagactttgcaagcctatacctcctcamctcggctgaaagcagccatggacaatctgtaaacaaatggttgtggctgtgttccaataaaactttatttatggacactgaaatttgaatttaatgtgtcacaaaatattattttttcccaaccaattaaaaatgtaaaaaccattgatagctcatgggctgtaaaaagcaggtggtaggctgcatttggctcctattttgctgccctctgtctcggagttttttgtttttggacccttgttttcctgggtgcttggaggaagggcactgaaagaatagaagggtgcagaaagaggaagcagggggccttggggaaaccattgcttatttcaacatttggccttagacaatcctaaatatgggtttggagggaggctcaggggtgttgtcacttcccctaacaactctgcccctcccatcccaaacctggagggtgtctgaaacacgggactgaaagcccactgcacaatggacctctgtaggcccatcttgcaccaactgacattgaaaggcctgtctttcaat

SEQ ID NO: 56927 - DNA, 986 bp, Homo sapiens
taccctaatctatcactttcattattttagtcatttggggatgtaatttgtatttaattcagacaacaaactccgcagttgccactgttactttctatgaacatacgcctttttaaggcacaatagggttggatgatttagatttacattcatttacttttacctaggaaaataatggtacattcttgtgggttttgctgacttctaggtaaatacagtggcattagatgtacaaggaggcaggtttggtccctagttaattaggaattttagtaggtgtctctataagaactgcatttgttactgcatsataatgagctggagtttgcagaaattcccctgcagaaatctcctagtgaagtaataggagcctattctttacctcattcagaatttgtacatttcttctctcccaagttagacactagaaatgtcgcctggattactcaactccagtacactgtttactctctgcccgggctttgtatatctgagtaaatttcaaaacaaaactcaaaagccttcccaggacatctgatgggaacacattcgctccaccttgtctttgtggatgacaccactattttgtttctgatctcctatacaggcagatattctttatttcctatgaaatatgtgtccttgaatgcaaaacaaatggtgaatgccctttgttccctttctaacttgctttttggtgtgatggtctaattgctatgccacagagttttaaatgaaaaaaaatttgaattaaaaattctatccatacttacaaaaaacaaaacaataaaatgatacctttggtaatcacttatttggttgaataactctcataaaacacacacacccacaaatgttttaaactactcaaatataaaattttgtggaggaagagattatttacaatgttagaaaacaatgccattgccagagacattttcttggagttgcaaggtaggtcagataagggaaaatacattatatga

SEQ ID NO: 56928 - DNA, 704 bp, Homo sapiens
  misc_feature (1)...(704): n = A,T,C or G
tcaaccatattcatatgtatagttaaggttcattcattgccattgctgtatggtgctctttatcatccatcctcctatcaacagacaagttatttttgttgttacaaaaaaaaatattgctatgaacatcctaatacatgtctcctgatgyactgtgcaagaccttctgcagggtatatatctaggaatgtaatcgatgaattgttgggtgtgctcatcttaagttgaataggttactagttatgtggttgatttcatgagagttgtaccaatttacactcgtatcagcagcatctaatcgctcctgctaacccacatctcaacaacccttggtgttagtacaacattttgattttcctgatgttcatttccnccgctgacttagaacaaacccctcacattagccatcgccccactatattggatttttaggccctaggattcccgatgcctaccataggcgctccataagtgagaacaaaacgaaaagaatctacgctttagccatttggtaaagtacattttttttctttttttttttttttttttgagacagagttttgctcttgttgcccaggctggagtgcagtggtgggatctcagcccactgcaacctccgcctccagggttcaagcaattctcctgcctcagcctcctgagtagctgggattacaggcacctgccaccatgcccggctcattttt

SEQ ID NO: 56929 - DNA, 875 bp, Homo sapiens
tcaaaaaatattcctcaaataagaaagacactgtacattttaaaaatgcttttgacagtgtcttacaatccatgtatggggacttacaattttgggaagtcatgtaaactttcctgagttgcgagtgaattcagtgcttcctccactcataaatgttattaccctacaaagaaatttctagattatcccacataaaagagaaaaccaaactcaggaaagaccataagattatgaactggtaccttttcccagcacagaaatcagaactgatagctttaaattagaagtgatatatagctcgttcttagagagctctctgtgcaaaatttcatcattttgtgcaatgctttatacagagtacacacacaagaaggattgactgacagtaaatgtttaccagttcaaattttactgaacacctctaatatcagtatctatcctggtagtttttaaaataatgctatattcatcaccattaccaccattatcattcttgattttttgtactgattagaatgttttccattgcaacagaaaccccaactcaaactagctagcagcaatgaatattttctctctcataacaggagattccttaaaatgaggggctttagagttagttgattcatcagattactagtgtcgttgagtatctccttggtgtagtagcaaggttggtagtaacatttccagatatggcattattcagagaaaacaaaagttatttgtctctttctrtggctttgtttagcaagaaaagaccttttcccaggagcttctcaggagcatcccctcatgactcagccatgagggtagggtcacaagcccattctcagatcagttactagcatgattgatttctgtgcaccctctga

SEQ ID NO: 56930 - DNA, 532 bp, Homo sapiens
ccttgatttgaagctccgaggaccaatctgtgttgcattcatgtcaaggggcctgacctggtgtcccaagcaggcatccagatcccacacatgaagggaacacaacagcaggatatgagaccatcgtgatcccacgtcagtccatcttcactcaaacaggcttctccaggagaggcggggcacaggggtcagcactcaggcttcaccaaggttcgacgagagaatgaggaggagaaagggaccaggacgtggagtgtcatgaggaaactgagcagaggggatggtctggctgcaagccaggctctcagccacatgattcagctgcacaacctcagcctttcctgaggatgcctcatgtgctacttgtggaagaagytgagaggggattttaaaaacctacttaaaatagagttattacaaaagtatgggtgaacaatgcaggtgttacaactggactgaactttgaaagatgccgtgttatctcgtagaacctccctcacaagcttctggggtttcaggaatttttggctta

SEQ ID NO: 56931 - DNA, 671 bp, Homo sapiens
cttggtgttagtacaacattttgattttcctgatgttcatttaacaagctgactttagaacaaaaccctcacattagacatgaccccactatattggatttttaggacctaggattcccgatgcctacaataggtgctccataagtgagaacaaaacgaaaagaatctaagctttagccatttggtaaagtacattttttttcttttctttcttttttttttgagacagagtctcgctctgtcgtccaggctggagtgcagtggtgcgatctcggctctctgcaacctccgcctcccgggctcaagtgattctcctgcctcagtctcctgagaagctgggattacaagtatgtgccaccgctcccagctaatttttgtatttgtagtagagacggggtttcaccatgttgcccaggctggtcttgatctcctgacctcaggtgatccacctgcctcagcctcccaaartgctgggattacaggcatgagccaccacgcctggcccccttttttcatattttaaagattaatcagcacacttcaatctttcctatgtctccaaattatgaacctaatgtgaacacatagcagtgcatttgttcccaaattcaaaggttacacaggaaatttaatgcaggagtacaagtattgctcccagaggtggaaaatat

SEQ ID NO: 56932 - DNA, 721 bp, Homo sapiens
cctctttcccccatatggcaaatgtttactgagcactttacctgagccaggcactgtgaagtaaacaatttaaagtcaaacaattacaagatagtatccacccttagcactcttaagggatggtcctgaaatggctgaatccccagattcctgaatactactacagcatatattttaccacattaagtacagctcagatataactgaaacacttagctgacccccctttagattcttatgattgcatacatatacctaaagacattgataaagcttttttttttatcgtggtgcagagcttatctgtcttaaacattaacattttttcacttctgcctccaacattaatagatagatttctcttggtagcccatgttttataaaataataaaaattttaatcacttaatgagtgacaaaacactatacctggtcttttgtttgttccacttttaatttccttaattacaaaatctcttcagaggttacagaaaacttgaagggtgtgggagaatagaataataataaagtgcatttcatgcagagtatttttgcattttgtttatatatgtaaatgtatactaggtggtgatataaacagtaratattacaatgggtcacagtttaacaagtttgagaaacactgttacaataaggaaaaagaagcgagttttgttaagctattcctaggttctcagttgagaccttcactagcagactac

SEQ ID NO: 56933 - DNA, 762 bp, Homo sapiens
gatattgctttcttactaaatagaaatatcccaagaacatatgcagagagtataaataagtatgtgactttgacagagagttggaaggaaaacagaatgtgagagacaatagaaaagctagctgccttttctgtatcttccaggggtttcccagatccaaaaactggacattcactgtgaatgagcctccgctaaaaggcaaaagctatgtatacttctaggtattttttttttcgttttaatgatagataatcaaatgtgcttagcttttgtttattttcaaagtatacacagagctattcatcccagtaacaagaatgtgaaaataacgatgtgaagatgtatcaggctctacgttcagggtgcataggtacaggtacgttttctgtatgtgtgttatacttcagtgaaaaggttttaaaaatgccaatgctgaagatcgtagctcttgtctgggccttggtgacccaaccttattcacatacgttttactgagtgctctgatgggtgttaaatcccacagcagagcctttgattgtgtgattcctggactgagtggtgacttcagcactggycacctgagtcttctgatagtacctgcatttttagctctgatagacacagagggtgatgtcaggaacattaagccagttaccccagggccttagtcagtgcccaagcctctgcctttcacctgagaaagaatttccaaactgcctgatgagggagaaaaccatgtccatggtcccaacggggtccaga

SEQ ID NO: 56934 - DNA, 762 bp, Homo sapiens
gatattgctttcttactaaatagaaatatcccaagaacatatgcagagagtataaataagtatgtgactttgacagagagttggaaggaaaacagaatgtgagagacaatagaaaagctagctgccttttctgtatcttccaggggtttcccagatccaaaaactggacattcactgtgaatgagcctccgctaaaaggcaaaagctatgtatacttctaggtattttttttttcgttttaatgatagataatcaaatgtgcttagcttttgtttattttcaaagtatacacagagctattcatcccagtaacaagaatgtgaaaataacgatgtgaagatgtatcaggctctacgttcagggtgcataggtacaggtacgttttctgtatgtgtgttatacttcagtgaaaaggttttaaaaatgccaatgctgaagatcgtagctcttgtctgggccttggtgacccaaccttattcacatacgttttactgagtgctctgatgggtgttaaatcccacagcagagcctttgattgtgtgattcctggactgagtggtgacttcagcactggtcacctgagtcttctgatagtacctgcatttttagctctgatagacacagagggtgatgtcaggaacattaagccagttaccccagggccttagtcagygcccaagcctctgcctttcacctgagaaagaatttccaaactgcctgatgagggagaaaaccatgtccatggtcccaacggggtccaga

SEQ ID NO: 56935 - DNA, 762 bp, Homo sapiens
gatattgctttcttactaaatagaaatatcccaagaacatatgcagagagtataaataagtatgtgactttgacagagagttggaaggaaaacagaatgtgagagacaatagaaaagctagctgccttttctgtatcttccaggggtttcccagatccaaaaactggacattcactgtgaatgagcctccgctaaaaggcaaaagctatgtatacttctaggtattttttttttcgttttaatgatagataatcaaatgtgcttagcttttgtttattttcaaagtatacacagagctattcatcccagtaacaagaatgtgaaaataacgatgtgaagatgtatcaggctctacgttcagggtgcataggtacaggtacgttttctgtatgtgtgttatacttcagtgaaaaggttttaaaaatgccaatgctgaagatcgtagctcttgtctgggccttggtgacccaaccttattcacatacgttttactgagtgctctgatgggtgttaaatcccacagcagagcctttgattgtgtgattcctggactgagtggtgacttcagcactggtcacctgagtcttctgatagtacctgcatttttagctctgatagacacagagggtgatgtcaggaacattaagccagttaccccagggccttagtcagtgcccaagcctytgcctttcacctgagaaagaatttccaaactgcctgatgagggagaaaaccatgtccatggtcccaacggggtccaga

SEQ ID NO: 56936 - DNA, 896 bp, Homo sapiens
tatatgaacaaaccacataaatacatatatgtttatgttattattttccattgataaaatacacattgtcaatatcagattgccttagttattgtggctttatagaatgttctgatacatttcttggcaattctccagcatattctctcccaaayaagttttagtatgacaggtccataataaatcatatgggatttttaattagaattgcaataaatttatagatgaatttgtgggaaattatcatcctaatagtattatttctttccaagtttatctcacagaagtagagagtggaatagtgattccagaggcaggtaggggtggggggaagcacagccaaaggttggttaacaacacaacgcacagctagatgaaaggaatacattttaacattctataccactgtaggtgactataattaacaacatttcttgtatgttttcaaatgcctagaaaaacagattttgaatgttcccaactcaaagaaatggcaaatgtttgaagtgatggagacgctaattactctgatttgatcattacacattgcatacatgtatcagaatatcacactgtgctccataaatgtgtacaattattataacttaattacaaataataaaagcaaaaaatacttctattattttaggttgaattatttaaaaattgtttttatattcaatcagagtaagctcattgaaaagatcttaggttggaaatgagaagtaagagaaaggtgaacttgcaggaatattgtttttttaacatgtgctaccctaacctgttcagggactttgtgatctagatatcaggaagtgctgcagcagccattggctgggagcagggaaattgtatcaataggatgagccattttcagtgtagatggaatagaaaag

SEQ ID NO: 56937 - DNA, 817 bp, Homo sapiens
attctggtggtaatcgccaccatcatttctaatgggacactgtgtagctgttgaaatattgaagattccactgtccatcggatgtccactctgcagcaatgcttccttgatctgggtgtctgccagctcgacagcttgctgcccagttgagtttgaacttgtagctcagtgataggcagaattcaaagatggctccagagtccctggcccctgatgtactgcctactcccaactattcaattaaacttatctaggtgtcgctggaaagggatttgcaaatgatattaaaagtccaagtcagttgaccttaaaaatgagagactatctgggtggagctggactaatcacatgagcccttcaagtctgaatctggcaatcacagataagtcaatcaaagcgagtagaagaatgagagagtcaacgagagggaaatgcgctggaggcacatggcatagaatgcaggcagtctctagaagctgagagtcagtaaggaactggcaacctcagtcctacaaccacaagaaactagattttgtcaacaatctgaaagagcttggaagcggtctcttccctagagtctccaaaggagagtgtaggtcatatgatattctcattccagcctcatgatacgctgaagagagaacccagctatgcagtgataaaattctaacctgcggcactrtgaactaataaacgctcattgttttaaagttaagtgtgtggtaatttgttatgcaaaaataaaaagctaacacaagctttctcagttaatgttctaagtctgataatttttcttcacagcccagatgctgaacct

SEQ ID NO: 56938 - DNA, 784 bp, Homo sapiens
tgtttcttggcttctgttaccttccattgccttacttaagagcaggtataacccacataggcagcctgcctcgctgtgccctgcccaatggactcatggaaatcctgggtctcccagcacttcatgttctcccagtaaagcccttggagaaactttcactgcctccctccaatgttttcaaatgtataagaaaaagagttgcattctctcacataatgcttgctgtataatctagcccttttccttgtttccctggaaaatcgtggtaagtagcasttttgtgttgcggttgctattggggagttgtctttatcttatggagaccatttttcactttgagaaatctttaaatcaaatgtgacaggtgctggggggacaaagatctggaatatgcctcaggtgcgattatgacttaattctgtgttaaacaatgttaaccagctacctttcctcttcacattcccaaggctcagcagacagggcctccaagcaggcctgtccacagtgccaagaatgtttccatcaagtcagccattagcttctcttttcctttcataatgacgggtctttaggagagtggtgggcaagcggcgctgacgctgtgcagggcggggatgctgaccctgctagagagggagattttgctctcctcttcctatttctttccatagggggtcccaggggaactttgaatgggagggggaaaaacctatgaattttgtaacagattattggatcacagtgctgatgcttgcagactgggtctagtcacatgaggcgggta

SEQ ID NO: 56939 - DNA, 1190 bp, Homo sapiens
tccccatacacatctcccactcagatctccaaaatccactctgctttgatccaggtccttgttctgactggagttatggagggtcatctggacatttcccaggggccggtagagccactgctccttgggcctttttcctgaggacaagaggaagaacagcgactatttcccctaggaatgccaccacatgcaccaacctgctggtcacccacctagctgcatgttctcacagagcagtgctccttaaatgcagattcttgggcatactttgaacctactaaatcagaattttcaatggcaggacttgggaatctacatttaacaacctcccttaggtaatattaacatagagttttatgaagctccaaagaataccaaagcatatggccagccactcaccyagaagctgcagacagctggatgagtgtggcttgaccattcattacccagcttgaaagcctccctgcagcagggccccttatacatgctacaggtcaagcagaaatgaattgaatccacctgttcctgtcaggggcacatagcacagggacaagggatgaggggtttggggagacagactctcagacaagtaatcacctgggtttgagtccctactctaccacttaaccaactgtgggggcctcacatcagtttcctatttttataaaaatagaaataaacactcagatactcaagaaaataaaataagttatttcactcagcacagagcctggcacacagtagacacttggttagcagtgaaactccatctgccaggataccacagagataagaatgatctcttatcagcagctattgttaactctggttttcagggagaataacacattcatctagttgtctgagaaagattttgttttatatcccattgttgaggtgaaaataagattctatcctcttgggactttgggggctgtttgtttcagccattcagagagttctaagtccctgggagcagcatgccctggaaacagaatacctcgcttttccaagggtggagtggtcatcccgactgctcctccccagaggagaggtctgacatggcatgggatagaggccagcagctcctctctcagggacatgtcaatccaagatgccaggacaaatagccttgttgtttgttcttgttctccggcagctaagtctatgccgttacaaagtgctttccc

SEQ ID NO: 56940 - DNA, 1190 bp, Homo sapiens
tccccatacacatctcccactcagatctccaaaatccactctgctttgatccaggtccttgttctgactggagttatggagggtcatctggacatttcccaggggccggtagagccactgctccttgggcctttttcctgaggacaagaggaagaacagcgactatttcccctaggaatgccaccacatgcaccaacctgctggtcacccacctagctgcatgttctcacagagcagtgctccttaaatgcagattcttgggcatactttgaacctactaaatcagaattttcaatggcaggacttgggaatctacatttaacaacctcccttaggtaatattaacatagagttttatgaagctccaaagaataccaaagcatatggccagccactcacctagaagctgcagacagctggatgagtgtggcttgaccattcattacccagcttgaaagcctccctgcagcagggccccttatacatgctacaggtcaagcagaaatgaattgaatccacctgttcctgtcaggggcacatagcacagggacaagggatgaggggtttggggagacagactctcagacaagtaatyacctgggtttgagtccctactctaccacttaaccaactgtgggggcctcacatcagtttcctatttttataaaaatagaaataaacactcagatactcaagaaaataaaataagttatttcactcagcacagagcctggcacacagtagacacttggttagcagtgaaactccatctgccaggataccacagagataagaatgatctcttatcagcagctattgttaactctggttttcagggagaataacacattcatctagttgtctgagaaagattttgttttatatcccattgttgaggtgaaaataagattctatcctcttgggactttgggggctgtttgtttcagccattcagagagttctaagtccctgggagcagcatgccctggaaacagaatacctcgcttttccaagggtggagtggtcatcccgactgctcctccccagaggagaggtctgacatggcatgggatagaggccagcagctcctctctcagggacatgtcaatccaagatgccaggacaaatagccttgttgtttgttcttgttctccggcagctaagtctatgccgttacaaagtgctttccc

SEQ ID NO: 56941 - DNA, 1190 bp, Homo sapiens
tccccatacacatctcccactcagatctccaaaatccactctgctttgatccaggtccttgttctgactggagttatggagggtcatctggacatttcccaggggccggtagagccactgctccttgggcctttttcctgaggacaagaggaagaacagcgactatttcccctaggaatgccaccacatgcaccaacctgctggtcacccacctagctgcatgttctcacagagcagtgctccttaaatgcagattcttgggcatactttgaacctactaaatcagaattttcaatggcaggacttgggaatctacatttaacaacctcccttaggtaatattaacatagagttttatgaagctccaaagaataccaaagcatatggccagccactcacctagaagctgcagacagctggatgagtgtggcttgaccattcattacccagcttgaaagcctccctgcagcagggccccttatacatgctacaggtcaagcagaaatgaattgaatccacctgttcctgtcaggggcacatagcacagggacaagggatgaggggtttggggagacagactctcagacaagtaatcacctgggtttgagtccctactctaccacttaaccaactgtgggggcctcacatcagtttcctatttttataaaaatagaaataaacactcagatactcaasaaaataaaataagttatttcactcagcacagagcctggcacacagtagacacttggttagcagtgaaactccatctgccaggataccacagagataagaatgatctcttatcagcagctattgttaactctggttttcagggagaataacacattcatctagttgtctgagaaagattttgttttatatcccattgttgaggtgaaaataagattctatcctcttgggactttgggggctgtttgtttcagccattcagagagttctaagtccctgggagcagcatgccctggaaacagaatacctcgcttttccaagggtggagtggtcatcccgactgctcctccccagaggagaggtctgacatggcatgggatagaggccagcagctcctctctcagggacatgtcaatccaagatgccaggacaaatagccttgttgtttgttcttgttctccggcagctaagtctatgccgttacaaagtgctttccc

SEQ ID NO: 56942 - DNA, 1190 bp, Homo sapiens
tccccatacacatctcccactcagatctccaaaatccactctgctttgatccaggtccttgttctgactggagttatggagggtcatctggacatttcccaggggccggtagagccactgctccttgggcctttttcctgaggacaagaggaagaacagcgactatttcccctaggaatgccaccacatgcaccaacctgctggtcacccacctagctgcatgttctcacagagcagtgctccttaaatgcagattcttgggcatactttgaacctactaaatcagaattttcaatggcaggacttgggaatctacatttaacaacctcccttaggtaatattaacatagagttttatgaagctccaaagaataccaaagcatatggccagccactcacctagaagctgcagacagctggatgagtgtggcttgaccattcattacccagcttgaaagcctccctgcagcagggccccttatacatgctacaggtcaagcagaaatgaattgaatccacctgttcctgtcaggggcacatagcacagggacaagggatgaggggtttggggagacagactctcagacaagtaatcacctgggtttgagtccctactctaccacttaaccaactgtgggggcctcacatcagtttcctatttttataaaaatagaaataaacactcagatactcaagaaaataaaataagttatttcactcagcacagagcctggcacacagtagacacttggttagcagtgaaactccatctgccaggataccacagagataagaatgatctcttatcagcagctattgttaactctggttttcagggagaataacacattcatctagttgtctgagaaagattttgttttatatcccattgttgaggtgaaaataagattctatcctcttgggactttgggggctgtttgtttcagccattcagagagttstaagtccctgggagcagcatgccctggaaacagaatacctcgcttttccaagggtggagtggtcatcccgactgctcctccccagaggagaggtctgacatggcatgggatagaggccagcagctcctctctcagggacatgtcaatccaagatgccaggacaaatagccttgttgtttgttcttgttctccggcagctaagtctatgccgttacaaagtgctttccc

SEQ ID NO: 56943 - DNA, 544 bp, Homo sapiens
tctaagatgtgccaaggtcccaagcttcagtagaattgtgtcagagagacaggcattgggcagtaagtagccccatcctcccaccctgctaaytgaaggcttgcctcgggtctctctcttctccaagtcattctagtcactactattaatcttggcagatctttgatcatgtcacaacccaaggtatgtaaaattaaactcaggttctccagtctgacatgtagagcccctcactttttggccctgcaattatgacatggtggtttagatggtctgaattcaaatcctagcttcactacttaatagggatgtgagcttgggcaaattatttaacttctccatgccaaagagagatttagtagactgggctgggggcaagggtccaggaagcaagcatgttctcagccgaaatgcgaagttcagttttttccacccgtcaaatgggagtggaagcatcaccttacttacttaactgagtcatgaggattaaacaaagaccacctgtcatatattaagagctcaatgttgttattgttgacatctt

SEQ ID NO: 56944 - DNA, 2045 bp, Homo sapiens
tactcattttagttttagccttagttacagcccattcccagtaaggtgcaaaggcaggtggagacaggatggggtcagtgtggcttcttctcatcaccttcccccaagttgagggatctcagtgctcttttccttggcttggcccctaacccagagctcctttccctcccttccaaaaatcgcctttctgtttgctcacccgtgttcgtagcagcataattcaccagagccaaaaggtggaagcagcccaactgtccatcaatggatgaatgactcaacaaaacgtggcatttccatgcaaatagaatattatccagcctcaaaaaggaaggaaattctgatctctgctccaacatggatggaccttgaagacattatgctaaatgaagtaagctgaacacaaaaggacaaatattatatgattccacatgtaggaggtatccagagttgtcaaattcagagacagaaaatagaacagtgactattgggcctaggagragggggaggatgggaggctgttatctaatgggtagaaagtttcattttgagataattagaacatttctggaaaaggaggatggtgatggttgtacaacaatgtaaatgtccttaatgccactgaactgtacacttaaaaatggctaacatgggaaatgtaatgttatatatatttaccagaatataaaggacagaagtaaataaaaatatatcaataataaaaaaatccattttgcctcttgagactctgagaggggtactcatagtacagtattcatgccctgtggggggtatgagggtgaatcagtcttccagggattgggcttgccggtgaactcctaattggcccaccttattgctttcaacccttgagggaagctctttcctgggcatcctccctgggggatcctcaagttcacggggtcacagccttgacagggagcagcctccatgttacagagatatctcctatactgtcctggagccggggactggctactggtcgtgggtgtgtggctgggtcccccagcacttcacttgctgtcaatgcatgcatgtgcattcatctaggattaattaggcaccactgtgtgccaggtagagtgccaggctctgggatacagagccagctggtgccctgcttcaatgggcttttgttctagtggtcaatggtccattttgagcaccaggctctgagccattatttcatttcactctgacagccacctagcaggtgctgttggactctcagccttctttggagcagcattctttctgtggtgaaatgcctaggtccatttggagacgcgaatgggaggtttggtggtcccagtaagaagagatttctctccagtctctatctgtcccacttgcttgaaagactgagtcattcgagggcctcctctggggctagcaagggaccccgtaggtgccttggtacctcttcctgcagcccccagtggcccccatagcaggccaggcatagtcaaacccctgggaaagcccagctcagagccatcagtgatatctctgagagaagtgatgagtgtctagtcacagagcgaaaagggcagagactacattaccaaggccctaggtatagaagaccagtgccctcctgccagggctgtgcatatgcccagagctgcagcagcctttggggggaaattgcagattagaccaggcatggtgctgggcctccacgagacagctgtgcggaagctgtgatgcccttctcttgcctaattccacccttctgttttcacttgctgtgcgtcctgctaaattcccttctcaggctaaaagtttccatctctgggcttggcccaaagtgaaattctctggaaactttcagctgagttcacttagctattgttgagtgaaaggtaggtgggggaggagacgatttgggttcagcttagttttgatactgcaaatgcaagtgcggcgagacctagaactttccccttggctgctggggtttcagttggggtcagggaggcaaatggggtcatgaagacagctttgggctgggattgggacccctt

SEQ ID NO: 56945 - DNA, 705 bp, Homo sapiens
tgcatgctccattttgttgctcccattatacccttcttttatacactttctgatctggcagctacccaaagctctactcttaacatctgttacattctttgccacacaaccctcctctagcacctcaggataaagaagtttttcccatctcatgacatagagttcttttgctctagaatcagttaactgttctcattgcattttcatygaagatgtggatgtcctctgtcacacctcttttcctttcttatattttctacgttttcatatttctatattttggagtatgcagctctttctgcctagactttatctcatgcagctccactgtaatatgccccaaactgaactctcttctcttcattcccttgcctcttcctccactctgcccctaacactcctagcctcagatttctcatctgagtgattaacaccatcatgaaatctcttcctgaaataaaagtttaaatatcttagatatacctatttttcttaccctcctgtatttctctatcattttcactttcaaatctacttcctaactttctttcctctccttctttagccttgttcccatcatggctcagtggactatggttataagcctcctaacagggttccatcaatttttctaccctgccctctaagggggctaattctgagacaggaatgctaagtggaacctttactgggggtctcacaact

SEQ ID NO: 56946 - DNA, 1004 bp, Homo sapiens
tgcatacatatttatgctaaaaaattattcactgtgtatctgaaatccaaattttactggacacttttttttttaaatcaaaccctgcaagcctgtttgggctgtcattattacaagtgaactgctgtggtcttgcatgactgcttttctctgcacctcaggaaagtgctacctccaacggaattattcccatcagtggttcccaactgggatgtggtagagaggggcttctaattcctcctgccagtacagtaattatgaaagtagatccaccttcctgtctctcatcttctcaacctagttcccttccaaataagttcttagtttcttgaatytgaattccttctctaaggtgttttcaaaaacctgactggagaaaagacaacattcttaaatgtcccaaataagcacattactaactatggcaggcaaagctacctattttagtctcagctctgaaagaatttatgctatttaacaaggaatatgctccactgtttttttatatacctatatgcaccacagtgctggaatcatggcaagtggtatagctgtgtgttgtgtgtgtgtgtgtgtgtgtgtgcgcgcgcgttgtgtgtgtgttgtgtgggtgcgtgttgtgttgtgtgtgtgtgtatatgtgttgtatgtgtgttcaccctgttattatcttcaacacacagtggtatagctgtgtgttgtgtgtgtgttgtgtgtgtgcgtgttgtatgttatgtgtgtggtgtgtgttgtgtggtgtgtgtgtgtggtgtgtgtgagttttgtgtgttgtgtgttttttgtgtgttgtgtgtgtgttgtgtgtatttttttgtgtttgttgtgtgtgtttttttgtgtgtggtgtggtgtgtggtgtgtgtgtgtgttggggaaagggggttaggaataccctacacccagggcatttccactgcccgtcactggttgctggtgatcagatggacattgacttacatcgggttttcagaatcccaaagagc

SEQ ID NO: 56947 - DNA, 961 bp, Homo sapiens
gaattttaggtattttgcctaaaggttattaacaattagtaccactaggggaaaaatcataaagttagttagaataacaaccctctctcaaaggataatgaaaactggacttgtaatctggtcataataaaaatatattatgtttatattggagcctcacatgtcaagaggaaaactcacaaactagaatatgtccaacaggtggccatgactaaatgaagactgaaaaacaagttgtatgaggaccaatgaaggaatcttcctttgaagcagtaaagactgcgaaaaaaaacatgaaaaactgtctttagataaatcctttaacaggaatggtacacagaacagggagatgttataagtggagctactgatgacagcattagagccaaagggtgaaaggcagatgttgagtcattcaatagaagaggtgtctgatctcttcctatccaatgtagcagaatccatcccatactatatctgaaagatgaccactttgctttgacatttgcagtggtacagaactcactatctcaagaataccttcctcgggatggtaataagtatgagaaatgccctttctagttctaaatttcttctccacaagacaactcattccattttcaaacaattattagatctatccatctcttagtcttctatttgtcaagcaaacatctccaattcctcacatcattattaattcagtattstgaaccttgtaccattttagtcaccagctttgtggataatctttggattgtagtgtctgtaactgacatccaaattaagtgctcttgatatggtctaactagcaactgaccccatccatatttctatttccaaagcagagaaacaagaaaatcaattggccaatataactgaataaatccaggtaaatacatatttggctttcaattagtcaggaagtctgaatttctagaggatattgaagatacagcat

SEQ ID NO: 56948 - DNA, 719 bp, Homo sapiens
ctaatggtttccttgtgatgtcatttatctgttcctctatcatctttatttcctgtaaggtgggaattatagcaaaggccttgctcagactcagattaaacatgtttttttgcaaaaatatattgcaaaaaacttttcatacagcatcacataaggagaaacatgtcaggtgatttctcccttgtctaatacagcttttccccttcgcagttaacaaaaagtcaggaggcagtatttgtagttggaatattctattgttactgttggagggtgtccaggttcttggcttcttaagcaaataacttgataaaacacmcaaagcaaggaaagaatgaagcaacaaggccgggtgcagtggctcacacctgtaatcctagcattttgggaggccgaggctggtggatcatgaggtcaggagatcaagaccatcctggctaacacgatgaaaccctgtctctactaaaaataggaaaaaaaaaaaaaaaaaattagccgggcctggtggcgggccactgtagtcccagctactcgggaggctgaggcaggagaatgacgtgaacccgggaggcagagcttgcactcagctgagatcatgccactgcactccagcctgggcgacagagtgagactccctctcaaaaaagaaaaaaaaaaaaaaaaaatttgaagcaacaaaaaacaaaagtacactccgcagggtgggagcgggtccaagaata

SEQ ID NO: 56949 - DNA, 2286 bp, Homo sapiens
gcatgtagggatattttgcatattaaaagtaaaaatagccgggcacggtggctcacacctgtaatcccagcactttgagaggccgaggtggttggaccttgaggtaaggagttcgagaccagcctggccaacatggtaaaactccatctctactaaaaatacaaaaattagctgggcatggtggcgggtgcctgtaatcccagctactcagaaggctgaggcaggagaatcatttgaaaccgggaggcagaggtttgcgttgagccgagatcacactgttgcactccagcctgggcaacaagagcgaaactctgtctcaaaaaaaaaaaaaaaaaaaaaagcaaaaatgaccaaggcaaaatagctccattctgaattacacatccaccttctgaaggtaaccaatgctgtcagaatccagcttggtaaatactctgtttttcttttcttttcttttcttttttttttaactgagagaacatatacaaaatcaactttatcttatcctggaatcacattctactataatgaaagacagatagccttgtctcaagaaaagtaaaagcaagaaagtagctctagcatggaggtgatacccaaatataaacagggctggtttcagaatttctaagcaggcttccaagaaacaatctgattggaagcagaaggcaacctattggtcttgaagctacatttgcagaaccagatcacccttcttacttggattgtgggtttactaagagtgttggagtgggtagctaacggagattctacctttaactatattaatgcaaactgtggtatagccctggaaataatactgctactgcatgcaatatcatcagccagatctttcttagaagacagctccaatctatcgactttaaaagaaatacaaatgaatgagaaaatgcttttgaaaaacagcgaagacactcaaggatgcataaatgtaaactgacaaacatgtaaacaataaagcaaaagtgaatgtctatttctcctcctctcatatcttgcagggcactaccgggaaagtttttttatagtaggcctacatgatagagtactttgtacaaaagatcagagcatgattagctcaagcgttagatgaccataaaactggagttacacaatataccccaatgtacagtttatgtcacaaaataaaaagaaagacttcctcataatcatgtttctttcacattttaagtgtttggtgtttttgactaaccatattatgctataaaatcaaaagtaatcacttttagggtcctttgagaaatccttcttcatacttatatatattttttaaaaaggytaggagcaacaaatcctggattcttccataatttaagtgcaacccccattttttaaatcatgaaatagagtttaaattggcaggagggggagctgcccaacaaagttgtacctagagagaacctttcctgtaagtcccttttgaacaaataagtggttctaatcaaattgtggatgtatgatgagattctcaaaacaaaggaagtctactcctctaggagacactagattgaatgaagcatttcatagcatttcatctatggaagaactaggccctctcctgaaaaatacttgctttggtccctaccataaagcagcaaggtagtaaaggagaaaatgctgtgacagtgttttcttttgattcagtccagtagctatggaaactatcttttaaatgccaattggtcctcttccctgcaactacataaaataaaaccatttcttaccctcacggatgccatggctggaagctccatttttcaacacgttcaactaatctaagccctctcccacttttgctcagtatttgcaagctgaagctatcatatttgattgatactatggatttaaattagaatacacatgaatgtacttctaactaaggctgcgaggagtaataatgcccaaaccacaagtaaacatttgttaaacctgcttgatgtgctccaagaaaaacaacgtttgcttctttctctttccctatatctcttcttctgaggtaaaaatgcatgtaattcccatcacttgtaacgtgtttttcttttcagtgcctgtgcatataccataggccacaagctgcaattcagggtcaagagtttccttctatttacaaatataaaaaattaagatttttcttttgtggctccctcaataggaaaatggtagacaagctaaaatataaactgatactagggtctgactgtttttctgcatggatttcaatcctatcccattcaaaacagaatc

SEQ ID NO: 56950 - DNA, 733 bp, Homo sapiens
actaaaaatacaaaattagccaggcatggtggcagatgcctataatctcagctactcaggaagctgaggcaggagaatcacttgaacccaggaggcagaggttgtggtaagcagaaatcatgccactgcactctagcctgggcaacacggcaagacgccatctcaaaagaaaagaaaaaaaaaaagagctgggtgcggtggctcacgcctgtaatctcaacactttggaagaccgaggcgggcggatcacaaggtcaggagattgagaccatcctggctaatatggtgaaaccccgtctctactaaaaatacaaaaaaattggccaggcatggtggcgggcgcctgtagtcccagctactcgggaggctgaggcagaagaatggcatgaacccgggaggygaagcttgcagtgagccgagctcgtgccactgcactccagcctgggtgacagagcgagactctgtctcaaaaaaaagaaaagaaaaataaaaaagaaaatgctgctacaggagtcatgttggtaccagaaatatgatgttaaataaaaccaacaaggtgttattcaagtttgataaaacttaaatattactggcaagaaacttggtaccaacatgattcatttacagtaattacgtcacattcaacaaatcatcctgattttataatatagttaggggctggatgcgatggctcacaccagtaatcccaacattttgggaagctgaggcagaa

SEQ ID NO: 56951 - DNA, 936 bp, Homo sapiens
gaaagaacagtgcctaaggttgaggcagctagaggaggctcagggagkaggcaggaactgagctgggtttggagttgagagagcccttgacaagcaccaggaaggcgggggatggtgtggtcctgcaccctctgatggggaccattaagagatcgagttggctgaagcataggctttgtgtaagtgatgggcctgggaaggtagctatggacgccagactgagcacccacggcaggaccatgtggatggggacgggaggggtcaggggccagggcagggtggaatgtggagcagaggttcaggggaagtgatcagagtcgggaggtcatggagacgagcctcccagaactgggagacaataaacttatgtcattgaagccatgcagtttatgaccctctgttattgctgccctagcaaatggatacaggtagccatttagattgtctgctgagcccactaatgtctgctgagcccactaactaatgatttgataaatatatactcatgtctgcctctctggggatttgtgatagtttttttgagttatatgtcataaaataggatagctgcatcatctggtatacatatgatcaaactcactaaataatgacagatttctcttcagaatcactctatcaatttacgcttcctccatagtgcagggctattgtccattccccagcttcctgagcattttcagatttgtcagacttttgtcatgtgcttttagtatgccctgcatttcccctgtctggaaattacatattccagacaatgaatattctattcataacaatgagtttttctaattgaagtgtaggatgattctcttaataatcagaagctgtgccataagtactttctcccactgtttgctctttttaatcttttatgctgttctttgataaatggaaactttcattattctttgataa

SEQ ID NO: 56952 - DNA, 859 bp, Homo sapiens
attaagaagttggcctcttatacattatctcaatctctgccaaatgtagacttgccttcctctcacttttttcttgtttacagttaccttgcatttcatggagtattggaagactcagtttcaccccattcatctttcaaggatcagctcaaatattatattttctaataccacaggcaaaaatcattgactatccatcaagacagattcttgactgaatttttaaaaatacgtttctacatgttttgaattaaaaattaggaccagtaacccatataaatatacatgtatcttcaaaacttaacatgtgatgtctttaatattgataaaactatcttatccatgtacattatccatgtacataagagtcatagaaatgaagaccaaaaattccacccaaagaataatattaattcttgttgtgggaagcgagggaccctgaacagagggagtggctggagccacggcagaggaacataaattgtgaagatttcatggatatttaccagttctcaaataatactttcataatttcttatgcctgtcttactttaatctcttaatcctgttayctttgtaagctgaggatgtatgtcacctcagggccactatgataattgtgttaaccacacaaattgattgtaaaacttgtgtgtttgaacaatatgaaatcagtgcaccttgaaaaagaacagaataacagtgattttcagggaacaaaggaagacaaccataaggtctgactgcctgcagggtcgggcaaaatagagccatatttttcttcttgcagagaacctataaatggatgtgcaagtagggaagatattgctaaattcttttcaaggaatattaataatta

SEQ ID NO: 56953 - DNA, 1125 bp, Homo sapiens
tgcatcccacgctagacatggcagcattcagtgggaccatcctggggctgactagattacctctaagcttgctctttgggaattttacatttattttatttatgtgtgcctggggcgatgggcaggtgttcctctaacaaatgtggccaatagtagggcagattcaagatgcccatgatgaagagtggggtctgatggagagggcagctatctcctccccagaagcagtctgctcagaagcccttttccttttttgttgcaaatccatattaagtaagcagtttccttaccaaaaagaaggcaacctaccacactgagggacatcacagtagtcgtaaagttttcttggatttgtcgtgtagcaccagggaccacctacatcaccatcagggttacggcagtactgaaaacaagaaggcatgtaagctccagctcacgtggggcaggagagggagaaggtgttccaaggctcacgcatttcatgtctatccttagaagacataaaggagtgtttctttttccttccttcttttttttttttttttttttttctgaggtggagttttgctcttgtcgcccaggctgagtgcagtggcatgatctcagctcactgcaacctccatctcctgggttcaagcgattctcctgcttcagcctcctgagtagctgcaactgcaggtgcacgccaccacacctggctaatttttttttstattttcagtagagatgaggtttcaccattttggccaggctagtctcgaactcctgacctcaggtgatctgcttgtctcagcctcccaaagtgtagggattacaggtgtgagccaccatgctcagcctcttcttcctttctattattattattattattttggcaaagttattttttgaatgctctaaagccgtccttcctgtgcccctgttcaaaaggagctatgaggccacacccctggacagggagtggtgaccctcgggggtctttggagaatgggtctcccttcaggagcctgacccagtggaggccttagagccccagcaccaaaggacagtgggacatcattgatgtgcattgtccctggagggctcagcgctctcctacccgatgaagcctgtttgctgttgatt

SEQ ID NO: 56954 - DNA, 640 bp, Homo sapiens
atgaccatgttattttagagacatttacaggtcactcagggagtatgaaggaggcaaacactttggctctcttatatctgtcactcacaggaagctggtggcttaaagtttttaagacatttgttttggttgagttctccaccagaagttgagcaaggcagaattgcaagggcaggtccaggttttgtgatgtctgaagctttagacaatataagttgtcctatttaagaaagataatataaaatcataaataaaaaactagatatgaaaatgagtatktaacttgaagccccagctaggcacagtgtctcacacctgtaatccttgcacattaggaggctgaggtgggagccttgctcgaggccaggaatttgagactagcctgggcaatatggcgagaccacccctctttacaaaaaaaaaattaaaaattagccaggcatggttgcgcacctgtagtcagtcccagtgactcaggaggctgaggcaggaggattgcttgaactcaggaatctgaggctgcagtgagctatgataatgccactgcactccagcctgggtgacagaatgagaccctttaaaataaaaataataataaatagttagaagccaacccccccccccccgccttgcaactggg

SEQ ID NO: 56955 - DNA, 640 bp, Homo sapiens
atgaccatgttattttagagacatttacaggtcactcagggagtatgaaggaggcaaacactttggctctcttatatctgtcactcacaggaagctggtggcttaaagtttttaagacatttgttttggttgagttctccaccagaagttgagcaaggcagaattgcaagggcaggtccaggttttgtgatgtctgaagctttagacaatataagttgtcctatttaagaaagataatataaaatcataaataaaaaactagatatgaaaatgagtatgtaacttgaagccccagctaggcacagtgtctcacacctgtaatccttgcacattaggaggctgaggtgggagccttgctcgaggccaggaatttgagactagcctgggcaatatggcgagaccacccctctttacaaaaaaaaaattaaaaattagccaggcatggttgcgcacctgtagtcagtcccagtgactcaggaggctgaggcaggaggattgcttgaactcaggaatctgaggctgcagtgagctatgataatgccactgcactccagcctgggtgacagaatgagaccctttaaaataaaaataataataaatagttagaagccaacccccccccccccrccttgcaactggg

SEQ ID NO: 56956 - DNA, 723 bp, Homo sapiens
ccaagactggggataagctgggcactatgaaaagctaacttccaaatcaaaatctatggcatagaaatatgacatcaggagaccctaaatatgaatggatcagctttgagaatttgagtttgtgacaaacttgatcagcagtacaagggcgttggtgggaagcaaggcctggaaataaggatggatgcatgaaatctagggcagtctgtagccatatgtcctgaacctgtgagctcacaacttctccaggctcacaatcctttatccacaattcagaaacccaaaaagctctaaaaacccaggcttaaaaaaaatttttgttgtcaaaatctgacctaaatggttgtgagaccacttaaagtctttattctacttagttttaaaattcacacattttgtggtataaataacaatgtgattgattttacattgttgctcctggccttactggagggtattgtgtaatatatggtatatgtatctcttaacctttctggaataaaaaagttgtaaattctgaaacatatctgctctcaagggtttttcytaagaaattgtagacttgtaataaatatcttacctgaaggcccaggcacaaatagttcccttcttgcctctttatggtttctgatttgactttctaacattatttttaatgattctgatgcatatgcatttttagtatgagctctcaatttttttggcaatagaggtcccctaaaa

SEQ ID NO: 56957 - DNA, 1440 bp, Homo sapiens
gaagaagaaaattgaaggagcagttgtaaagttttctttcaggaaatttgtgaacagaggaaaaaagatgagagtgggaagagaagcaagaccctttgggggcatagggtttttttttaagttttggtagccccaagagtggttacgtagtatctacctggtatgtgtcatcaggcactcgggaggtgtttgaggtttgcagatagaagggagggaataactgctaccgcaaccaagagcgtgggagggaaaggggttaagagcgcacagctggagaacagcctgggttaaaacatggggcattttcttcctcattgtcttcaagcctgttactgaaattttttttttcttttatctttttttttgagacagagtcttgctttgtcacccaggctgaagtgcagtggcgcratctcagctcactgcaacctctgcctcccgggttcaagcgattctcctgcctcagcctcctgagtagctgggactacaggtgcgggccaccacgcatcgctaattttttgttacttttggtagagatggggtttcactgttagccaggctggtctcgatctcttgacctcgtgatccacctgccacggcctcccaaagtgctgggattacaggcgtgagccactgtgcctggcctgcaattttttttaaatgcctactgccagagctgggagatcgatgtaaaaatgggaaatattctcctcagaagcaatgtcatgtaatgggagttatagtttctatactataatctagacgtactaagtatggtctaacaggtttttatgggattcgtctggaaaattaataccatatgttaacactctttctatgggaaaatgcttctgaggaagaaaccaccttacaaactaacttaggcgtgacccagtcattattagactatagagactgccaccacccagttctgggcgagtcaggagcagtatactatgaaaagctgttactgccacctgcctcgtattctgccttttgaaacaagtcacaggatcacagaacgcccaggagcaagcggctgatctctctaaaaacagaacaaaaccttttcagtgttttgctttaaaataatcaatgattctctgagacaagtggctggacattagttttctccccatagctccctccccttttgcacttaccaaggaaaacaaagaagacaatctgaaaacaattaaaaggatttaaaaattactcttttacttttattacaataaataattatcaataatagaattaaacaattttcaattaaaacctactgcattactttggggtttcacagcagcagaaacaaacataaatccagttgaaagggcaaggcttccagaatccagtgacaagaaacagtctggtcttgattattcgggctagcaatgggaaacactgatacagataatgcaaaaacaatgaaatgca

SEQ ID NO: 56958 - DNA, 819 bp, Homo sapiens
attctttcttttcaaaagaaatgaaaaagtcatctaaaaggaaaatatcttgcaataatgagatatatgtaacactcagccggagttaagccccagttaatatggttttctgaattgggctacttttctcatttgcctactgtgggtaccacacaggtagacttcataaacctgagttatctgtctattaaagagcagcaggggctctttgaytcaggatttcattaaaacaacaaaaggattttgggggaataactgaattcgctctctggaattagagatacatagtttaatacatacatattctttccataaattgaatgatttaggtgatcaaaatgagttctgatcacaattcccggttcctccatgttaagaaataaacaatgattgttacccatagtggctgtagatatagctctgtgctgggtgagattgtttttctgtgttctgtctgtggttcctatgacctctctcatgctctgtcacttgggatatctagctcttattctagagtctttcaaagtcttatttttcacaccagagcatttggccaaggttcagcatttaaccactgcgtctttgtctttttttttcctgtagctttatcttccactctccactgaaaatccctgggtatctacttaattgattaaagtcaggagaggttgtgggcactgcagctttctgatattttaagattggcatatctgcattatctctgccatgaccatcattggtcgaatccctcacttgtttgtttatttttaaggacttaattattgtagagcagtttttggttcatagcaaaattgaaag

SEQ ID NO: 56959 - DNA, 819 bp, Homo sapiens
attctttcttttcaaaagaaatgaaaaagtcatctaaaaggaaaatatcttgcaataatgagatatatgtaacactcagccggagttaagccccagttaatatggttttctgaattgggctacttttctcatttgcctactgtgggtaccacacaggtagacttcataaacctgagttatctgtctattaaagagcagcaggggctctttgattcaggatttcattaaaacaacaaaaggattttgggggaataactgaattcgctytctggaattagagatacatagtttaatacatacatattctttccataaattgaatgatttaggtgatcaaaatgagttctgatcacaattcccggttcctccatgttaagaaataaacaatgattgttacccatagtggctgtagatatagctctgtgctgggtgagattgtttttctgtgttctgtctgtggttcctatgacctctctcatgctctgtcacttgggatatctagctcttattctagagtctttcaaagtcttatttttcacaccagagcatttggccaaggttcagcatttaaccactgcgtctttgtctttttttttcctgtagctttatcttccactctccactgaaaatccctgggtatctacttaattgattaaagtcaggagaggttgtgggcactgcagctttctgatattttaagattggcatatctgcattatctctgccatgaccatcattggtcgaatccctcacttgtttgtttatttttaaggacttaattattgtagagcagtttttggttcatagcaaaattgaaag

SEQ ID NO: 56960 - DNA, 2073 bp, Homo sapiens
gaagtatatattgcatgtgtataaacactttaaaataattatactctttattattttcaaggtgtcacaaacagaatatattattgaaaagaatttccctatataaaaatattattgccacttcccaaaattagcagtcatattttttttctagttattttgactgctggaaaaaatcagaatgagcaccataagactttaggtaattctgggcaatatcttcatatgatcagtctctgccactaaatctaataggtgttgcattttgcacctatgaacagacctcacatattaagaacttaagaaaagctaacttgccagtaaattgcaattaccatatgagcactaaggtgcagtctgttcagaagctttatgtcataatttccatagataagataaaatgatatttaatttgtattttttattttattaataggatattttatagatgccattccttcccacactctaatttatctcattttatagtgctttccttaaggccctggagacaacctacttattttttaagactgtttcctaaatatttgggaatgctgttattattttctcagtgaatcagagggtagcttgtaacataaactatgtttgtagtttatgctgctaaaatctttggtgctttggtttggcaagcaaaagggcatgggcccaatgagaataactagaaaggctatggggattgctactgctaatgtcacacatgagcgcacacacacacacacgcacacacatgtggatatatatatacacacacatatacactcatatatgtggcatatatatggctttgtatggtattaatatgaagttctttagataatattttaagcattgaccatcatcaaaagaagaaaatatagatccatcagaacaccatggatttcataatttgtaaggaaagctggaacaggatgaatgtagtgagaaattcatgtattcattcaacaaatatatatgtgtatatatatatatttgcacgtgtgtgtgtttgtgttaaacatcttagaaagtgaagcaacctagtctaaggttttaatgttgaaatcaagttcttatcaaaattttacaactgcaacatccctttctccctaaaaagccaaaagccttggaaagcattctgggaaactgaggtaattttagaatagaggtcatgaaaacatatttttataaaaggggtgattatgtcatcctattggaaaaattatttagaagaaaatcttcaacatactagtcagtatagtagatgataaaataaaccattactttcagattatttacaatatttatttaatatcaaaactgcyggtggtcattataataaatatcatctacttttatagttgccttctattttgttccaatgtttggggctttagatactaaaaagacttttagtgaacctgtgagaatttacttaaagctgttagtgtatgtgcgtgtttctttccattgcaggttatgagaacatatttaaagtatcccattacttttcttgtttaataagaaccagtattattttgtgggcataatttagaaactctattacagacatgtttgctgggagttgaaaatgttaattaaagttcttaaatatctggttgttattttattaaatgtaaaagtgtcaatgtcatagactgtatgtttcttataagaaacataaagaacagaaccattacccatatagtctacttttaatgaaatgatattaattgattctttgtatataataaacatttaatattaatgcaaacttaactcatggtaccaaactaagtggttgtagaaaaatgctggctttatttgaaagatgttgaattgcagtgggaaaataaaaaaacaaaacaaaacaaaacaaaaaaaacaaaaaacaaaaaaacaaagactaaatatcagtagacatatttctaggttagaatctgctttaattagcttttattgtaaatgagatatttggcttttgggatctcagtttcctcagctataaaatgatttctttcttctttttatttgtatatatttgtggggtacctgtgcaattttgttacatgc

SEQ ID NO: 56961 - DNA, 2073 bp, Homo sapiens
gaagtatatattgcatgtgtataaacactttaaaataattatactctttattattttcaaggtgtcacaaacagaatatattattgaaaagaatttccctatataaaaatattattgccacttcccaaaattagcagtcatattttttttctagttattttgactgctggaaaaaatcagaatgagcaccataagactttaggtaattctgggcaatatcttcatatgatcagtctctgccactaaatctaataggtgttgcattttgcacctatgaacagacctcacatattaagaacttaagaaaagctaacttgccagtaaattgcaattaccatatgagcactaaggtgcagtctgttcagaagctttatgtcataatttccatagataagataaaatgatatttaatttgtattttttattttattaataggatattttatagatgccattccttcccacactctaatttatctcattttatagtgctttccttaaggccctggagacaacctacttattttttaagactgtttcctaaatatttgggaatgctgttattattttctcagtgaatcagagggtagcttgtaacataaactatgtttgtagtttatgctgctaaaatctttggtgctttggtttggcaagcaaaagggcatgggcccaatgagaataactagaaaggctatggggattgctactgctaatgtcacacatgagcgcacacacacacacacgcacacacatgtggatatatatatacacacacatatacactcatatatgtggcatatatatggctttgtatggtattaatatgaagttctttagataatattttaagcattgaccatcatcaaaagaagaaaatatagatccatcagaacaccatggatttcataatttgtaaggaaagctggaacaggatgaatgtagtgagaaattcatgtattcattcaacaaatatatatgtgtatatatatatatttgcacgtgtgtgtgtttgtgttaaacatcttagaaagtgaagcaacctagtctaaggttttaatgttgaaatcaagttcttatcaaaattttacaactgcaacatccctttctccctaaaaagccaaaagccttggaaagcattctgggaaactgaggtaattttagaatagaggtcatgaaaacatatttttataaaaggggtgattatgtcatcctattggaaaaattatttagaagaaaatcttcaacatactagtcagtatagtagatgataaaataaaccattactttcagattatttacaatatttatttaatatcaaaactgctggtggtcattataataaatatcatctacttttatagttgccttctattttgttccaatgtttggggctttagatactaaaaagacttttagtgaacctgtgagaatttacttaaagctgttagtgtatgtgcgtgtttctttccattgcaggttatgagaacatatttaaagtatcccattacttttcttgtttaataagaaccagtattattttgtgggcataatttagaaactctattacagacatgtttgctgggagttgaaaatgttaattaaagttcttaaatatctggttgttattttattaaatgtaaaagtgtcaatgtcatagactgtatgtttcttataagaaacataaagaacagaaccattacccatatagtctacttttaatgaaatgatattaattgattctttgtatataataaacatttaatattaatgcaaacttaactcatggtaccaaactaagtggttgtagaaaaatgctggctttatttgaaagatgttgaattgcagtgggaaaataaaaaaacaaaacaaaacaaaamaaaaaaaacaaaaaacaaaaaaacaaagactaaatatcagtagacatatttctaggttagaatctgctttaattagcttttattgtaaatgagatatttggcttttgggatctcagtttcctcagctataaaatgatttctttcttctttttatttgtatatatttgtggggtacctgtgcaattttgttacatgc

SEQ ID NO: 56962 - DNA, 2073 bp, Homo sapiens
gaagtatatattgcatgtgtataaacactttaaaataattatactctttattattttcaaggtgtcacaaacagaatatattattgaaaagaatttccctatataaaaatattattgccacttcccaaaattagcagtcatattttttttctagttattttgactgctggaaaaaatcagaatgagcaccataagactttaggtaattctgggcaatatcttcatatgatcagtctctgccactaaatctaataggtgttgcattttgcacctatgaacagacctcacatattaagaacttaagaaaagctaacttgccagtaaattgcaattaccatatgagcactaaggtgcagtctgttcagaagctttatgtcataatttccatagataagataaaatgatatttaatttgtattttttattttattaataggatattttatagatgccattccttcccacactctaatttatctcattttatagtgctttccttaaggccctggagacaacctacttattttttaagactgtttcctaaatatttgggaatgctgttattattttctcagtgaatcagagggtagcttgtaacataaactatgtttgtagtttatgctgctaaaatctttggtgctttggtttggcaagcaaaagggcatgggcccaatgagaataactagaaaggctatggggattgctactgctaatgtcacacatgagcgcacacacacacacacgcacacacatgtggatatatatatacacacacatatacactcatatatgtggcatatatatggctttgtatggtattaatatgaagttctttagataatattttaagcattgaccatcatcaaaagaagaaaatatagatccatcagaacaccatggatttcataatttgtaaggaaagctggaacaggatgaatgtagtgagaaattcatgtattcattcaacaaatatatatgtgtatatatatatatttgcacgtgtgtgtgtttgtgttaaacatcttagaaagtgaagcaacctagtctaaggttttaatgttgaaatcaagttcttatcaaaattttacaactgcaacatccctttctccctaaaaagccaaaagccttggaaagcattctgggaaactgaggtaattttagaatagaggtcatgaaaacatatttttataaaaggggtgattatgtcatcctattggaaaaattatttagaagaaaatcttcaacatactagtcagtatagtagatgataaaataaaccattactttcagattatttacaatatttatttaatatcaaaactgctggtggtcattataataaatatcatctacttttatagttgccttctattttgttccaatgtttggggctttagatactaaaaagacttttagtgaacctgtgagaatttacttaaagctgttagtgtatgtgcgtgtttctttccattgcaggttatgagaacatatttaaagtatcccattacttttcttgtttaataagaaccagtattattttgtgggcataatttagaaactctattacagacatgtttgctgggagttgaaaatgttaattaaagttcttaaatatctggttgttattttattaaatgtaaaagtgtcaatgtcatagactgtatgtttcttataagaaacataaagaacagaaccattacccatatagtctacttttaatgaaatgatattaattgattctttgtatataataaacatttaatattaatgcaaacttaactcatggtaccaaactaagtggttgtagaaaaatgctggctttatttgaaagatgttgaattgcagtgggaaaataaaaaaacaaaacaaaacaaaacaaaaaaaacaaaaaacaaaaaaacaaagactaaatatcagtagacatatttctaggttagaatctgctttwattagcttttattgtaaatgagatatttggcttttgggatctcagtttcctcagctataaaatgatttctttcttctttttatttgtatatatttgtggggtacctgtgcaattttgttacatgc

SEQ ID NO: 56963 - DNA, 771 bp, Homo sapiens
aaacgtctttcaagtctgtgtatttctgtttaagtcaagaaaaaatttttattgacctagtccaagtacttgcagatcaacagtggtagtgatggtactaggtcaatggaaatgtttctcctaattattatttttaactttgtatcaaataaaaacattcataaagttcttcttgacagaatttcacagtaaaacataaatttattttatatatatatggctttgcattgtattaatatggagttctttagataatattttaagcattgatgatcatcaaaggaatataatatagatccacagaatatcgttgaytttgtaatccgtaaagaaagctggaataggatgaatgtcgtgagaaattcattcattcattttgacaactatttatttggtacccaaaatttacaaaatacaatttgttggagtttacatgttaaaccatggtctctgcacagaagggacagaagcaaagagagacaaagagagagggagacagggagagagaacctgatcagacttgtctgggtgttgcaagttgttattgtgtgaaatggcattctttaaagtgaagggattataatcctatttgattttctagttgactgaagggcttcaaggtggggtgaaatatgtcacaattagtgtttaatgacggaggaagaaagttttcaaacatataatacctgctaggaattctagtactgacatgtttcagacattagtaaaaactacaaaaagaagaaaaaagtgaaagctggaaaagaaaca

SEQ ID NO: 56964 - DNA, 771 bp, Homo sapiens
aaacgtctttcaagtctgtgtatttctgtttaagtcaagaaaaaatttttattgacctagtccaagtacttgcagatcaacagtggtagtgatggtactaggtcaatggaaatgtttctcctaattattatttttaactttgtatcaaataaaaacattcataaagttcttcttgacagaatttcacagtaaaacataaatttattttatatatatatggctttgcattgtattaatatggagttctttagataatattttaagcattgatgatcatcaaaggaatataatatagatccacagaatatcgttgactttgtaatccgtaaagaaagctggaataggatgaatgtcrtgagaaattcattcattcattttgacaactatttatttggtacccaaaatttacaaaatacaatttgttggagtttacatgttaaaccatggtctctgcacagaagggacagaagcaaagagagacaaagagagagggagacagggagagagaacctgatcagacttgtctgggtgttgcaagttgttattgtgtgaaatggcattctttaaagtgaagggattataatcctatttgattttctagttgactgaagggcttcaaggtggggtgaaatatgtcacaattagtgtttaatgacggaggaagaaagttttcaaacatataatacctgctaggaattctagtactgacatgtttcagacattagtaaaaactacaaaaagaagaaaaaagtgaaagctggaaaagaaaca

SEQ ID NO: 56965 - DNA, 771 bp, Homo sapiens
aaacgtctttcaagtctgtgtatttctgtttaagtcaagaaaaaatttttattgacctagtccaagtacttgcagatcaacagtggtagtgatggtactaggtcaatggaaatgtttctcctaattattatttttaactttgtatcaaataaaaacattcataaagttcttcttgacagaatttcacagtaaaacataaatttattttatatatatatggctttgcattgtattaatatggagttctttagataatattttaagcattgatgatcatcaaaggaatataatatagatccacagaatatcgttgactttgtaatccgtaaagaaagctggaataggatgaatgtcgtgagaaattcattcattcattttgacaactatttatttggtacccaaaatttacaaaatacaatttgttggagtttacatgttaaaccatggtctctgcacagaagggacagaagcaaagagagacaaagagagagggagacagggagagagaacctgatcagacttgtctgggtgttgcaagttgttattgtgtgaaatggcattctttaaagtgaagggattataatcctatttgattttctagttgactgaagggcttcaaggtggggygaaatatgtcacaattagtgtttaatgacggaggaagaaagttttcaaacatataatacctgctaggaattctagtactgacatgtttcagacattagtaaaaactacaaaaagaagaaaaaagtgaaagctggaaaagaaaca

SEQ ID NO: 56966 - DNA, 935 bp, Homo sapiens
tgcatttgtatctggtaggcagggggatgactgcacctgtaaagacaagctatcgatttacattaccatggcgaaattttaacaggaacaccttagggcagaaatcttggagctcaccaggaatttccttgtgggcaaaatatgggggaggcgtgtaggttatcatcttgcagccctcttatttaggaaccaaaaggggaggcaggtttgcctgacccagttcccagcttaacttttccctttggcttaatgagtttggggtcacaagatttattttcctttcacagtatgtaagccctgggtctgggaaggccctgggcctgggggtgatggttgggaaaccaccacctygtctcaccactgccagagacacagatgtggcttctgtacataagtccctattaaatgtttctctctaaagaactagatttgccagtccctttctttggcgtctcagcttcctctgactttggggcagatttgtataggcctggccactgaggaacagtcactaaccattaggaaaaggcaaatgaaaaccaccttatcattttatacctaccagtatgaccataatacaaggctgtgaaaggaaagtatcttgggtcccttcaacctgcctcccattctagtcagtcatccctctgctcactgagacagatgcacagctgactgtctcctttggaaaggctgatcagaaactcacaagaatgcaactgttcatctctcacatatctgtgacctggaagcccccttcccgctttgagtcttcctgtccttgcttcaagttgtcccgcctttccagactgaaccaatgttcttcttacatatattgattgatgtctcatgcctccctaaaatgtataaaactaagctgtgccccgaccacctcgggcacatatcatcaggacctcctgaggcagtgtcatggatgc

SEQ ID NO: 56967 - DNA, 918 bp, Homo sapiens
tttaatcttcaataacaaccttctacctttaatattattttagtatcccttttaccaataaggagaatgagactttaagagactgtatcacttgccaaacggtttgcaaagaaggaattcaacccaaggcacakttggaatctagatcctatgttcttaagccacaggctatatcacctcattgtctaactagtaactacattcattcatctgaacactccaaaaatattatcctattatatccatctagggaaataaacataaatatgatatgctcctttcctctgggagcttattacttatgggagggtgggggatcctataaacaataaacaccttgatctttttggtcaaatacttttctgagattcatatgaaaactacagacttcagagaaaattcacacaggcatagacacaaaaaactcgattgactgctcagaccacaggttaggaatccctggaatacttaactagctgaccacaaactgcatggagttttgattaagataagaacaaaatattatgagaattcgaaggagagaccccagagtaaagaagtcctgaagattgagaggtatataagtcaggcaaagaaacagggatgatggaccttcaatggtgaggtacatgctaggaaaaagagctaaagaggaaacaggaggaaagtagggagaggcaacaggcccctgaaatggtccaggcaagagtttcctacttctagaaaggatgtagcaaggatgaggtatcagagcccaggctctggggtcagagagtactagcctcaattccaagctcttcccatttctcattagctattcacccagggggaaattactcaagccttctaagcttcagtatcgtcatctgcaaaatgagcataagaacagtctcaacttcacaggctgttgtggaataa

SEQ ID NO: 56968 - DNA, 501 bp, Homo sapiens
atgggagtaagagaactgcaatctatatgattgtagtgaggattggagggaatcaagtgatttgtctctattctgtgcctggcatgtaataggccctcaataaacatgggtcttattattgttagtattgtcattattattatttttgtaatttaattattacacccattacttgaggaaagtggtattgtacacattttcatatgagaaaccaaggcttaagtaaccaagagatttgcctagagcagtggctctcacctgaggatgattttagctcccagaagacaytgggcaatgtctggagagctgtttttggtggtcccaactggcagcgcagggtgttactggcatctcctgggtataggccaggggtgctgccgaacattctggaatgcataggacagcctctgcaacaatgatccagccccaaatgtcaatcgtgccaaggctgagaaagtctggcctagagtcatggacctgccagatcaaggagcagaattc

SEQ ID NO: 56969 - DNA, 501 bp, Homo sapiens
atgggagtaagagaactgcaatctatatgattgtagtgaggattggagggaatcaagtgatttgtctctattctgtgcctggcatgtaataggccctcaataaacatgggtcttattattgttagtattgtcattattattatttttgtaatttaattattacacccattacttgaggaaagtggtattgtacacattttcatatgagaaaccaaggcttaagtaaccaagagatttgcctagagcagtggctctcacctgaggatgattttagctcccagaagacattgggcaatgtctggagagctgtttttggtggtcccaactggcagygcagggtgttactggcatctcctgggtataggccaggggtgctgccgaacattctggaatgcataggacagcctctgcaacaatgatccagccccaaatgtcaatcgtgccaaggctgagaaagtctggcctagagtcatggacctgccagatcaaggagcagaattc

SEQ ID NO: 56970 - DNA, 639 bp, Homo sapiens
cagatgcaaaacttgggaataataacgtagtcatttgcttaaggtgaaaccactagcccggcatcaagctgaggctgcagctgccctcgggccgccttcgggcagctctgactccaggccgttctccagtcaccaaagcccttagagaagacccaggatcatgagcgcaaaagcaggacatctgccttggcacggaagaactttgagcccaggctggtcaaatacatatgcgaatagtttaaaaaaatagttcaaggcaacataaatctctaggaattgatggtgatggtgggctgtggcgctgtgggccggcgccggagggacagctccgcagaagatctgaggttgggctcagaggggccactgctgcccgcctgcatcagtcacccgtgccggtgcctcggccttgcttttgacctttttcagaaagggacgagaaccctccctagctttctaatcaagggactttatgacaggaatatttttggagtagtgtaagaagtgggacagcatgagcgagaggccagacagaaggtgactgtgcagacaagtacgaggcggkgcgttcactgcctgcataacagacgaccccgggctctgcaggaggtgatgagcatttacgggagcagctctggcggg

SEQ ID NO: 56971 - DNA, 649 bp, Homo sapiens
attagagctttcctagggtttagagtcctatctcatttgaaatgtctstcttgagaaaaatctcttattatgactccagaaaattactcttcctaatatcaaacctattataatttgttgtataaagtttgatgcagctgtctcccacacataaacacaaacctttaatcatcttttattcttaccacatttgtttcttagaacatgtattgccaaaccattttcaacagcatatatataacattaaaaaatattttctaaaatagtgtggcattagcatatttatctttatgaattgtcacaattggtggaaggagtgcaattctttgtgtagatcagatgtctttctctgggtacctatcatttgtatccaggggagtaattgtttcaaatggagatcaaaggcagccttaaagggaaaattgagttacaagaggatagctattccaataaagacttaaagctgagaaaggcatacaatggtgactgggggaggcatatgagctcaggatgtctgtgaaccttggggaccaacatctggaagagctgctatcttcttctctgattggtctccaagatactgttctattgagttacagtaggtactagcaggtgccatttgcttaattcatagactgaattaaaatcc

SEQ ID NO: 56972 - DNA, 917 bp, Homo sapiens
ctgggcagtgacttatttggcagttaaagaagttaccacatatcgtttttgatgttttttatttgatttttcatttaactcttctcacaactttaaaagataaagttaaatcaattttcaattaagataattgagattcagagaaatttaagtaactcgcccaatgttacagtgggagttagtggcagactcaagattttaaactgtatcttcctgatttcattgtatcttattcattctgccatactgactcagcttttggtggaaatgaacagtttctgtgttaatatattggctgacttatctgataagacaggtattttatatcattgtgttttctgtacaaaaagcattaagtaactgcaggtcttttttcttatttttcatggcattgcctgctgactacacatagcatttgatataatataaatgtgcagaaggtaggaatcgtttaaaggaggagaaagtgaaaaaattaaacagaaaatggagagagaaatcaatgtaagcttttctcacatttttatcttcaaaattatagcaatacaaatgaaataatccgttcctcatgcagaggctggagggtaagaggacactctgtgtatatactttttccggtcctctctggttgtacattcaaccattagctgaatctttgcgaatccagtgggagaaggtatttggaggtttcctaaagttttttgtttgtttattattctttgcagtcttaaggggacatattgtgaaaacaggcagrgtagggaaacactgacagcgcacagcatgaaatatgcagcatgctgcctacgctgtgggcatcagggacattgccagttacagggcatttagaaacacatttttctctctccttttgaatttagactgtgctatttctgagaactgatgattgtctggca

SEQ ID NO: 56973 - DNA, 621 bp, Homo sapiens
aatgtctggtccatgtgaatgtaaacatcatgatggcaaggacatcatatatcttgtacatataatccaagtgtctgggacagtggcacgattagaggaaaatttagcaatatatgctcaataatgagatcttgtatgtgaggaggcctagaaaaaagcttgtcatacaatgaatcctcttgttattatttttctgctaaaaaggaagatgtaactgttaattttgattattagttttcataccacactataccacaatactggaaataaacattatcagttcaaagttagggtgttttattggatcaaccttttaaaaaaatctgtagttttcagagatcagatattttggtgcaggatatagatcgaatcactgatcttgagggttggctctggggactctgagatgacacacgaaaatgaaaaccacccagaggttttcttgtgtaccaattttttggatatatatcattaaatgagtctggggtaggcatttgaaaaggcatggaatctgctacccaaaatatcagtctaataagagagatgggcacatgaaccaamcattgaagtgtggtgtgataaaaacctcaatgaaaggaataactaaatgctcaggatccc

SEQ ID NO: 56974 - DNA, 621 bp, Homo sapiens
aatgtctggtccatgtgaatgtaaacatcatgatggcaaggacatcatatatcttgtacatataatccaagtgtctgggacagtggcacgattagaggaaaatttagcaatatatgctcaataatgagatcttgtatgtgaggaggcctagaaaaaagcttgtcatacaatgaatcctcttgttattatttttctgctaaaaaggaagatgtaactgttaattttgattattagttttcataccacactataccacaatactggaaataaacattatcagttcaaagttagggtgttttattggatcaaccttttaaaaaaatctgtagttttcagagatcagatattttggtgcaggatatagatcgaatcactgatcttgagggttggctctggggactctgagatgacacacgaaaatgaaaaccacccagaggttttcttgtgtaccaattttttggatatatatcattaaatgagtctggggtaggcatttgaaaaggcatggaatctgctacccaaaatatcagtctaataagagagatgggcacatgaaccaaccattgaagtgtggtgtgataaaaacctcaaygaaaggaataactaaatgctcaggatccc

SEQ ID NO: 56975 - DNA, 536 bp, Homo sapiens
cacaggttacccagaaatataccttggaaaatcacatgtgtacttttctctaaaactgggtttgtaatatttttatgcatatccaaatgttttaaagatgactttcctagcaagtagttgttttactacaagaagatcataacaaaataatayttggaacatacatgaattctaccacataagaacaatgggaaaatatagaaaggaagtgaggttctttcacatttggtggcatgacctctattgcttggggctttgtcaaatatctatctaaagcaatgtggacttaaggaaggatgccaggtggagatttgtccagttttgctctttggttgaatgtttccattgtatttacaaaataatatagaaatagtttagaaatagggatgacagattgaactaatatatatagctttacattattccttaattccatagttttgaagcaactacagcccaatgaggttagttattatagtaaaaaatcttctaccttactctgactttggaataatttgcagataatttagaattag

SEQ ID NO: 56976 - DNA, 903 bp, Homo sapiens
cgaacatcatagcttagtctagcccactttgaacatgctcaggacacttacattagactacagttgggcaaaagtcatcaaatacaaaacctattttataataaagggttgaatatctcatgtaatttattgattactttactgaaagtaaaaaacagtatggttgtatgggtgcttgaagtatagttttgactttgtgcatattgcttgcaccgtagtaaagtcaaaacatcacaagtaagggaccatctatagttactcttcatatggctagaagagattctgaatctgtttgatacacatttgttaagggcttgggaatttggcccagtgtttccttgtttgcttgggttctcataggtttcacatccagagttgagagacccagtactgagaaacccaggtctgggtgaagagtaggttacagagatgagcaaaagagataacctctgagctccttcagtatcctcatgtgataccaatcctaagaatgagaagtttagagtagtcaagtcgtacgggatagtgatggttaaatgttatcctggcgggcagttgtgggggccaacctgagaaagctaactgaaaaaaaaaaaaggcaggggaataacctgaggggttcgtttggagaatgttttaaaatatgagataatgaatttaaataaactcaagagaaataacttgaatttactagaaaagataatattttataatcatagaactrtgaaacattatactgtcttgatacatgagagagatacttcccaagaaaatcggaagatgctatatggttctaaggtaacactttgaaaaagaaaggaaagaattgcctaaactactaagaacctgatctttaaaatttcatatctaaggtatttgttgattgtatttatgccctgggag

SEQ ID NO: 56977 - DNA, 903 bp, Homo sapiens
cgaacatcatagcttagtctagcccactttgaacatgctcaggacacttacattagactacagttgggcaaaagtcatcaaatacaaaacctattttataataaagggttgaatatctcatgtaatttattgattactttactgaaagtaaaaaacagtatggttgtatgggtgcttgaagtatagttttgactttgtgcatattgcttgcaccgtagtaaagtcaaaacatcacaagtaagggaccatctatagttactcttcatatggctagaagagattctgaatctgtttgatacacatttgttaagggcttgggaatttggcccagtgtttccttgtttgcttgggttctcataggtttcacatccagagttgagagacccagtactgagaaacccaggtctgggtgaagagtaggttacagagatgagcaaaagagataacctctgagctccttcagtatcctcatgtgataccaatcctaagaatgagaagtttagagtagtcaagtcgtacgggatagtgatggttaaatgttatcctggcgggcagttgtgggggccaacctgagaaagctaactgaaaaaaaaaaaaggcaggggaataacctgaggggttcgtttggagaatgttttaaaatatgagataatgaatttaaataaactcaagagaaataacttgaatttactagaaaagataatattttataatcatagaactatgaaacattatactgtcttgatacatgagagagatacttcccaagaaaatcggaagatgctatatggttctaaggtaacrctttgaaaaagaaaggaaagaattgcctaaactactaagaacctgatctttaaaatttcatatctaaggtatttgttgattgtatttatgccctgggag

SEQ ID NO: 56978 - DNA, 1508 bp, Homo sapiens
tttcctaagagcaggggcatcgtgagcaccggccccatcttctctttggcatcttcggcccactgttcttgtctctcatgttcctggcctgcagtgcttacgtttcacagctttgtcaccttctcctgggatgtttgtgtatttatctaggcaaggtagcattttttttttaatgctgaattaggaccattgtcaactttctttaatacatttagaaaactgccaagtttgggaagaattgattttttagaataagagagaaatgtatatcagtaagagactgcaaatcatcatgaatgcacaccagcatgggcaaagctgtgccaaagctccatgtttgccccratcctgggatttggcccctgctcatttcttttttgaatagaaacttgaaactgggaagcaaggggaggttaggtttcgggttggattactgtgaaatcttcttgtaaagggaatatcacttcctggaatcgtgaggatgaagtcgaactttcccaggcagctgtttttgaactaggaattgagccacgtggcctagaatgacagaaaaaattcggattttccattggttgtaaattgaaaaatatatggtggtttggttactttgcttagttgtttgcatggactttttttttttttaaacctgaatgcattccacagactctccttacctctgatttgtggatttagagattgtacttgaagtgtttaaaaaaaaaaatgtggccgggagtggtgactcacacctgtaatctgagcactttgggaggccgaggtgggcggatcatgaggtcaggagttcgagaccagcctggccaatatagtgaaaccctgtctctactaaaaatacaaaattagccaggtgtggtggtgcaagcctgtaatcctggctacccaggaggctggggcaggagaatcgcttgaacccgggaggcggaggttgcagggttgctgtgagccgagattgcgccattgcactccagcctgggcaacaagagcaaaacttcatctcaaaaaaaaaaagttactatagctgccccccaaccccattataacttaaatttttccccatctgccctagttcagccagtgacacccagtgctgcttgtggtggacccattcttggctgttgacccaggggctagaaggaatcttcccctgtcagctcacggggttgaagggtctgaaatgggccagtcttagttttaaaaactgtaattccaataatgtccactatgtggtgcacatgcatccgcagtaaattctaaaactagttgaaagggagctcaaaaacatttttaaaatccacagtgataaaaatagtggggaaatggcacatgtttatttgctgtacactgggttcctcttaagtagcagcttccaatgtcatattcataatgtgactcagcttattttaacttttgagaaaatgtgcgggagataactgatttggagcccaggagagaagggtgtgacatctcctgccttccatttcgaaggtggg

SEQ ID NO: 56979 - DNA, 1508 bp, Homo sapiens
tttcctaagagcaggggcatcgtgagcaccggccccatcttctctttggcatcttcggcccactgttcttgtctctcatgttcctggcctgcagtgcttacgtttcacagctttgtcaccttctcctgggatgtttgtgtatttatctaggcaaggtagcattttttttttaatgctgaattaggaccattgtcaactttctttaatacatttagaaaactgccaagtttgggaagaattgattttttagaataagagagaaatgtatatcagtaagagactgcaaatcatcatgaatgcacaccagcatgggcaaagctgtgccaaagctccatgtttgccccgatcctgggatttggcccctgctcatttcttttttgaatagaaacttgaaactgggaagcaaggggaggttaggtttcgggttggattactgtgaaatcttcttgtaaagggaatatcacttcctggaatcgtgaggatgaagtcgaactttcccaggcagctgtttttgaactaggaattgagccacgtggcctagaatgacagaaaaaattcggattttccattggttgtaaattgaaaaatatatggtggtttggttactttgcttagttgtttgcatggactttttttttttttaaacctgaatgcattccacagactctccttacctctgatttgtggatttagagattgtacttgaagtgtttaaaaaaaaaaatgtggccgggagtggtgactcacacctgtaatctgagcactttgggaggccgaggtgggcggatcatgaggtcaggagttcgagaccagcctggccaatatagtgaaaccctgtctctactaaaaatacaaaattagccaggtgtggtggtgcaagcctgtaatcctggctacccaggaggctggggcaggagaatcgcttgaacccgggaggcggaggttgcagggttgctgtgagccgagattgcgccattgcactccagcctgggcaacaagagcaaaacttcatctcaaaaaaaaaaagttactatagctgccccccaaccccattataacttaaatttttccccatctgccctagttcagccagtgacacccagtgctgcttgtggtggacccattcttggctgttgacccaggggctagaaggaatcttcccctgtcagctcacggggttgaasggtctgaaatgggccagtcttagttttaaaaactgtaattccaataatgtccactatgtggtgcacatgcatccgcagtaaattctaaaactagttgaaagggagctcaaaaacatttttaaaatccacagtgataaaaatagtggggaaatggcacatgtttatttgctgtacactgggttcctcttaagtagcagcttccaatgtcatattcataatgtgactcagcttattttaacttttgagaaaatgtgcgggagataactgatttggagcccaggagagaagggtgtgacatctcctgccttccatttcgaaggtggg

SEQ ID NO: 56980 - DNA, 1508 bp, Homo sapiens
tttcctaagagcaggggcatcgtgagcaccggccccatcttctctttggcatcttcggcccactgttcttgtctctcatgttcctggcctgcagtgcttacgtttcacagctttgtcaccttctcctgggatgtttgtgtatttatctaggcaaggtagcattttttttttaatgctgaattaggaccattgtcaactttctttaatacatttagaaaactgccaagtttgggaagaattgattttttagaataagagagaaatgtatatcagtaagagactgcaaatcatcatgaatgcacaccagcatgggcaaagctgtgccaaagctccatgtttgccccgatcctgggatttggcccctgctcatttcttttttgaatagaaacttgaaactgggaagcaaggggaggttaggtttcgggttggattactgtgaaatcttcttgtaaagggaatatcacttcctggaatcgtgaggatgaagtcgaactttcccaggcagctgtttttgaactaggaattgagccacgtggcctagaatgacagaaaaaattcggattttccattggttgtaaattgaaaaatatatggtggtttggttactttgcttagttgtttgcatggactttttttttttttaaacctgaatgcattccacagactctccttacctctgatttgtggatttagagattgtacttgaagtgtttaaaaaaaaaaatgtggccgggagtggtgactcacacctgtaatctgagcactttgggaggccgaggtgggcggatcatgaggtcaggagttcgagaccagcctggccaatatagtgaaaccctgtctctactaaaaatacaaaattagccaggtgtggtggtgcaagcctgtaatcctggctacccaggaggctggggcaggagaatcgcttgaacccgggaggcggaggttgcagggttgctgtgagccgagattgcgccattgcactccagcctgggcaacaagagcaaaacttcatctcaaaaaaaaaaagttactatagctgccccccaaccccattataacttaaatttttccccatctgccctagttcagccagtgacacccagtgctgcttgtggtggacccattcttggctgttgacccaggggctagaaggaatcttcccctgtcagctcacggggttgaagggtctgaaatgggccagtcttagttttaaaaactgtaattccaataatgtccactatgtggtgcacatgcatccgcagtaaattctaaaactagttgaaagggagctcaaaaacatttttaaaatccacagtgataaaaatagtggggaaatggcacatgtttatttgctgtacactgggttcctcttaagtagcakcttccaatgtcatattcataatgtgactcagcttattttaacttttgagaaaatgtgcgggagataactgatttggagcccaggagagaagggtgtgacatctcctgccttccatttcgaaggtggg

SEQ ID NO: 56981 - DNA, 764 bp, Homo sapiens
cttttctcacacaccacattcattccattccacagactgtttactccacctccaagcctggtcttcagtgatagtctttctcatcactttaacaactctaccccagacccgaactatcaaaaacctcctgacagccctatatctgcttctagctctttgcaactgggagccagggtaagattttattttattattattattatttttgagacagggtctcactctattgcccaggctggagtgctgtggcatgatcacagctcactacagccttgacctcctgggctcaagtgatcctcctgcctcagccttctgggtaggctgagactataggcatgcaccaccacacccagctaattttttgtattttttgtagagatggagttttgtcatattgcccaggctggtcttgaactcctagggtcatgcaatttgcctgccttggcctcccaaagtgttgggattgcaggcatgagccactgcatgcagcccagggtaagattacaaaatgaaaatctggyatgtcattcccctactaaaatccctctaatagtttacactgctcttaggctaagctcctgcctgtctgagagcttttgtacaaactggattaggaatatagtttcatctcctgaattttgacctaacattatgttttgtgagaattttctaatgccacgagatagcctgtgagaacattattttgagtgactggaaaacattcttctttatgaatccatcatttccttattactggatattta

SEQ ID NO: 56982 - DNA, 808 bp, Homo sapiens
acccacctcggcctcccaaaatgctgggattacaagcgtgagcaccgcgcccagcccacttgttctcttttaagtgatgatgcatatttctagttccatcttcactttgtgaattctgcttggttagatctgccacatggttgatrccaggcccttggactgaatcacagccttcagtgataaccttggccatataggagagtatactcaagagtagggccaacttgggttttttctttcatttccttttcctactggacaaagggaaaatacccttgtgtctttgcaggcatgtggtatactcacagattttctcagctttcatttaacacgaccacatccattataaggagaaattttgctttttttttttgagacagagtttcgctttgtcacccaggctggagtgcagtggtgtgatctcagctcactgcaacctccacctctcaggggttcaagcagttctcctgcctcagcctcccaagtagctgggactacaggtgcccgctaccacgcctggctaatttttgtatttttagtagaggtggggtttcaccatgttggccaggctggtctcgaactcctgacctcaaatgatccacccacctcggcctcccaaagtgctgggattacaggcatgagctaccgcttccggccggaattttgctttatttgtttttcaaataaatgttgttccctgtgatttcatagaattaaaaataattttaagactaatctttttagaagaaactactatgataagcctcatgaatatagtaagtaatggggttcctgtccagagaaggga

SEQ ID NO: 56983 - DNA, 808 bp, Homo sapiens
acccacctcggcctcccaaaatgctgggattacaagcgtgagcaccgcgcccagcccacttgttctcttttaagtgatgatgcatatttctagttccatcttcactttgtgaattctgcttggttagatctgccacatggttgataccaggcccttggactgaatcacagccttcagtgataaccttggycatataggagagtatactcaagagtagggccaacttgggttttttctttcatttccttttcctactggacaaagggaaaatacccttgtgtctttgcaggcatgtggtatactcacagattttctcagctttcatttaacacgaccacatccattataaggagaaattttgctttttttttttgagacagagtttcgctttgtcacccaggctggagtgcagtggtgtgatctcagctcactgcaacctccacctctcaggggttcaagcagttctcctgcctcagcctcccaagtagctgggactacaggtgcccgctaccacgcctggctaatttttgtatttttagtagaggtggggtttcaccatgttggccaggctggtctcgaactcctgacctcaaatgatccacccacctcggcctcccaaagtgctgggattacaggcatgagctaccgcttccggccggaattttgctttatttgtttttcaaataaatgttgttccctgtgatttcatagaattaaaaataattttaagactaatctttttagaagaaactactatgataagcctcatgaatatagtaagtaatggggttcctgtccagagaaggga

SEQ ID NO: 56984 - DNA, 638 bp, Homo sapiens
caagaaagaatttcaatgcagcaaaaataaggttcctgatgtataaatgattcattgtatgagggattaatgcatagctgctgtgcctttattgatacatgaattaaatgaaaggacatttcattagatctccaagaagtgattggccggttgggttcaaatcacaaagatgattatttctaacagcaaagaatactattggcacatcagtgctacagtttaacaataaaggatttttttcaactttctacttcagacacatttttaaacaccctaatattcacatttttgttgtagaggaaaygctgaaatatattcccacaaatctatctccaagatccaacaattatgtacaagaattaatcttgtttcatcttgcctttcttattcacctcctcccccaacccccacattcacatacacagtggattattttgaaacaaattctagaaagacaaaccagtaattatataaatacttcaaaatgtttctcttaaagataagggatctatttttaatataatgtaaataacatcataacaactaaaaataataattctatattgttttaaaatatttaaccagtatttaaattttccccattgttacatttttcaaatggttacttattagaatca

SEQ ID NO: 56985 - DNA, 638 bp, Homo sapiens
caagaaagaatttcaatgcagcaaaaataaggttcctgatgtataaatgattcattgtatgagggattaatgcatagctgctgtgcctttattgatacatgaattaaatgaaaggacatttcattagatctccaagaagtgattggccggttgggttcaaatcacaaagatgattatttctaacagcaaagaatactattggcacatcagtgctacagtttaacaataaaggatttttttcaactttctacttcagacacatttttaaacaccctaatattcacatttttgttgtagaggaaacgctgaaatatattcccacaaatctatctccaagatccaacaattatgtacaagaattaatcttgtttcatcttgcctttcttattcacctcctcccccaacccccacattcacatacacagtggattattttgaaacaaattctagaaagacaaaccagtaattatataaatacttcaraatgtttctcttaaagataagggatctatttttaatataatgtaaataacatcataacaactaaaaataataattctatattgttttaaaatatttaaccagtatttaaattttccccattgttacatttttcaaatggttacttattagaatca

SEQ ID NO: 56986 - DNA, 2070 bp, Homo sapiens
tttttggtgggtttttaaaattgttcccatataatgtttttctccttaatatttacttttatctgataataatatgaccaactattttttctttattgctacgtatgtttctctatttttcttttttctttttctttctttttttttttttacagtggcatgatattggctaactgcaatctctatctcccaggttcaagcaattctcatgccttagcctcccaagtagctgggataacatatgtgcaccaccacgcccagctatttttttctatttttagtagagacagggtttcactgtgttggccaggctggtcccaaactcctggcctcaagtgatctgttggcatcagcttcccaaagtgttggcattacaggcgtgaccaccaggcctggcctctatttctttattttgatcttttkttgttatattcttttagaaaactgtttataaatatatgttattataaacttatctgatccatttttaaaattttcaatttatatgcaaaaagttttaaatgtgtcccaacctagaagtgtatattacaacatataagccatcaccaacagtcaaaattatctcaatttaaccatatttctttcatctatcaccttcactgtggttgctgaagacttttatagataattcatgaacttatgccatttcaacactacgtaattcagtgtacacatcttaaaattataatttttatataattacaatgtcataattatatctcttgtatgttttttctatgcgaatgacctattggagtcgtgacctgtttgattagttatcttgtaacatatactaaattatcaattgttcagttttttttcccctcttagtgtaatttaacttgtacctataccgtgcctcccatccacccatattttctgaaaatgaaatttatccctagaaacttgatatttggtgctacctattttcagcaaagctatttcacacatggtgttttgtacttcagcaggtggcacataatgtctgtggctgtctctctcttagtgatcagtgattcagatagcaacagctgaatgcctctgtttcaagtattcctttgccctatcagctaataatgtcatccattggtgttttttgtctgaatcaaatagttcgaagttcttagttattttctaattatatgttaccttccataattattcaggatttgctggtgaaaaagatctttttctcaagcaatgggactacagatgcttcttgtcttacgatggaattacttcccaataaatttatcataagtaaaaaaaataataacttgaaaattcatctaataccatgaaaaatccattgtaaaatcaaaaaaattataagtcaaaccattttaagttgatgaccatttgatttgacttacttgtaatgcagtatgtacggtactggaggaacaaatgcctaattattttccttttccttccaactttcaggtaaggtaatcattttcaaaggtaatttttgctaattataataattgctaattattttcaatcatgatcaatggtaatttttgttttgttttatttttgttattgttctattttatagcatcatcataaactcatgagatattatatattcaattcatttcaatcaattgtactttttatgttgtttgtggctccaagtgtcccatctttgtcctatatgccaaattggctgctgtgatttgtttatgtgaactcattgacttgattttctttctgacacaacaacgtattccaggtataccttgtaaatctacctgatatggaattggctattccactaagaagttccatttcctttcagtggctgataatatttacagagagcaatctaggaactaggactacttattgatagtaggttgtctttcctcttaagacacttcagagtatagaattgcgatatgcatataattcaaacaaaaataataataatttaatattaacatcttgattcaaattaaactaacttttttgttttataattacactatcttttctttcacataaaatatcctggcttccaagaacattactataattctatta

SEQ ID NO: 56987 - DNA, 700 bp, Homo sapiens
tggtgcctaacccaagcatcagtttggcagaggccgagtccctcctctgtactggataccaagtcagcttccatagggatggggagacacctggcccagggaggagatgagaagcagcccggatggtgctacatatgtcagagagcagggcaggaagggatcagtgtggctgccaatggtcaggagggcgccatggagtgaaccatggcccctgcctcctcaccagcagctcctctggagctgatactcaagaccccccgtctctctcctcaccctcctctcccgctgcctcggctggctcaggtgttcgatgcccgggactgcaggtctgcacaggaaatgttcacctacatctgcaaccacatcaagtatgccaccaaccggggcaaccttcggtgagtgccccccaccatgccaggccccagccttcttccccaaggcagggaaggcggggctctgaccagctctttccccatgcgtgccagctcggccatcacagtgttcccgcagcgctgccctggccgaggagacttccgaatctggaacagccagctggtgcgctacgcgggctaccggcagcaggayggctctgtgcggggggacccagccaacgtggagatcaccgaggtgggcaccgagggccacccatgagggtgtccccaaggtggagaatgaggaaaccagtgggagaaggctcggg

SEQ ID NO: 56988 - DNA, 705 bp, Homo sapiens
tagatccggcctagatcccagcccatgctgatcttcccttcctggccgcatctgagtatgcacgccgtgaacatcaacataaatatcgtgctgtagtatcattcaggactggctcccctggaacctggaccaaggcatttggtcttgggcctagaaaagcacctggcacacagtgaagcattcagtaagtatgtgttgaatgaatgagtgtatctccttgaacctcattttctcatctctcgagtgtaaataatatcactgacatcagartgacactgtgcgggtcaaagatgaccacgtgaaaatgctcactaagactggagacccctggaggacagaaacagggttttctcattctctaacaccctagagtgtccctgttcagggcccaaacttagagcccaaggggtgcttacaccgaatgcagactccgaccccagcctgaggggtcccccaacaccactctcctcacctttacaatctcaggatcgaggtcaccattgcaactgtcaaaatacttcttcaggtcctgaaaagggatatgagtgggggaatgggacagagtttaacctcaatctgggcccctataccttcccaaggctactgtcctccaaaccccgcctttcacctggtcacagaattcaaaaaccaaagtcagcttcttgtcgctgtgcaggacgtcatgaagcctagggcaaaagaagg

SEQ ID NO: 56989 - DNA, 797 bp, Homo sapiens
gactccagggctccgtttctaccgcggaggcaaaccttggacttcaagtcccaggaagcaacgcgtgtccgttttccgggcgccccgccgcggcgccgtggttcccagtgtgccccgctgttgttattccttttatgtgctcccagccctcttgaaaagggccgctccgggactacgcgttccagaatgcagcggaaatgggggcggagcgctctcggttaggggtttggggtttggcggcctagatcccgggcactggcggcccagcgctgacctggttggtggcattgtgttcccaacggcctcttgacgacctcagcacgggtttccacctctccccaagccacctagtgaccccagaattgactggggaatgcctgtgagcgatgatgacctcacagggaacagctgaccgcagggctgggagaacagctgtgccccttcgaggctggattttagtggagggacacacgccaaagaccccctctctgctgagccccgtttgttgtctcggagcccacccgactctagccgctgaactctgacatgctgaggaaaactgggtggagccctgggggtccccctcagaccccagtctccggaacagggcccactggagtcagccagggtgtggcaggcaggttggttaaccccctccacagacaagaccacagaccgatgytcaacttgcagcagcctctgcctcaccccttaaaggagctgattatagattcccttacgctgcctctctaattgtctcatgattgcattcttgagggctatggaccgagggaaaa

SEQ ID NO: 56990 - DNA, 536 bp, Homo sapiens
gattttggaggatggggggccatggatggtgatgctggtcctggatctgcccctggtctccatcgtggcgctccctggtcctgaatgaccccygcctcccattcccagctgttgccttgtgtgtgttgtttaagggagagaagctgagccagtgagagcatctttagagggttctcactagaggagtaggtttctcctgggaaggaggccacagctgtggttgagcatcgtctccttctatcttcctagtggggtctacctcctgcattcgtcatctgacagccagggttttagggggcttttccccagttcttccaacatatgtttactgggtgtcagctgtggcccaggccctgtccccggggcaggctccttgttgtggcactttcgctcattcttctagccatccagcctctgcgttcagcgagtctcactggcttacgcgggaagtgtggttgctgggagggaaggctgggtcttcctgctgcctggcttggtggtctgggggatgcttgggacaattaggggattttctg

SEQ ID NO: 56991 - DNA, 861 bp, Homo sapiens
cagactcattattagagtaatttacacagacgaattcggctccaaacacagtttctcccgatgcaggcatgcccgttgttccgtgtgggtgtgtgtgygaggccttgtgtgagcgtggtgttggggaaggagtgggtacaggcgtgtgtgcccgaggctgggggctgcatccagactggttgctggttcctcccactcctgagcccctcagcctctcttccactcccccagctcccctcacccaaccaggtagagcacctgagcatcatctcccagccatgcctcgtggaggatgtccagaggctccgccagatggagaaagaggaggagttccgggcagcaatggtgaaggcccatgattctctggtagagacagaggggcctgacatgaaggagaaaatgaaggagcaaatccgacagtggtttatcgagtgccagtcagtgtcctcagctgaccctaccctccatccttcattcccttcgctcagggtccctcagggctgctcctgccccatcccctgcatgggttctgccttctagtccagatggggccttttctcctctacccccaggtccccaacacactgctgaccctcttggtttcaacaactttgggcccccagtgtacaggaccatctccacacctgacttctcaattccacaagggagagaaagtgccagaatagggtggggaaagcacccatggatgccccctgagtgatctgtcctcctgtttgtaacaatccatttctcccacctctccctccgtcaccctggtcctttatttttctctggtgttctccatccatccacccacccttttatccgcctctccatctacctatccatccatccactcac

SEQ ID NO: 56992 - DNA, 571 bp, Homo sapiens
ccataggataaacaggtagtctgagtagatgaggcaaagtcttcctttacagaagaaatcctactgataaatccagaggaagagtaaaattagaatgcatcactattttgtagcacccaatgaaataatcaatttaggaaacggtaactagataaagagttgacgggcaactttacgatggaggcagcatctgaacacaatgtcaatcagacattcatgtctcctaagtgatgtaatgtgaaataaatagcctacaaagcatttcctcaaaacaagcaaacttgaaatataaccaagtgttacaagcktatttccagtttatgggaataatgaatgctcaaagatcaggttaaagaaaacaatgaagaaaaaaataggacatccatttcagtttcctcagtcaatgtaatggaaaaacaaatgttttggagaagtcttgaccaaaaggtctacgaaaagcaaggacactataagagtctccaagtcattagtaattaggaaatgcaaattaaactatgagataccacttcatacctattaaaatggttaaataattatttttaattaccga

SEQ ID NO: 56993 - DNA, 1476 bp, Homo sapiens
agatactgatataagcaactctctactcttgtgtacgtttgaayacatttaaaattaaaacttaaaataatagtcaacatttactgagtatttaccttgtgcctggaaatattctaaggttttacatgttaacatatttaattcttatgacaatgatagaaagttaagtacaattataatgcccattttacacacggaggcattctgccaagtttaaaaaattcccccaaatcaagtagccagtatgaggcaggctggcacaaggctcacattcttaactagtccagaacccccttttaaattatagtctagactacatggttttcttacagtctgtgtatattatctctcatgctggttatcaggttaatacctacagctgtatttcttcattcttatacatttttcagttctgtatttgcacaccaaagtaaaggcaccatattgactgccttccccaaatcataacagaatgagttagattaagaaagaaacaaaatgtgaaagttagcataacatttagaatttaaaacatttatttgaaatactttaggtttctttttgccagaagaatgatttagtcataataataaatgtgattacgccactcgttccttttcagttttgtatgcataccttcaatctatttttctctaggccttctttttctattgctgataatgaaaaggcatactgttgtgaacaggcttatgaatattaagatgttttgtacagaaatggctaatcactattaggtgaaaaaaatgggaagaggcaaaatcaaagtcataagcagaaactagtatgttaccttttttttttcttttgagatagagtcttcctctgtcctccaggccggagtacagtggtaccatcttggttcactgcaacctctgcctccagggttcaagcaattctcctgcctcaacctccctagtagctgcgattacaggcatccaccaccatgcccagctaatttctgtatgttagtagagatggggtttcaccatgttggccaggctggtctctaactcctgacctcaagcagtccacctgccttggcctcccaaagtgctgggattaaaggcaagagccactgcgcccagccaaaactaaaataagttttcataaatttatcttcaccagcataatgttaagaataaccacaggaccatatatttgatccttctctgagtgacatgctccaaggggaatgtttaacaagattaccaagggacttaatttccaaatgaaaggtcagccatgatacattcatcttggcaataacgtaagggaatcctaatagcattttgcttttcagagtagctattaagaaggtaaccaactaaaattccttggagaaacaggttaaatatagcttcttttttgacagaaaaggaaacatggtggtaaaatcaagtactccacattaaaatgcaaagctataaatgaattttgacttgaattgaggtttct

SEQ ID NO: 56994 - DNA, 1000 bp, Homo sapiens
agtgagcccttagttgaggatcagaggatttcctccatgtaaatttatctggttcatagaagattttatagtggtgacttggacctccctagcagaatgcagcattatgtgtactgaccccagctagcacttttattcttggttcaccatgtatatgaaaagaggaagatgtagctgcctttttcatctagttcaacaaacatgagatgattctgacggtttctagttttttgaattgaagccagtcccctgatacattcttagttacattgttgtgcacaaaatatgtgtgttcaggttttagtgcttaagcatgcctctctgaaatgcagcccataccacacttaggtacttgtcaatataaacacaaaattgttaacaccttttgtcttcttatatgtaaaatagtgccattaaatggaatttagaattagcgaagcctagctgtaaatactgcctcccctaattatttatgtaacctcttcgagtctcagtttttaaatttggagctggtaaagcagtgtttggaaatgttcatttttattgcagacagtcaatataagatttatttgaagtactggttttaaaacataggaaataaatcagcagtacctttttgagtcacttaatttacccatctttttctatctcctgagttaagttaccctacatgcttgcattttttctgattcttaaagatcttcagagaaggaaattctacagcctttttgggcagcctattctagatccttacagcattcactgtcagggaactytttctcatatctaaccaaaatctctgttgctggaatttaagctcatttcttcttttattgtcccctgtgggaagtagaataggtcagttttttgtttattattctctcaatagccctcaatacataaaattaaattatggcagagttatctttatttcataacctacaacttttgcccgttaggagagttcagggcctaaggtggccctcttaattctgatgta

SEQ ID NO: 56995 - DNA, 1245 bp, Homo sapiens
atgcactcatttatatgtgggttcatttatctgctattttgttcatttggtctatttgactttccctgcatgaatatccctttgttttaactactgtggctttaaaataaagcctccttacgagaaaagtaaattttgactatctttgggaattttgactaatatgtgaacttcagattcgtcttaccacagtctatgaaaaatctgttcctctttttactgaaacaccattgaatttatggattaatctttggggaagtgacatctttactatattgatttctctcatcccaaacattttataaattccttatttatttagctgttactttatgtctttcaataaggtttcacgattttttcatgaagktcttatgaaacttttgctagctctattcagaggtttacagtctttgattctttgtttcaagtacagaggggtgctgttgtgttttatatgttggcctaatatccagaaacctttctctttcattatattagctctaatatcttgtttgtactttaaacaattttaagaacactgctatcatttaataatggtaacagttttgactttttgcttctaattcttataattttcttttccacgtatcactatcatgtgcagaatatcaagtacagtgatgagtacaataagttgataatgggtatcattttctcctgattttaaagaaaagattccttgcctttataactgtatttatttgctgtaaatgtttagtcaattccttgtgatacctactgttttagagttttttttttaaatcatgaatgggtaaactgaattttatcaagtactttatatgggcagttaacaagatgatcacgttatttcaaaccatattttaatctgatgaattatgttaaaaaccatttctaaaaccaaaccaaactcacattcctgagataaatcctacttggtcattacatctttccattttctgtacctataactctagatggtctctggcttaggatggttcaacttacgatctttcaactttaagacggtgcaaaagtggtacacattcagcagacactataacacaaatacccacagaactgtttttcaatttcagtacaatattcaataaattacatgtgatattcaacactgtattttaaaaacaggctttgtgttagatgattttgcccaattgtaggctaacacgagtgttctgagcatgtttaaggtaagctagactaagatgtgatgttcagtag

SEQ ID NO: 56996 - DNA, 537 bp, Homo sapiens
gactaaactgcaagagattttcatcatatttgaaaaaataagaacagtatctgaagaactgttgaaaatataacaattgtttcattccctgaaaagtattacaaaaaacacaggaacaagaaaaaagtctttccatatatatgtttgcaaaatatggaccagcagagcatggttaagtatacatgtttcagcaaagttgctagaggaaaagctcacccgcctcctcaaaggagcagtcacagcaggcatgacaaaagaaaacggttttcattgggatttaaagaaatgyttttattcccttgaggttaaacttaaaagaaaaactgagacacatgatccggtaacagataataacccctggaaaaaccatgtgaaacgttaatctctcagacatcctagtaacaattacggaaaacaaagtgtcatcaacagtaaaatcattgactttgattgtgtatacctagaagagggagctccaagctttgctttttaactaaatttttaggctgaacatttttgtgctagccaagatcattt

SEQ ID NO: 56997 - DNA, 537 bp, Homo sapiens
gactaaactgcaagagattttcatcatatttgaaaaaataagaacagtatctgaagaactgttgaaaatataacaattgtttcattccctgaaaagtattacaaaaaacacaggaacaagaaaaaagtctttccatatatatgtttgcaaaatatggaccagcagagcatggttaagtatacatgtttcagcaaagttgctagaggaaaagctcacccgcctcctcaaaggagcagtcacagcaggcatgacaaaagaaaacggttttcattgggatttaaagaaatgtttttattcccttgaggttaaacttaaaagaaaaactgagacacatgatccggtaacagataataacccctggaaaaaccatgtgaaacgttaatcyctcagacatcctagtaacaattacggaaaacaaagtgtcatcaacagtaaaatcattgactttgattgtgtatacctagaagagggagctccaagctttgctttttaactaaatttttaggctgaacatttttgtgctagccaagatcattt

SEQ ID NO: 56998 - DNA, 894 bp, Homo sapiens
tgtccctctgggaatgcgactaactgcaagcagagtttagaaaaacacctcttggggccctattactcacaattacaattgcaggcctgctctgtcttcagagattgtaagtctttgagaggagagtaatttttttttttttagacagagtcttactctgtcacccaggctggagtgcgcaatctcggctcactgcaacctcggcctcccaggttcaagcaatcctcccacctcagcctcctgagtagctgggactacaggcacccaccaccatgcccagttaatttttgtatttttagtagagacagggtttcaccacgttggccaagcttgtctcgaactcctgacctcaggtgatctgcccacccgcctcggcctcccaaagtgcagagtggtcatgtttttaatgaataagtctttcagagggcccatgtggttgttgagccctctgtggtgccctctgtgctggacactatgcggggtccctgccatagggcattccatcttcacagcagccctgtgaagcgggccctttcaacagataagaaagttaaggttcagagcagttaagtgactttcccaaggccgtataactcctgtaatatagagtagagattagaacccagccggactgtctgacttcactggggcttggactgccataacaaggtatcacagactggatggcctaaaccacagacatttgcgttctcacagtcctggaagctggaagtccaaggtcaaggtgcctttagggttggtgtctggtgaagcctctcttcctggctggtagatggctgtcttctcatcttatcttcacatggcctttcttctgtgctkgggggtgaggagagggagaaagaaaaagagagagagagagagaaagggagagag

SEQ ID NO: 56999 - DNA, 531 bp, Homo sapiens
ttttcgttggtttcttgcagttttattaygatgtagttaggtgtagatttctttttgtttatcttccttgcaatgtgtacaacttcgagaatctatggtttaggtatcatttccttttaaaatactgcttctgctatacatgtaactttccctctcctttcattattccaatttttgcgaaaacttttcgatgtatagtctatatcttttcctttcttctgtaatactgtatcttgaagcttcattccagatctctccttctaagccatcttccagttcacttattttcaagtatgtctaatctgatgctaaactcatccactaagttttctgttttccccaccccctcccaccccatttttcttttcaaacagggcctcactattttaccctggctggtttcgaacttctgggctccagctacccccaagcctcagccccccgagtaactgggactaccagctacttgcacctacctacctgtacatcgagtttttaatttcagttactgtatttttatagttctaaaat

SEQ ID NO: 57000 - DNA, 531 bp, Homo sapiens
ttttcgttggtttcttgcagttttattacgatgtagttaggtgtagatttctttttgtttatcttccttgcaatgtgtacaacttcgagaatctatggtttaggtatcatttccttttaaaatactgcttctgctatacatgtaactttccctctcctttcattattccaatttttgcgaaaacttttcgatgtatagtctatatcttttcctttcttctgtaatactgtatcttgaagcttcattccagatctctccttctaagccatcttccagttcacttattttcaagtatgtctaatctgatgctaaactcatccactaagttttctgttttccccaccccctcccaccccatttttcttttcaaacagggcctcactattttaccctggctggtttcgaacttctgggctccagctacycccaagcctcagccccccgagtaactgggactaccagctacttgcacctacctacctgtacatcgagtttttaatttcagttactgtatttttatagttctaaaat

SEQ ID NO: 57001 - DNA, 1162 bp, Homo sapiens
ccgcttactgttctaccaggccagcatttatttcacttctttctgacatgccgaagtgtatggctgaccgagctgttgctttccctgttggcacttcaaggaccaccgaccaaatggcaaatgcctggtccccaagccagtattgtctgaatgacctgcagtctccaggaaccatggcccagctggtccaatcagcctgccctgttccaaggaaacacattatacctctgtacacgtctcctcattctttaaaacttattcccaacgtaacatctcctggcttttccatactgtccctaaagggtcagttgatccctgcctcaagtattagggactggctgtaagaacctccactacagcagttagcacagtcccaaactgtcagggtcccatcctgaaagggcatggggaaaggtggctgggactatattttatctattttttttttaactgctacaacagtcactgcaagaaaaatagcccaaaatacaggtggggtgttcacaatagatgtttattatatgaatggctacatctcacgattttccaaatgaacatttttctaaaccacaaaagtaaattttaataggtgaatcaaggttttgtgtggaacttataaacttatgaaataaaagtaatcctttaaaattacatgggtagatatttttgtaagccagccagctctcatggtctccatgtaccgtcttgtctacgtggcacccgtgtgttgggagctcctgcagactgagctgctgggtgagcatgccacactcccctgcctcaccaccttctcaaccagcaccaacaacagcttcaggtctgctaatgtcactgacgatcaagacctttctaaagaagtagtgacagactctgatgctaataaattattaatgagttctgatgatccaatcagaagatctgtcatttctagcttatactccattcccttgaaatctgacaagtggattgatacatgactgcatttgcaaatgactgttttaaaaagttctaccccaatgactyttttttttttttttttaaagaaaacggagttaccatgggtttgagaagttttcttatgtaagataaacctcctaggtttggaacaggaacaccccgatggtgtctgtcttgcacaaggtctggaagagagacctgggaa

SEQ ID NO: 57002 - DNA, 638 bp, Homo sapiens
gtgacaggctgggagaagaacatgttctgattccagtgagacactcgccgtggcttcaccttagcatcagctgcaagaatcgtcacagcaaccctgggagatacatcttatcattcagcccaggaaccaaatgaccagatgtctcacaaccagaatttgaatgcacacttgtctgattttaaagccagagtgctccttctcctgacaaagatcaccacgaaagggctagaaccttgacagtcgcattctgcaaatcgcatctgctgatgccatctgtctggggtatctgccaccctgggtggccggctccaacctctcaaatcagctaggaaccatgtcaggctacatcaagaagcaagcccatgaatgtacacacaccaagtttgttttcaacgktactgcttctcttagatgttagcacaggagggaaaaaaaaaaaaaagccttgttgaatagtgtcacctggcttcagtaatgagcagatgttggactcgggtgtgtatcataaccaaatctaatctgtgttacacatggagagaaccactccagatccctagtctgtagccagagctaaggcaattgtccttttccttttatttaaaaagaaaaacaaaaaagcatggattagcataggcctc

SEQ ID NO: 57003 - DNA, 638 bp, Homo sapiens
gtgacaggctgggagaagaacatgttctgattccagtgagacactcgccgtggcttcaccttagcatcagctgcaagaatcgtcacagcaaccctgggagatacatcttatcattcagcccaggaaccaaatgaccagatgtctcacaaccagaatttgaatgcacacttgtctgattttaaagccagagtgctccttctcctgacaaagatcaccacgaaagggctagaaccttgacagtcgcattctgcaaatcgcatctgctgatgccatctgtctggggtatctgccaccctgggtggccggctccaacctctcaaatcagctaggaaccatgtcaggctacatcaagaagcaagcccatgaatgtacacacaccaagtttgttttcaacgttactgcttctcttagatgttagcacaggagggaaaaaaaaaaaaaagcctkgttgaatagtgtcacctggcttcagtaatgagcagatgttggactcgggtgtgtatcataaccaaatctaatctgtgttacacatggagagaaccactccagatccctagtctgtagccagagctaaggcaattgtccttttccttttatttaaaaagaaaaacaaaaaagcatggattagcataggcctc

SEQ ID NO: 57004 - DNA, 549 bp, Homo sapiens
ctgaggcgggcggattacttgagcccaagaggtagaggctgcagtgaacagagatgacgccactgcacgccagcctgggtgacagagggagagcctctctcaaaaaagaaaagctcccagtgacgctttcctgaatgaaaatgaatttcatcactgccaatgccacgcatggtgttgaggccarccaggtgccacagaagggacctgccgtccagctgaagcaggtcctgctgcttactcagtgacctgcaaaggcaatggcactctgtcttctgcagagaaagggtgtttcattttctcgtgcaaattccaaatatatccacatttcagattgctacaaggcagtactataaagggagaagcgaaacaactcccactttctgggaagaaatgcccttgtttccagctgcaaaaccctctctgtggggaagcacactgaagtcgctcaggaacaggccacccctcttggaaagagtggaggtcatcatttttcacctattagcgaaaaaaaaacataatctgaatacatttatgtagggctattaccca

SEQ ID NO: 57005 - DNA, 978 bp, Homo sapiens
ctttgtaacatcttgcagaggaaataccttcaccacagaaacttcgaaaaaggtattatgaaaaagggaacatgggccagacataggccaaacttaataccctagaaactgaagtggaagaattggggcaattagaaatttacaagaaaaaagaatgtttttggttagattggttggttatttcaaggacaagggctttagaatttcacttacctaaatactatcttatatttctcctttatttgtatccaaagatgtggctttattctcttctgagatttcttaaattctaaatatgacacaggacctcatgcagttctgccccaaatgattcattagaaactaaatttctctacatttcttcacacttccaaataaataaaacacaaattttcacttatctcagcagttccaacacatgatcatttgagggagatttatttaacatagaagttttgggctgactgccactgctcctggattataaacaaaattgaaaatgcacatttgcatttaaagaattatmtcccccaacacttccactgtcctctagaggtaaccactttgtggtcataaccaccctcaggtgaagggggaacactgtcaatacccatcacaatacatttttatttatttatttatttatttttattatactttaagttttagggtacatgtgcacaacgtgcaggtttgttacatatgtatacatgtgccatgttggtgtgctgcacccattaactcttcatttaacattaggtatatctcctaatgctatccctccaccctcccccaaccccacaacaggccctggtgtgtgatgttccccttcctgtgtccatgtgttctcattgttcaattcccacctataagtgagaacatgcggtatttggttttttgttcttgtgatagtttgctgagaatgatggtttccaccttcatccatgtccctacaaaggacatgaactcatccttttt

SEQ ID NO: 57006 - DNA, 539 bp, Homo sapiens
tgaagaactacttcctggagctagtaaaacagtgtttgaaagatggcagatatcgtagggtatcctcgaactcctcaccaccctagaagttaagtcaccttgtctgcaaatattrtgtgttatttccagattcttaatttgcaggctggggactcagcagtggactagtcagttgacatggtccctagattgatcaacacgttcatagatgcagctaattaactctcctattacagaattttacagaaatagcctcttccaggctgcagagctcagtcagagagattgttttcttcaaacttccatatgatcatcatagtgctaggaaagtcaaggaatgctaagatcaattaagacagttctctgaaggagttgcaatctaagaaaggtaaaaaaataaacatacaaataatttaaaaataacacagacatgataagtgcagaaagagaaaaagtgcaatgggagttgagaagaggaaaggatgagatttttttttttttttttttttgaggtggagtctcactctgtcacccaggct

SEQ ID NO: 57007 - DNA, 650 bp, Homo sapiens
attccaaaagagagatttctccacagcctccaccactggaagctccccaagcaggaggaagataccttattttgatgtgtatccacagtgcctggtacagcagctgtcgcataagccaaatcccagggcgagcttcttgggcagtgagctgtgcagccactcagggactggaaggaccctgcacttggtgttttgctctgctgtcattatcttggaattcttcataatttaacaaagagccttgcattttcattttgacctgggactcacaaattaagtagccattatcattcaataactattaatatttttaaaactgaagtaaaccattccggttctggattctactcataggaaacaagatagagaaagcaaggagcccaaaccctaagtttgaatggtattcccagcatttaccaatgttctagtttgggttaataatctttaatattaaagttaaataatcttctacactaggagtccccaacccctaggctgcagactggtccaagtctgtggcctgttaggaacctggctgyatagcaggatgtgagcagctagcaagagagcgactcaccatcactcacattaccattgagctccacctcctgtcagatcagcagcagcattagattctcataggagcatga

SEQ ID NO: 57008 - DNA, 650 bp, Homo sapiens
attccaaaagagagatttctccacagcctccaccactggaagctccccaagcaggaggaagataccttattttgatgtgtatccacagtgcctggtacagcagctgtcgcataagccaaatcccagggcgagcttcttgggcagtgagctgtgcagccactcagggactggaaggaccctgcacttggtgttttgctctgctgtcattatcttggaattcttcataatttaacaaagagccttgcattttcattttgacctgggactcacaaattaagtagccattatcattcaataactattaatatttttaaaactgaagtaaaccattccggttctggattctactcataggaaacaagatagagaaagcaaggagcccaaaccctaagtttgaatggtattcccagcatttaccaatgttctagtttgggttaataatctttaatattaaagttaaataatcttctacactaggagtccccaacccctaggctgcagactggtccaagtctgtggcctgttaggaacctggctgcatagcaggatgtgagcagckagcaagagagcgactcaccatcactcacattaccattgagctccacctcctgtcagatcagcagcagcattagattctcataggagcatga

SEQ ID NO: 57009 - DNA, 599 bp, Homo sapiens
  misc_feature (1)...(599): n = A,T,C or G
atgtcacagaaaccagatgaaaagaagcttctggactcctcagaatgatctctggaacagagctgcccagcatcctggcacattcacccaggactgttccaagatacagtagacaacttctatggttttttaagccactgaattattattgaatctctttatgagaacagtttcatcttaccctgactaatacaatgagggaatagtcttgatgagtttctcctctaaagacgatcagtgaaaaactttgaggaaagtataaggaaaagtgccaatggccgtncagtctttcacctctgacagtgtatttgaaaaatattattataaatgtgtttttttaattgtataacccaatgtcaggcagggtcccatacccctttcagacctggttgcaattgacccaaacctcaattccaagacttaatggaagcccaggccttctttttagctttagcaaatgcctagaatttcctctcgccgtttccctcagcctctgagattttgtattgccacacactgcattagttttcacccatatcaatctagctgtgaacyccaactcctttcctgattaccaacaacaatccgcccttccccgt

SEQ ID NO: 57010 - DNA, 2174 bp, Homo sapiens
tatatatatataatctggaggtttctttcctttcaaaaatacttcatacctgtaacttaaaaatataattttatctttagtctttattttgaattttcagtcatttcaaaattaatatgagcaatatcattaaaaagtgggcaaaggatrtgaacagacacttctcaaaggaagttggccaacaaacatatgaaagaaagctcaacatcactgatcatcagagaaatgcaaatcaaaaccacaatgagagaccatctcatgccagtcagaatggtgattatttaaaagagtcaggatacaatagatgctggtgaggctgtggagaaataggaatgcttttacactgttggtgaggatatacattagtttaatcattgtgaagacagcatggtgattccccatgtatctaaaaccagaaataccatttgaccctgcaatcccattactgggtatatacccaaaggaatataaatcattctacttattgcagcacaatttacaatagcaaagactggaaccaacccaaatgcccatcaacaatagactggataaagaaaatgtgttacatatacaccatggaatactatgcagccatgaaaaatgaatgagagcatgtcctttgcagggacatgggtgaaactggaagccatcatccttggcaaacaaacacaagaacagaaaaccagacactgcatgtactcattcagtgggagttgaacattgagaacacatggacacagagaggggaacaacataaaccatggtctgttgggggatatgggggtgaggggagggaacttagaggacgggtcaataggtgcagcaaaccaccatggcacacgtatacctatacaacaaacctgcacattctgtacatgtatcctctttttagaagcagcaataaaggaaaataaatgatcgcttcatttcaggaggtagagttttcctcttaaagtttttcagatttttatctcaagggtttggctttttatgcatctcactacatgtaatttgcagttaatacatcaatgccttctgctcttacttctctccttaaaacattacatctttttgcttaactaaagtggtgactctctctctcattttctttttttttctttttttttgtcagttcctattgcatttttccccacttcgcactctggtattataacctgacactgagaatgtttgcctcaaaaaaactggaaaaacaatgtttttccagtatagacgaattctgtactcggcttttcctgatgtatccaaattgttctatgtaaccaggaaatttcacatgctcttactttttctaaaagccatccattccacctggtggaggtactacttgtgtgtgtgtgtgtgtgtgtattattatcctataatatggtttacttataaccttagacacacactcttccagtgtctaattgaattaaagtagtttttcatggggtttaatttccagcttactcaaaagggcatataccaagagaaatggtcatactacaaaaggttttttttctctctctctaagtaatccacctaataagcaggtattttatgtttcaagatagcttcctgtggtttgggctgtctttattcgggttttgaccacctgaaaaaactaagtcatctctaatacaggtctaactattttttttctcttgactatgtaacttttgaatttgtttttgaagtctttccattattactctggctaaataagtgaccattatctctcaaggatatgtaattctactttaattaaatatttttaggctttttgaatccaaacaaatgacaaacttccccagaatcaaattcaaatttaactctttttcacctaaaattgactaagggattttctagttgggatcctgggaagtctcaaaagatttgtctcccattaggcttgtttgaccagctcccaaaatcttctctagtgtctgtgagctttctttcaaaacaatatgtagcatttccctcgctagtaaacccccaatcttctctttgtccttcacacatatagaagaccaccgtggttttcagttttgttcagaactacaattctgtgattcccaaataaattgcatactttagagattcatctttattttgacttcagtagtggtgataaactctgatacaatattcaagaatatgttttataa

SEQ ID NO: 57011 - DNA, 501 bp, Homo sapiens
aactgattatactagtgcaataagtgaaaacagctaacatcgatccactgcttaccaggttcccacactaagtctgacttcgtcagcctatcctagcttcccagccaagcgcatcttcagcattttcttgaactactcgtgttcctcacgttcctttagggaataaaattcctcatatttgtgagagattaataaacttaattaccaaacaccaagaataaaccttcacattttaaaaattaactcataagacacgttaagaattaagattacataaatttcccattaatgtttgttttccatttccttaatgattttgttttctgctagggyttactaacctacaagcaatagtaggcagtaaaagtttaagaaagttttatttgaaaaaaaattaattggtgaaattccacaactaatgacaaaaacttttttggcttagaaaaatggccttattatttactttttcttcagaatctcatttcacctcacagatcactg

SEQ ID NO: 57012 - DNA, 586 bp, Homo sapiens
tgtggcaaatcagctctgtaaatgttttctttagcagaacttaagatacggctgtatcaaacactcagcatgtcgaagatataaaaggatcataaaaatgagtatgtatacattttagaaaactgacacagtgggatcatttggaaacaaaatttttagatgcattgtaaatgaatttctgcatttcttttgaacatatttcttgatgttaacgaaaatcagcataattctgccattatagattcagaatacaattatataattrtctcctgttcttcatatgatcaacactaggtcaaacagcaaaatggaaagtttcttaggtcacttgctagtcaacaatctagttttctttacatacctaagatgccaacatacacttgctgaaaccacaagtttacaactacttatatatggtaacgtggaggacagatattttgcattctttgagagcatcatttgtcaactatattaaaataatattaagataattaagaagaccaataatattcaaagctagtggaattgaaccagtagttgtagagactccttaccctggacaggtttttaatgctcttcagggcgc

SEQ ID NO: 57013 - DNA, 733 bp, Homo sapiens
gggatcctgagggcttccattgattgggaaatgtcaaacacataatacgtagatgacttaaaatgctgtaggccccctttttctctctttgcagactgaatggtcaggtttctctgtctctttaggactccattttctctaagtttttmtttgtaaagatgtaaagagggaaacatacctctttccatattctgtgtattcattcagcatagaacgttggcaaggactctgctattgcatgttttctttatgagtttggggatacgcatgagactgtgtgttaatggagaccaatctggcaagatctcaggcaatgccttgctcccaatggtcatgcccaagtttgtgatatctttttaggaggccactgaaaaaactcagaatggagatgtggcctctatgtagatatttgttctgtgagtgaacatggcattaggagtcatatgcagcttctccacttcctacctgtgtgatctgagactaccttagcactatgagcctcagcttcttcagctataaaatgaagatgacatttttgagctatccattctgatttttctctttatatctttatgacagccagaaaagtgggtccctgggcatgctagcctgtttgcagcagcaggtcatcatctttctccttttccccaagctcttagttcactccattttctgtctggcttgaggcccttgactttgcctcttgtttggagctttgttcccacactttgga

SEQ ID NO: 57014 - DNA, 1510 bp, Homo sapiens
tgcatgagagatactcacaacatggcaaggccctcataatcacctgtgattaatgctaagaacccccagtggtacatcctttaatgatgctcttagaatcatgatgtctgatcttggttctattactgycaaaagtgctttaatctgccctgggttaagggctcatacatctatgctggtgcctatccagggaagcaattggtgatttttttcaccctctgcctcaaatattcattctttttcctatttgcttcataacatagaaatgaaagcagcaaagagtgtgtgtcctctggaatcaattgtaactactgctattacacaggtcatttggcccaaattgaagcatcctgcctggtttttctatgccctgacttcaaggcaacagaacaggaaagagtagttcacaagaaataaagtgcgatagaggcacttcctgggagaggtcaccaatacatcgtggtgtatttcagggccaatttcagtcaattgttaacactaccagacacagaaacctccaatgccatttgcttatttcaaaactccttcctgtttagtgtatcagatgctttccgcagcaagagttagtgacttacaggttaagcaagaggcactttttgcatacctgcttgtgtttttaaataaagtgcatccagttccagggatggcagccagaacacttcccattgtttcttttaatacagtgagacagtgacaccaacaagccacataaccgtgggtggatcaattataatttttaggcttcaagttccccacctgtcacaggaggaaattaaaccaccagaactattaaacttcaagttctgatgcactgggggctcctgtccccacaataattcataaagaacaaggagcatgtcttaagatggattttttcttaaagacagaggaagtcacactttcatcagggcaagtgacttaatgtgaaacatttcttcaactattaaccccaagctattcatatcccaattaggtcttataaacaacatattatacagaaattactccaacaataaagaatgaaatcactaagctaaagatgattacttggctgattagacttggcttccatgctccacagacagaaattttgttgatgttacttgtgtgtgtgtggggtgggggtggtgtggggggggtttccctaagctcctctaataattcagatagaagggagaaagtagaactaatctgaaatgaatatctctaggagacagccaaattccaagttgtactctaaatataaggattggagcactggtaacaaaaatggggataacccaagcacaagaatttgaagataagtactgcaggaatttagaaaataggcatgttggataacattaatgtagtaaaagctctttcctttctctaggctgacaatgccaagcagggacccgagtattccgagaagaaaaaaaaagcaagagtagttaaaatccaaaacactatttttgttgtacctctgttaaagatcttttctgtaatt

SEQ ID NO: 57015 - DNA, 1510 bp, Homo sapiens
tgcatgagagatactcacaacatggcaaggccctcataatcacctgtgattaatgctaagaacccccagtggtacatcctttaatgatgctcttagaatcatgatgtctgatcttggttctattactgtcaaaagtgctttaatctgccctgggttaagggctcatacatctatgctggtgcctatccagggaagcaattggtgatttttttcaccctctgcctcaaatattcattctttttcctatttgcttcataacatagaaatgaaagcagcaaagagtgtgtgtcctctggaatcaattgtaactactgctattacacaggtcatttggcccaaattgaagcatcctgcctggtttttctatgccctgacttcaaggcaacagaacaggaaagagtagttcacaagaaataaagtgcgatagaggcacttcctgggagaggtcaccaatacatcgtggtgtatttcagggccaatttcagtcaattgttaacactaccagacacagaaacctccaatgccatttgcttatttcaaaactccttcctgtttagtgtatcagatgctttccgcagcaagagttagtgacttacaggttaagcaagaggcactttttgcatacctgcttgtgtttttaaataaagtgcatccagttccagggatggcagccagaacacttcccattgtttcttttaatacagtgagacagtgacaccaacaagccacataaccgtgggtggatcaattataatttttaggcttcaagttccccacctgtcacaggaggaaattaaaccaccagaactattaaacttcaagttctgatgcactgggggctcctgtccccacaataattcataaagaacaaggagcatgtcttaagatggattttttcttaaagacagaggaagtcacactttcatcagggcaagtgacttaatgtgaaacatttcttcaactattaaccccaagctattcatatcccaattaggtcttataaacaacatattatacagaaattactccaacaataaagaatgaaatcactaagctaaagatgattacttggctgattagacttggcttccatgctccayagacagaaattttgttgatgttacttgtgtgtgtgtggggtgggggtggtgtggggggggtttccctaagctcctctaataattcagatagaagggagaaagtagaactaatctgaaatgaatatctctaggagacagccaaattccaagttgtactctaaatataaggattggagcactggtaacaaaaatggggataacccaagcacaagaatttgaagataagtactgcaggaatttagaaaataggcatgttggataacattaatgtagtaaaagctctttcctttctctaggctgacaatgccaagcagggacccgagtattccgagaagaaaaaaaaagcaagagtagttaaaatccaaaacactatttttgttgtacctctgttaaagatcttttctgtaatt

SEQ ID NO: 57016 - DNA, 1510 bp, Homo sapiens
tgcatgagagatactcacaacatggcaaggccctcataatcacctgtgattaatgctaagaacccccagtggtacatcctttaatgatgctcttagaatcatgatgtctgatcttggttctattactgtcaaaagtgctttaatctgccctgggttaagggctcatacatctatgctggtgcctatccagggaagcaattggtgatttttttcaccctctgcctcaaatattcattctttttcctatttgcttcataacatagaaatgaaagcagcaaagagtgtgtgtcctctggaatcaattgtaactactgctattacacaggtcatttggcccaaattgaagcatcctgcctggtttttctatgccctgacttcaaggcaacagaacaggaaagagtagttcacaagaaataaagtgcgatagaggcacttcctgggagaggtcaccaatacatcgtggtgtatttcagggccaatttcagtcaattgttaacactaccagacacagaaacctccaatgccatttgcttatttcaaaactccttcctgtttagtgtatcagatgctttccgcagcaagagttagtgacttacaggttaagcaagaggcactttttgcatacctgcttgtgtttttaaataaagtgcatccagttccagggatggcagccagaacacttcccattgtttcttttaatacagtgagacagtgacaccaacaagccacataaccgtgggtggatcaattataatttttaggcttcaagttccccacctgtcacaggaggaaattaaaccaccagaactattaaacttcaagttctgatgcactgggggctcctgtccccacaataattcataaagaacaaggagcatgtcttaagatggattttttcttaaagacagaggaagtcacactttcatcagggcaagtgacttaatgtgaaacatttcttcaactattaaccccaagctattcatatcccaattaggtcttataaacaacatattatacagaaattactccaacaataaagaatgaaatcactaagctaaagatgattacttggctgattagacttggcttccatgctccacagacagaaattttgttgatgttacttgtgtgtrtgtggggtgggggtggtgtggggggggtttccctaagctcctctaataattcagatagaagggagaaagtagaactaatctgaaatgaatatctctaggagacagccaaattccaagttgtactctaaatataaggattggagcactggtaacaaaaatggggataacccaagcacaagaatttgaagataagtactgcaggaatttagaaaataggcatgttggataacattaatgtagtaaaagctctttcctttctctaggctgacaatgccaagcagggacccgagtattccgagaagaaaaaaaaagcaagagtagttaaaatccaaaacactatttttgttgtacctctgttaaagatcttttctgtaatt

SEQ ID NO: 57017 - DNA, 624 bp, Homo sapiens
aagattgcgccattgcaccacctggatgacaagagcaaaactccatctccaaaaaaaaaaaaaagaatattctagctggtggattatttccattcttcagaagttccaagtgtccaaacatatgcattttttgttatataccatttgtatgtgctgtttcaaatattttccattttattccagtctagcatataagcagttaaaaatataaggttaaaaaaattatatgtcttatcagtcctttctgctagaatgtaaatgctatgaagacacttaagatttgtttactgctatgttggttgtgtttaacagaggaccaagaggataatacaggctcaataaatatttgctgcacagaaaggaaaaatgaaagtctcctcccagtgcctagtacatcacctcractcagtcatcatactgactgccggatgtcaatcatgcctattctctaagggcttaaggtctagattagtggtaaggtaaccatgtctagcatactttaagaaatagtgactgcaaatgttatatttatagagtcatttaaaatccccttctcccccaaatacttttttaatctcattctctgagcaattctatgatattggtttagtgactgatttctta

SEQ ID NO: 57018 - DNA, 1838 bp, Homo sapiens
gtcttcctcagaaggggtgcatagacagggggctaactggctgatcaaaatgatatcattcgttcctgttgcatcatgaatcatttcaatcccagttatgctcctgaggcaggctcaccagccactcgcctttatgcagtcctgatgtttttgtctaaattcagaattctccatggtgtcctctcatcttacctgtagacttcagaggtgactgtccactccttctcacacaggtctctcaggtggagggtctcccctcccaggatttctatgaggggacactcatcttccaggtcctctgcccttcccagtcataatcctaaaggacatttcctcattcctcccacagcattcacctttgccacatgtgtttgatgcctgtctatatatatacatggatttttaaaatttcttttcctggtttcaaatatgaattttgttcaatgcaaggagttaaagtaaaaaattacataaataagaaaaaaaattacttgtaatcccatatccagagataaccagtattaacatttgaatgtgtaacttttttattctgtatgtatgcatattttatacacacacatataattattacatcaaattttggtccagagtgtatatttagttttgtctttctctttagtgccatattccgtgtccttggttttggatttgtactactgtacactgccttataattgaatcttttttttcatgaagggaaaccagatttttttcttaattagattaaaatccttgagtgcagggatagtttctctttttttaaattctcacttttttcacctctattttcattcccaccagcaaccagtaaaacttagcagcacagaatgagtattttgataaatattttctgagtagaattgaacagaatgaggtgagatgcacccatagcaggaaactggagcacctgatattcccctcttgttcttgccacacagagaaagtcacagcttgaaacgagtcatgaacggttctttggcggtatgcacagtgatgcacctgctaagttacaagcccgatgaatcatttgcctggttatcttgctagttatgctgaaccaaatgctacttttcaaaccaaacaagtctaaaccagagctcttttcttgctttggtcttgggttagtgttttctctgcaaatagtctccctatctctttttaaaaatctgtactagtggccttacaaaaacaatattcaaagaataattctccactactcctgtctcttctaataggaattgtatgacatattgccatgtaaattagatttggctccttgttttatttatacaataaaactgagcaaagatatcaaccacaggataaattaattacaaggcagagaatcctgccagatatttcctttgggggacaaaccaaacaagaaaaccactccccaaaacttgttcttatctatttcattacgtgctttggcaagtctcaatgacctgcttatttaactaacctaatgggtttgtttttgttttgtaatctactcctttgcaaaagttaatgtctttttgctttagtattaaaaattctcccttcctctgttccagtcttccttatggaccttcctcccctgcattccttagatgagaaattgcaaaagtcactgaaaytaatgaaaaacacacagtcctaacaacaggaaaccagagacccaatttggccttcaaggggctctgcttaggtgtatcatattgcgttagatgatgtaaaaacttcacgtgggttaatcagaatgcaacctcaacccttactcaagacacctgttggactgctgtttgcccaagaggttgagtctgccttagtct

SEQ ID NO: 57019 - DNA, 692 bp, Homo sapiens
tcttcatgtctgtgttaactacagttcctttgctctgccccccctcagaaacagatttctcagctcctctagtagtgactgtattagtccattctcacaatgctttaaacatactgcctgagamtgggtaatttataaaggaaagaggttcaattgactcatagttccacatggctgcagagatctcaggaaacttacaatcatggtggaaggcaaaggggaagccaggacctttttcacatggcagcaggagagagaagagctagcaagaccagggaaaactgccttataaaactattagatctcatgagaactcattatcactagaacagcatgggggaaactgtccttatgattcaatcacctctcactggctgcctcctctgacacgtggggattatgggaattacaattcgagatgagatttgagtggggacagagagccaaacaatatcagttaccaatacatggaaagttttctatatgccactcggctaccatattctgtttttgatatcccttcttttcatcaatttgattgttctaccttgtgtgacttaatatgattatagtcagagtcctatcaaatcagttctgaaaaagtagctgtatttttgtagcatttttcaagtgctgaaaacaggctttaatctcctgctttacttcattcagtgattaccacaatccgtctg

SEQ ID NO: 57020 - DNA, 743 bp, Homo sapiens
aaatatgctgcaaatggctgggcgcagtggctcacacctgtaatcctagaactttgggaggccgaggcgggcggatcacgaggtcaggagattgagaccatcctggctaacacagtgaaacctcacttctactaaaaatacaaaaaattagccgggcttggtggcgaacgcctgtagtcccagctactcgggaggctgaggcaggagaatggcagaacccaggaggcggagcttgcagtgagccgagatcgcgccactgcactccagcctgagtgccagagcgagactccctctcagagaaaaaaaaaaaaaaaaaaaaatgctgcaaataagtgaaattgacctggagacagaaaggatagagtagagataaatggaaaagtatgaaaataatatactatgtcttaataactgagtgagattatatgatgctttagtctgtttgtgttgctataaaggaatacttgaggtgggtaatttataaagaaaataagcttatttggctcactgttctgtaggctgtacaagaagcaatgtgccagcatctgcttctggtgagggcctcaggaagcttctactcacaggatagggcaaggaaagtcagtgtgtacagagatcacatggtaagasagaaagtgagagagatgagtaagggtcagtctcttcaccagtcagttgtttcgggaactaagagtgagaactcactcctgtgaaaatggcaccaagccattgatggatcccct

SEQ ID NO: 57021 - DNA, 2004 bp, Homo sapiens
tgacccagatgtggtgccaagggaaccgaacccacagccaccattccaaaaccctgcgtgaaagtccccaggggaggtggaagagtgagagttgctctcagccactccaccctgtgctattttaagcaccatgacttcattcttgtttgttctgaagcagcacagatgggccgcgtcaatttatgttactacaagaagagaaggagacccagattcaaagctgcacgtttctcttgccttgtgttagggcatcctgaagctggaactgtggtgtgtcgagcagaggaaagcactatttcttttttttcctttctcttttttagaagcctaagagtatttcaccaacgtgsccatatttcatggaaccaacagccagatctacctgaaaaatggcacaaggtgagttgctaataaagccatcgagcctttgcagctttgtcagtgccacccaactgtgaaatccatggcccttgctccagacacaggaagggtcctcttcctcagagagcaggagacagggtcaatgatccaagctgcagcatgatccagggtggaaggggctccaaaccacatctcacccggtcacctcggagggcacaaggctcttccctgaacctttccaagaaacttaatgaaccagactgtctaaggggcaggtacagaatatattattttatttttttattttttgagatggagcctcactcggtcgcccaggctggagtgcagtgccacaatctcggctcactgcaactaggttttgaattggtagaggtggtcattaccccacattatgaatgcactaaatgtcactgaattactcactttaaaatgattaattttctcttatgtcaattccacttcaattataaaaaacacttcaattataaaatatgcataatctgcatcagcgtcactatatatggtacaccccacgcatcgccaggagctgtcagccttgatgtacttggtccgcctcctggtgcaagcaattctcctgtctcagcctcccaagtacctgggattataggcacacatcaccatacctggttattcttatatttttagtaaagacagggttttgccatgttggctaggctggtctcaaactcctggccgcagggatccgcccccctcggcctcccaaagtgctggaattataggcagaagccaccacgcccggccagattacatttattaaacctctcccaggcactgcacaatctggttaaaaactcccaaaaatcctatgaggtaagtcctcttatcattcttttttttttgagtcagagtcttgctctgccacctgagttggagtgcagtggcactctcaacgcactgcaacctctgcttcccaggttcaatcaattctcctgcctcagcctcccagttagctgggattacaggcgcatgtcaccatgcctggttaatttttgtatttctagtagagacggggttttaccatgttggcctggctggtctcaaactctggacatcaggtgatccacccacctcagcctcccaaaatgctgggattacaggcatgagccaccatgtccggccctcttaacattcttgctctttctgttttcaaacagagaaagccagctccaagaagtcaggaaacaacaaggctgagctagcctccgcttcacagcaggtatgtggaggagctttgactgccctccgaggggcagaatagaagcttcttgaggaacactgatctttcactagtctacccaatgtgtcagcctcccctgccagcaaacaccatgtagaaataatgaataaagatgcatagaaaacaggaaaacccaagagccagtcctacaactgtcacttcccaatgacttggccttgagcaagttccattgcccttgagctctgttcgggtcccctatgtgtaaaggtgtgtttggttctccctctgacacagggttggggaccaagtacatccaggctgacaggtcctggtgatgaatagggtgtaccatatatagtgac

SEQ ID NO: 57022 - DNA, 2004 bp, Homo sapiens
tgacccagatgtggtgccaagggaaccgaacccacagccaccattccaaaaccctgcgtgaaagtccccaggggaggtggaagagtgagagttgctctcagccactccaccctgtgctattttaagcaccatgacttcattcttgtttgttctgaagcagcacagatgggccgcgtcaatttatgttactacaagaagagaaggagacccagattcaaagctgcacgtttctcttgccttgtgttagggcatcctgaagctggaactgtggtgtgtcgagcagaggaaagcactatttcttttttttcctttctcttttttagaagcctaagagtatttcaccaacgtgcccatatttcatggaaccaacagccagatctacctgaaaaatggcacaaggtgagttgctaataaagccatcgagcctttgcagctttgtcagtgccacccaactgtgaaatccatggcccttgctccagacacaggaagggtcctcttcctcagagagcaggagacagggtcaatgatccaagctgcagcatgatccagggtggaaggggctccaaaccacatctcacccggtcacctcggagggcacaaggctcttccctgaacctttccaagaaacttaatgaaccagactgtctaaggggcaggtacagaatatattattttatttttttattttttgagatggagcctcactcggtcgcccaggctggagtgcagtgccacaatctcggctcactgcaactaggttttgaattggtagaggtggtcattaccccacattatgaatgcactaaatgtcactgaattactcactttaaaatgattaattttctcttatgtcaattccacttcaattataaaaaacacttcaattataaaatatgcataatctgcatcagcgtcactatatatggtacaccccacgcatcgccaggagctgtcagccttgatgtacttggtccgcctcctggtgcaagcaattctcctgtctcagcctcccaagtacctgggattataggcacacatcaccatacctggttattcttatatttttagtaaagacagggttttgccatgttggctaggctggtctcaaactcctggccgcagggatccgcccccctcggcctcccaaagtgctggaattataggcagaagccaccacgcccggccagattacatttattaaacctctcccaggcactgcacaatctggttaaaaactcccaaaaatcctatgaggtaagtcctcttatcattcttttttttttgagtcagagtcttgctctgccacctgagttggagtgcagtggcactctcaacgcactgcaacctctgcttcccaggttcaatcaattctcctgcctcagcctcccagttagctgggattacaggcgcatgtcaccatgcctggttaatttttgtatttctagtagagacggggttttaccatgttggyctggctggtctcaaactctggacatcaggtgatccacccacctcagcctcccaaaatgctgggattacaggcatgagccaccatgtccggccctcttaacattcttgctctttctgttttcaaacagagaaagccagctccaagaagtcaggaaacaacaaggctgagctagcctccgcttcacagcaggtatgtggaggagctttgactgccctccgaggggcagaatagaagcttcttgaggaacactgatctttcactagtctacccaatgtgtcagcctcccctgccagcaaacaccatgtagaaataatgaataaagatgcatagaaaacaggaaaacccaagagccagtcctacaactgtcacttcccaatgacttggccttgagcaagttccattgcccttgagctctgttcgggtcccctatgtgtaaaggtgtgtttggttctccctctgacacagggttggggaccaagtacatccaggctgacaggtcctggtgatgaatagggtgtaccatatatagtgac

SEQ ID NO: 57023 - DNA, 2004 bp, Homo sapiens
tgacccagatgtggtgccaagggaaccgaacccacagccaccattccaaaaccctgcgtgaaagtccccaggggaggtggaagagtgagagttgctctcagccactccaccctgtgctattttaagcaccatgacttcattcttgtttgttctgaagcagcacagatgggccgcgtcaatttatgttactacaagaagagaaggagacccagattcaaagctgcacgtttctcttgccttgtgttagggcatcctgaagctggaactgtggtgtgtcgagcagaggaaagcactatttcttttttttcctttctcttttttagaagcctaagagtatttcaccaacgtgcccatatttcatggaaccaacagccagatctacctgaaaaatggcacaaggtgagttgctaataaagccatcgagcctttgcagctttgtcagtgccacccaactgtgaaatccatggcccttgctccagacacaggaagggtcctcttcctcagagagcaggagacagggtcaatgatccaagctgcagcatgatccagggtggaaggggctccaaaccacatctcacccggtcacctcggagggcacaaggctcttccctgaacctttccaagaaacttaatgaaccagactgtctaaggggcaggtacagaatatattattttatttttttattttttgagatggagcctcactcggtcgcccaggctggagtgcagtgccacaatctcggctcactgcaactaggttttgaattggtagaggtggtcattaccccacattatgaatgcactaaatgtcactgaattactcactttaaaatgattaattttctcttatgtcaattccacttcaattataaaaaacacttcaattataaaatatgcataatctgcatcagcgtcactatatatggtacaccccacgcatcgccaggagctgtcagccttgatgtacttggtccgcctcctggtgcaagcaattctcctgtctcagcctcccaagtacctgggattataggcacacatcaccatacctggttattcttatatttttagtaaagacagggttttgccatgttggctaggctggtctcaaactcctggccgcagggatccgcccccctcggcctcccaaagtgctggaattataggcagaagccaccacgcccggccagattacatttattaaacctctcccaggcactgcacaatctggttaaaaactcccaaaaatcctatgaggtaagtcctcttatcattcttttttttttgagtcagagtcttgctctgccacctgagttggagtgcagtggcactctcaacgcactgcaacctctgcttcccaggttcaatcaattctcctgcctcagcctcccagttagctgggattacaggcgcatgtcaccatgcctggttaatttttgtatttctagtagagacggggttttaccatgttggcctggctggtctcaaactctggacatcaggtgatccacccacctcagcctcccaaaatgctgggattacaggcatgagccaccatgtccggccctcttaacattcttgctctttctgttttcaaacagagaaagccagctccaagaagtcaggaaacaacaaggctgagctagcctccgcttcacagcaggtatgtggaggagctttgactgccctccgaggggcagaatagaagcttcttgaggaacactgatctttcactagtctacccaatgtgtcagcctcccctgccagcaaacaccatgtagaaataatgaataaagatgcayagaaaacaggaaaacccaagagccagtcctacaactgtcacttcccaatgacttggccttgagcaagttccattgcccttgagctctgttcgggtcccctatgtgtaaaggtgtgtttggttctccctctgacacagggttggggaccaagtacatccaggctgacaggtcctggtgatgaatagggtgtaccatatatagtgac

SEQ ID NO: 57024 - DNA, 741 bp, Homo sapiens
cactttctaatcccaccccacttttataataagaaaaacaatgaagaacttctaaggctaagtcgggcacatgaagcgtttgtgaaggaataaaaaggtrttgattaataatttgatttttaaaaattaatcataactcagaatgtgtaacaggactgtctcaaaactggacattattcctaacatgcatggaaaatgcaaagatggtattaaagattaaattctttaaaaagtaaagacactgcagggacatggaaagaaaaatgatacaggaaagaccaaagcaaagctcttcatctccaaatctttgccatctaatttagtgaccagaacactcagacctttctttgaacagagccatttttatcaagtcaagatctcacgaccatccaaagactctgagctcaaaacctcatgtggacagacgcaaatgtgaggcaacctggccagccttctgctgctctgctacaggtctgggcaaatgaaagaacgtgctcaaatctaaactcaggtaatggagaggctaatgttgtcaacatcaatattgtcactgcttccaagacaacttctcagcaaaacaaagagtctcaactccctctaggtgttaagaatcttcaagtatcaagtgaaaaggtctccgttcccttgaattcttttttaatccaaggtttggggcttcaaattcagtataaagcgagtgcaatcacagtaggttacttgaaggggcaaaatgcaatctca

SEQ ID NO: 57025 - DNA, 672 bp, Homo sapiens
aggatatgttttggtaaatgtgggattccggtgagttcattctgggctaacacatgatgactgccctttcaagtgtcattccaggaagacatggttaaaagcaaaacacgactgaggcaggagcactggttgaccacaatgaacaattctctctggcaactgctgctacccaaccaaagatcaataataaaaggccacttgtcaaatggggaacagtgctgtcgccaggcatcagtttttacatcaagaaaagagcaatgggattagaaaggagggattcgttttatcagcagtaatgctaggctcatggttacaaatctcctaaatatacgtacttgcccgtcaaaataatcaaacacataagcaaccataactccatcaactgaaaaacatcaaaaacaaggtatttttttaaatttataaaataaaaacactctttaaaaatatacagattcatttgttatttctagttcttatgtatagtatgagttgtaaaaatgctaaaaatgcatgacaccctactgtcctgggctcaacacaaagtctgaagtttcatagaaagcacaccccaaacaatgacagctttaaaaaaaatggrgaatcgtaagacaaacttcacatgcccgggccatttttaaaaagatgttttattcatagcagacgtatatgact

SEQ ID NO: 57026 - DNA, 665 bp, Homo sapiens
agttagctgggactacaggtacacgctgccacgcccagctaatttttaattttaattttaattttttttttttgagacagtcttgctctgttgtccaggctggagtacagtggtgtgatctcagctcactgcaacctccgtctttcaggttcaagcgattctcttgcctcagcctcccgagtagctgggattacaggtgtgtgccaccacccctagctaatttttgtatttttcatagaaacgaggtttcacggtgttgcccaggatggtcttgaactcctgacctcaggtgatccgcctgcctcggcctcccaaagtgctgggattataggtgtgagccaatgtacctggcccagctaatttctgtgttttttgtagagatggggttttaccatgttgcccatgtgggtctcaaactcctgggctcaagcgatctgcccgcctcagcctcccaaagaggcataaaacacagtgcttggccgtgttttaaactaaatgcaaaatgccatgttgtctttaaaaatgtagtaccattttacatatcagctaacgatacacgaaacaactctttcaccatacatttaccaatactgagtatttttccatctttgggggaaagtcttttactggtctttttataatatctgcattcttctgacasaatg

SEQ ID NO: 57027 - DNA, 565 bp, Homo sapiens
atcaggtaactctggctctgtactagcatatatctgtcagaacctcaattttgtattcgttgttgagtagatgttggcttagcaattagtctcatttcatgtttctcatttttattaattttttttttttttttagagatgggggtcttgctttgatacccaggctggagtgcagtggtgctggagtgcaatggtgtgatcatagttcactgcagcctcaaactsctgggctcaagcagtcctcctgccttagcctcctgagtagcttgggattacaggcccaagccactgtgcccagcttcatgcttctcttttatgaaacctcagagtagaaaagcaagaaaataattttagggttttatggaaaggtggaaacttacagtaaaacctgttataagacttataacaaaatactcaatagacacaaagacatagaaaaataaacaggcacagatatatagagacagacacaccgagacccagagggagagttacacacagactccctacacacagagacacttcccccatatatacataacagaacccctgccccaccatgccc

SEQ ID NO: 57028 - DNA, 914 bp, Homo sapiens
gataacatttctatgagccagacactgctccaagtactttctcttagcaaccccttgagatagaaattattgtaatctccattttaaaaaattaattaatgttaattgccttgttcagggttacacaactagggaaggacagagttggaatttaagccaaggcaacttcaaggcatagtatttcaacatctggaccacatgttccagaatttatgtactcattctataatttttgggcatttaagtttttaatttttcaccaatataaaataacactatctgaatgtccctgaatatacagctttgttgggatcatggattatttctttgtaatcagttcttaggaatggaattattgggttgaggacatatcaattcttttctgaattgtgatatacatctccaaattatcttccaaaatgtatactcccgtgcatacttccaccccaaatgcttgatgcttgtgtcaattaatcctcagaggtatttttgcaaacacaaagaaaatagaaaagtgcctcctaggcattttgaaaatctctagagaagtcaaataccattttaaaaatatttataaacacatatttctcttagtgcaaattgtttgctcctttttaagatttttatttaatgagattgatctgatttgtatgcacacattcatgagcttatgcataaaagtgagttttgcccacagcagagtgatcacttagacacttaatctaatgataataccattcgataaaagtatgtggaactcctttatgggacttacacrcaaaatagtttataaaccacataagaaaagaggaaagtctttgtataaagcattgttatcacctttaaaaaatgttatttgtatttaagaaaaacacataacaatattatattgttcattaatcttatttgccagg

SEQ ID NO: 57029 - DNA, 914 bp, Homo sapiens
gataacatttctatgagccagacactgctccaagtactttctcttagcaaccccttgagatagaaattattgtaatctccattttaaaaaattaattaatgttaattgccttgttcagggttacacaactagggaaggacagagttggaatttaagccaaggcaacttcaaggcatagtatttcaacatctggaccacatgttccagaatttatgtactcattctataatttttgggcatttaagtttttaatttttcaccaatataaaataacactatctgaatgtccctgaatatacagctttgttgggatcatggattatttctttgtaatcagttcttaggaatggaattattgggttgaggacatatcaattcttttctgaattgtgatatacatctccaaattatcttccaaaatgtatactcccgtgcatacttccaccccaaatgcttgatgcttgtgtcaattaatcctcagaggtatttttgcaaacacaaagaaaatagaaaagtgcctcctaggcattttgaaaatctctagagaagtcaaataccattttaaaaatatttataaacacatatttctcttagtgcaaattgtttgctcctttttaagatttttatttaatgagattgatctgatttgtatgcacacattcatgagcttatgcataaaagtgagttttgcccacagcagagtgatcacttagacacttaatctaatgataataccattcgataaaagtatgtggaactcctttatgggacttacacgcaaartagtttataaaccacataagaaaagaggaaagtctttgtataaagcattgttatcacctttaaaaaatgttatttgtatttaagaaaaacacataacaatattatattgttcattaatcttatttgccagg

SEQ ID NO: 57030 - DNA, 914 bp, Homo sapiens
gataacatttctatgagccagacactgctccaagtactttctcttagcaaccccttgagatagaaattattgtaatctccattttaaaaaattaattaatgttaattgccttgttcagggttacacaactagggaaggacagagttggaatttaagccaaggcaacttcaaggcatagtatttcaacatctggaccacatgttccagaatttatgtactcattctataatttttgggcatttaagtttttaatttttcaccaatataaaataacactatctgaatgtccctgaatatacagctttgttgggatcatggattatttctttgtaatcagttcttaggaatggaattattgggttgaggacatatcaattcttttctgaattgtgatatacatctccaaattatcttccaaaatgtatactcccgtgcatacttccaccccaaatgcttgatgcttgtgtcaattaatcctcagaggtatttttgcaaacacaaagaaaatagaaaagtgcctcctaggcattttgaaaatctctagagaagtcaaataccattttaaaaatatttataaacacatatttctcttagtgcaaattgtttgctcctttttaagatttttatttaatgagattgatctgatttgtatgcacacattcatgagcttatgcataaaagtgagttttgcccacagcagagtgatcacttagacacttaatctaatgataataccattcgataaaagtatgtggaactcctttatgggacttacacgcaaaatagtttataaaccacrtaagaaaagaggaaagtctttgtataaagcattgttatcacctttaaaaaatgttatttgtatttaagaaaaacacataacaatattatattgttcattaatcttatttgccagg

SEQ ID NO: 57031 - DNA, 823 bp, Homo sapiens
ttcttaaagaaaataatgaagtactgaactgacttttcaggagtaacagctacactagaagtgaggaatagacggggagacagattccatcctggaactgccccatccacacacrtgtttctgggatgtttgtaggacacgggtaggctgcctttgaataaactgctcagccaacatttttgaaaacttaactgcatttcttttagagtccatgtggcctgggtaatgcttattaaatgcccactgaagtgtgcgtgtatgcatactcacatgtgtgctgctgaaataatgagagcagcacaggctccagccttgagaaattattacttcaagttgacttccaggccctcccaaatccatttccctcaaacgtaattggaaacaaatcagaatgagactgtggcaacatattatttttaccagtttttaactagcacatgatttcagaagtcaatatgaagttacacttccacttgatatatataaaagaaaatataacagtggaaattactaaagaagagaaaaataacttctttttatcagtcaaacatgtagccaggactcctggggaaaaaaagccaaccaggcaattcaaaagctgcaccgatggccgtttaggaaagtctcttggcagtaagccaggtaaaactaaactctttccatctcctcctcaattacttttgcaactctctcaaaaggtagagacaccttttctaaattcagaaaaggtgaattattttcagtctaatggcctggtcactgtttctgaaattacataccatattacctgggagcttgttaagaatgctgatttctagtgtcg

SEQ ID NO: 57032 - DNA, 823 bp, Homo sapiens
ttcttaaagaaaataatgaagtactgaactgacttttcaggagtaacagctacactagaagtgaggaatagacggggagacagattccatcctggaactgccccatccacacacatgtttctgggatgtttgtaggacacgggtaggctgcctttgaataaactgctcagccaacatttttgaaaacttaactgcatttcttttagagtccatgtggcctgggtaatgcttattaaatgcccactgaagtgtgcgtgtrtgcatactcacatgtgtgctgctgaaataatgagagcagcacaggctccagccttgagaaattattacttcaagttgacttccaggccctcccaaatccatttccctcaaacgtaattggaaacaaatcagaatgagactgtggcaacatattatttttaccagtttttaactagcacatgatttcagaagtcaatatgaagttacacttccacttgatatatataaaagaaaatataacagtggaaattactaaagaagagaaaaataacttctttttatcagtcaaacatgtagccaggactcctggggaaaaaaagccaaccaggcaattcaaaagctgcaccgatggccgtttaggaaagtctcttggcagtaagccaggtaaaactaaactctttccatctcctcctcaattacttttgcaactctctcaaaaggtagagacaccttttctaaattcagaaaaggtgaattattttcagtctaatggcctggtcactgtttctgaaattacataccatattacctgggagcttgttaagaatgctgatttctagtgtcg

SEQ ID NO: 57033 - DNA, 502 bp, Homo sapiens
ccttcctgcacctatcgctctaccctccccccactccacatctggayaccaaagtaatcttctaattaagaaccttgtagttagggagaactataagcccacaaacaagccaattaatacacttgagttccaaaattcattttttcccaacagtgatgacttcagtaattcttgtcatcattttgaccattgataacagaatcctgattcaaaatgatcactgtgagctgggacagttggccaaaacattttcactgctttaaggtgaaagcttaggaagatatgtacagtcatttacttctagaaagatctaatttgctagcagctagatgaaaattagttagaaggtaggacatgtatcctgaccacaagtttaacctaagccaaattgtgtctggtcgcacctgtcctgagcgcaggctgggcggtgtcagggaggctgggcggtgtcagggaggctgtgcccacttgctgaaagcaacagacttgtagcttgtgttcc

SEQ ID NO: 57034 - DNA, 560 bp, Homo sapiens
ctagcataagtcatgtggtattgagctgttgtgtggatggtttttattggatttgccccaaaagtatcccgacagacccatttacagttagatctccacataggagtacctgctagaggatggttaaatacttcccaaatagwgattctgcagattcagggcattctacctgaggcccagcgccatgctgtaaacactgctgttccagatcgtgtcaagggtccccaagatcatccccagattcaatgatgtgctgggggattcaggcacaggactcagcatatagtcgcactcactgctaagatttattacagcaaaaggatgtagagcaaagccggcaaaaggaaaagatgcacggggcaaagtccaggctaagccaggcgtcaagcttccagagccctcccccagggagtcacacataacacgcttaattcctccagtagtgagttctgagagcaaatatggaatgttgcccaccagggaagctagtgagagactcggtgctagggatttcctggggcctggtcacatagacaccctctacctgggaggcaccaaaa

SEQ ID NO: 57035 - DNA, 731 bp, Homo sapiens
tgtggagggtacagttgactctccccaagagcataatgactattgtatgttgtgaattaagaatataagctttgaagttagtaggaccaaggttggtttaaaggatctggtttttgcttggggatgttcggcaaatttctttctctaagcctcagattttcatatctgccagtgacaatggtactatccacactcgttggggtactgtgaaaactgaatattatgtacagcgtttggagcaggtctcaggttgaataattggcatttactattttaagcgcatccttggtattgcatgttcttttgtatgtagtaacgcatggcaatggaagctgtaatgctgctgctactactgctgatggtgatgaggatgctggtgtccacaggtgctttcagttgtgctgatggcggagtatggaaggcccagctctagtatattgagcatttgctttgccacattatgagggaacatttcagttttaatcttaagaggtcaacttatatgtctagaatatacatttattagggaaatcaggataaatgatccagtctaacattctgttgagtgttgaattaatttctgtattggaatgtatgtcatattttacatacatacataaaatacacaaagttrtgcatgtgtatgtttgtgtggtattttccgggtatcatctccattgctgatgataatgctttttcatttacaggtcggcggaagcagaagtgggctg

SEQ ID NO: 57036 - DNA, 1543 bp, Homo sapiens
aggccccgccccctccaggcccccgcccccgcgcccaccttcttcttggcctgcaggtggcgcaggttggcaccgtgcgcctgatgtccgggcactgcgcgcctccagagcgtgaggccgatgacgctgtaggctacaaacatcaccgcgagcggcaggaagtagatgagggcgatcaccacgaggtggtacctgcagggagagccgaggcctgggcagcggagggcccgggggcgactccgaagtctgccagcgcctggtcctgggaccccgcgggcactgtggagccgcccctgcgggcccacsctgggcgcctcccagggacttggtttgatttaaacaaaaataaaggtggcattgggtagcctgtgtgccaggagacggcttccctgcaaaagggacgccagcagtagccctgcgtccttccatatcacatccttccacgtgatagacacgtgtcaaaaaaaggaaaagtgaatgaaacaaattaagaaataatttgtttgcaatttaaaatgccattaagcacaaaggaggcagtaaaattatcccactcccaccactattaacattaactattaatatctggcatattttttccagaatcatatgtatgaatagtagtcacccctgatgggagtttcactttcccgggtttcagtaacccctcccaactgcggatccaaaataggggaggagagtacaacaagatattttgagagggagagacctcattcacagaagtttaattacagtatattgttatacttgttctgttttattactagttactgttaatctcttactgtgcctaatttataaattaaactttatcataggtatgttgaggaaaaaaacagtatatatctatatagagagaattcagtgctatctgaagtttcaagcatccaccgggtgtcttggagtgtatcctacagtatagccatatatgtatacgtatacgtatatgtatatgtatatgtatatatatatatatacatatatacatatatatatatatacatatatatatatatatatatatatatatatatatatatataatctgtatctgtctggatggatagaatgactggtgttaataaggctccatctgcaccaacatcgctatggaggcatgggacagtggaaaagcgccatatatcacatgctgctgtgtcatctgcttatggtttatcagcatttggctgggaacctcgtttgtgtcagcaaatgctctttcataccacctttgaggaagtgatgcagagtaccattgcgtggcttcctaccccgtccccagggaggacactgggttgtgttgaggcttttcatttccttttggaaacagtgtaggccaggcgtggtggctcatgcctgtaatccctaaactttgggagaccaggatgggaggactgcttgagcccaggaatttgagaccaacctgggcaagatagtgagaccctatctctattaaaaaaaattaaaaaaattagccaggcgtaatggggcacacctgtaattccagctactcaggaggctg

SEQ ID NO: 57037 - DNA, 1543 bp, Homo sapiens
aggccccgccccctccaggcccccgcccccgcgcccaccttcttcttggcctgcaggtggcgcaggttggcaccgtgcgcctgatgtccgggcactgcgcgcctccagagcgtgaggccgatgacgctgtaggctacaaacatcaccgcgagcggcaggaagtagatgagggcgatcaccacgaggtggtacctgcagggagagccgaggcctgggcagcggagggcccgggggcgactccgaagtctgccagcgcctggtcctgggaccccgcgggcactgtggagccgcccctgcgggcccaccctgggcgcctcccagggacttggtttgatttaaacaaaaataaaggtggcattgggtagcctgtgtgccaggagacggcttccctgcaaaagggacgccagcagtagccctgcgtccttccatatcacrtccttccacgtgatagacacgtgtcaaaaaaaggaaaagtgaatgaaacaaattaagaaataatttgtttgcaatttaaaatgccattaagcacaaaggaggcagtaaaattatcccactcccaccactattaacattaactattaatatctggcatattttttccagaatcatatgtatgaatagtagtcacccctgatgggagtttcactttcccgggtttcagtaacccctcccaactgcggatccaaaataggggaggagagtacaacaagatattttgagagggagagacctcattcacagaagtttaattacagtatattgttatacttgttctgttttattactagttactgttaatctcttactgtgcctaatttataaattaaactttatcataggtatgttgaggaaaaaaacagtatatatctatatagagagaattcagtgctatctgaagtttcaagcatccaccgggtgtcttggagtgtatcctacagtatagccatatatgtatacgtatacgtatatgtatatgtatatgtatatatatatatatacatatatacatatatatatatatacatatatatatatatatatatatatatatatatatatatataatctgtatctgtctggatggatagaatgactggtgttaataaggctccatctgcaccaacatcgctatggaggcatgggacagtggaaaagcgccatatatcacatgctgctgtgtcatctgcttatggtttatcagcatttggctgggaacctcgtttgtgtcagcaaatgctctttcataccacctttgaggaagtgatgcagagtaccattgcgtggcttcctaccccgtccccagggaggacactgggttgtgttgaggcttttcatttccttttggaaacagtgtaggccaggcgtggtggctcatgcctgtaatccctaaactttgggagaccaggatgggaggactgcttgagcccaggaatttgagaccaacctgggcaagatagtgagaccctatctctattaaaaaaaattaaaaaaattagccaggcgtaatggggcacacctgtaattccagctactcaggaggctg

SEQ ID NO: 57038 - DNA, 1543 bp, Homo sapiens
aggccccgccccctccaggcccccgcccccgcgcccaccttcttcttggcctgcaggtggcgcaggttggcaccgtgcgcctgatgtccgggcactgcgcgcctccagagcgtgaggccgatgacgctgtaggctacaaacatcaccgcgagcggcaggaagtagatgagggcgatcaccacgaggtggtacctgcagggagagccgaggcctgggcagcggagggcccgggggcgactccgaagtctgccagcgcctggtcctgggaccccgcgggcactgtggagccgcccctgcgggcccaccctgggcgcctcccagggacttggtttgatttaaacaaaaataaaggtggcattgggtagcctgtgtgccaggagacggcttccctgcaaaagggacgccagcagtagccctgcgtccttccatatcacatccttccacgtgatagacacgtgtcaaaaaaaggaaaagtgaatgaaacaaattaagaaataatttgtttgcaatttaaaatrccattaagcacaaaggaggcagtaaaattatcccactcccaccactattaacattaactattaatatctggcatattttttccagaatcatatgtatgaatagtagtcacccctgatgggagtttcactttcccgggtttcagtaacccctcccaactgcggatccaaaataggggaggagagtacaacaagatattttgagagggagagacctcattcacagaagtttaattacagtatattgttatacttgttctgttttattactagttactgttaatctcttactgtgcctaatttataaattaaactttatcataggtatgttgaggaaaaaaacagtatatatctatatagagagaattcagtgctatctgaagtttcaagcatccaccgggtgtcttggagtgtatcctacagtatagccatatatgtatacgtatacgtatatgtatatgtatatgtatatatatatatatacatatatacatatatatatatatacatatatatatatatatatatatatatatatatatatatataatctgtatctgtctggatggatagaatgactggtgttaataaggctccatctgcaccaacatcgctatggaggcatgggacagtggaaaagcgccatatatcacatgctgctgtgtcatctgcttatggtttatcagcatttggctgggaacctcgtttgtgtcagcaaatgctctttcataccacctttgaggaagtgatgcagagtaccattgcgtggcttcctaccccgtccccagggaggacactgggttgtgttgaggcttttcatttccttttggaaacagtgtaggccaggcgtggtggctcatgcctgtaatccctaaactttgggagaccaggatgggaggactgcttgagcccaggaatttgagaccaacctgggcaagatagtgagaccctatctctattaaaaaaaattaaaaaaattagccaggcgtaatggggcacacctgtaattccagctactcaggaggctg

SEQ ID NO: 57039 - DNA, 1543 bp, Homo sapiens
aggccccgccccctccaggcccccgcccccgcgcccaccttcttcttggcctgcaggtggcgcaggttggcaccgtgcgcctgatgtccgggcactgcgcgcctccagagcgtgaggccgatgacgctgtaggctacaaacatcaccgcgagcggcaggaagtagatgagggcgatcaccacgaggtggtacctgcagggagagccgaggcctgggcagcggagggcccgggggcgactccgaagtctgccagcgcctggtcctgggaccccgcgggcactgtggagccgcccctgcgggcccaccctgggcgcctcccagggacttggtttgatttaaacaaaaataaaggtggcattgggtagcctgtgtgccaggagacggcttccctgcaaaagggacgccagcagtagccctgcgtccttccatatcacatccttccacgtgatagacacgtgtcaaaaaaaggaaaagtgaatgaaacaaattaagaaataatttgtttgcaatttaaaatgccattaagcacaaaggaggcagtaaaattatcccactcccaccactattaacattaactattaatatctggcatattttttccagaatcatatgtatgaatagtagtcacccctgatgggagtttcactttcccgggtttcagtwacccctcccaactgcggatccaaaataggggaggagagtacaacaagatattttgagagggagagacctcattcacagaagtttaattacagtatattgttatacttgttctgttttattactagttactgttaatctcttactgtgcctaatttataaattaaactttatcataggtatgttgaggaaaaaaacagtatatatctatatagagagaattcagtgctatctgaagtttcaagcatccaccgggtgtcttggagtgtatcctacagtatagccatatatgtatacgtatacgtatatgtatatgtatatgtatatatatatatatacatatatacatatatatatatatacatatatatatatatatatatatatatatatatatatatataatctgtatctgtctggatggatagaatgactggtgttaataaggctccatctgcaccaacatcgctatggaggcatgggacagtggaaaagcgccatatatcacatgctgctgtgtcatctgcttatggtttatcagcatttggctgggaacctcgtttgtgtcagcaaatgctctttcataccacctttgaggaagtgatgcagagtaccattgcgtggcttcctaccccgtccccagggaggacactgggttgtgttgaggcttttcatttccttttggaaacagtgtaggccaggcgtggtggctcatgcctgtaatccctaaactttgggagaccaggatgggaggactgcttgagcccaggaatttgagaccaacctgggcaagatagtgagaccctatctctattaaaaaaaattaaaaaaattagccaggcgtaatggggcacacctgtaattccagctactcaggaggctg

SEQ ID NO: 57040 - DNA, 1543 bp, Homo sapiens
aggccccgccccctccaggcccccgcccccgcgcccaccttcttcttggcctgcaggtggcgcaggttggcaccgtgcgcctgatgtccgggcactgcgcgcctccagagcgtgaggccgatgacgctgtaggctacaaacatcaccgcgagcggcaggaagtagatgagggcgatcaccacgaggtggtacctgcagggagagccgaggcctgggcagcggagggcccgggggcgactccgaagtctgccagcgcctggtcctgggaccccgcgggcactgtggagccgcccctgcgggcccaccctgggcgcctcccagggacttggtttgatttaaacaaaaataaaggtggcattgggtagcctgtgtgccaggagacggcttccctgcaaaagggacgccagcagtagccctgcgtccttccatatcacatccttccacgtgatagacacgtgtcaaaaaaaggaaaagtgaatgaaacaaattaagaaataatttgtttgcaatttaaaatgccattaagcacaaaggaggcagtaaaattatcccactcccaccactattaacattaactattaatatctggcatattttttccagaatcatatgtatgaatagtagtcacccctgatgggagtttcactttcccgggtttcagtaacccctcccaactgcggatccaaaataggggaggagagtacaacaagatattttgagagggagagacctcattcacagaagtttaattacagtatattgttatacttgttctgttttattactagttactgttaatctcttactgtgcctaatttataaattaaactttatcataggtatgttgaggaaaaaaacagtatatatctatatagagagaattcagtrctatctgaagtttcaagcatccaccgggtgtcttggagtgtatcctacagtatagccatatatgtatacgtatacgtatatgtatatgtatatgtatatatatatatatacatatatacatatatatatatatacatatatatatatatatatatatatatatatatatatatataatctgtatctgtctggatggatagaatgactggtgttaataaggctccatctgcaccaacatcgctatggaggcatgggacagtggaaaagcgccatatatcacatgctgctgtgtcatctgcttatggtttatcagcatttggctgggaacctcgtttgtgtcagcaaatgctctttcataccacctttgaggaagtgatgcagagtaccattgcgtggcttcctaccccgtccccagggaggacactgggttgtgttgaggcttttcatttccttttggaaacagtgtaggccaggcgtggtggctcatgcctgtaatccctaaactttgggagaccaggatgggaggactgcttgagcccaggaatttgagaccaacctgggcaagatagtgagaccctatctctattaaaaaaaattaaaaaaattagccaggcgtaatggggcacacctgtaattccagctactcaggaggctg

SEQ ID NO: 57041 - DNA, 1543 bp, Homo sapiens
aggccccgccccctccaggcccccgcccccgcgcccaccttcttcttggcctgcaggtggcgcaggttggcaccgtgcgcctgatgtccgggcactgcgcgcctccagagcgtgaggccgatgacgctgtaggctacaaacatcaccgcgagcggcaggaagtagatgagggcgatcaccacgaggtggtacctgcagggagagccgaggcctgggcagcggagggcccgggggcgactccgaagtctgccagcgcctggtcctgggaccccgcgggcactgtggagccgcccctgcgggcccaccctgggcgcctcccagggacttggtttgatttaaacaaaaataaaggtggcattgggtagcctgtgtgccaggagacggcttccctgcaaaagggacgccagcagtagccctgcgtccttccatatcacatccttccacgtgatagacacgtgtcaaaaaaaggaaaagtgaatgaaacaaattaagaaataatttgtttgcaatttaaaatgccattaagcacaaaggaggcagtaaaattatcccactcccaccactattaacattaactattaatatctggcatattttttccagaatcatatgtatgaatagtagtcacccctgatgggagtttcactttcccgggtttcagtaacccctcccaactgcggatccaaaataggggaggagagtacaacaagatattttgagagggagagacctcattcacagaagtttaattacagtatattgttatacttgttctgttttattactagttactgttaatctcttactgtgcctaatttataaattaaactttatcataggtatgttgaggaaaaaaacagtatatatctatatagagagaattcagtgctrtctgaagtttcaagcatccaccgggtgtcttggagtgtatcctacagtatagccatatatgtatacgtatacgtatatgtatatgtatatgtatatatatatatatacatatatacatatatatatatatacatatatatatatatatatatatatatatatatatatatataatctgtatctgtctggatggatagaatgactggtgttaataaggctccatctgcaccaacatcgctatggaggcatgggacagtggaaaagcgccatatatcacatgctgctgtgtcatctgcttatggtttatcagcatttggctgggaacctcgtttgtgtcagcaaatgctctttcataccacctttgaggaagtgatgcagagtaccattgcgtggcttcctaccccgtccccagggaggacactgggttgtgttgaggcttttcatttccttttggaaacagtgtaggccaggcgtggtggctcatgcctgtaatccctaaactttgggagaccaggatgggaggactgcttgagcccaggaatttgagaccaacctgggcaagatagtgagaccctatctctattaaaaaaaattaaaaaaattagccaggcgtaatggggcacacctgtaattccagctactcaggaggctg

SEQ ID NO: 57042 - DNA, 1172 bp, Homo sapiens
cttagcccctgcgagggctcagcacccacccctcccccagcacttgcccttgcactgaacaggctatatagtaacaggtcatgataataaactgcaatcactgagggtatccatttcactgattcgtttttgtatggtcagtctcccccactgagsggtgggatggtgatctgctttctgctctgctgtctcctgagagatgaggttgtggtgcctgggacataaggggtgctcactaagcaggtgccaacccagggaatggaaatggcctggagctgtggcccctgcactgtctgggcccccaggactcagtgggctcactggatcccatgtgtgagccccagagggccaggctcagcatgttggactccttataggctgtggccaaacctttgtccctctctgacctctgccttctcctctccagaaggggcatctaaggctttccaggtgtaatggctcagggagtggctgtgccaggtgtacgggtgccctttgatgtcacctgtcacctcgctggtggctgcgctctcccttcctctcgctgctcctgtgtcttctcctccatctgccaaagtcaccatgccagggctgcccccagccccaatatccagtggaaaaacccagagaaatcacacaaatagaaaatatccacatcaacttgagaagctaagcctgcgcttgaggcagttcttggagcagcttctagcaggggcccagaccaacaccatcagcaaggagctgccgggggctcggccccctgaaggaggtttttatgactggccttagctggccctcctgaggctgacaagggctccactggggaacctctgggcaagtcggtggagggcccctcagcatcatctgggccttgctggcagcaaaagtgggtctcagaaaccaactcccatgagaggagccacctggatagagagtgggcagtgagagcaggacacaggttccaccacagagcagcagagacacccagaggctcctggtccatggtgcctgggggatcagaaggactcacacccggaggggaacgggcctgtggagaatgttaccctggccaggacccggctggcaccacacgccccaatatccctgccttggctctgtgaggagggctctgccagggtttgaggggcctgcgtgggagccagggcaaccca

SEQ ID NO: 57043 - DNA, 2415 bp, Homo sapiens
tttgtcgaaaggctggagagtatttggctgggattggtttttcaactttgaatgggagggagatatgctagtccctgatcctcactgggtaataaaagccctagcaaggtgccaccatccagggcagctctatctctgtacctatcagcctttttaaaaactttttatcttgaaataattttacactgatagaaaagttgcaaaaataatacagagttcccatataccctttagggtattagttttagtataatatcaaaaagaagatccataattatctgaaatgttaattcccctaatgttaacatcttttttattattattatactttaagttctgggatacgtgtgcaggatctgcaggtttcttacacaggtatacatgtgctatggtggtttgctgcacccatgaacccatcatctaggttttaagccccacatgcattaggtatttgtcctaatgctctccctccccttgccccctaccccctgacaggccccggtgtgtgatgttcccctccctgtgtccatgtgttctcattgttcaactcccacttataagtgagaacaggcagtgtttggttttctgctcctgtgttagtttgctgagaatgatggtttccagcttcgtccatgtccctgcaaaggacatgaactcattcttatttgcggctgcatagtatttcatggtgtatgtgtgccatactttctttatccagtcgaccactgatgggcatttgggttggttccaagtctttgctattgtgaatgtgttaacatcttatgtaatcatagtaccattatcaaaaccaggaaattaacattgctacaatactattaattaagctacagaccttattcgaattttgtcagctttcccattggtgtcattcttcttgttccgggatccaatccatgagcccacatttgcatttagtttttatgtctcctcaggctcctctaatctgtggtagtttttaaatctgtctttgtcattcataatcttgacatgtttgaatggtactggtcagttatattataaaacgtctctcaatttcagtttgctggacgttttctcctgtttcgatttgaaggaagaataccacagaggtgatgtgcccttctcagtgcatcatgtcagggaatataggttgataatatgtcttcttattggtgatattaaccttgatggtttgattaaggtactgtctgacagctttctccactgtaaagttactactgtttcctttataataatatttattttaataaatatttatttgaggggagatgcttggcaattatcctgccagccttttaactttgacatgtcatcttattaatttcatgatttatgacactgacatcggagtcactgtttatgtaacttttcagaagaggtggttggaatagactatcagagagtgcacctactcattgttgagaagaaagaacagccactagaggactgaggagcagagaagcaaagtgagaaaggctcaacagagaagaaatgaagcccttcagaacccagtaaagagactatgagctgtctcccatgcattgttcaatatcccccttattctttttagtaatttaacccccactcaccctcaagttttagcaaggcacgtggccttccagctagaaaccacatttcccagctcaatgtaaccttgtaactaagttctcaacaatggaatgtaggcaggaagtactgggtgcacttcattaaaaggaagtttcttactctacattcccttctccaaccgtgaccctaaaacagtgcttcttaaatcagttttgtacctatttggcattcaagtgaatggtcccctgagacattaacagaatgatgtttaaaatacacttaaagataaaacagattataaaggaaaccaaacataatggaataccatyatataaatatgtttaaaataaatgtaccacatactactatatgtatttcttcattgatatattaattacataacaaaatctagtaaggggttctaacaactaacatggttttaaaggagtgctgagtataaatggtatcttaagatctctgcaataagtgtaatgtgctgtaaaaatgcctgtggtgtctattgttgacaaagtcattagtcctgctaatgctactatggtttgttgcctataattgaaggaaatgctacatttctattagaggttttcctacctaaattcatagacattccaaatacagaaacccacattaagaatccatgccctagaggatgtctgggcatgacagaaggaatctgagaccctggaggacccatggaacagaactatctgcctgccctgacctcccaccccagtgatctctggactgttacttaaaacgagggaatttctatattgtttgaaccacttcatacatctctttttc

SEQ ID NO: 57044 - DNA, 621 bp, Homo sapiens
tgaatagagcaataaagagatagagaaatcaaatagcaaaataaagaaatttgctgtgctgttctagacacagctgccctaatagagaaatgtgcagtttctactttccttgcagtttttcagtacagaattactttaaaataaatcccaatgaaagcagtaatcaattatgtcaagaagaaaacaaagtttgatctgaaaatactaacagaatctaacattttagaaataaattaccatgtcatgtcctgtggcaacattgtatcaaattgcttaaagataaattgtataatcaactcctgagtctctgcatgtggcttatccttttttgtagattatcaaaggcaaacatttaatttcaggtttttatcgctctttttctccacctttttttcctyttatatttttctgctacctttctttctactatcagtcacagtatgctaaaagaacagaaatttagtgaacacaatggtaattcacttactctgtatcatagaagaataaggtgtttgatataagtaaatttcaaagttagcctaaaagttatccaaacacctttgctaaaaaaacaaaaacaaaaacaaacaaacaaaaaaagaaacctatgacaattctggt

SEQ ID NO: 57045 - DNA, 614 bp, Homo sapiens
cacccatttcattsagctcatccctggacatgtatttcctgcagtgttattccccgtggctgagcttctaagagctcctgcacctgcacttggggccagctcagttataaaatgcctagaaaacttttggagactttgctctttttctctgtgaataaactcatcatttcaatgccaagcttctcattgggattagtttaccagctttagacttttttgtttcttttttcttttttttttttagacggagtttcattcttgtcacccaggctggagtgaaatggtgtgatctcagctcactgcaacctccacctctcgggttcaagcaattctcagacttccaagtagttgggattacaggcacctgtcaccatgacaggctaatttttgtatttttagtagagacgcgttttcaccatgttggccaggctggtcttgaactcctgacctcaggtgatccaactactttggcctcccacaatgctgggattacaggtgtgagccactatgcctggctcggcttttgacttttaagtgagtctggtttttcagcaacttcaccttccttcttggactcaaatctcaagtcagtgaataaaattcataatgttcct

SEQ ID NO: 57046 - DNA, 912 bp, Homo sapiens
accaagtttggtgtggggacgacagcttccaccaatgaggccagacagacaaagccttgccattacctatggtcaagcctgataaaccacacataagattttaccctaaagcaagactcctcagcccactgactgaccttgcttacaccccactctctgtagttcattttcccaaaagtggcaaggcagaatttttatttttatttaattttttatttttatttttgagatggagtccctctctgttgctcaagctggagagcagtggcatgatcttggctcactgcaacatcagcctcccaggttcaagcgattctcctgcctcagcctcctgagtaactgggattacagctgcgtgccaccatgcccagccagtaatttttaaatgtaattatatcataacacaaattccttactatatatacaggttctacataataaggcccttgcctatctctctgacttcattaccccactctagccacagtggcctttatcctacaagcatgccaggctcatagctatctaaacatctttatacctttctkctcagaaaaatattttctcatagttttcttaattattcatatctttgatcaaatattatcttatcaaagcagtattctatgactacgtgaaatagtgtatctagttcctatttttattgctttaattttattctttaaacatataatctggtatcatattacatatttgtctgctaaattttattgtctgtttcatgagaatattgatttttatgaaggctaaaactttgctgaatattcattgactaaaacagtgcctcatacatagcctatggttaataaatgttagctagataagtcaataaattgagaaatataggttcagttatgttattctatttcttaaagtcaggaaattaatgca

SEQ ID NO: 57047 - DNA, 1293 bp, Homo sapiens
actttatttcaaacacttttcatttggtttcttttgcactaagatcttattgctcaaagttttttttgaaaattttttcttctgtttttttttttttttttttgagacagagtctccctctgtcacccaggctggagtacagtggcgtgatctcagctcactgcaatctctgcctccagggttcaagtgattctcctgcctcaatctcctgagtagctgggattacaggcacgtgccaccatgcccggctggtttttgtatttttagtagagacagggtttcaccatgttggtcaggctggtctcgaatttctgagctcatgatccacccccgcttggcctcccaaagtgctgggattacaggagtcagccaccgcgcctggactcctcttttttttataatagtcaccatagtaatataaggaattactatattaaaagcccaaacgtatatttatttgacctgaatatttttaaaaaatattaatatcactttaattctattacatcttgctgttaagattttgacttttcttacaccagtgaagatgagaaaatggaaataaagaaatactaggtattattaagcgttaatataattatagtagatctcatttaatctttaaaacaaagtagcgtgaatgttttaatttccaatttatatctaattttcagaggctaatatatttcctagggtcacgtagctagaatattgtagagctaaaacttgaacccagagattctgattgagaaaatagctatgattttattttttaataattttgaaataacgggcagggcaagtatttggggagaggttgtcaaaataagtaagaatttgcctttagagaagcatattcctgaggttaaaagcacaataaccttcataggtgggaattgaacaatgagaacacttggacacagggcggggaacatcacacactggggcctgtcatggggtgggggatgggggagggataacattaggagaaataccgaacgtaaatgacgagttaatgggtgcagcacaccaacatggcacatgtatacgtatgtaacgaacctgcacgttgtgcacatgtactctagaacttaaagtataataaaaaaaraaaataattaaaaatgaatataaattgaaaaagcacagtaacttgaattagtctggacagtaaacagagttaggtttcttcttttaactttggtgtagaagtctttcctctgttttatttattttgctatcatccatctcctaggctctagatccatggcatgtcttatagaaagatactaa

SEQ ID NO: 57048 - DNA, 948 bp, Homo sapiens
ctccgaaatttaaggtgaatcattagtcagacttggtatcgtcatggaatttggtctgttttctaactagctttattttagcacagccataaatctggctgtaattgtctttaactccgatgactcatacatctaagcatttcatttaactttcaaccgtgaaaaattccaactgatttggcaatatgaatgtgctcttacatgcatatgatcatatgatgctgtcagtacaacatctgtttttgttcttgggatgttgatggactatcatgaaccatcttataactttcccagtcccctttaagtccaagaggatacarctgagaaggcaggtagagtttttggtcagtggctaggtttttcctgaatatcaaacaaattgcctggtatgagaatttaacagaatatgaccacaatttttttaacagatttatctacttgaaacatcgcctcagtcaatgaagaaacttatgttctataactaataataaaagatcatttgtaactgaaatatgacaaattgctgttttaatcatgaggattaccatttagaacagctaggtaaacatttactttttaatccggaaataagttaaagcaaataataaaaatttatatttaaatcacacaacatgttttatcatgaataataaatgtttttaaagtttaaaaatgtacttgttaccttgtgggtattcctgaacatgattaggatttttatttctccaagtatttttattcactcacagaatcaaaatgtcaaggctatataagttttcatcaagtgctaatttagcatctaagtttttattaattaatttgtaaaggaaataataatgagagtcaaaggaagaagcatctcctgtggtgagctccatttccagattccaacgaaaccattaaaatatttatggcactgaggctgaatcagacgggtcttgtgtactc

SEQ ID NO: 57049 - DNA, 822 bp, Homo sapiens
cagagtttgtagcaaatatttgagttaatagctcttcctttagataagtgagcctcagatgtcatgaaaacaaacatgaaatttaatcgtagaaatatattgctcttcaacaatccttatgtctctcagtacttaatgttgtctggcagtatatattactttataataaaacctgttttgctagtatatggtaacatattagataaaacttatttgacatgtgcaggactcaagactggttaagtgtggaaagaaattttccaaatgaagttattggatatagtgatggcaatatttttgtcttttaaataaaagayaaattcaatcaaaaataaccattcactcagatgccttatgtgtgttacaatgtttatctgaaaatattagtattagagtcttagctaaaactaatgtagtatgctaatgcaacatacagcaaatacaaacacaaatcaccatcagagttgaggtttactgatatttttgcccattcccaacacacatcctgggcatcaaaatataattcttaaagaattttgtgaggaaaataaaatgagtttgtctagaatgacatatttatattgttaatgcacatttttaaaattttgttttgatttttaaatccttatgtctcattaaaattgtgataagatacaaacaatatgaaatttaccatcttaatcatttttaattttatagttcagtgacattaagtacattcacttagttgtgccactgtcactaccagccatccaaagagctctttttattttgctgtaccaatatttttagacaacatactctatgtaggtttgggtatta

SEQ ID NO: 57050 - DNA, 669 bp, Homo sapiens
gttatgaatatagatggtcagccctaaccattgcataaagacagccaaaataattttcacatcacattcaaggctccttgatctgagcacatctctcttctgtgactgaacagatcatgaaaagatcttcattctttcttaaaatagttgggaatacataccaatttattggtgatgctgctctatcactttcgttgtgacacacaaatcacacagagtttttaaaataccaatcccagaataagattgaagtgtaagactgaatgtcacagcatgaaataagactgaagtacaccatgaactcaactagagtagaattaaactgtctccttgaattgaatcwtgacattttagggctactcttcaataattcatcttgtccttccaaacaagcacttcctggtgatcttgagttttttgttctctatttcagggttgtcttcctaacatacctgtcctggaaccattagatttagaagaagctaaacaaatatagtgaagttaacctacatatattttcataaccagaaaataccagccaacaattacttcaaaaattagaataaacctagaataaacattagctaatgtcatggccttatgattatcttatgataatctgaaattttgttttagatgggtgtgaagcgggaaagagcaagtggtaag

SEQ ID NO: 57051 - DNA, 1205 bp, Homo sapiens
tgcatgctagaacaatgaagttatattcaaacagaagtgaggccattagcagtagatttatataatttcttccttatttatctgcttatattaacttactttttcctctttctttctcctattgttttacagtagaagtactggagatagtataccttaaagtgtggtttttaaattacagtagacccaattggactataactaaaacacaggaggaattaccatcccttgaaattaatttggggactgatggaacatttttcttccttttggagaagacagtaagatactcttcatttttataaaartggattttatcatacgaagtagaaatgtcaaaggcaaccaatactattgttgtgtagaatttacacatggacagaaggttgcaaatagacactgagaaatgaaaagtaataactagatcaatctcttgtccctttgctctcagcctccattctcactcttctgtgctctgttacaaagagtctatgatacccaaactatatttcccagattctcttggttaagttttcaattagggttgaatattagaacccaggagaaatggaatagtgactccctacatttcaagtttctggcagcgtctctcacaggacaattcagtagaagttttagcactgaaggggaggacagtggcagtgagcatcctggtggtcccttcaggctagaaataaactcctgggcatctgtattccagaaacagaagccttctcagcacagcacccttaatgtatgggtaaaatttgtgcatctccagcccagaagagaaaaaccagtaattaactcttgagttgctttatcttttcttctctttgccccttatatttctcttttgttcctccagctcttctgacactgttataatcaatataatattaatatcatatgttctgtgttcgaaataactagtgttatttttatctgattagcacatgtccaaatttcacctctctaggtttcagtacaaacaagagtgcccctaatacttaagagaaatatgtaacatagaaagctttatttcagatcaacatttgtttgggtctgtcttctgtctgctgtgcaggacattcctgtaagaagtggatggacgtgccagcaaaataaaaagggctgaactgtatggtcagaaaaagaagaggaaataatttaaactctaatcctctctcagttactaaaggtat

SEQ ID NO: 57052 - DNA, 765 bp, Homo sapiens
atgagttccctgtgtctccttttatcattgtggggtctccaaccctgagatctcaatcctcttcaaaatctcccacacttgtaagtacaaatgtttcaactgagctcatgagtaatttatcttagttcttctaatggccaaggcaatttctgtgcaagaaaacacaaagcatgtcatgagttcagttggcgtctgagagtggtgatgygtctgacactcaagccaagcacggagtcccccaacactattaaactaccaactcaggccatggttcccctgatgaccggtttgtaagcaaagcgacagtgccccaaatgcactggattaaactgtgctgtgtcccttggggtcctaattacattgaagcctcttggcattccatgtgacagacaaggtcttagactctttccgccacaaaggtacttttgtgtgtaaataaatctcaattttgtctgctttgttttattgttatttgtttttgtctgtagaatctctctgtaagttttatgtacatgaagtgaggggatgtatctgagggctacatgctcaaaactatcctttgttttggagaatgatggtgtgattttgaacccgatctttgtttgccttaacctcacttcccttaggatggattaggtcacagaagatatccggatttgcatggagacgtctgtgcaggacagcccttgggcccagcgtgacttccaaccgtgattcctcaagtgattcctgcaactgtgattcctcacaagttccagcagtgct

SEQ ID NO: 57053 - DNA, 1089 bp, Homo sapiens
atttgtgcaccacaccctatactgcatgcaggatatacaaagccaggcagatcacaaagtacacaaagccaaggagattactacctagaagcgagagacagacatctaaacaaatacacatgttgaactacttcagtataagcaaatagagagcatagtagggaccaagttttatgatggagagttagataatctaatagcaatgaataattttgttttaattttcaaagacatgatttaatatattggtgtaggatggtctgtaatgtacagaattaaatagtcgtggatgaagtaagagctctcattttgaataaagaaaaaataagcccttatctatgtcatgagaatgaggtcttatcattgatctctgtttgatcttcctcataaaatggaagccataagtagttgttttaaaggtgaatttttataatcaccgggagtctactttcagtgctgatttgatcaccagtttgggcgttagctaccacactagcaataaagggaagtaataggtggttcaggactcaaatgtataaaagtccaaccccataaatgctgatgtgtgttgggggtgggatgggagcatttgtgcattttaatatgaacgtttgtgtgtgcgcttgttatgtctgcttgtgtacctttttattgaaatattggcaggggtgtgttattggctaagygcaaactctgtatttaagtgggaaaaacacaaatattgatatcagtatctagattcaagtttacactatcaagaagactttgtgcaaactgcttaaaacttctgaatcctgggtttcctcttttcatgacaatagtgtccaaagcactatgacgttaactatcaagtcagatataaagcccaataactaaaggtaacaggctttttattgtttttcatatgttactctgttttctgtattagttaaaattatcttttttgctgatagaagccctttgcaaatgagtcatttagaaaacctttaggaaacattgaacaagaaaagactcaacaccataaaatcaattttagcaaaatcaatctataagatatgaactttaaattgaatattgcttttagactat

SEQ ID NO: 57054 - DNA, 747 bp, Homo sapiens
agcagaaggctgagataagccttgtgtttctgtatgtgcttgtgtgcatatacacacgtttaaatgtacatgtgttctaggcatatgaaggtatacaggtacatattcctatgtacctatatagaaaagatcaagaacatatttgtgtacatatatatatatgtgtatgtctgaagatagataaatatatagagatgtagaaaggtacaaatatatagatatagatgatatagctagattgagatatattgatacagatattattgctggcttccaaaatactttggctctatgaatattatattctctatgtaagttccaaagatccctgtaagtcagggcttccttgctgccattcatatatgctacttataattacatccacattgttctgacagttaaatgcttctacttggctcagtaattctgaaatcctgttatctctgttgttastagaatgcccaactgttttacagcatttcttttcattaccacagcctacagaagatgacaacctcttagcttctcaataatgcttgtgcctctcttataagggcatttctcactgacttggtaaatggaatgcactccagctttcctatagaatataatgagcttgggatattttggtcctatagagtacacctattctagcacacagacttctctgagctttttctctttctccaaagggcatagcagatcaggcatcgtttaatatgtgctgtcacttttatacagcctcca

SEQ ID NO: 57055 - DNA, 747 bp, Homo sapiens
agcagaaggctgagataagccttgtgtttctgtatgtgcttgtgtgcatatacacacgtttaaatgtacatgtgttctaggcatatgaaggtatacaggtacatattcctatgtacctatatagaaaagatcaagaacatatttgtgtacatatatatatatgtgtatgtctgaagatagataaatatatagagatgtagaaaggtacaaatatatagatatagatgatatagctagattgagatatattgatacagatattattgctggcttccaaaatactttggctctatgaatattatattctctatgtaagttccaaagatccctgtaagtcagggcttccttgctgccattcatatatgctacttataattacatccacattgttctgacagttaaatgcttctacttggctcagtaattctgaaatcctgttatctctgttgttactagaatgcccaactgttttacagcatttcttttcattaccacagcctacagaagatgacaacctcttagcttctcaataatgcttgtgcctctcttataagggcatttctcactgacttggtaaatggaatgcactccagctttcctatagaayataatgagcttgggatattttggtcctatagagtacacctattctagcacacagacttctctgagctttttctctttctccaaagggcatagcagatcaggcatcgtttaatatgtgctgtcacttttatacagcctcca

SEQ ID NO: 57056 - DNA, 747 bp, Homo sapiens
agcagaaggctgagataagccttgtgtttctgtatgtgcttgtgtgcatatacacacgtttaaatgtacatgtgttctaggcatatgaaggtatacaggtacatattcctatgtacctatatagaaaagatcaagaacatatttgtgtacatatatatatatgtgtatgtctgaagatagataaatatatagagatgtagaaaggtacaaatatatagatatagatgatatagctagattgagatatattgatacagatattattgctggcttccaaaatactttggctctatgaatattatattctctatgtaagttccaaagatccctgtaagtcagggcttccttgctgccattcatatatgctacttataattacatccacattgttctgacagttaaatgcttctacttggctcagtaattctgaaatcctgttatctctgttgttactagaatgcccaactgttttacagcatttcttttcattaccacagcctacagaagatgacaacctcttagcttctcaataatgcttgtgcctctcttataagggcatttctcactgacttggtaaatggaatgcactccagctttcctatagaatataatgagcttgggayattttggtcctatagagtacacctattctagcacacagacttctctgagctttttctctttctccaaagggcatagcagatcaggcatcgtttaatatgtgctgtcacttttatacagcctcca

SEQ ID NO: 57057 - DNA, 1626 bp, Homo sapiens
aaattgaacatgttctctgttgtaccatcttcatctacatatatttattaaaattctcatcactctgtataatatctttttatctgccaacttatgaaacagattgtgaatgccttaaacttaaggttctatgtcttattcatcattgtggcagagatgggttctttttctacttcgtgggcacataattatatgatatttctcagcctttcttataattagctgtacttatacactttaaggccttttccatacaaagtttccatttgccatactctatgccatttttctttcccctggcttgatgcctaggaccatggtaactcaaatgttggaagaaggtggtttcctaaattaccgctagggggtatgggctttacctcacactggctagaattacacaagttgatgttttttttttttacgctcaatacctggcactttataacagctcaataataattgctgagtgaacaagtaacatttttttattctctgttcaaagttataacatatctcctctaaacataaagcagctcttttcaactatccaacgcattcctttctatctagttatctgaaatatgttgaatattcagcaagtctatgcagaatcccattaatgtttagatattggtattttcattgaatttggatwaaaatggagtttaaatagttatgtactgaatattgacttaatgtacttaataaaatattttatttttgtaaaaattgaaatacttcatttacaataatgtaatgctgaagtataaatctttattaaatgcaaatttaaataagtagccctataaaattcctgcctgttgatgctagaatataagttgttcttgatttggaagaacatttgtttttatagtattcataacctcttgaattattagagaatatatggaatcattgttgtgtttaaactgctttcccttgcacagcaatatttcattgttgaagtgaaatgtattattttttaaagaaatgcatttaatggtaatgcatatatttttgagagccatgttgtttgtagcttctatgatgtttatatgaataggatatttaaaaaaaatttgtatttcttattcttgcatacagtatcttttaaaatattaggaagagcccagcttagagaattatatcccttcttggaagtagacttaaacaaaatgaagcactgccaaaatccagattaatgacttgtgatgtgattctgtgttaactgcatcaaccaggcaagtcctctaaactttacttgtatattaaaggaaaaaaaaaaataccactatattaggccattatagagttttagatagagaggagagaaatagaaatcccctcacctcccttcagggaggaacaaagcaggtagaaaagggaatgttgttgaggtatctttaataatgcgattatgtaaataagcagagtatgtgtggcagattgtattgtttaaaatgtttgctgcccctctccctgtggaaggattctgtatatctgaccaactgccatcaagtttaactatgagacttgctttaagcaatataagtgaacgtaaatgttgtgtgagagccatcagaagcttctgctgtaatggtgatgtggggcagagcattggca

SEQ ID NO: 57058 - DNA, 1069 bp, Homo sapiens
tgcattctccacatctgtgctcttgctactggctgcaaggaaattggtgctgctcagagaagtggacaagctccagggagggatgaagaataagtgtgtgtgtgtgtgtgtgtgtgygcgcatatgtgtgtagggggtatttgagggagatggcatagagaaacactgactagagatgttacaagtcccccaaactcagttggaccacttgactcacccctggatgcagcccaaaaatttgctcttggaagtgcttcctgactggcttggaatacttgtccttaactccatcaggatgccatgggtcttaagatcttttctatattggaatgtttggggcaattagacttaagtccaaggccctgcctctgcctgaatgatccaagcatgggttctcttcatcggtgtgaacagtaggctttgcctctgcttgagtcattgcttttccttgcagagaaggcacagctgcattcctgccttctctgagatcctgcctgctggatggccaaggggcttgggccagagtgaagaggggaatttaaagtagtgcacttcaaactattcataatgaaagacttacgtatgttgttttgttttttatttccaatctcttgtggactgataatcttttaaagaaaaaactttaaaaatttttaaatggacaaataataattgtacatattcacagtggtacatagtgatgctccagtattataaagtgtagtgatcagggtaatcagcacatccatcatcccaaacatttgtcatttctttgtgttgggaatattcaatatcctccttctagctacttaaaactatgtgacatattattgttaactacagtcatcctatggtggtatagaacactagaacttattcctcctatctggctgtaattttgtgtcctttaacaaatctcttcctatccctcccttccccctacccttcccagcttcttgtatcttctgtgctacttttacctttaccaacgtttttttttttgaagtttccacatatgagtgagaacgtggtatttaactttctgtctctagcttatttcacttaacac

SEQ ID NO: 57059 - DNA, 1069 bp, Homo sapiens
tgcattctccacatctgtgctcttgctactggctgcaaggaaattggtgctgctcagagaagtggacaagctccagggagggatgaagaataagtgtgtgtgtgtgtgtgtgtgtgtgcgcatatgtgtgtagggggtatttgagggagatggcatagagaaacactgactagagatgttacaagtcccccaaactcagttggaccacttgactcacccctggatgcagcccaaaaatttgctcttggaagtgcttcctgactggcttggaatacttgtccttaactccatcaggatgccatgggtcttaagatcttttctatattggaatgtttggggcaattagacttaagtccaaggccctgcctctgcctgaatgatccaagcatgggttctcttcatcggtgtgaacagtaggctttgcctctgcttgagtcattgcttttccttgcagagaaggcacagctgcattcctgccttctctgagatcctgcctgctggatggccaaggggcttgggccagagtgaagaggggaatttaaagtagtgcacttcaaactattcataatgaaagacttacgtatgttgttttgttttttatttccaatctcttgtggactgataatcttttaaagaaaaaactttaaaaatttttaaatggacaaataataattgtacatattcacagtggtacatagtgatgctccagtattataaagtgtagtgatcagggtaatcagcacatccatcatcccaaacatttgtcatttctttgtgttgggaatattcaatatcctccttctagctacttaaaactatgtgacatattattgttaactacagtcatcctatggtggtatagaacactagaacttattcctcctatctggctgtaattttgtgtcctttaacaaatctcttcctatcyctcccttccccctacccttcccagcttcttgtatcttctgtgctacttttacctttaccaacgtttttttttttgaagtttccacatatgagtgagaacgtggtatttaactttctgtctctagcttatttcacttaacac

SEQ ID NO: 57060 - DNA, 678 bp, Homo sapiens
tttacaatcaaaacttaaccatcaggcaataatatgactacttggtcttgttcataagttgtagtttaatgctgcctatctactttcatctgtgattcttccgctggactttgcccttttgataaagaattaatgtttgaacaagtcttcaaaaggaatggtggggcaaaagagaggaaggggagtggtaggaaatgagaatagagtggtagctaaggctgataataaagaagtttattctatcaagaaagttctagtgtgcctctgaaggaacctaagcaaaggagagctccttggtttttaggtttaattattcccttattgcagcttggtgcagtcctaaaagagatttctcttcctccctaaacttctccytattcccatgtggcctagtttactcactctttcctgtatccagtccttaccaccaagcatgggtgctccatgctttctcacaggccagggatctccaaagatttttggttgtatgcctttatcagttcaaaaaaagtgaaaatacaaaaatttttctctcatataaaatgagacctttatggacaatatggtggctccatgctgtcataagctccttatatctttctgtccccatatgtctcatgtggcttccaccttcaaagtgagaagatggcaatcggacccaagaagggaaaaaaggaa

SEQ ID NO: 57061 - DNA, 598 bp, Homo sapiens
tgtgcttatttgaaaaactttatcttgtagatagcatgtaacagattacatatgtataagtaatataktgtatatcacatacactattttcaattttcatatatatttggatataatacatatattttatattgaatatatatttcaaatcttaaaaaatttttttgctcatttataggccaattgtaagaatacttttttaaaaaatttaaaatacaacaacaaaactgtttaattacattttgatagcagcattatatactttataaaacctggtttctggaaagatcacatcaaatatctcataattacagcatagtgggcagatatgaaaggcttcttattttactttgaatagttagaaatgctggccaggcacagtggctcatgcctgtaatcccagcactttgggaggctgaggtgggcagatcacctgaggttgggagttccagaccagcctgaccaatatggagaaaccccatctctactaaaaatataaaaaatacaaaattagccgggtgtggtggcgcatgcctgtaatcccggctactcgggaggctgaggcaggagaatcgcttgaacctgggaggcggaggtt

SEQ ID NO: 57062 - DNA, 598 bp, Homo sapiens
tgtgcttatttgaaaaactttatcttgtagatagcatgtaacagattacatatgtataagtaatatagtgtatatcacatacactattttcaattttcatatatatttggatataatacatatattttatattgaatatatatttcaaatcttaaaaaatttttttgctcatttataggccaattgtaagaatacttttttwaaaaatttaaaatacaacaacaaaactgtttaattacattttgatagcagcattatatactttataaaacctggtttctggaaagatcacatcaaatatctcataattacagcatagtgggcagatatgaaaggcttcttattttactttgaatagttagaaatgctggccaggcacagtggctcatgcctgtaatcccagcactttgggaggctgaggtgggcagatcacctgaggttgggagttccagaccagcctgaccaatatggagaaaccccatctctactaaaaatataaaaaatacaaaattagccgggtgtggtggcgcatgcctgtaatcccggctactcgggaggctgaggcaggagaatcgcttgaacctgggaggcggaggtt

SEQ ID NO: 57063 - DNA, 1276 bp, Homo sapiens
catccaaggacataagactgtcaggaaaacaagtaagaaataaccaaagtctaaaccaaagtcatgactgtgagaatagggggaagtcaatagattaaaaagatcatacagagttcagtctggtaggaattggtatctgagttgacacagagtgacataaagagatattctagcaggagacagctctcaaagcaacctacacttaacataataattctagacaacatgtattgtttggcacatttatctctacatgccatacaacattcagagtgtttgtatgaataaatgacattggtcctcgcaacaatcctatgaggtagatagcatcatacatagtcattttataggtggggaaactgaaccagagagaggttaagagatggcagagtcagaattctggctcaatacgactggctgcagagcccaggctctaagccactctgtcatctgctgccatgacaccagccacctctcagtctctccaactaggctgtgatttactgaggcagggactgtgtctttagcatttttagcttcttgtgcctgatccatattttttgctcaatgaatactagtgaataagaggatggttcaatgaataaactctataatttgtaatatttaaaaattgggacttagaaagttgtgaatttaggaaataaaatctgcattgcccacaatgcctgaccacaaaatgaggttcataatgctcatcacagaatttaaacacctgcacagaacttcctcttaaaatgatgaaaaatgctttgtaaaagtgaaaatggtaaaaacaaatgattacagatttcatttccagagagagactttatatcctttgtagttacattcataaatttcatcctggtaaaacattcatctcgaattcttaattttttaagaaggaaaattacaataaaccgttttaaatctttttgtcaaactcagtatgtgcttccttaaaaataatgacactcctatttggacattatattccaagtgccacaatcacttagtttaatagttattaaacaaactatacacaaaccttggaagctagacacttcatcaaacataatcaatttctttaattacaacaaattgttttaattattcatttctcaaaagtacaaagccacttaccaataagggttaattgacttaaaaatatttaccttaaggtggatttatttggttgctatcagaaaaaagatgatactagcacttttaagagttctgtttaatgggcatgtacttcaaattmatggtattacac

SEQ ID NO: 57064 - DNA, 1255 bp, Homo sapiens
  misc_feature (1)...(1255): n = A,T,C or G
ctttwnnnnnnnnnnnnnnnnnnnnnnnnnnnnnnnnnnnnnnnnnnnnnnnnnnnnnnnnnnnnnnnnnnnnnnnnnnnnnnnnnnnnnnnnnnnnnnnnnnnnagtcccctttgcctcaggatcttttttttttctcatctttctttcttttgatttttttttttttctgtttgagtagataggtcagcatgtcctttagcaacaaaggctaaaaggaaaatagcgtaataaaaaatagccagttgatgcatttacacttatttctcattgaggacagtgttcaggggataggggtcactatggtaatgagtacaaaagattcatggagactcaaaaaatgtaatccaaatagccacaaagggtataataccatatattaaaataggcacttgttggtaaaaacgattttactgaaaaattatatataacatagttgtgtttctttttgattttaattcatttaaattcaagagcagcaatcagaagacccgggatttatatcagagttcatggaagtgtgcattgtattcaaatgcacacacataaaactagcctgtgagaaccctggtgaagtaaaataaaagttattccatcatacacagaatttgaaatgattttggaaatatatcaccatactgaagaaaataaatcagaacataaaaattagaaaagataaactaagaaaatgtattattctgtatctcacttggaccccactgaacaagtataacaaagaacatcgtgaaagaatatttgcaaaagcatccctatttgcaaaaatctcaaagaaaattaacatacctatatttttgtgaaccttattagatcaatacctgtaaacatagcttctgacttgtgagttaactatattatttatttacaaatgagagacaaatagaaagaattccttgtgttgtcttccctaggcaaaacagaaaacccgtccagaagcagtaatctctataaacaaagagacaaataaaaataccaggtggaatatgcccttgatttgtgaaaatatcccaagcaatattgccataaaagtaaatgtatttttcatccaaaatgaaaaatcatattctttctagttaccctagccttagggacccacatacattgcatcattcttcatcttttattggtatgaaaaataggtagcacttaagttttacaatttttagtcgtgtctttttttatatcaacatatgtggtttgttttaggtaatacaaatacatcagtgagaaacaagat

SEQ ID NO: 57065 - DNA, 1211 bp, Homo sapiens
actccaagttcttcagcttttggactcttgggcttacaccagtggtttgccaggggctctcgggcctttggccacagactgcactgttggcttccctacttttgacatttggggactcggactggcttctttgctcctcagcttgtggatggcctatagtgggactttatcttgtgatcatgtgagtcaattctcctaataaactccacttcatatataaatacatcctattagttatgcctctctagagaaccctgactaatacagacataacctagatacactctagattattatggattagagacttagataactcttaaattactattgattataatatagacatatgttacagatagactcaatcactctatttaagacataaccatatgctatcattaatagtagatgaaagaaacaaaattaatttgatttaggactctttagattgtaattggttataattcttaagtagattactacattgatacaatatgttttggaaaggaaagtttaatgattagcaaataaagaaaacttcagacaagacataactccattaacaattatttaacaaaactgataaagaagttataaacattaatacatctatttattagtaataattgcataggttggtttgagtgygctaatatttacaactatttgattaaaaccttgtaaatttctttgttccttcttgactcccactgcttcacttggttaaccttaaaaaattaataatgataggataaaggcttaaagtgaattcgtatgaaattaatatacacaatgtattttggttttaacaagatatttaatagaatcccaaaacattgttgacaaacagataaatttatgataaatagccattattttttaagagagatgtgttggtagcctctattttaggtacaaatattgttattattttagtcaaattttattaaaggttataaagtgtttttagaaagccatataaatttcattctatttaagattactaaatataataaattataaagagtaggtatgaaaattaaacttggtaatgagagatgaagccagctggacttcctgggtccagtggggacttggagaacttttctgtctagctagaggattgtaaatgcaccaatcagcactctgtaaaaacacaccaatcagcgctccgtgtctagctaaaggattgtaaatgcaccaatcag

SEQ ID NO: 57066 - DNA, 510 bp, Homo sapiens
tttttagtagagacggggtttcttcatgttggccagactggtctcgaacgcctgacctcaggtgatcgcctgtctcggcctcccaaagtgctgggattacaggtatgagtcacmgtgcctggctgaaaaaaatattttaaaaacatacctagtacctcctgctcaactcaaactatgcaaaaactttagatgtcaaacttttattccttccaaacttttatctagcttgaagtcacatccaaatatatgtatctccatccctactatacccccaatttctcaagctgttaaaaccaagttttaaaatggcttagaaatctcaaatcataaaaaatgtttctctttcagataagccctgaataaacagaacttaataaagcaagtttctagcaataggagctattctgattgattccgaagtggaatgccgagaatggcaaagaagctgtgtctctcctggtgagatgcaggatgctgagggaagcagaaggtaaaagcaggagcctaaaa

SEQ ID NO: 57067 - DNA, 683 bp, Homo sapiens
gaccgtcctataaagaatttattaaagaaaaggaaaaagagaagttgaaggaactttccccaaactgagttggggccaactttaatcacagctccaggaccagtgcaggctggctgcccyctttggaccgtgtctggaataatggatactgttggcagttcaggcgtcaactcagaactgaagctgcagcaatgaacaagcagataagcagtcacattaaaaaaaaatgttaatcattccctgatgctctaccaactaccgtgaggctaaaagcaaagtcaacaaactcctacccactattattccttccaccaagttcattatcattgtctttcttaggaaacagacatgcccattcatttgatttaataaagttttattttcccaaatgtaaaaaaaaaaaaattatcctagtgctggaggggccttaggtctggcccaaatcatatattttctttcttattaacttgcattgttttcaacataaagaaagaaaaagaaagaaaaccttgtaatttgaagcaatttggatggaactagaggcctttatattaagtgaaataagcaaggcacagcagtcaaatatcacatttctttttacctataacgtgggagctaaaaaggcagatctcatgaagggagagtagattggttgttaccagaggctagaaaaggtagggagg

SEQ ID NO: 57068 - DNA, 1106 bp, Homo sapiens
acctggggagcaggccgactggtgataagagcctctagaacagtgcagctggtggggttaggggccatggagatcactgtgagaatgcccaaggagaattccccttcaaatcccattttcccagttacattgtcagctctactaggaccagagaaacctgcgtctctggaagcatgctgagttgtctcctgcttgatttaactgtttctttatcctttataactcaagaacctttatgtcctcaaagctgtctgtggccaccattttgccaacagaaccatttcattgtaatggatgtgatgttgctatccaygtatctgcccaaactagaacttgagattcccctattttcctccttctatcttatcttctgtacactcagccaccaagacttattgatacctcctaaatattctctataattaatttccttttccttccacctgcctctttcctagttcaagcacaaataacctcgtttctaaactactgttaactttttttcttgtcactttgcttttcgtcttgaattgggactctgtctctgaaatctattaaattttctgaagttcttcactttcttttcatcctttctcttttttctccatgaacttaccctggaagatcttgtctacttccctggctttgattcctgtcgacatgctgaagataaactgaagatgttacagtatcccactgagactttttccagaagtccagatctttaagtttagctgccagttcttcaaactcaacttgtcaaaaaatgagttgactactttctccctccaactggatcttgcttctctattacccatctcagtgaatgacaccaccttctgctacctctcataaacctggatgtggtctttgatttgtccttcttcctattttcctaggtcaaatcaaccatctctaactctacctcttaaacatctcctggccttttctcttgtcaccaaccctattgtcactaccttggtcccaggccaaccatctcacctagatttttttaaacctgtatatctgcatcaacctcttaatgtcttttttgatctctctgttgtctttctgcaatccatttctcacagggtagacagaattat

SEQ ID NO: 57069 - DNA, 2932 bp, Homo sapiens
  misc_feature (1)...(2932): n = A,T,C or G
agatatacccacatgttcttagaggggaaatagaaataatggtgggaatggtcaaggatgttgcagaaaggttatcatggtggggaaagaagcaccatcttggaatcatctgggttaggattatgaccttgtattgagagagattcacagcatcattcagaactaatgtattgatggggacctaggcaagagagagaactgggttctgttcagctgtgcattacctgagtgacagctaccagtagctggtggacgcagggtgtgcttgactcttgtcctaggaccagcatgaactctgatgtggtctgtgggccactaatacatggtgaatatttacctactggcctgggatatgattaatacaatggttgagatcaagtgtttcaaaacttttagtgcaatttgactgtgtctcagcaaacggaattgctttattgaatgggatacagagcaggagaatgttgtcaaattcatgtggtgagttacaaatggaaggagctatgtaattgttgagcacagtagggccatgttctggaataattaggcattcttagaagcttaaaaaattcttgttatttgttannnnnnnnnnnnnnnnnnnnnnnnnnnnnnnnnnnnnnnnnnnnnnnnnnnnnnnnnnnnnnnnnnnnnnnnnnnnnnnnnnnnnnnnnnnnnnnnnnnntttcctctggtgcctgcactgttctaaggctttgcatgcattatcttattaatttctcaccaccatccaatagggtaggcactactattcacctcatttaccaggtgagaaaactgaggcacagagagattaaactgcttatgcaaggtcacaccaccatgaagctgggattcaagctcaggaagtgtgaaagtcaaatcctgcttccaagttttacataatgattcaggttactagggtgataaggctgtagggtgaggttacgtgatattaggagtcagaagatcctgcttccactacctgccagctgtgtgggtgatcatctgatttcttcaaatcttggttcattatatgtgaaatttgaaagtctattgtaaggattgacaatatttataaaagggtgaacatatagtagtgtcctcatgtatggtagcagttattacctgtataattattttctctgacgtggtgatctgtgacacgcagaaaaggaagttttctacatgtggctcttattttgggccataggaaaggagtgcctttgcttgtaacatgagacaaatacaagttcacaatatcaattttgaaattgatactaaagaaatttgcaatagcagacattattttaaggatcatcaaactattataattcctggcctttgctttcttcatgtgttcaagaagacaggggatggagtggaattgtaaagattactgaactaagttcctttcctgctggagagattacactaaagacaaagaggaaaatagctgctgatcgctgtggaattatgagtgtgtagcaggggaatttctctagaagacagccttctggtgagctcttcctttacgtcattagatgatgatttacacattagccagttctcttctccagagattaaactctttaattttaagtgagcagttttagttcatctttccacagtcaaaactacattaggaaactttctccaaaaaaggaatcaaaagccaatgcaggtcaaaactcattgaatgatatacttcagatttgtgcattccattgtatgtaaattttacctcaaaagaaaaaaaactatagaaaaatattgaagttaatggtatgcatgctgaagggtttagaagtgaagtgtatttattctacaacttcgtttgagatgcataaaacatatggatggatagatagatagataggtagacaagtagtaaacgtatagcaaaatgctaactagaatctaggtagtagatatatgaatatttatttagaattatataaggttttctataaatttgcaaatgtttacaataaaatggtggaggaaagggcatttcatctaatgataaaaagacaggtcctgtgactagattgcactgctaactatatgttttatctcaggcaaatttagttaacttttgcatgactaagtttagtcatctaaaaaatgacgatagtaacastatcaacctcacgtggttgttgtgagggtcaacggagttggtttttgtaaagttcttagcatgtagtgcaatgtaaaagtttgttaaataaaagttttaaaagtcgtctcatatatgggtcattcataggaaaacagatcgcatttactttcttggacactcgactctgagaatgcagtattttattagaagctgatgacagccctacacaccttgggagattagtcattttccctctaatccaggcatatttcatctcctgctaagatgcagcaggaatgatcaagatgaattaataatattttatttctattttcattctcttcaaaaagttccactgcttaaagcatgctccctacctccaagcttggagtatatcatatctggatagcaatagagaagcatgttgttacctggtcaccaaagtaatctaatgactttgtgatttttaaaaaggtggtagtaaatagtagccatgctgtccaacaaagcttaagaaacctgtgaattaattaataagaggttatatactttgaagtttacaaagaagtctgtggatcatatgagcagagctttcttagtcttttagagatctaggtatgttaaatgggagttcttgcaaagaacagatttgtaaaaacagatagtctttattcattccataaatatttttcagctcctattacatataggctctggtctaggtactagagattcagcagtgaaaaagatagaaattcctgcccaggtggacctcacagtctaaatgtggagacaggcaacagataggaa

SEQ ID NO: 57070 - DNA, 2932 bp, Homo sapiens
  misc_feature (1)...(2932): n = A,T,C or G
agatatacccacatgttcttagaggggaaatagaaataatggtgggaatggtcaaggatgttgcagaaaggttatcatggtggggaaagaagcaccatcttggaatcatctgggttaggattatgaccttgtattgagagagattcacagcatcattcagaactaatgtattgatggggacctaggcaagagagagaactgggttctgttcagctgtgcattacctgagtgacagctaccagtagctggtggacgcagggtgtgcttgactcttgtcctaggaccagcatgaactctgatgtggtctgtgggccactaatacatggtgaatatttacctactggcctgggatatgattaatacaatggttgagatcaagtgtttcaaaacttttagtgcaatttgactgtgtctcagcaaacggaattgctttattgaatgggatacagagcaggagaatgttgtcaaattcatgtggtgagttacaaatggaaggagctatgtaattgttgagcacagtagggccatgttctggaataattaggcattcttagaagcttaaaaaattcttgttatttgttannnnnnnnnnnnnnnnnnnnnnnnnnnnnnnnnnnnnnnnnnnnnnnnnnnnnnnnnnnnnnnnnnnnnnnnnnnnnnnnnnnnnnnnnnnnnnnnnnnntttcctctggtgcctgcactgttctaaggctttgcatgcattatcttattaatttctcaccaccatccaatagggtaggcactactattcacctcatttaccaggtgagaaaactgaggcacagagagattaaactgcttatgcaaggtcacaccaccatgaagctgggattcaagctcaggaagtgtgaaagtcaaatcctgcttccaagttttacataatgattcaggttactagggtgataaggctgtagggtgaggttacgtgatattaggagtcagaagatcctgcttccactacctgccagctgtgtgggtgatcatctgatttcttcaaatcttggttcattatatgtgaaatttgaaagtctattgtaaggattgacaatatttataaaagggtgaacatatagtagtgtcctcatgtatggtagcagttattacctgtataattattttctctgacgtggtgatctgtgacacgcagaaaaggaagttttctacatgtggctcttattttgggccataggaaaggagtgcctttgcttgtaacatgagacaaatacaagttcacaatatcaattttgaaattgatactaaagaaatttgcaatagcagacattattttaaggatcatcaaactattataattcctggcctttgctttcttcatgtgttcaagaagacaggggatggagtggaattgtaaagattactgaactaagttcctttcctgctggagagattacactaaagacaaagaggaaaatagctgctgatcgctgtggaattatgagtgtgtagcaggggaatttctctagaagacagccttctggtgagctcttcctttacgtcattagatgatgatttacacattagccagttctcttctccagagattaaactctttaattttaagtgagcagttttagttcatctttccacagtcaaaactacattaggaaactttctccaaaaaaggaatcaaaagccaatgcaggtcaaaactcattgaatgatatacttcagatttgtgcattccattgtatgtaaattttacctcaaaagaaaaaaaactatagaaaaatattgaagttaatggtatgcatgctgaagggtttagaagtgaagtgtatttattctacaacttcgtttgagatgcataaaacatatggatggatagatagatagataggtagacaagtagtaaacgtatagcaaaatgctaactagaatctaggtagtagatatatgaatatttatttagaattatataaggttttctataaatttgcaaatgtttacaataaaatggtggaggaaagggcatttcatctaatgataaaaagacaggtcctgtgactagattgcactgctaactatatgttttatctcaggcaaatttagttaacttttgcatgactaagtttagtcatctaaaaaatgacgatagtaacagtatcaacctcacgtggttgttgtgagggtcaacggagttggtttttgtaaagttcttagcatgtagtgcaatgtaaaagtttgttaaataaaagttttaaaagtcgtctcatatatgggtcattcataggaaaacagatcgcatttactttcttggacactcgactctgagaatgcagtattttattagaagctgatgacagccctacacaccttgggagattagtcattttccctctaatccaggcatatttcatctcctgctaagatgcagcaggaatgatcaagatgaattaataatattttatttctattttcattctcttcaaaaagttccactgcttaaagcatgctccctacctccaagcttggagtatatcatatctggatagcaatagagaagcatgttgytacctggtcaccaaagtaatctaatgactttgtgatttttaaaaaggtggtagtaaatagtagccatgctgtccaacaaagcttaagaaacctgtgaattaattaataagaggttatatactttgaagtttacaaagaagtctgtggatcatatgagcagagctttcttagtcttttagagatctaggtatgttaaatgggagttcttgcaaagaacagatttgtaaaaacagatagtctttattcattccataaatatttttcagctcctattacatataggctctggtctaggtactagagattcagcagtgaaaaagatagaaattcctgcccaggtggacctcacagtctaaatgtggagacaggcaacagataggaa

SEQ ID NO: 57071 - DNA, 386 bp, Homo sapiens
ttgatgtgagaattaaataagatgatgccattaaatgtctggcacaaagtgaatatacaataaaatattaactaacatcagctaaactccatgaaggtaggagccatatctggactaatcrctactgtgtacccacttcctgggagacaagagatactcaataaatgtgttcagtggatgaaacaattaaccacaatctgattttgggatcattgaaacaaaaacaggggaaggcaggacagataggagagtgcactatattttttaattgattttttaatgtaataaagttgtcattgcatttttgaaacatttgtataagatagtaaacctctgactaagattgtttcatcactgagaaaattattttttctttcacaagttca

SEQ ID NO: 57072 - DNA, 1063 bp, Homo sapiens
gaaggggatagatgatcaaaaaagaaagttaagtatggtgctgtaatggcatggcacatcagagggcaaaggaggaagggaagagggaaagagaaaatagaaaggttaacacatgaaaactccccattcttttgctgcagcttggtactgataattcctgcttctcttttcccttactagacccatttcagggattcttgtgtttctagagccagcttgtaaagaggctgcagaacctactgtgttgagagttattttatctgctaaaaatatattctttctatttatttacttattattattattattattttttttttgagacggagtttcgctcttgttgcccaggctggagtgcaatggcatgatctgggctcactgcaactgcctcccrggttcaagtgattctcctgcctcagcctcctcagtagctgggattacaggtgcccgcgaccatgcctggctaaattttttttttttgtatttttagtagagacagggttttgccatgcttgccaggctggtctcgaactcctgacctcaggtgatctgctcaccttggcctcctaaagtattgggattacaggtgtgtgccaatgtgcccggccctctttctttctattttttaaaaaataatagagacagggtctcagcatgttgcccacactggtcttgaactcctgggcccaagtgatctgcctgccttggcctcccaaagtgctgggattacaggcatgagccactgcccctggcctgaaaatatttccttaaaagattttatttcagtgttttacagaatatttatctatgttttttatagaatttttctgaatacaacaaatactaatatcttcacaaaatggatattaaaataactcaataaataatatcactggtaatctcttttcaaagactagttgagacataaaaaaggtagcttctaattagcagcaattatttcttattcagtggaatcatcaagagttgcccacttgatgtctaactgaaatgtttctatagttaaatttgatgtcaaccccgtatactaaagacatccttctca

SEQ ID NO: 57073 - DNA, 671 bp, Homo sapiens
aaatgtttcagattttggagaagtttagattttagatttttggattcgagatggtcaacttgcatcttatttaattggcacaaccctataattttattttggttactgtcctgtttctacagatcaatcwtctgggcttagaaaggttaagtacttgtttaaagttaagcaactaccaagcagcagaacgaggactaaaacccaagaagattcagaattcaaaccggtggttgaactgaatgttagatgtgacgactgtcttcttaccaccatactatctcaaccaactacgtgatactttacaacaaaggggttgatctctttcaacattaaaattatttgattctagtttggttaaaataaatcaactaattttaatgtttgcttataggcacaatattaaacatggatggtaaaagtagccaaaatcactaactccttacattgtaatgtctaaggagtccatagtataaagagcaaacatgtcaatgaatactgagttaatgtttaagaaatgtccacagactaacagccctccagaaaactgtgactgaagtggaaaaaaaatggacattccaactgacattaataattagttaattcattcaattattgagtatctactatgagtcagctacagaatttggaaatttgtatatattttctcattt

SEQ ID NO: 57074 - DNA, 2058 bp, Homo sapiens
gcatacattactttctcctatctacaattctgttactgtaaaagctaacatttatggaacatctatcatgtgccaaggatgtgctttctgtggattatcacatgtaatagttcgaacaactgtagagatggtccatactattattcccatgttacagatgggacaacttggcacaaggaaggaatttatccaaaacataaagctagtaagtggtcaagccaggatttagtctcaggcagtttatttagctttacagaccttgtcattaagcactacacttctctggggagggagaagagagctcaagtagaggagaggaagaagggaagaatactgaaagcattttgagaaagttcatgtgcagttatttatataagcatgtccaccactgaaaattgagccctgaatacactatactatacttttcttagaacacttgttttccacttgatactctgaaatatatatattatttggacaaatgaaccaaacgattttcaatttttttttaattcttcaggatttatgattcaggatggcccttttggatcttgtgaaaataagtactgtggtttgggaagacactgtgttaccagcagagagacagggcaagcagaatgtgcctgtatggacctttgcaaacgtcactacaaacctgtgtgtggatctgatggagaattctatgaaaaccactgtgaagtgcacagagctgcttgcctgaaaaaacaaaagattaccattgttcacaatgaagactgcttctttaaaggtaaatgaagggtgaaccttaagtgtcaccccactctatttcttttctttctcaactagtgcctttaaactctagcaattttatatcagcaagggtctaaaaaggaaaagaaacacaaaatagcctaagtactccactaagtagcagtgtgtggaaatttacatggaaacaattctgatattcagttatgagaataaagctggccaaaatatgactcaaaatttaatatagctttcagcattgcaccatatggcttcccaatcatggattttcttagggacacagggtggccaattcagtctacaggccaaattcacccagtaaaaagcacctggagtggaattgagggactagtgagtgccaagccatgctgtgataacatttcattccttcctgattaaaaacgatggtttcagtttgcaccacataattcaaattataaggaaccagtagttgcccactgaaataactagaagaactcatgctaaatctcattagtgaatcagagataaccatagttaaattttttttaaagtactggtattcactttcatgcatttgaaaatcattggtttagaaaagtactgaatttgtaattccatacattatttttacatgccacataaataaatcattgaacagttttaacatcattcagtttttatacatttatttgttgtttacttgttcatgctgttggaaatattttctcgtttatagtcatgactcagtctgaaattctagagttaaatgtgtagaacttccatcaataattaatctgacttctaayctttggtcagtgccaagtcccagtttctcagaatatttctgaaacgtatttacacttaaaaacctgtttaatatttttactcctagcttaaatttatggctgaaaaataattttattacactccactcatccacctattaaggtaaattgaataattaaaaattatcctttttcaaactttctctaacacaatattatttccatcgtgatttaaaaatgacatgtagagcttttcagatgatgcaagatgcaatgctctgttattgttgctgctagaaatcctttaacacatttgaagtaaaactgggataatttacttaccatagtgtactgtgtgcctcttacatacatgtgcagagaattttatgacagttcttttaccaaaaggataacagatacttagatttcaagttcagtttagttcccttttctatcaaatctattttacaaataatatttgtaaaatattagggaatttttttctgtcattttgacacaa

SEQ ID NO: 57075 - DNA, 570 bp, Homo sapiens
tgattgctttggtttggattccagctttgmcactttcttgctctgtaatctatgcattattgatgttataagaataataatggttcccatctcaaaggctagttccaagaactaaatgacttaataacatacgttgcaacttagaacgatgcctagaccataataaatgctatccatacgctaatataattatgacaatattactgttattctcatcatctttgggcaacaatactctccccctgttctctctccagtctggccaaccttcccggtctcctccatggacttcccctctgcccgactcttaagcactcctgtccttcaggttcacggattctctctcactacaaaattcttcaggcaacctcactccctcttgggtttttgaacagccaaagttcttgaaggattcgaatccacacaagtagccaactgtctgcccaaatctgcagaattggacatgtaacaactcttgaacatatccatttggaggttctaaataaaggacaaacagtccaaaatagtccaaagctgaactccctgaaatgcttccaaactgatttcttt

SEQ ID NO: 57076 - DNA, 1441 bp, Homo sapiens
atgtcccctactcatactgcaaatacctagagggcagtgattacactgtcacactcttgtcctcactgaccagtggtgtccagcacaggctctggagccaagtttggacacttacgctgaggggttctgtgcaccacctgcacatcaccatcctcatccacgaaatgagaataacgtatctctttcacaggctatctgaataataagtcataaaacggacaaaatatacatagaacccagcaaacatttactaatgaaatggggaacactgtatcactgcacaacagaagaaccgtggcagagagccaatagacctggtgagggactgaccattttcaaacaggccaaaaaaaaaaaaaaaacaaccccacaacagcaagggatggggcattcccatggctgacaagcttctccaaacaacctagatcattacccagcacacatcgggagctgattcaaccttgaaatgcagttagcaccgtatccctgcttatcacaayaccggggattccataagtgctcaagaaatgctgttaacagtgacagcaataacagcaataaatgctgtagttattattagttgattcagcaacaataagactcctcatggggaaaattcctataaataaatgtacaaaattccgttatttactataaagtcatatttcctaatctgttcaaagacttcaattgcataactcaatgtgagttttactttttcatttttaagtattagctagcctgttttaaataattttctctggtgagctcaaaatatttaaggcagctgaacaatcttgttctcttaaaaatgaaacttaattcaactctaaaaatatctgaaaccgaacatgcattatttctggcgtactctccctcaagtagcaacatcaactatttcatgacattttctaaacatcgtgtccacctaaaccttttttttttttcaggtctcacaaggactaagaattacaaactcttctttcaggcttccctaattcccctctatttaaaatctctgtcctgatactcagatttgtccaagtcaaatatttcattacccactttgaagttacacatgagacctcactcagaaacccaaggcgcttctcactcctctcacttttgtgtatacagtgtactgggtacatctttgctgactgcaagctccccagggcagcaacccatttaatctacatttgagatctgtaactctctgcataacgacagtaaggatctctgtgttgctccttgttgctgtgagcccacttaactttgggaaaagttcccttcaataaaatcaaacagcagtgctttatagctctgctccaatgctgaaagtaggaactgaaaataaaacacgtttctattacaaaggaataaaagtcatttctaccgaaaacactttacaaatcctaagaacaatcatcaagacaacgga

SEQ ID NO: 57077 - DNA, 3119 bp, Homo sapiens
gggattgcctcatcctactctaattcctcttccctcaatttgcagctcttacagtcgctgtgggatccccatcttagggctgcttctcaatttgaaggggccttgggaccaggaagaccttactgcctcagctctcaaaagttagttaacaagcacttggggagcttgttaaaatgcaaactcccaggtccctcccgttgacattctgattcagtaggaaggggtggccccagaaatctgcctgtgtcattcacctcaggggattccagtgcaacaggtcctgggggaagaactggttcatctagtccacagcagttgttctctgggcccctgtttattagaatcacttggaaatgtgatcatggtcgtgtggttatattactaaaacgagttcttatcatttagagataaatattaaaatatttgcaaatgaaataccatgtccaggaattgcttcgaaaattaatctggtatggggagggggaggaaaatggagatgtagctgaaacaagattggccatgtgctgataattatggaaacccaggtgacaggtacaccagggatcaatatacagctttctacttttgcgtatgtttgagattctccatagaatgattttttttttctttttaatcacagggaagttctttaaagtattcctttgcctagcctcactcctgacccagaggtgaggcacagacactttttccctcactgttctctaggtgattctaacccacaaccaaggttcaataccactgccctacaggaaaagaaaaacaaagacctatccccagggggttcccctttgagccccttgaatgccaaagccccaatatccctgtgaacagctggaggccacagcccagctgagctgtgacagacactgctctttgcctgccagcatccgttcttctcatctgcctcactaacaagaatctggattttgtccagggacagcagtgcgcccaacgctttccagattaccacccacctagtggtcacgtgacctgcctctggccaataggctgcaagcggaggtcgaccacaattgctgagttttgctttcccgatgcaggtgcgttgcttgtccctgcctggactgaggctggaggtgaaggactatcacagtatcctgggatcctgagctgccttcagaataacacagcagaaaaaaacaaggagcctgggctccccaaagccacaatggccctagacttctaggggttcctgctattcttagtgtgaggcaatcccagctcatacactggtctcccagggctaagaatgcccatgaggcgttaggcccaaaaccagcacataaaatagtgtgtatttccctggagggtctcctctgcccaggagggtcctgcagtaacagcaagctgctggccaaccaagccactaacaccaacagctatgccggtctcagtctctcgggaggcacaagttaagctcgagatggtcaacacgctttctttcttgcttgctttttttttttttttttttgagacggagttttgctcttgtcgcccaggctggagtgcaatggcacgatctcggctcaccgcaacctcttcctcccgggttcaagcgattctcccgcctcagcctcccaagtagctaggattacaggcacacgccacaggcccggctaattttgggtttttattagagacggggcttctccatgttggacaggttggtctcaaactcccgacctcaggtgatccgcccgcctcagcctcccaaagtgctgggattacacgtgtgagccaccgcgcccccaccggtcaacacactttctgaagggagagcccaaaggggtggctgtgaggttcaaaagacgagagcttcctgatttttgccctaacccaggaacagaatgagagggaggaagtggtgcagtctggcacctccccaaggccctgtggaagagcctgctgtcctcagcgccctggtcatcccggccgcatttgagagcgctccctatgctggccagggcgttcattctggcttcttctctatcttaccagtctgtgtgtctgtgccttttattgtccccatcaggaatcagmaacaataaccagtaacccagctttctgctgagaggagccatgagtccatttgaatctaacaagacggggcttaggaggaacacatatcagtggcacaggtgcagctcgggagaaatatggcctcacggcagcatctgtgaaaaaaatttagcctgtttgaccatgaatcccgcatgtgatgtggcagccaaaagaagctatgtgagcctaggctggacaggaaagaaactaggataggggaggcaagagcccttctccactctgcccgggtcaggccaccctgggagcactatgtgctgtacctggcctggcagagctgagcactggtgatcacagcccaggaggcagggtcccagatgtgagcaaggcacctgccccagggatgccagagtcttctggcaaagccagaaatctgagaaatctgaaatcggagggccatggggagccagtaagcacagcaggttgtcaagtgttggggttgggggccttatccagccactcctgggaaggttttcatctggacggagccatgtgtactgggtgatgcctgctctgggcatgtcaagagtggtgggtgttttgttcaggcaccacaccttaagaaggagcacaggcaaagtgcagaccattcagcggggagacctggatgatagtggggaaaccatgagagataaacaaggagaaaccatgtgggtggagtaagagtagacaagtgggtgggtattgaggtggcacagtgcccctggggagaagggaataactcgctcagtgtgaatgcaggggcagacccaagaacaaggagtggcattaacaggagaaaagatttctcctcaataaggagatgtccaaacacaggaggcctgctatgagaggtactaacctctccatcactggacatattcaaacagaggcgataaagtcacttggtaaggatgctatcagcaagattcactcacaggtgcagactggagtatgaggccctttccaactgagactcaagcaaaatgatcaggccaaagttttccctctgagggactgtg

SEQ ID NO: 57078 - DNA, 1191 bp, Homo sapiens
gcatcttccagattctctttttctcttttttctacagtctttcttctcaatattccccctgcaatttcccaagtatgttccttggagaagttacatttccaagatttggtatttgcctcacatatagggctaaatctttcatttacattcagaagatggttttatgtgattgtctttttctaaggaaaggaatgctaaactttccctccttctaatcctttcaataaggatccttctttacatttgtatagtaaatttaactttccaaagggcttaaacaaacacacttgatctcatttgatatttactgacactgcctagtggtaggtagaattctttaatctccaggagtctctcttctctccagtaaaagcagatttattaaaataataataattggtcacaggacctcacatacacattttttaaaattttcgaataatatataaataataatgaactgctatattaacttactataaactatactaatatattataaatgtaaaatatataaaaataggaataaaaatgagtgagatacaaaatacacagggtttctaataatttcttcaagttctcagtgcataatctttggatcctctttgagaccacggcataatcttctagggctttagtaactgcacttggacaccttctaagagtgctggttacctggaggaggttgagggagagctaggataggacttctttgctgctacaccagcataacttccaggtttctaactctggctcccttttccttggcctgggtcctcaacctacgtgaggcttagaggggagaaagccaattagtgtgtatctrtgccttgaggataaagaaggagaacctaatcctaagacctaaagtctaaggcagcatttcctttgggagatttagacttcagctaagtgcttttccttgagtgtttgttgatgaggtagaggtgcaggcagagatagagcatcacctgggaaaggatgcagctgattaacattctgggcatgtaaaacagtttgtgcacaattaacttttctaaaatatatcctaagctttcaaattatattttgcaaagtgtaattctatcctattacccttagccacatacaccttggtatcacagtactgtaaattattcctttgcctccttagtgtttacaactttctgatatagcactcgtagatagtga

SEQ ID NO: 57079 - DNA, 1191 bp, Homo sapiens
gcatcttccagattctctttttctcttttttctacagtctttcttctcaatattccccctgcaatttcccaagtatgttccttggagaagttacatttccaagatttggtatttgcctcacatatagggctaaatctttcatttacattcagaagatggttttatgtgattgtctttttctaaggaaaggaatgctaaactttccctccttctaatcctttcaataaggatccttctttacatttgtatagtaaatttaactttccaaagggcttaaacaaacacacttgatctcatttgatatttactgacactgcctagtggtaggtagaattctttaatctccaggagtctctcttctctccagtaaaagcagatttattaaaataataataattggtcacaggacctcacatacacattttttaaaattttcgaataatatataaataataatgaactgctatattaacttactataaactatactaatatattataaatgtaaaatatataaaaataggaataaaaatgagtgagatacaaaatacacagggtttctaataatttcttcaagttctcagtgcataatctttggatcctctttgagaccacggcataatcttctagggctttagtaactgcacttggacaccttctaagagtgctggttacctggaggaggttgagggagagctaggataggacttctttgctgctacaccagcataacttccaggtttctaactctggctcccttttccttggcctgggtcctcaacctacgtgaggcttagaggggagaaagccaattagtgtgtatctatgccttgaggataaagaaggagaacctaatcctaagamctaaagtctaaggcagcatttcctttgggagatttagacttcagctaagtgcttttccttgagtgtttgttgatgaggtagaggtgcaggcagagatagagcatcacctgggaaaggatgcagctgattaacattctgggcatgtaaaacagtttgtgcacaattaacttttctaaaatatatcctaagctttcaaattatattttgcaaagtgtaattctatcctattacccttagccacatacaccttggtatcacagtactgtaaattattcctttgcctccttagtgtttacaactttctgatatagcactcgtagatagtga

SEQ ID NO: 57080 - DNA, 1143 bp, Homo sapiens
atgtttaagaatgtcatggaaacattattcataaaagtcctagaatgaaaaccatccaaaagcccaccaataggaagggtaagtaaattacgaaatattcctacagcggaacactatacagcaatgggaacgcaaaaagcttctgcacatcttgtttagtggatgaatcttgtgaatgtaatgctacacaaaaaaaagcagacatgagagaatacctactgtatgactccaataatatcagttaagggaaaaactaatctactgtttcagaagtttggttttagacattttctatggttttagaagtttagagtgggaacagtaagtactcttgacactgggaatatcttgatctgggtgatggttacaagggtgatttttgtgaaaatttgccaatataatcacttatgatttgaggatttttatgagtttaagttatgcttaaagaaaagaaaaccctttaagaaagaaaaatgatctagagaactatgctgcttttagtgtgaaatgataactttaattgcaaaaactaagaaaaagtgtataaaatgtatttggcaaaattccacctcaattcactcaccaaactgtcattccaattacttctaaacaacattataagtatgattttaaagtcaactaaagtattattgaaatgactgttatagaaaacaatgctttcgtctatggccataccagtctgaagacacccaatctcgtctgactttgtagacaaaaacaaagcttttgaaatatttttaaaactcccatatttgcgatttgttcattwaaaaaaaaaaaaggcaatgtgtggactggacgcggtggctcatgcctgtaatcccagcactttgggaggccaaggcaggtggatcacttgaggtcaggagttcgagaccagaccggccaacatggtgagaccccatctctactaaaaatacaaaaaattagtggggcgtagtggcatgtgcctgtaatcccagctactcaggaggctgaagtgggagaattgcttgaacctgggaggtagaggttgtaccactgcactccagcctgggcaacagagcgagactctgtctcaaaaaaaaagagaaaatgcaatatgtgatgatggttaaaaaattacataattctaattttata

SEQ ID NO: 57081 - DNA, 538 bp, Homo sapiens
gctaagctactccaagcgattgttttgctaattagcacaggtcctagtgctctgggctgcactattatttgcattaaaatgactaattagaagaaaattttgggggcattttgaaaacatggcttctcctttggcatgtttaattgtgatatctgacagatatccttgyggtttaagatgacacttttaaaataaattctctcctaatgatgacttgagccctgccactcaatgggagaatcagcagaacctgtaggatcttatttggaattgacattctctattgtaattttattcctgtttatttttaaattttctttttgtttccctggaaaggaaagatgatgctcagttctaaacattaaagtgcacgatttgtctgttacaataaaattaaatgtgtacacaaaggaaaaaaaaggaaaatttttaacaaaagagtcaaccagctgttgtttatggttttagaaagtgaattttctcaaagggagggatacgcctgtctagtgtcaggaaatagtttgcttggtttctcccc

SEQ ID NO: 57082 - DNA, 757 bp, Homo sapiens
gcaggcagatcacctgaggtcaggagttcgagaccagcctggccaacatggtgaaaccccatctctactaaaaatactaaagttagctgggcgtggtggtgcgtgcctgtaatcccagctacctgggaggctgaggcaggagaattgctggaacccgggaggcggaggctgcagtaagccaagatcacgccactgctctccagcccgggtgacagagcgagactccatcttaagaaagaaaaaacagaaaaaaagatattaaggagaggtaacttgggatgcagcactttcaagtcaagctattaagtcacagagaaaaatcaaaatttttcttttctrtgtcagggttcagaagtttatcacccacacatcccgtaggaggttaaggaggccccctgacaaaatgaagaagggacacaaggggataatatgacataagaaagagggcatcacagatactgtgtgagtcctgctctgcgagacacctgaggagtcagtggcacagaggcaggaagtagaaggatggttgccaggggctgtgggagggaggaggaggaatggggatctgggttcagtgggtggagagtttcaattatgcaagataaaaagagctctggagccgggtgcagtggctcatacctgtaatcccagcactctgggaagccaaggcaggcagatcactcgaggccaggggttcgagaccagcctggctgacataacaaaaccctgtctctaccaaaattacaaaattagccgg

SEQ ID NO: 57083 - DNA, 1131 bp, Homo sapiens
aaataacaacatctcacacctgcagctttacgagcccttgctgagaggagccagtgcaagccctcccctccctttgcccccctccagcatccccccattcacatttgggcccccactctagccaggctgctgctggggcaccagagtggcagggggagtctcccccttgctgaagctaggacccatcgctcaatccttacaacttgcaggtatctcsactcacaatgccgctgctcttgggtcccccagctaattccccagggacctgagcaaggcaagcggactatgccattaaaataccccatgccagaggtcactggcgagcaggtttgtctgcacctgcagctatgtctcaggctcgggatggacgaggggatggggctgcgctggatgctggattgtgagggcagaaatgaccaatggatcctcttgggccctgggggatagcagaggcgggagccctctgagctgcctcagcacatttctctgctttctccttccatacctctccctaacaccatgcgaagcaggttctttcaaagcatggtgttcctgctccttctgcaccacttggtcttggacctgaccccataaccattagcctcattttgtaaagagatgaggttttggcagagctgtgtcaagagaagaacgcaaacaatgacagatgcaggagcctgtgccttagcaaggggatggcattcaggaagcgcgggaccaagtcctatccccactctaaatgtccaaggcctctagtcccactgtctccccacagctggaggctcccaactagggttcaggccagctcacctaggcaaagaggaggtgaaaggtgctggctggcctggggtgggaggagagcaaacaggctgcctggggcctgcccagacccttccccggggcagcctggaatggccattacagggccacttcttgcggcaccacgagccattaaagcaggagtgctcggggagccatcagcccagtgcagatgacttccccagatgtggcagtgggcaggatgtggaagcccccagccccaactctacagacaaaacattcccacactcaccatcctcggaaaccccacagcccagagcccctcttacagatgctttctagaccatttag

SEQ ID NO: 57084 - DNA, 1131 bp, Homo sapiens
aaataacaacatctcacacctgcagctttacgagcccttgctgagaggagccagtgcaagccctcccctccctttgcccccctccagcatccccccattcacatttgggcccccactctagccaggctgctgctggggcaccagagtggcagggggagtctcccccttgctgaagctaggacccatcgctcaatccttacaacttgcaggtatctcgactcacaatgccgctgctcttgggtcccccagctaattccccagggacctgagcaaggcaagcggactatgccattaaaataccccatgccagaggtcactggcgagcaggtttgtctgcacctgcagctatgtctcaggctcgggatggacgaggggatggggctgcgctggatgctggattgtgagggcagaaatgaccaatggatcctcttgggccctgggggatagcagaggcgggagccctctgagctgcctcagcacatttctctgctttctccttccatacctctccctaacaccatgcgaagcaggttctttcaaagcatggtgttcctgctccttctgcaccacttggtcttggacctgaccccataaccattagcctcattttgtaaagagatgaggttttggcagagctgtgtcaagagaagaacgcaaacaatgacagatgcaggagcctgtgccttagcaaggggatggcattcaggaagcrcgggaccaagtcctatccccactctaaatgtccaaggcctctagtcccactgtctccccacagctggaggctcccaactagggttcaggccagctcacctaggcaaagaggaggtgaaaggtgctggctggcctggggtgggaggagagcaaacaggctgcctggggcctgcccagacccttccccggggcagcctggaatggccattacagggccacttcttgcggcaccacgagccattaaagcaggagtgctcggggagccatcagcccagtgcagatgacttccccagatgtggcagtgggcaggatgtggaagcccccagccccaactctacagacaaaacattcccacactcaccatcctcggaaaccccacagcccagagcccctcttacagatgctttctagaccatttag

SEQ ID NO: 57085 - DNA, 711 bp, Homo sapiens
aaatacaatttggtaaaaatgaaaatttaaaattaaagtgatacatcacttttaaatatatccattgaaatctacacacctcatagatatttattactgatttttaaaaaatgagaagttytgccttcgtttttgagaattttacattgtttttcttttgacttgaacttatgtaatcctttttccattatagaattttattctaatgtgatgtatttatgagaattttgacactgtgtatttttggataaatattatgtacttgagtgctgtggtcaacagaacagaatatacagctaaacttctggagttcaagtttcaccctttgccagctaagtgacattgggaaagttacttaatcattctgtgcctaagttccctcaattgtaaaagtgggagaaatattacatatcccacagagtgattgtgaggactaaatgagttcacatgtgtaaagaacttagacgaaagcctggaatgcaatatacactgtcctgttatcgttagactgagacacagcaacaactattttgtgcctcttttttatgggtttaagtgcttataaaccttgtttacataaaaaggaagatgataacgagaggatttttggtatatattgtccctcaaatttccaagttacacgcaaaaacaataccacatagtggtctatcagcaaaacttttttaaaatacaaggattaacaacttgatg

SEQ ID NO: 57086 - DNA, 618 bp, Homo sapiens
ttatttagttatttattttttccaggcagggtcttgctatgatgcccacgctggtctcaaacttctggcctgaagcaatcctcccagcttagccttccaaagcattgggattacaggttcgagccaccgcatccagtttttattttttatattttacaaactgtatccacaacaatgttaacactggagtaggaagtctttggtgtaaatttatttggccttgttactttgttggccttgttactttggttgaaatcatacacagacacagactataaagatgtatttttcattttcccrttcccactctgctagactttgcctgcagttctgtgatgggaacaaatgcatttgtctttacaataaatgggctcccagcgactgggcgtttgtctggaaggacattccagatcttgggcacatcaagtgtggaggccttttgcatctgtctgagtcaacagtcaaccctgtgagggcaaagtactcattaaagaaatggatgctcaatagagtgttagcctggtgacaaaacacacctggggagccatgtgctgagcatggggatcagctgcgtctccaggatgtgctgtcatcctctgtcccttgtgttcttggttt

SEQ ID NO: 57087 - DNA, 675 bp, Homo sapiens
tattcagggtttatttgagataaagaataattgttgtctcacctttgctagatgtatataactttaccactcggagaaattacaggtattttcactttatttttgtccttggaggtgtcatttttcttcttttactaaattacaaagatttttttcattgataaagctaactctgtcccagtccaatttttttttttaaatagaaaaaaaaataactattttctgctaaagctctttttgagaattctaatcctgtttacactattggggaaaaagtagagcataacataattcatatgagtttaaggaaattaacctatttgttactcttattggactgctttcatttgtcattagtttttagcatagattaacaattaacaaatagtgtatttatytttttataacttttacattaactattataaactaagtataatcggatgtttcatttgaattttttatacaagtaacaaggcaataatttggagcacaagaaatatttatcacagaatgtgaggtacaattaggccttgtagataaattactctttttttttcacatttttaaacactgtattacctatcagcactctagaagcaggcatagtttttgtgtgtgaaaactaagaagacacagttaagtattttaaagaatcttctactaaaaatctgt

SEQ ID NO: 57088 - DNA, 536 bp, Homo sapiens
gagggagagagtgtgcaagaggttgaagttgctgccacaagcaatttataattggcattaatccatttattaaagtggaactttcacatgctaagccacttcccattaagccccacctcccaccacagttacattgtggatgaagtttctaatatgtgctttttgggggacacattcaaaccatagcacaaatatgcccatattagcatatactggtgtttcttaactggagcatcagatgaagaattggatccgcaattagggatcattttttccaataaaaagttatactgataacaaacagcaacattacaattagtacgaagcgaaggaagaactgatttatgcttcaattttgcactcacaatagcacaaatcttcatggaatagaatgggctaaatttcctttactatttaaattgctattgaatatgaaytgttaaattcatattctctcttgctgtaagtaaaacaggtattttatatcactctctctataaaatttaataatttttaaatttgtgtacatactgtaa

SEQ ID NO: 57089 - DNA, 797 bp, Homo sapiens
atgcatttcttctttcataacaaatttgacactcaggagataataaccttatgagaataaacagtattcttcattttctttggctgtctatacccacacgaaattaaatatatgaaggatatttcaaaacattctggaaaaataagaagaatatttaaaaaaataaactttaaccaatatcagtctttgacaacaaagttaaccattttagccatatagtataattttagtttctaggaaaatgtatgaatagggaaatgtttcttacattatrcatattttctcgagtgatgtcctagggactcctgtaaaatacctcattgattgaattataactataaccttaatgcaaatggtacattagagcatttttttaaaaaaagaacacatgtacacattggatggtcttccaattgtactgtttcttatgtatgtgtgtatgtgtatgtctatgtaattttaggtagttatagagattagatattggacaagtaattagaaagtaaccagattttgtttgtcataaaaaagaaaatgattaattttaattgaatttttagttgaacagtaaaactggataagaatttaccctattcagggaaaagatgtactgtgcttttcagaccaaaactgttctttcctgagtgacccagtgttggcctttactgcagaaatagatttgttttggtagacccctgtagccagctacctgcagagagaaaggaatcctgctaaagagaattcttaatacagtagttaaatattctttcatttgggtgaagtttcacatatgatat

SEQ ID NO: 57090 - DNA, 650 bp, Homo sapiens
ctggatcggaaagcccaaagatgatgagcaaatgacaaaaaagacagtagcacctgtgagaagtcgactttgagataaacaagcaagccctgcaggtgggcagtaaggattctcaccaacttaaccaagccgtgtgcccgtgagtgcccgtgagtgcttaggaggtggcattatcattaaccccatggacagcgccaggccctcaacggggctagtaaatacgtgctgaaccgatgaggaaataacagcakagaaagtttgtattacttgcctcaagtcacagagcaagctagcaatagggggaaaaaaaatgaggattcaggcagttcaagtgtggagttaatacccttccccacaaagttatttcctgtatctgtgaatgtatgcccaggacatggtactgaaggtgaaacaagacaaggttgtggctgtctcctgtaaacctaaccttattaaggatgcaaaaccagggaatgccttgagtgcaagaggttaaaaggtaataagaacaagagagagaggaagagtaatttcacccaaacttaagagggagtattggtagagggtgtggaaaagacagcagagatcttcaaaaccccccgcccttgcagcccctcaggaaggggtggctgaggccacctagggagcct

SEQ ID NO: 57091 - DNA, 761 bp, Homo sapiens
caaaattctacagccacgggaactgtgaaagatacacaaagcctagtgagatatcagaagatgagaacacatagccaagcccatggcctcccacccagggaggaaacccacccaggctagcttttacataaggctggctaaggagagttatttacagaggaattactacaagccaggccagcagccctctgacaccatgtcacacacggaacttgcgcacacagtgacaccacatctcctggctgcaaatctgtctccagctcctgaggctcgggcctctgcagtgttcttctaccttctcagcagaacagtgaggctgaagggcaagcccagagaaaaatggtgggcacacagggagagcggtgacagaggcaaggagtcaagaggtaagtaatggagccgcccgcgggactrgagaataggatgtgcttattttgcttctatcgtaaacaagggtgttctcaggtttgagagttggtcttttggacgttctctgcaagggatcttaacaacaacactatcaacatttggggctgggtaattctttgttgtggtggctctcctgtccactgtaatacttttagcagcttccctggcctctatccatagatgccagtcgcaactctgcagttgcgacaatcaaaaatgtctccagacactgccaaatgtccaaaaaatcactcctggttgagagctgctagactatctgaccatcgcagtactcagaggagtaaaaacagtaataagcatgaacactctgg

SEQ ID NO: 57092 - DNA, 649 bp, Homo sapiens
tgaagcgacgggcgctttacaggaaaggcctgtggtgagtggctctctgagagtagtcaggaaggcttcccagaggaaggaaggttccagctgtgatctgaggttcagacagaactcactagaccaagggaaggagggggaagaaagctctgagcagggagcctggcttgtgcaagggcctgtgggaggagggagaatggtgctttccaagaaccgaagtgttgatgctgggagtgaggagagagtcgtgagagatgaagctggagagcggacggggctgcagcatgtgtacygaaaagagatcactcaggccaggcgccgtggctcacgcttgtcacccaggcatggtggctcatgcttgtaatccggatgtggtggctcatacttgtcatcccagcactttgggaggccaagacaggcggatcacttgagcccaggagttcaagaccggcctgggcaacaaactgagaccccatctctacaaaaaacaaaaattagctggatgtggtggtgcatgcctgtggtctcagctacataggaggctaaggcaggaggatcacttgattccaggtggttgaggctgagggagccaagatggcaccattgcactccagcctgggcaacagagcaagaacctgtctcaaaacaa

SEQ ID NO: 57093 - DNA, 1877 bp, Homo sapiens
aatgaagcaatccaattcagaccacaagattctccaaaggctcaggaactggcagtaaaaggaccttaggaagaaatggaagaaatggcaggcaaaaaagaggtgtattagatgtgtccaagaagcagttagttcttcttcaactctaattccatgtatctgttttctttgtttgagacagtcttgctctgtcacccaggctggagtgcagtggtgcgagctcagctcactgcaacctccgcctcctgggttcaagcaaggctcctgcctcagcctccttagtagctgggattacagatgtgcaccaccacgcctggctaatttttgtattttttagtagagattgggtttcgccatgttggccaggctggtctggaactcctgacctgaagtgatctgcctgccttggcttccccaagtgctgggattatgggcgtgagccactgcacctggccactgttttcttggttttgatgcttgccacaccaatcccgacctctacactgaagacacctgggaygactggtgatgtgctttcctgtagataatcttcggagaggcctatggatgaagcattagggtctctgccagaaagatgctacgacaaaatcacctgaaggtacactgttaaaaatttttaaaggcaattagatttcctgataaatctttacccactgcatgcattctcccttggagaaagtggagctttagactcttcagaggataagaacagagtccctggaccaagagacaccagccatgatgaaagaagtactggactgacaatggttgggggagggttaaataaacattacataataattaatggtgaggtgcctcccccagccttctttccccacttaagctcgcagaactctgactaccaggctattacttgaaaaactttgttttggagaagctgaccagcctgagaggaaagtcttgaaggcagtgacatcagggtgcccacaaaccagacaggcaggacaaatcactttccaccacagggtctagtttcaaacagaaagtcaaagtgccccatgccccaactcatgaacccagaataccagtgaccttctgagtgctccactcttaaatgtaagaccacctaggatccccagacatcagaggggaacctccagcataaaagacagccaaaacagaccacttagagaaaacaagacgaagcagggaggggaaaaatgtcaaaaccacctttcagaccacagagaaataacaaagagtattgtgtacacaaaatcagtatgtttttagaaaattaatagaatatgcagaaacaaagggatcttagaataaaaaatgtgataggagctaaggactgcagtcattcataagcctcacagaactacttgctatttcaaactgcgtgcaccatgggtacaatgaaaagctgaaggaggcagaagagaaaacatgcacaagagctgatgaagtggatcccacacacagatctcggctgtcaaccttttcaaatactcctgtggaggaagcaggacggactgctgggagatgagagagcaaaatcacgggcagagaatgtctgaacacctctacagagagaagacaggaggcagagaatgaagttggaggagtgggtgacatgccagtggctcaccaacccagtgggatctggcctctggtggaggctgacccttagggaggaaaagcacactttctgagctggaaagctgggggagggtcggggaacagagtgactgactgtggagtcctgactgagaggggtctagggaccagagcttcccacaaaagacagacttaggggaaacagaaggactgagatgattccgggtctctcatggttgcctgtgtttatcctgcagtcatttttaagacat

SEQ ID NO: 57094 - DNA, 801 bp, Homo sapiens
atgaaagagtgttaatggagagtgaggagtgcaggggctcccatccgctatggccttcctacattactggtggacggtgcaaggtcagaagcctgggtgcagaggctgcatgtgctcctgggcagggtaggggctatgacctagtaacactagtaacaatagtagttagggatatgacctagtaacattagtaacactgctatgttacatacgatgggagcccaggctagagtgcagtggtgcgatctcagcttactgccagctccgcctcctgggttcacgccattctcctgcctcagcctcccgagtagctgggactacaggtgcccgccaccatgcctggctaattttttgtatttttagtagagacagggtttcacygtgttagccaggatggtctccatctcctgaccttgtgatcttcccaccttggtctcccaaagtgctgagattacaggcgtgagccaccgcgcccagccccctatttccttctttctgttgagagagttttgctggggaaagaactgcaaccttgcttctcactctccacttttcctttccctccttccaccacaaaggaagaggagttgtaaagtgacaggtcaaattctggactctcctgggaacattagaaagtaggcagatatgctgccacctaggtgtaacattccctgtggggctgcatgtgtctttgtcttaaactgctcagactgttgtcactaagtgccaaagactgagtggtttaaaccttagaaattcatgtctcacagttccagaggctggggaaccaaggtcaagttc

SEQ ID NO: 57095 - DNA, 723 bp, Homo sapiens
cagtgcttggcacacggtaagcattccacatttactgaaggaaaggatgggtgaatggatggatgagtgctgggaggctgtattgtaaataacaaaartgggatctgaaggaaggtatgggactctgaagtctgcattccttttaccttttgctatatttttctgtctcactattatattttgttttctctgggcctttttcttcagtcacacttttccaagttcatgtgtgctatttcttggactggttctatttatttagctggaggcagatttgcatttttaaagttcatgtgtttgttttcgagccaaggtcgtttttatgtgtgtcatttctctgggccttcacttttcacgttttatgaccatatccagaatttcccacttctccaagaagtaactgggtggttgggaggggggacagtcaagggtattggtccaatgggcaatgagatgtgggtgagattggggccagttcctgggaagcccctctgaggcccccacacctccatgcctccatggcctccatgggcacggatggcaggcccagcacataagcctctctgccatcatcccaccccaacccccacttggagaatagaggtcaggtctgctgtatcaactgtcctatcttgaatgctggtagttgtaatagagtgaacgagagctgtatagggtcttataccagcaatagatgcttcgcccagaaataacacatcactt

SEQ ID NO: 57096 - DNA, 595 bp, Homo sapiens
tctttacatgaaagagcgctttatggctcaccgagtgtttctacatccatgatctcatttgaytgtcatgacagctgtgggcacaagtcagtgctgagtttaccctgaggactcttgctgggccagaagacatttaggatgctctgacttagctcttaaggagtctggttgggaagagttatttaagcatatgagtgaacccttgagtgctaaactgagaggacacattcccaaaagggcaggagttcagaaaagaaataatcatgaggagttggggaagtcccagatggctttgataaagcagatgggggttgagagggctcttgaaagagtttacgttcatttattcaacagcaagcatcaaggccctggtgtaagcccagaagtacagtgatataaaagcagatgagttgcctactctcatggagctgactctctagaatggaggggagacagataaactaaatgaacacaaattcagataataagtgctctgaaaccaataaaacaggactactttagattaggcagtcagggagggcctccttgaggaagtgactttcagacaaatatctcagtcacaaaaagtagctag

SEQ ID NO: 57097 - DNA, 1131 bp, Homo sapiens
actaagtccttctattgctttacctgctatgggggatactgtggatggtggtgtgttgtggtggtccacagcctgtaaaggggagccacatggcccagacccaaagcccagctctgcctctgtgggtctgtagccatcatttcgagctgttggaaatctaatggcaatggctgaaaagctctgatgtgccaataaatagtaaccggcactgttaacactaacaacaaataatcatatgactatcatcattacagaaaaatcattcttcggtagcctctaggcttcctggccttgccttgaccttctgctctctaaagggaaatcatccagctgcagtacaggaaatggctgggtggtggctttcgtgtttttttgtacgttcaccaggcttgtaagtctttctgtaaattgctagcctcaacttatttgtcatttagattatgtatgaaatattgtatttgaaagcctgtatatataaaaatgaatatgaaataaaaatataatttctttgcattatttagtcaaaatattttgtttctcctcctcatgataaaaataatctggcctaaattttatcagtatacgtttttacctttagaagtatcagtacttttgcagattgagcatctctaacctaaaaatccaaaatctgaaatgttccaaaatctggaacgttttgagcacctccatggtgctcaaaggaaatgctaattggagcatttcagattttggatttttggattagggatgctcaaactaagtataatgcagatactccaaaagtagaaaaaaatctgattttcaaaacacttctggtcccaggcattttgaataagggacacccaacctgtattcactgagggttttgagggaggccatctaattacaacttcccactttaaagtttggtggtcgttaacgctaacagttcaatgtatctgatggtcagaccctgggcagcagaagcatatcatgctgaagcccacagagcagccgaggagcacggctgtctgaagagccagcagaacaggccctgagtccctcccgcgttgagtccaggtccaacagtgcccagagcccaagggtgagccctcaatagaggcctctgccgagccccacccrtcctagcta

SEQ ID NO: 57098 - DNA, 700 bp, Homo sapiens
gtaagagcccaaattggaaacgaccccaatgttcattaacagtagagtggacaatactgtacccacacaatggaatgctctccagcaccaagaatggaccatatttgtgcaagtcacggggcgaatctcaaatatgatgctgaagagaagaagccagtcttgaaacagcacacctttgcctaaagcatggaaccaggcaagacaaatctgtgtgctaggagtcacgatagtgttgtctttgcctgggggtggcgactcaaaggggctgaggaggtttctgggatgcaggtttattctctctcttgatctggctgactaagggcgtgtcctgttagtgaaaaatcatcatgctagactctcaggatgagtgcacttcagtgtccagcaattatacgttcagctgaaaccatacaagggaaatccgtgggacttgtgggctggtgggtgaccccgtggggccaagctgttcctccagagagcaatcttccattctcctgcctgggtgagccatttgtgagtggactgggagtggggcaggcgtctcttgactccctgtgcaggcttctcacacactccactttttcagtaaagagcctcacttctgccctgagaaaggctgagctccccacctccagagagtctgggttcaccctccrcagagaataaacctcccatcttcaactgggatggtgggggatag

SEQ ID NO: 57099 - DNA, 1748 bp, Homo sapiens
gcaggtgccgagcatggctggctgcttgtgcacaaactcaagtacacatgcacagacatgaacacatgtgaatggacaggtacacacacacatacctatgcacatgcttgcacatgtgtgctggcacaccatgcactcacgtgtgcacacacatggatacacacgcaggatggacatgtgcacacagacccatacacacacacttgcgtacttggacacacagttcacatgaatgcacacacattcgcacagtcatcctgcatggtggacaccgagacccaaggagaggaatgcacaatgtcatgtgcactgtcaggagctcgttccctcatcccaatccaaagcccccagaaaacaatgagggagaaagaagtggatagaaatggttgaacatgccctggtccttcaggggtgctggagtttggggagtagagccccatccactggagccccccaggcctggcctccagcccctcaggtgaagactgtagggactcactcacaggagcctccagcctctacctaaaggtgtgtagctgtgggtgggggcacagaggggtggaagtcggagctgggaccctaaggatggataggagctcaccaggtgaggtgtgtgtgggtgcctcacttccaactggtctggttgaagaaatcccaaaacgcttcccccacctccctatcagtgcctcagactttgccactagcacgtctgtctgctcctctccagttacaaagtccattcctgagtcttgccctgtggtccctatggcagagtctgtagctgggcctgggatagcttctgaagctgccctgaggggagagtcagtgtaagccagtgctcccctccccaggctgggaagagtcaaacctgccacctcaacttggctcaaaggaaagggaagccaggcgctgacagcagatcatttgcttcccagaacaacgctctctcacagagaagtcctgttgcaaatgacaaaaacccagttcaaacaaaaagggaaacttgctagctcatgttaacttcaggtctggctggatccaggtgctcaatgaccttgcacagtctctccatcccttggctgtgtgcctctgctggctctgctctctagaaccctctccctgtgtggaggtgaaggtggtgggaaggggggaacaggaatcgttgatagagttggggagagtggttcttcagaaaacttgaaaagctatttctaaaagaagacgggtggatgcagagtgggccacaggtgttccctataaatcttagacactgctttagttgttctgtaatgaggaaactgaggctcaggcctaagggaattgctggcctttcttggcaaccaacaggaggcagagtcaggatttaaactgaggcccccaggcctgcagagcctgtggattttcctgtgtgcaccgggctcccttcctgcctgaacccactacaggaggtgccaagacccggactccagggagatgccagcaggcccggaaatgctgaagaagctggtaatggtccttacatctcattcattcactagtcctggyccccaaacgactccctacctgcctataccagggaccacaggggtggctaatgggagcccacgtcaggctggtcttgagaagctggcaggctgtgcacacactgtgttgcctttgggttggaggcctgtgtcggggctgggtgggcacccaggaggagggctgcgaggactcacacagggcttaacccttgagtaatgtggaag

SEQ ID NO: 57100 - DNA, 696 bp, Homo sapiens
catgagtgggcctgggccgtaggctccacccagcagaatcatgagccacataaaatgggcgttgttttaagctacgaggtctgggggtggtttgttacccagacagagccagctggtacaggctcagacagcatccagcccacaggtgtctgtgtacctgggagtctgtttcccaccccaggatgcgtccccaacccccaaaagtgacacctggaggagaggatgaacagctgaaagttattcctgtgagatctgaagttggacaaagccctggaagccaaatgcttctgagggagtcagaacagcatggtggataggcctgacctgtgacccctcaccmctcctcttagtaggcccctccctgaagggctcaggccagggtgcccagtgcaccccacccctcctcgccgcatcacaccacatggagtctccttgtgcatttccacaggctgacccgggactcctagaaagggagtctcccaaagctgtctgtctggctgctagtatactacccgcccagccagtaggacacgcccaagccccaacccaccccttgagctctgagtgtgagaatctgagaagggaagtttgtgctgccaagcctgagtcaaggctgcaggctttcagctccagatggcatggggactccccaagggctctatcaggaaacccaaggtcaccggcagagcagttaga

SEQ ID NO: 57101 - DNA, 1705 bp, Homo sapiens
taatctgatggacctggctctttgagaagttaacaaatcaaaaccagtttgatacattcatttaactaatcaaaatttagttaatttcttatttgaaaaacttttactaaacatcatcacgtgccagcgactgtgcttggcacatgtactgtaccctgtttcccatcttcacaggaagctcagctggcagatgccattattattaccattctgcagatgtggaaatgaaggcaagttcattgacctctcagactcagtttcccggtctgtaaaacagggacgatggtggtgcctacttctgtcagcttcttatgaaaaccagataaatgtgataatccacatttgcttacagacacaccccagggagaggcaggtgggatttgaacccaggtgtggatgagtcttaccttgctcttttctgctgtactgagatacgtatctctcagaatgtacaggatgggggcattcagctgcttgctgcttacctgactgcctggctgtcccagtgctggctgtgcccttccctgaatttcagcccaccacgtgtgtgtgtgtgtgtgtgtgtgtgtgtgtgtacacatgcttgtttcctaagctgtggcatcttatgcaggcattgactcccgtgtgtatgtgtatgtgtgtgtgtgtgtgtacacgtgcttgtttcctaagctgtggcatcttatgcaggcatttactcccatgccagtgcttacagagttctgtcacctttgtaacaagggaaacaaagatgcatggagagagagttgaccaacagaggttagtgtttgtgtagcatatgggaatggaaagtcaaaacaaaagacgccgggtggcagttttctctcaagaccacaccttggctggttctgtgggtggtggggtgagccgccattactggtggcattgtgggtgtgataaagaggctgcttctgtcttgtccccagggcagatgtcacacagggaccccagtggtctgctgaacctggatggggccttgagatccttcttgccactgcgctgtagcagctcatctcagccatgtggggttggcatccaaggtgaaacccatttgacatccctgggccagatgatttctgaagatagagttttcaattctgaatctctgttctcagtccctgatttcagaacacagaatctgttaagctgtttgtctttttatgtcctactttctgtctagaatgacctccctctttttttcttacaaattgctctgtttaaaatttaacttaagcatcttttctgcttactgtttgtcttacccagaggtcaacctaatatcttatatatctccgtatccccaccatccaagccaggacttagccttgagagatgctcaccaagtcagtgtcagatgggtggatgaactgacacccattgtgggatttaaaaataagtggttgactgtttaagcacctactcatgcagcagggctctgtctggatcaaggccctgaacggtacagggccttacctcatttgaggcagggccttgcacaaggcaggagccccacacagggcagggactttgtggtaaccgagggtacagatcttagcagtgctacctgacgtgtggcctgggtcggatgacataaatgctgagamacacttcccttacttctaaaggttgttttgagggcatcatgaggtaatttgttaagcctctaggaaagtgtcaggca

SEQ ID NO: 57102 - DNA, 741 bp, Homo sapiens
cacaccccaccactgaaactaacttcagatttatcattctcttattagaagcagtgcattgaaagggcaccattaaaaaagtgaaaaaattcacataatgtgtgaaaaattttgcaaatcatacatctgataatggattggtatttagaatacatataggactattataattcaataataaagagacaaataatcaaatttaaaagtgggaaagggacttgagtagacatttctccaaagaagatatacaagtggccacaaagaacatgaaatgatgctcaaaattcctagccctcggggaaatgcaaatcaaagctgcagcagggtcccctcacacctgctaggatggctagaataaaaaacccataagaacaaatgctgacaaggaagcagagaaactgggaccctcattgattccatacatggtggaatgtaaaatggcrcagatgctttggaaaatagactggcagctccttagatgattaaatatggagtgaccatgtgacccagaaattccactcctagctctttacaacagagaaatgaatgttcaccccaaaattgtacctgaatattcacagcagcattattcagtttagcaaaaaagtggaaatagcccaaatgcctatcaattgccaagtggataaacagtatgtggtgcaccctacagtggagtattattcagccatacaaagggaaatacttacacataccgcaacccgggtgaaccttggaaacatg

SEQ ID NO: 57103 - DNA, 2216 bp, Homo sapiens
agtgagttgagcatttatcttgcagataagagggaaccattgaaaggtttgacacagggagagagggaacaatcaggatcacatttgtgtatcataaaaatctttctggaggctgggcatggtggctcacacctgtaatcccagcactttgggaggccaaggcagatggatcacgaggtcaagagattgataccatcctggccaacatggtgaaaccccgtctctactaaaaatacagaaattagctgggcgtggtggcacatgcttgtagtcccagctacttgggaggctgaggcaggagaatcacttgaacccgggaggaagaggttgcagtgagctgagatggtgagatcatgccactgcactccagcctggtgacagagtgagactccgtctcaaaaaaaaaaaaaaaaattctggatatgaggtaaagaaagccatgaaaggtggtaccagtgcagtttttcccaggagaatgttgatgactcaaccaagccagtggcaatggacagcaagaggctgtgggcaactcaaaatatactgaggacttcaagtcaacttgacttcacaactccagtaaggagaaggaagagtcggaggatggcatggctagctggtgcccttgtctgagttttggtacatgagcaggttcggaagaaagttgatgaaattcattttgaaggtgtgttcaaggtgtctgtggggaggcttctaggtggtgatgtctaatcaacaaacacaggttggaactcctaaaagactattacctggggctagaaatttggagtcataagccaaaagctgggcaattaaaccacaggagccaagcaggggaccagagacaagcagagggcrgtgagtgggacaccccagggccttccaagaggcatgttcttgtcaataaatacactaagcaagggagcaactacagcatccccaccaagggtgaaacataacaggtggagagaagccctaggctgaatgcattaggattctaatgacatgccacaaactcctatcaggagacgtggtggaagggagctggcaaatatatcaactcacataattggcatttttgcagcacacttctggtgcagaagagctgctggctttcagaaggaagggcaggatggggtctgatcactcactttttcaagtctactcttaggatcttctgtctgggaagccagctttgtcaataactgtttttctctgcctcagggccatgttggatctacctcaacagttttcagatgacagcaccaaacaaccctcccagcttctcccaaaggctgcctccaatttggatgtaatcagaatccaaactggctcctttccatgtctcctagtaggaagtgaccctggaagctgcaaagtcctcatttgcaaactgacagtcactttttcagtttcctaggccaagatgaaaaaggctctttaccttccaagataaagcccccccgcccactagagcaaagagaaatcacacccacacccagctgacattcattttccattttcccagcctgtcactgctgagaaagagacagctgctgctgccaccacaggcagagagagagagagacagagagagagagagagagagagagagagaaaatcctttaacctcttaccatattaagtcacagaaattttcttgcaatgtgtcttcctgtcatttactcaggaaggtccctatgacatagttttgaaagattttacagacagcagaaaaacaagagtgttatcccaaacctcaatcaactaagcaatgtaaagacataattcctgaaattcttgcccacaatagtttttggaaagaaagcactacatttcactggttgtttccaaactgattttgtgtgtgtgtataacactttgctgtggccatctccagaacattaggttgtctcccatagtgtcaatcccttctgtccaaagaattacatccacttcttacccccttacttagtgtaataagctcaactgtgtcctcctcaaaaaaatttatgttgaagtcctaatccacagtacctcagaatgtgaggttgtttggaaacagggtcttaccagaagtaattgagttaaaatgaggttatgatgggcccaaatctgatatgactggtgtccttataaaaagggaacatttggacacagagacagacatgcacagagggaagattatatgaagacactcagagaagatggccatgcga

SEQ ID NO: 57104 - DNA, 528 bp, Homo sapiens
tgcagaattctaaagcaaaacagaaataggtagaatggattatggtctctgctgatacagacaaaaaaatactataatttattatcttgttaaaaatgcgaactaattaaaacaaactatatggatgaagttaggcagaagaaaaaccattttgagcaagaagcctctacaggaagaaaaccctccactctgacaccctttaaaatacatggtagttacagacagagcagaacatagcaggtggaaatactgtcaggagggctgtggggcgtgtttataacaaggcaggyacctacgagtcacccatcatgacttgctaacgtctggatcattttttctggggcagcatacagtatttacatacttcagggacctaactcagggttagtggaggggcttctcttcccccttcccaaagtgcaagataattttataagccccttcctgtgggagttgagctggagcgggggaggcacacaggcacaggtgggaccgtgggggcattacctgacggctcggatggcggcc

SEQ ID NO: 57105 - DNA, 1385 bp, Homo sapiens
ctcagagaggggaagtgaccagctcaaggccacccagcaggacagtgacagagcttggctcacatgggaacccaggtttcctggctgtagaggaaggagaagttactgacgtgtgtgagctccatgctccacagtttgcagggggcggtcacccatcttttccccagtccctgcagcacggggcttgttgtcctgacactccagctgtgacctctgcgacagcatgcccttgtctgcctgtgtcctgctgcatccccgcacttaacacaatgcccggcacacaggaggcgcctaataaatgcaccttctaaggaagcagtctagtgggagctgtggtgtttagcagcagaggcgttggagcctgacagacctgacgggcgtcccagctctgccacttcctagcagtgtgaccatgggtcagttacttaccttctctgagcttcagtttcctcagtagtaaggtggaaatgataacagtacttacctcataaggttgtggtgaaagttaaatgaggtaatccatggtacttggcaaatacatagccaataaacattattagtagttactaataagagaaggtagtgattcaaaatcatacagcagagctgggatttgagcctacctctctgcaactgtaaaaagcctgaccccttccattatgccacagtgccttgggttcaggctgggctgaagtgtcaggggagactcctggaagaaggggctggagctggacgacaagaaggaaagaagcattccagatgtgaagaacagctggaacagaggtgcagcagttgcgatgggcagggtgatcgtggaacacagggaggggggtggtgaggagggytgaagtgggagatggaggattgaactgctacatgatgggaaccccctggataaggcactcagagggtcagtgagcattattagaggcaggacagatggccctcgccactcaatccctctgaatttcccaatcctctgtcccgccactcccgctaactctacagcccctctcagttctcaccatctccccttcccatttgcccatgctgtctcctctgcctggtcccaggcccctcccatctctgcctgttgagccccctcatccttagaggcctatttcaaaggatactataacccccagggaaccttccaggcccctagacagaagcatgacagcatgcacagcagcatcccttcaggtgccctggagacacaccatccttcatgcatcttgctgccgtcttccgttttctcaagtgtgacttttctcagtctgctcagccccaccacgtggtcgtctccagtgccccatccctcggggcgcacccagttcacactgacccgcctggctgctccagcaagaatgaggaagtggctttgt

SEQ ID NO: 57106 - DNA, 1239 bp, Homo sapiens
gcatgccacattttaagccagatgttaataaattgaagagcatcaagaggcagagtggtgcagagcctgggaatgttgttacatgaacgcctgaaagaagtggggaagcctaatttgcaaaagagcctaaagtgaccctttcctgggatctcatgggctatttcaatgagacggggattctttaccagaattcagaattcagactactgtgtgactgttacaggaaggcagattttagttcaatgtatggaagaataattagacctgtccaaaaatagaatgtgcttttgttactggaaatattttgtcagttggatgaacacgtgctgtgaaggggagcccacatagagtgcaaggtcatacctgctgacctctgaaggctgcacctatccaaagctcccttagaacatcctggaaaccatgtatctctgccaatactgtgtacagtataactgaatttagggctgtatttatgtgattttcaaacaaccaaccagccatacaaagtagattaacaacgtgtccactartacatcagggcatatgtttatttcagcaccgggattttgcccatggtctctgctgcagaagcaaccagaaatcacaaggagtagtttttgttttttgtttttgtttttgtttttttgtgacaaagtctcctctgtcatccaggctggagcacaatggcgcaatcaaaactcactgcagcttcgacctcccaacctcctggactcaagtgatccgcccacctcagcctcccaagtagctgggactataggcgtacaccactgtgtcgggctaatttttgtaattttgcatttttttttattaacagagataaggttttgccatattgtccaggctagtctcaaacccctgggcccaagggatctgcccaccatggcctccctaagtgctaggattacaggcatgagtcactaagccaagccagtagaactcttaactaacccttatgagagcctctcaatagcaacggaaacatggggacatttgaagataagattacctttccatgcaaaagagcagcagcttggtgtcctttgttgattctaggaatatataaattgcaatttcagagtccataattagatgctttgaagaatgagaatgccaacattgctagtcttggtacattaattaataaatgttagaagttacttggcacttcttccccttcagaaacaacagcaagagcatagggcaggggtcctcaaacat

SEQ ID NO: 57107 - DNA, 689 bp, Homo sapiens
agaatctttccatctgtttcttctgtctttagacattgtcttgggcagagtttactgagcacacactgactatgtgttcagccatgtatgaggtcctctgggaacccacaaagaaagtgaacagtctatgtaatatagactcatggcaaaaggcacaaacattagtatatgcataaacaataactgatttacggctatacctgtgcatgagtgaaatgggtactaagaggttatttgatgacaataaattccaaggataatcagttgttcatgatgaaatatgaaagataattttttataccagcttaaatcttttattcttgcttaggagtttcctccctcccaagacagcaaaaatgtttatgatctgttttacatcattaacaattcaaacatgaatttatgaaatgggtctgcgtatctatggacaaaactattttgcaaaaatggtaagaattatttaaatttctaaacaaaattggatgatcccacattagtatgatacccatgctgtctggggatcaaaatgaaatcgctccccgaagaagtatttaagaaagcacaagagacgtcatcccaaattgccagtgtacctatttcagacagatgartattgcttaaatgccatttttaaaaggcagaaagaggtaacaaagtgtaaacatatttatttttcctttaagaaggaa

SEQ ID NO: 57108 - DNA, 595 bp, Homo sapiens
atccaacttattttagttactttgcaaattttaaatatacacaaaaaagacaaaatagtataaagatccatagaactaatcattcaacttcaaaaaatatcaatttatagacaatcttatttcatctctatcctacttactaatctccayaccaccccataatatcttttgatatgactctcgaaaatatgaaaattctttcttaacatacatttctcctaaaaatttaaaaattttgaccaaatattcagtattcaaaagtctgatttgtgtcatgttaggaatttttaacagtttgtctgttaggacaatccaagtaagtcccacaccttgcaattggttaactttcttttaattcataggttctctctcatctctttgcttctcttctctttcttctccctcttctcctcttatttgttgaaaaaaactggggccgggtgtggtggctcacacctgtaatcccagaactttcggaggccgagatgagtggatcacctgaggtcaggagttcgagacgtgagccaagattgtgccactgcactccagcctgggtgacagagcaagactctgtctcaaaaacaaaaaaacaaaa

SEQ ID NO: 57109 - DNA, 843 bp, Homo sapiens
acaatggagctactggcccaggaagaagttcaaagccccagaaccaaaatgagtgtagacgtgtatgggcagactggggacagaaagaaggaatttcatttcttttccaaaagttaaccaaagaccttggagacagaatctgtgttgtggtgacaacattgcctcagtcctttctggctcctgtggctcccttcatcttgttcttaaatcagggagctcagtatttgcaaaaagtgcaaggtgggcaagggctttgatccactgcccctgacatgtggaccaggtactcttgataggatggtcaacgtgtaacaagactgtgctcagaaaacgaatctcagctttccaaggaagctgaaaatgtgagggtttttcagaaacaattttagcaggtgttttcacagcttcctaatcaccatcactccccgtgaaaattgagtattcactgagtggctaatttcccctgatgaaaacatcgtggcttcaattttatttgcttcaggttttcacttagaactactttgataaagcatagaattgtcagagcatgaaaacctgttttctctttccatatgacaggtgttgaggtctcatttacaaaactctctcataaggaactttttgcaatctcttctaaacagtgaaatatggaagaactgtattagtctttttggaattgcagtgtatgtttaagccagtttttttttaattttattttactctgaggtgtacccttcagaaaatactttttttcctttttagaaacaggaccttgcttcacccaggctgaagtgawgcaatcctagctcactgcagccttgaccacctgggctccagggatcc

SEQ ID NO: 57110 - DNA, 1405 bp, Homo sapiens
tgtaatcctaacactttgggaggccgaggcaggttgatcacttgagctcaggagttcaagaccagcctgggcaacatggtgaaaccctgtctctacaaaaaataaaaaattagccaggtgtggtggcatgtgcctgtagtcccagctacttgggaggcagaggtgggaagatcggctcaggcaatcaaagctgcagtgagccaggattgtaccactgcattctatcctgggtgacagagcgagaccctgtctcaaaaaaaagaatcttcagtagatttattttcctccccggctcacagtatgagtagtgttggccatttaagtatttatttattttgaagctcgcaccaacaggtaacttgttccagaacatagctagaatatggtttcagatgcctgccccttagaaactccagagcgtaaagagaagtctgtatctggatgtgcatgtgccatgtgcaacatttgattggcagcagcctgaatgtgttaagtccccagtttctctttcccagacagcagagtatgcaggaaaggtagtcattcagctccattctggcttagcagtgtaaagcctgagagggaagagatggagaattactttttgatgccttattttagtgttaatgacactattaggctctgcagataatttccatcaaggaagtcaaaggctttgagacaggagcctgccttattctcagccagattgagaaattgaccaaatgactataattcttgtgtgtgcagggaatcttggcyctcaagttggatcctgtaggtgggttctataagaaatgccaagaaattttaaagtggtggtttctgaaaacaaggacatgcaattttattttgcattccctcccctgcttttgaggcagatttcctaacaaatgctgcacaggcaaagacccccaccccacgccctggcggcacccctctcttctaccctgtatttgaacctttagaatgcagccagattggagagtgcctcccaaatggtgtatggtgaggacatttttcccccagtgtccaatccatcgcggatgatatctctgtaaaatacaatagaaatgatctagaaaaataaaatgaaaatgacatacaatgtacaattccaaatcatttattagtagattgaacagacttgaaatttctctgtcaaattgtaataaagtttctaaatgctatcagatttttttcttaaaatagtcacatactgttaacagccatgcacatactttgagcagcatagttttagagcacagacagaccttgtgatcttttcttctttatttccatctccttttccccaaccctccacccgaaaacttaacagtggcgcaatcttgggccactgcaacctctgcctcctgggttcaagcaattcttgtggtctatcctc

SEQ ID NO: 57111 - DNA, 1298 bp, Homo sapiens
gggagggagatggtcacttgcctctgttgatttcaggggctttcctctctttagacagtctcacaaagtgctgtatgtaagggtcatgccagtagccaatgcttactgcaaacctggaagggagaaaaaaggaggaaggtgagtagagattgagtaggttcagaccaaggtccactgccaagttcccaggaaccagatcaaggaactcgacgaaaaccaaccatccacctcaaaaggccaagtgcacatttagtgccctgttacacatgcgaagacgcagccatccattcatctttatgttcacgttacaccacccatcacattttccacagtgggccttctcactcccttccctcatattgctaattcacttcccaggaccctacatagcaaatagcctcacttcatgcttcatacagaagatgtgcagccatttattcactctgcaaactcakggccagagctagtcagttaattccactaaatgaaaaagcctgtgcccagaggaagggagacttagaaacacttgacaaacagcatgaattaaccaagtgtttctcctgactctgtattaggtgccaatcatttcactcttcttagggaggtcatagtggggaaactaggaagaaatggacaaagcaagcacgaacaaaacaatgtggaaaatgccacagtagccttaattctctctagccagtctacaaggaattaaggcttcatctagcacaggaagccttcttgcaaccatgagtagaaccagctttaggatgactgaggactcatgaaaagaaccgggatcccgaaggccatgctcagctgctgtgggcctgcagactgctctacctctgaacatcgattttgtgagataagtgccttcacccttttagccaatttgagtcaggcttctgttacttgcagcccaaagcatcctaatgataccctgagtaatgcccccatttcttgttgcctgctaagtaaggtgaaattaagggtatgggtgtgtcatgtctctcagcttctagaagtaaataatacagctttaaatctgctactaaggcttacctctggcctgactacaataagtgttgaattctgcacaatctcccaacctcttccatccatagacacccaaaaggaagcacatgttcagctgctccatgcagcaactcaccacagaaacatggaaaatactcactaatggacacgatctgttatacaagcccagactgtccaaggaaaacagcatacccacacagttttataacaatatacttaaaaaaatggttttcagttagtca

SEQ ID NO: 57112 - DNA, 1298 bp, Homo sapiens
gggagggagatggtcacttgcctctgttgatttcaggggctttcctctctttagacagtctcacaaagtgctgtatgtaagggtcatgccagtagccaatgcttactgcaaacctggaagggagaaaaaaggaggaaggtgagtagagattgagtaggttcagaccaaggtccactgccaagttcccaggaaccagatcaaggaactcgacgaaaaccaaccatccacctcaaaaggccaagtgcacatttagtgccctgttacacatgcgaagacgcagccatccattcatctttatgttcacgttacaccacccatcacattttccacagtgggccttctcactcccttccctcatattgctaattcacttcccaggaccctacatagcaaatagcctcacttcatgcttcatacagaagatgtgcagccatttattcactctgcaaactcagggccagagctagtcagttaattccactaaatgaaaaagcctgtgcccagaggaagggagacttagaaacacttgacaaacagcatgaattaaccaagtgtttctcctgactctgtattaggtgccaatcatttcactcttcttagggaggtcatagtggggaaactaggaagaaatggacaaagcaagcacgaacaaaacaatgtggaaaatgccacagtagccttaattctctctagccagtctacaaggaattaaggcttcatctagcacaggaagccttcttgcaaccatgagtagaaccagctttaggatgactgaggactcatgaaaagaascgggatcccgaaggccatgctcagctgctgtgggcctgcagactgctctacctctgaacatcgattttgtgagataagtgccttcacccttttagccaatttgagtcaggcttctgttacttgcagcccaaagcatcctaatgataccctgagtaatgcccccatttcttgttgcctgctaagtaaggtgaaattaagggtatgggtgtgtcatgtctctcagcttctagaagtaaataatacagctttaaatctgctactaaggcttacctctggcctgactacaataagtgttgaattctgcacaatctcccaacctcttccatccatagacacccaaaaggaagcacatgttcagctgctccatgcagcaactcaccacagaaacatggaaaatactcactaatggacacgatctgttatacaagcccagactgtccaaggaaaacagcatacccacacagttttataacaatatacttaaaaaaatggttttcagttagtca

SEQ ID NO: 57113 - DNA, 659 bp, Homo sapiens
attatgccaaacagaacatgcttgagaagagatcataatatcaacttctggaacaagcaaatctccttcaacattaattccagaggtagaactttttttattttttcctagcaagaaaataacccatttaaagagaataccattaaagagaagcaccagagggtgaattctgaacaaattatatcacattttgatcagtaatgatttgaaaagacagccctcttgacctttttgcactttcaacttctactggccataaaaactttctcttctaaccaagctccttcatttcatgaaccttcactctaacaaagctaggggtgagggtgagggtaagttattaataattggagtgtaaagaagagagggaaaaatctagatcttgggaaaagagtgctgtgtgaaattgtctaggttgtggcatattggttttctcctttgactgtgtaagagttctttcactttaacttcttatgatggtcatgccagtaagagayaaaaaggagagaaaatttacctcttaatagaatgatgtttatgattacaggtgaaataaggcattttaaaaatcagtataaaggcaaccttaagcttatacaatatcttctctatcgtgaatactgacatcttttcttcactcactattaataacaaatgca

SEQ ID NO: 57114 - DNA, 634 bp, Homo sapiens
aaagtgcagcaaaggcttagattgagttgtccagaatgacctttataaggaaataacttttaacttgagacttaaagaatgagtaagacttagtcaagtgaaggtattccaggcagaaggaatagcatgcgtgaaggyttggagtggcttttgcagatggaaagtgctgcactgtgactacaatgcagagaattcaagaatgagtggtacagatttatcctggaaagacaggaacagtcagaccatattgggtcctgctggccacatctaaaaaatattagtttggaacaccgttttggtgtaaggcataagagttaagaacagttgctgtattctaggtaaataatttatttcattacctcttccagcttctagagcttgctcactttcctcattgtctcatcttattttgccatcatgaagaccattacattgcttctctttggccctttttcattatcccctctccagggatctctacctcccctcccctccctatccttcccctcccctcctctcccctccccttctcccctcccctccccttctcctttcctatcccctccccttctcccctcccctcccctctcctttcctctcctcttctctcctctcctcttcccctttattcccc

SEQ ID NO: 57115 - DNA, 1315 bp, Homo sapiens
tgcatccttgtctatcaaaaaagcaacttgctcaggaattgttcccaggtcctcagctgagggcaagcctccggtaacccaagtcctctgtgcctcaggaaccactgatttccgctcaccatttccgctcaccgtgtcccctccagctctcaccctccttcaggaatttacaaactcttcccagggactgcatatcaagctgattctttgttcaacgtaaccgaaacacctgttggtggtttctggtactttcctcactacctctccccttgacttcccctaataaatgttacgccttcctttttaactggaaatgctttagaactacttttttaaaaaattattcagtgatttagaacacaagaaatagaaatgcagcaagctacctttatggctaacccagcattcacttagttaccaaaataaaacaaggcaaaagagaccgttttataggagtattccagtaaatattgaagtgttgcaatctctaaatataatgtgttaagagctkagcccaatattccactgtttttgtttgttttgtttttttctgagacagagtctcactcactctgttacccaggctggagtgcagtggcgcgatctccgctcactgcaaccaccacctccctggttcaagtgattctcctgcctcagcccccgagtggctgggactacagacacacgccaccatgcctgactatctactggtctttcctttagtgaacggtacctttccttggctccaatgacctagttttatcagtggacgcaaatgagtgcctgattagcaggatacattttctattattaataattattggaatgttaaacagctttcttctgcctgttttcccaccatcctaaagactccaagaaagaggagctgaaatacaggctggcattttggtagaatttctatctggatttgagtaaaccattaaacaaaaggtttacagtgagcttggaattcttgctaacttctgaggtctgccctccccgacataaggacattcttgaggactgtttactaaagggtggtatgaaagcagcaaagggggcaaataattctgactctgagtctactctcaaatggactgagggtctgatctaatttgtaaaactaacctggatatacaaattataattcaataaagaaggaaatataattaacctggattcggacaaacctgtaaaacaacgattgactcatttcatgtcttctctccacaactccccaaatttctaaatttaacctgaatctggaacccacgtggattatgcactcaatttccactttgtctgaaaagtaaat

SEQ ID NO: 57116 - DNA, 651 bp, Homo sapiens
gggcacctgagcaggaaatctcaggtgacttagtttgccagtgcctactctactgaagaactaggttttcattcttgagaagaaactcatggaaggatgtgtttcctatcacaggtatacatgctaatttttttgttgaattttcttgttgcgacttatgccaagtaattataaaggttttttttttttttgtcttcttgatgaatatttcatgaaggctatgaagttggaacaggcaagtcctgggtgtgaaaattttatctacctcatttattttttattttttgtagccatagtgtctattttcctattttaagattactgggctgctctctgcctatggagcagccattcttttatccctttgctttcgtaataaacttgctttcacttaaaaaaawaaaaaaaagaaaaaacacttacgtattcccaggccccgtctaaaacctaagagttgtgatgtattggcaggaagagctgaacgttcaagatggttttgtgatgcattttcttctaatctccttttgtacatgtaatattgagcaaacaaaacactgctctcagtttaacaagaaaggaggaagaaagattctaacttctgagagaaaagtctttcccctctatgtggaaggccctgactgaaatgtggat

SEQ ID NO: 57117 - DNA, 566 bp, Homo sapiens
agttgacatagagcttatattcaaataagggagagagaccatgaataagtaaactgatgatgtctgaaatgaaaatcctatgaatagctgaccagaactcttactggtcagctggtcagggcccaaaagaaataggctttctcatccaccatgcaggcccatgtggacatggtagtgcaaaagagaaataaggggctggagtcccttggcaaagcagataaatacctgcaaactaccttttcaaaatggaagccagactgtgacggtgccttttttgaatgtggaaaagcagggcttccaagcaagctggcatgatgttgaaggagatgcagaaacaaccagtctgcgtgatgtatcgagaaaacagcacccctgacccagcaacctcagaagtggtggagcaagctggaaagctcatagaaaatgtagatccagaaaaggctgtacwattgtatcaataaacagcaatgtgtttgaaaatgtgcaatgcctcaacaggcagttgaacacttaggaaaagcttcaggactgctagtgtaaagatgcaggattgatgggggagcact

SEQ ID NO: 57118 - DNA, 566 bp, Homo sapiens
agttgacatagagcttatattcaaataagggagagagaccatgaataagtaaactgatgatgtctgaaatgaaaatcctatgaatagctgaccagaactcttactggtcagctggtcagggcccaaaagaaataggctttctcatccaccatgcaggcccatgtggacatggtagtgcaaaagagaaataaggggctggagtcccttggcaaagcagataaatacctgcaaactaccttttcaaaatggaagccagactgtgacggtgccttttttgaatgtggaaaagcagggcttccaagcaagctggcatgatgttgaaggagatgcagaaacaaccagtctgcgtgatgtatcgagaaaacagcacccctgacccagcaacctcagaagtggtggagcaagctggaaagctcatagaaaatgtagatccagaaaaggctgtacaattgtatcaataaacagcaatgtgtttgaaaatgtgcaatgcctcaacaggcagttgaacacttaggaaaagcttcaggactgctagtgtaargatgcaggattgatgggggagcact

SEQ ID NO: 57119 - DNA, 566 bp, Homo sapiens
agttgacatagagcttatattcaaataagggagagagaccatgaataagtaaactgatgatgtctgaaatgaaaatcctatgaatagctgaccagaactcttactggtcagctggtcagggcccaaaagaaataggctttctcatccaccatgcaggcccatgtggacatggtagtgcaaaagagaaataaggggctggagtcccttggcaaagcagataaatacctgcaaactaccttttcaaaatggaagccagactgtgacggtgccttttttgaatgtggaaaagcagggcttccaagcaagctggcatgatgttgaaggagatgcagaaacaaccagtctgcgtgatgtatcgagaaaacagcacccctgacccagcaacctcagaagtggtggagcaagctggaaagctcatagaaaatgtagatccagaaaaggctgtacaattgtatcaataaacagcaatgtgtttgaaaatgtgcaatgcctcaacaggcagttgaacacttaggaaaagcttcaggactgctagtgtaaagatgcaggattgatgrgggagcact

SEQ ID NO: 57120 - DNA, 964 bp, Homo sapiens
aattaattatagttgatcacgtaatttcttttcttaaaatgttttcctatacattgaagtctaatttccttagcatttaatctcagattcttcattactccaaatagtttattcacaataatgccttatttttttctagtttctctaacttcctcagcatttaattctagtttcttcattactccaaatagtytattcacactaatgttttacttttttttaatttctctatattgaatgtccgtctcccacacaatcttctctgcctctcaaaccacatagaccctttattatttcttctttaaaactcttcttacacattaccgcctcctccactccctctgccttttaaaatgaatgacactcttagccctttttgtgttcccatagcactgtgttcctaactttaatgcactacctaatttattctcctagctgtggttccatttgttctaggacagtatcagagccttgttcaccactgtgtctcagtgtttgttgaaggaatcaattagtaaatatgctgtttatagatgtatatccattacataatatatgaaacatagcaggaattcattaaatattttggagtgaatgaacgaatgattctactaactttatgagtccaagtaacatctttatgctgtacttaagatgtaaaccaaaagtaaagttgtattttaggtttataatcagtccttttccttaggatctattgaccccacctaagtgggaaaacttctctaagtcctaagaagtgagtaggatgcctttaatttaaatggaatgtccctcttagggttctacaggcaaagaattggtgataaaatgtgagttctcttcctgatacaaatacatttcacagaaataagaagtaaatattcaaaggtaaacattgaagaagggaggattctggctttatttaattataaaatgacaaatgggaaagaaccttttaagaaaa

SEQ ID NO: 57121 - DNA, 964 bp, Homo sapiens
aattaattatagttgatcacgtaatttcttttcttaaaatgttttcctatacattgaagtctaatttccttagcatttaatctcagattcttcattactccaaatagtttattcacaataatgccttatttttttctagtttctctaacttcctcagcatttaattctagtttcttcattactccaaatagtctattcacactaatgttttacttttttttaatttctctatattgaatgtccgtctcccacacaatcttctctgcctctcaaaccacatagaccctttattatttcttctttaaaactcttcttacacattaccgcctcctccactccctctgccttttaaaatgaatgacactcttagccctttttgtgttcccatagcactgtgttcctaactttaatgcactacctaatttattctcctagctgtggttccatttgttctaggacagtatcagagccttgttcaccactgtgtctcagtgtttgttgaaggaatcaattagtaaatatgctgtttatagatgtatrtccattacataatatatgaaacatagcaggaattcattaaatattttggagtgaatgaacgaatgattctactaactttatgagtccaagtaacatctttatgctgtacttaagatgtaaaccaaaagtaaagttgtattttaggtttataatcagtccttttccttaggatctattgaccccacctaagtgggaaaacttctctaagtcctaagaagtgagtaggatgcctttaatttaaatggaatgtccctcttagggttctacaggcaaagaattggtgataaaatgtgagttctcttcctgatacaaatacatttcacagaaataagaagtaaatattcaaaggtaaacattgaagaagggaggattctggctttatttaattataaaatgacaaatgggaaagaaccttttaagaaaa

SEQ ID NO: 57122 - DNA, 1042 bp, Homo sapiens
ctgccaacagcagatcttgggatttktctgcctccaaaatcatgtaaaccaattccccataagtctctttgtgtgtgtatacacacacacacacacacacacacacacacacacacacacacatcctgttgcttatcttgttttctggagaactctaatacaagcatgggcttaagcaaaaatcttacagaatgaaattttgatttttcagcaacattcaacaacttagataaatggcaaatttcctaacttcatttgaagaactggcagcaaaacctattaatgttaccttgaaaagataaaaaaagtaaaacaatctagtaatgagagaataattcttaggaaaaaatatgtagcacgagcagcaagaaatatgctagttctgtccattgaacattcaaatatggtgacattggcagctttgataaaatataaaatgactagggaacttagttccaccccaaaagacaggcaagagaaatacctgctgtttctcttggcacagttaatagtaaaaagtatctgccaataaaagcttggaagtatctctaagcatcagaattctaccaaaatttattttcatataattttgattttgtttaaacaaagtaggaggaaatattaaaagacattgttttacaatgataaagggttatcgaagaacgaattcctttttttttgaggagttttagtatgagttgtctcaagtgcatcagtattcccagactaaataataactatttgatgtgcatgcacattatggagcagtgataaatgtgcgctactctcttctttccgaaaacagcagcattccctccattctgatgcttacacttactctcaaagccaacatgtgtattattcattgtaaagatatggttatattctaacggcaatcacattttttaaactacacgtcatatcattgttcatggatagtggtggtcatgtttgaattgttaaaattttaatggttttattctatttatctgcatagatcctaccttactgaccaatttacactgagttgtttagtctattc

SEQ ID NO: 57123 - DNA, 1042 bp, Homo sapiens
ctgccaacagcagatcttgggatttttctgcctccaaaatcatgtaaaccaattccccataagtctctttgtgtgtgtatacacacacacacacacacacacacacacacacacacacacacatcctgttgcttatcttgttttctggagaactctaatacaagcatgggcttaagcaaaaatcttacagaatgaaattttgatttttcagcaacattcaacaacttagataaatggcaaatttcctaacttcatttgaagaactggcagcaaaacctattaatgttaccttgaaaagataaaaaaagtaaaacaatctagtaatgagagaataattcttargaaaaaatatgtagcacgagcagcaagaaatatgctagttctgtccattgaacattcaaatatggtgacattggcagctttgataaaatataaaatgactagggaacttagttccaccccaaaagacaggcaagagaaatacctgctgtttctcttggcacagttaatagtaaaaagtatctgccaataaaagcttggaagtatctctaagcatcagaattctaccaaaatttattttcatataattttgattttgtttaaacaaagtaggaggaaatattaaaagacattgttttacaatgataaagggttatcgaagaacgaattcctttttttttgaggagttttagtatgagttgtctcaagtgcatcagtattcccagactaaataataactatttgatgtgcatgcacattatggagcagtgataaatgtgcgctactctcttctttccgaaaacagcagcattccctccattctgatgcttacacttactctcaaagccaacatgtgtattattcattgtaaagatatggttatattctaacggcaatcacattttttaaactacacgtcatatcattgttcatggatagtggtggtcatgtttgaattgttaaaattttaatggttttattctatttatctgcatagatcctaccttactgaccaatttacactgagttgtttagtctattc

SEQ ID NO: 57124 - DNA, 1005 bp, Homo sapiens
tgtgtatgttcatgacagcactactcacaataacaaagacatggaatcaatgtaaatgccctcaacagaagcctggataaagaaagtgtggtatatatacaccatggaatactacacagccataaaaaaaacagtatcatgtcctttgcagcaacatggatggagccagaggccattttcctaagtaaactaacacagaaatgtaaaaccaaatackgcatgttctcacttacacatgcaagctaaacactgagcacgtaggtacacaaagaagagaacaacaacccaggggcctgcttgagggtggagggtgcgaagagggcaaggatcaaaatactacctatcacatgctatgcttattagctgggtgatgaaataatctgtacagcaaacccccgtcacatgcaacttacccatataacaaatctgcacgtgtaccgctgaacctaaaataaaagtgaaaaaaaataaataaatctttgtatgtcataggacaaaaaccttattttaatgcaacgtgaaacaaatcacatagaaaacaaaagaaccaagtttgagaaatggttagtcagatttactcatgtaaattgatttagagaagcttcagataaaacttccaaccccataaggtttatataaacaaagactctagaggtttaagtggtatcattataataacaatgagttatactaaaatacacaggtaaatagcttttgactgtcattattatagatcattactttctaatccttagaaaatgttaataagcatatcagaaatggcattcttttcttttggcattctatctgttaaactcagaatagaatttaaagcaattataatgaatagatttatctctttgcaaagccaaagtcatagataaattcttttttgttggattaaggaatgaaccagtgtttaactatttaatttttatatagaaaatgatacaacagatgctgccaaattgatataacaagtattactctcttatgatgctttta

SEQ ID NO: 57125 - DNA, 1005 bp, Homo sapiens
tgtgtatgttcatgacagcactactcacaataacaaagacatggaatcaatgtaaatgccctcaacagaagcctggataaagaaagtgtggtatatatacaccatggaatactacacagccataaaaaaaacagtatcatgtcctttgcagcaacatggatggagccagaggccattttcctaagtaaactaacacagaaatgtaaaaccaaatactgcatgttctcacttacacatgcaagctaaacactgagcacgtaggtacacaaagaagagaacaacaacccaggggcctgcttgagggtggagggtgcgargagggcaaggatcaaaatactacctatcacatgctatgcttattagctgggtgatgaaataatctgtacagcaaacccccgtcacatgcaacttacccatataacaaatctgcacgtgtaccgctgaacctaaaataaaagtgaaaaaaaataaataaatctttgtatgtcataggacaaaaaccttattttaatgcaacgtgaaacaaatcacatagaaaacaaaagaaccaagtttgagaaatggttagtcagatttactcatgtaaattgatttagagaagcttcagataaaacttccaaccccataaggtttatataaacaaagactctagaggtttaagtggtatcattataataacaatgagttatactaaaatacacaggtaaatagcttttgactgtcattattatagatcattactttctaatccttagaaaatgttaataagcatatcagaaatggcattcttttcttttggcattctatctgttaaactcagaatagaatttaaagcaattataatgaatagatttatctctttgcaaagccaaagtcatagataaattcttttttgttggattaaggaatgaaccagtgtttaactatttaatttttatatagaaaatgatacaacagatgctgccaaattgatataacaagtattactctcttatgatgctttta

SEQ ID NO: 57126 - DNA, 1005 bp, Homo sapiens
tgtgtatgttcatgacagcactactcacaataacaaagacatggaatcaatgtaaatgccctcaacagaagcctggataaagaaagtgtggtatatatacaccatggaatactacacagccataaaaaaaacagtatcatgtcctttgcagcaacatggatggagccagaggccattttcctaagtaaactaacacagaaatgtaaaaccaaatactgcatgttctcacttacacatgcaagctaaacactgagcacgtaggtacacaaagaagagaacaacaacccaggggcctgcttgagggtggagggtgcgaagagggcaaggatcaaaatactacctatcacatgctatgcttattagctgggtgatgaaataatctgtacagcaaacccccgtcacatgcaacttacccatataacaaatctgcacgtgtaccgctgaacctaaaataaaagtgaaaaaaaataaataaatctttgtatgtcataggacaaaaaccttattttaatgcaacstgaaacaaatcacatagaaaacaaaagaaccaagtttgagaaatggttagtcagatttactcatgtaaattgatttagagaagcttcagataaaacttccaaccccataaggtttatataaacaaagactctagaggtttaagtggtatcattataataacaatgagttatactaaaatacacaggtaaatagcttttgactgtcattattatagatcattactttctaatccttagaaaatgttaataagcatatcagaaatggcattcttttcttttggcattctatctgttaaactcagaatagaatttaaagcaattataatgaatagatttatctctttgcaaagccaaagtcatagataaattcttttttgttggattaaggaatgaaccagtgtttaactatttaatttttatatagaaaatgatacaacagatgctgccaaattgatataacaagtattactctcttatgatgctttta

SEQ ID NO: 57127 - DNA, 1005 bp, Homo sapiens
tgtgtatgttcatgacagcactactcacaataacaaagacatggaatcaatgtaaatgccctcaacagaagcctggataaagaaagtgtggtatatatacaccatggaatactacacagccataaaaaaaacagtatcatgtcctttgcagcaacatggatggagccagaggccattttcctaagtaaactaacacagaaatgtaaaaccaaatactgcatgttctcacttacacatgcaagctaaacactgagcacgtaggtacacaaagaagagaacaacaacccaggggcctgcttgagggtggagggtgcgaagagggcaaggatcaaaatactacctatcacatgctatgcttattagctgggtgatgaaataatctgtacagcaaacccccgtcacatgcaacttacccatataacaaatctgcacgtgtaccgctgaacctaaaataaaagtgaaaaaaaataaataaatctttgtatgtcataggacaaaaaccttattttaatgcaacgtgaaacaaatcacatagaaaacaaaagaaccaagtttgagaaatggttagtcagatttactcatgtaaattgatttagagaagcttcagataaaacttccaaccccataaggtttatataaacaaagactctagaggtttaagtggtatcattataataacaatgagttatactaaaatacacaggtaaatagcttttgactgtcattattatagatcattaytttctaatccttagaaaatgttaataagcatatcagaaatggcattcttttcttttggcattctatctgttaaactcagaatagaatttaaagcaattataatgaatagatttatctctttgcaaagccaaagtcatagataaattcttttttgttggattaaggaatgaaccagtgtttaactatttaatttttatatagaaaatgatacaacagatgctgccaaattgatataacaagtattactctcttatgatgctttta

SEQ ID NO: 57128 - DNA, 799 bp, Homo sapiens
aatgagacttcttctaactcaaaatttctttgtcagtacaaaacaagaatttgtaagcaaaaagcaaagaatattcttttgcctttatttattgatttttctcattatgagaattttttcattctttttccatttcagataatctttggttataactaaatttcttttcaacttttaaattataatacatataaataagtagccatattattttaatttacaaatgtaatttttgttaatttatactatgtttgttctcattttctgttttatgtagttcatgtgaatagtggttgagaactcagtaatgagactacattgatcttggtgagagaaggatgagatttgaataaagacagagggaatgacagatggtgaatgtgaatgatatttaagagacagcattgaaagttcttggtaacatattttctgtggtgatgatggtagagagagcacaggaataatttagtatatttcccagattactgttttgcctgatggtggaaggccttgacgctactttgcctagctttgggtcaatttagattattggttcaatctgtagacatcttcagtttaaagtatttgcagggtcatctgataaagatgtccagtaaatagttatgtggatttaagttggtagtttagaaaaaacaaaaacgaaaaccaagaactaagctatatatctcaatttgaaaagcagagcaaaaaaaatgctatagatgaatccatagatgtagatggatttttccagagrtagtgtatagattcagaaagagacaagaagtgcacttgttag

SEQ ID NO: 57129 - DNA, 817 bp, Homo sapiens
ggttgaatcatcttcaaaagattttacatggcacaatatgttagctgatactcacattcaagtgtgaattatatctaacattctatccatgagcaccgcattttattttacttcctttgcagttctcatccttgagagcttctcttatccttccccagaatctctcctttttttttttttttttgagacaaagtctcgctctgtcactgaggctggaatgcagtggcgcaatctcggctcactgcaagctctgcctcctgggttcacgccattctcctgcctcagcctcccgagtagctgggaaaacaggcgcctgccaccacacctggcttttttttttttttttctgtatttttagtagagacggggtttcactgtgttagccaggatggtctcgatctcctgacctcgtgatccgcctgcctgggcctcccagagttctgggattataggcgtgagccaccacggccggcccccttcccctgaatctcttatgcacagagatctkccaggattctcctcctcctcatccctccctgcacacccaacatcatttccccccagaacagaaatgtcatgtctttaggccagttacaccttggacatttctgactgttttgtattctagaagatcatgcatgagctcctatgcctcacttgtgaacaaaccaaggagatgtctccttgaaaacctttatagttaaaaaattcatcacccttctaaactttctttagaactcagaagactataaacacaaattatgaaaactctgtcatcaagctgcttccaattcctatacctttgtgtgatggatcc

SEQ ID NO: 57130 - DNA, 817 bp, Homo sapiens
ggttgaatcatcttcaaaagattttacatggcacaatatgttagctgatactcacattcaagtgtgaattatatctaacattctatccatgagcaccgcattttattttacttcctttgcagttctcatccttgagagcttctcttatccttccccagaatctctcctttttttttttttttttgagacaaagtctcgctctgtcactgaggctggaatgcagtggcgcaatctcggctcactgcaagctctgcctcctgggttcacgccattctcctgcctcagcctcccgagtagctgggaaaacaggcgcctgccaccacacctggcttttttttttttttttctgtatttttagtagagacggggtttcactgtgttagccaggatggtctcgatctcctgacctcgtgatccgcctgcctgggcctcccagagttctgggattataggcgtgagccaccacggccggcccccttcccctgaatctcttatgcacagagatctgccaggattctcctcctcctcatccctccctgcacacccaacatcatttycccccagaacagaaatgtcatgtctttaggccagttacaccttggacatttctgactgttttgtattctagaagatcatgcatgagctcctatgcctcacttgtgaacaaaccaaggagatgtctccttgaaaacctttatagttaaaaaattcatcacccttctaaactttctttagaactcagaagactataaacacaaattatgaaaactctgtcatcaagctgcttccaattcctatacctttgtgtgatggatcc

SEQ ID NO: 57131 - DNA, 757 bp, Homo sapiens
ggatcccattcataagatattttagaaaatgcaaaactatagggacagaaaacagatctgtgactgccagggtctcctggtggaggaagagttgatcacaatggagtgtgggagaatttgggcggtgatagaactattttatattttatgattgtggtagtggatcaacactgtatgtttgtcaaaattcatcaagctatatatcaaaaagagtgaattctatccttgaatcttaagcatgagggtgaaaaagatattccctctgaatagaaaagcctcagggtaggaggaggttgggaggaagacttttccatgataaactcattgacttattgccaaaatgtcattctacaagtgactcataaaaaataaatggtgttaccattgtaataatggaataagtagatgctgcagtgttctctatacaaatgtgtgttttttataataatatggttataataaaattacwtttgaacacactatataaacttcatggacatgtatttctcaaatgaaaattagctacagttaggtcagaataatctgccaaggtacacagatatgcacaagacatattacaatatgtcacaattcattgggatttttatttcttttgtcatttatttttcttctaggagcacttaatggaaagaacaagtccttagcataaaatttcccaaaccgtaagaacaccccaaaacaccaaacacaagtccttaaaaaaaaagtaaataaaaaactcacttcaattctgagt

SEQ ID NO: 57132 - DNA, 1032 bp, Homo sapiens
ttttgttttcacaaatgtactttgacaggtaattatgaaaagaaaattaatattaggcataaaacaattaatttattcaaacaaataccaatcgccaacgacgcacaaggcactattttagggcctgagatacagagtgtctgtcctcaggagcttatgatatacagagaagcaaggcccaagccatggcagcacacggcagacaagacctgcaacagggagaggtgtcgccagaccccagggaaaccacactgaacctgctgtgtgtcggcagcagggtgagggcaggagcctgggaaatggtctcagagaaagtgatgagatctgaaatgtaagataaaatctgaagctaaaagtaaaatccagcatggtgatggcattccaggcagggggacggcatgtgcaaagtcccatgacaagagacctggggcagctgggacagtgtacaaggctgagcgtggctgccttgtgaagggaaaaggagaaacaagccygacagacaaggccagatgcaggcggcacaaggccaggaggaccagtgctcgaacttcatcttgaggcccggaaactactaaaaggattttaaaggtgagtggggtgggggtgtcatatgccaccttcagaaacatctggttaactggattaggaggtgaataaaggacaaagctggatacttggagatcagctgagatttcctgcaggaatctaagcagaattatgccaatggccagaacaaaggtggtggcaggaagaaagagtgaaccccctgactaattggaataggaagtgtgagccaaccgagaaattgtgggaagatggtagaaggtgttctgagtttccctgcccttcataaatggaaccaactgaggaaacatcttcatcactaagtcaatctacatctgttaataaagagagaaaagcaacacaaggaacgctggatactccaagcatgaatcaactttatcacttttgtctccagactttggagggcaaggggagcataaacaaagactgcagatggcagcaggatcc

SEQ ID NO: 57133 - DNA, 1032 bp, Homo sapiens
ttttgttttcacaaatgtactttgacaggtaattatgaaaagaaaattaatattaggcataaaacaattaatttattcaaacaaataccaatcgccaacgacgcacaaggcactattttagggcctgagatacagagtgtctgtcctcaggagcttatgatatacagagaagcaaggcccaagccatggcagcacacggcagacaagacctgcaacagggagaggtgtcgccagaccccagggaaaccacactgaacctgctgtgtgtcggcagcagggtgagggcaggagcctgggaaatggtctcagagaaagtgatgagatctgaaatgtaagataaaatctgaagctaaaagtaaaatccagcatggtgatggcattccaggcagggggacggcatgtgcaaagtcccatgacaagagacctggggcagctgggacagtgtacaaggctgagcgtggctgccttgtgaagggaaaaggagaaacaagcccgmcagacaaggccagatgcaggcggcacaaggccaggaggaccagtgctcgaacttcatcttgaggcccggaaactactaaaaggattttaaaggtgagtggggtgggggtgtcatatgccaccttcagaaacatctggttaactggattaggaggtgaataaaggacaaagctggatacttggagatcagctgagatttcctgcaggaatctaagcagaattatgccaatggccagaacaaaggtggtggcaggaagaaagagtgaaccccctgactaattggaataggaagtgtgagccaaccgagaaattgtgggaagatggtagaaggtgttctgagtttccctgcccttcataaatggaaccaactgaggaaacatcttcatcactaagtcaatctacatctgttaataaagagagaaaagcaacacaaggaacgctggatactccaagcatgaatcaactttatcacttttgtctccagactttggagggcaaggggagcataaacaaagactgcagatggcagcaggatcc

SEQ ID NO: 57134 - DNA, 640 bp, Homo sapiens
atctgtaagtgagagtaagtagtaatgaaagtgtagtgagaattgaaatctatttcagagttgtgaggtggtgtgagaagagaggatgttatgatagatgatggtattaacctttcagttaataaggataggtgattagagggttaacatagatgatgtacatgatttaagagaaatagtattgtttcaagcaaatttgtaatttgcatctttggatttatattgtgcaagcaacttgtaaaggcatcagtaagaaagttctaaaagcagaaaagagcactatccttttaaaacctctatttttttttcttttttttttgagatggagtctcgctyggtcacccaggctagagtgcagtggtgtgatctcagctaactgcaagctccgcctccctggttcacgccattctcctgcctcagcctcccgagtagctgggactacaggcacccaccaccacgcctggctaattttttgtatttttagtagagacggggtttcaccatgttagccaagatggtctcgatctcctgacctcgtgatccacccaccttggcctcccaaagtgctgggattacaggtgtgaaccactgcgcccagcctaaaacctctattttgaggcatggaaaaggtgtttaaaaa

SEQ ID NO: 57135 - DNA, 3054 bp, Homo sapiens
atgactctattagaaggcagagtcattggaactttgtggagataaaccttactccctaactaaagttggcctcactcttttgcaaattactgaactgaagtgtgttgttttgattcctcatctacctggcttctccctcttccataggaagttatttgccgtattrgagagactgtcagttcttaaattcttttttaaaatactcaaaaacgccgcccgtgtgagccagagaagtctctgtgggtgcttgatttccacaggaaccattcatggtctaggtctcccaggcttcagactggcagcttccacagaatgagcgaaaccctgcaggacagggccaaatctgatggcccaggtatcagtactggattaagaatacaccacttaaagatccaaaggagcaaagttgttaagatactattttattgggtggaatcaggacaagggctaccagtttctactgaacaggaaaagggcaaggaaatgatgctgagtacattgatatacaggttaaagaggatggtgttgcaaaaatgtatgatctgcgtggcctgaccaggtaagaggccaagaaacaaatgggcacagatgccctgtgagatgctgaagatgctgccgtgctgcctgcctgagtagcagagagaacgtgccaaagaggagttgccttttctagagaactgtttagtttgcaactaatacatgcttaatgggggttgatcagtctagcagatattttcttttcgtttcttttttgattaagtaaatttttaatttcagaagagttttagatttacagaaaagttacaaagatattataatacagagaacccctgtgtattccttacccattttcccctgttgttaacatcttacaattgtatatttgtcacaactgagaaaccgatattgatgcattatgcctcactttatgtgaattgcactagcgtttccttcatagccattttttcccaggatcccactactttacatttagaggcattttatgtttattttcaatctaccttaatttttaaagagaaaaatatttgctcacatttattaaaggagtactcaaataaatccccaaaatgtattaatattattttaaactgtagtacactttctccaggcagatcaagctaaattctcttgtgtatgagagtgtacttagagtgcacagaggcgcagtagccaaaccacatggttcaaatcacagtgcaccgctttctatctgggcagcctgggaaaaatacttaagtatttaatccctctgggctttaattttcacatctataaaatggaaagtgatagtacattacctcatggatgtgatatgtacattaaaattaataatacatataaatcactgagaagagtgcctgggtacatagtgagcatggaattaaccttagttgttattactgttactatcgctatttgattccagagtatcctatgtatttcttttcttgacactcatcacacttttaagtatgtctcatatttgtcttcacttccagatggcaattttcatgagttcaaagacattcctacccaactcatagtggatgttcgggaaacagtctcttaattgtccatcctgactgcagagccatcaaacaatgacatgcaatgtgaaagcttgaaggaagagaaagtgaatgaggtgaagatagacagacaagcagataaatgggatatagagacacagaaatatagtcagggaagtacaaaggtcaaatgagaacaattttttaaattgcaaaataaaaactatatttatatgtacaacatgatgttttgaaatacgtatatattgtggaatggctatatcaagctaatcaacatatgcattacctcacatacctatcatttttttgtggtgaacacacttcaaattgattctcttattaatttttaagtatgtaaaacattgttattaactatagtctttatgctgtagatctcttgagttcattctctttaaattttgtttcccagccattgatatatgacactctgtctccactcttaaactcattttctcttcgtgtgttacataaaactgaaagggaatgtatttttctgaaattaacaatttaaaagttcagcaggaggacactgccctttcaagcactggtaatgaagaatggcagaaagaattctggatggaattctcagctacagctttctggtaaaactggcattagtgatgcacaggagatgaacacgtattatattgaaatggcatcaatattccagtttcttgccaaatgccttgaatagctgattgtgcttcatgtacaaatgtacacttgggctctgtgaatcccaggcacagatgtctgtaaagccacatgtatttctgccataaagtccactttaaaatgtgctccactcttatccagacctccagtcaaggaagttgttaaatccattttttttcttttttcctgtacgttgtttttgcctttgaaatattgctaagcagttgtcccacagggtggaggtggaattagcagctgcagcatttcttgtgccaccgtcatctctttggtatgtggcttcctttcactctcatgctggggaagatcccacccatcctttgcattcctcctgagcaagttgtgtcaaggaaagtcgagagaggaagcgattcccatcctatgggtgtcatcaaataggaaggttttaattagtttctcaggatgttctcagtttctgcactgagcagcccttcccttctttggcattaaagcacttggattcttcaagaaacacacaattttgctctgttaggcactaaactctgtgtattcaaatgtaataaggagtcatgaagcctgtctttcctagcacttaccatggttgtaatcttacatttatttgtataattagttgagccatgactgtctcttcactatgctcaggattctaggaaggcagtgacatgtctaattttgcaatccattgtatctgcaggcactcaataaatggtttcaagataaaataacgaacatatgattgaaaaaacttctcctacagcaaacaaaa

SEQ ID NO: 57136 - DNA, 1944 bp, Homo sapiens
ataaaaatcagctgattgtgtcaggatacacttagcaaatgggattcacatgctggctttcatttgctttattctgtgaaaaatgcacacgaaaattttctatcacctgctccctgtgaaattaaggcttttctcttaaaaatgtggccaagaacttgggaatcttgtccttgtgggaacagtgcacaaccacatccagaaggcagcaaaccactttgctgaattttctttacaaatgtccagtgaggtaaactgttttcaatgtgtttctcaagacttacaagtactgtattctatttactgcagatattcgaaacacatggaaagcaagaagaaagatagttaaggggcaaaaaaattaaatctcctgacgcaaaacaaacctttattcgcttattcccaaattgaaaccacagttatgtttagaagatgaaaaagaaaagaataaactttgccatctctgtggcgtctcctagttagaattgccgtgatattgatgaggggctcactttgctgaggcatgtgaggccctgagggtgtgaaatgtgaggaggtgctgccttgtgggctctgcacattggcacctacccaccacaatgtcagcatgaacccagggagcacagggacaatgccaggtgtcctggggacagtcggcagcatcccagtgacttcccctcatactcttggggccagaagggagggaagaccttaaagggacaaatggggcctgcccttccaatcctacatctggaacccttatatgattatgatttaaaaaaatatgaaacgcatcctcccctgcttttatctcaggcctccaggatgttggggagctacagtgatgggggttttgtggagtcatcatcctatgtctcagcaggtgacgtcattaggcagggacccagccatcccggaatccaggattctggtcaactttattgctactgcccagggcagtcactcatcactctctgtctccacgaaagttgctccacccctgacaacaagcctcttctccataaatcaccaatccaccacaccctccgtgaatgaaaggagttgagagcagccaccagacaccagtgccttcaccaaccctccacacataggaccctcacccacatcatccttccacccaggacagatttccaccgtctctaaagccggcctctctctctggatcctggattccatctcttcccaacactccaggctggaattcattcctacaaatgtttcaccaaccactaccactgccaatatgccttcaaacacacacttcacaccagcaatttatcttttattcaaactcatattccaaaatatgataaaagtaatgcatggacatggtaaaaatatttcactcagtacagraagatgttaaatgaagagaaaaagttattcctccattccccctgctccccaccccacagtgcagagacaacctctgtaagcatttccgtttgagttcttcctggggctgtcattacagcactgaacaatatacttacacatctgtgtccaagctcatcacccatgcctggtaggccttggcacttccttctcttctgagagatgaaaggcacattgcaagtatgcttcatccctccacctgccctagattttgttttgtttagcatctttagtgtttctcctattcaccctctgcacctctaaattatatgcttcagataggagttctcagccttgattgataacctgagtgacacatgaagaatttttaaaatacagagaaaagtccttccctcctcagaccagctaaacatccctggcatctgtagtgaaggttttacatcatagagatgattctgatgagcagccaggggtgaaaacgatgaagggaattttttaaagtcaaaagatcaatgtgaagggacaataggggcaggtaaaatcaaggtgagaaaaataagagagaacaca

SEQ ID NO: 57137 - DNA, 749 bp, Homo sapiens
ctgcagcagaagccagctgaatgccccaccctatccccagcccctactcctgggtggagcctgcaggacggcaaggtccctgtgtggaactgactaatgtgtgtctacacagataggcctgagacagcctcacagataatggtgactccagctagactgatggggatggaaatgagataaaagaratggagagtagacagaagaaaaatatattgggaagtaggctatataaatatagtaaagaatgtacaaacatctttgtatgtagaaaaatgtaagtccctcatttctagtacttgatacttgctcaagaaacacctatgttgttcgactttatgatgggatcagtgttttgagggttaccttggaaacttaacctattacctcatttcatgggaaactagattatgaattattagtggttaacttagaaatcaaacatttgcattaggatttattgttagggtaaagtgactcctgggaaggattagagatgaagaacatgaatttggagcaagtccaacctacctggctgtaagaatgctgtcaatgacaggtgacatcaaacctaaatgaaagtggctcaaataatgtagaaattgattgatttccttaaaaacagttaaaagtaagttgactccagtaagggattttttaaaatcaggaagtcaatgatatcaccaaggactaaggtttcctttgtctttctacatgaacaactttagtattaggtttagctttctgcttga

SEQ ID NO: 57138 - DNA, 970 bp, Homo sapiens
gcatgattaataaatgtggaatgaatgaataactagggcatatcatatatctaactaggttactgaggtgataagaaagaaaaagaagatgcgttctccttgttcatttcatcattttggtgtgtcatgtagaaatttggatatggacacaatagaagtgaaatcagccaggctgactatttcaggacagggccttgcagaagagtacctgaattatacactcttatcagcaagcaggggtgatcaggtccaagaaactattttgcaaaactgaagtgtttgaaaactgaggtaggcaccagaactgtcaatttgttgctttataatgagaaataaaaataatatgagccaaaattctagcatcaatgtggccaaagaagctctaaaaaagacattaatggacagataagtcaaaataagagttacctggtaaacatgggtgttaagcaaatgagctagtaagtcaaatgtttaacaaacattatatgattttgtcttatttatctctacattagagatgcaatattgacaatagagcacaaagttgatggccaggctccctccctcccctcctttttttttgtttctttttgggttttttgtttttgttttctgagatggggtctcactctgtcacccaggctggagtgcagtggcatgattatagctcactacagtctcgacctcctgggctcaagcaatcttccacttcagcctccagagtagctgggactacaggcatgcaccrccataatcagctaattttttaaattttttatagagatgaggtctcactatgttgcccaggctgatcttgaattcctgggctcaagtgatcctccccccctcagcctcccaaagttctgggattataggcgtgagccaccacacctaggtataccttaaatcttgttaccattgaattttgtgagcctggatccattgtcagtttgggtaaattttgcattac

SEQ ID NO: 57139 - DNA, 1389 bp, Homo sapiens
taaacagcatctgtaagtacgtataccttttaatgtcttgtaatttcttattttcatataaggcaggagaattcttgaacccgggaggcggagactgaagtgagccgagatcatgccactgcactctagcctgggtgacagagcaagactccatctcgaaaaaaaaagaaaattcctaatttattaaaaattttggctgggtgtggtggctcacacttacaatcctagcactttgggaagccgagatggggggattgcttgagctcaggagttccagaccagcctgggcaacatggtgagacccccatctgtacaacaaatgcaaaaattagcttggcaaggtggcacatgcatgttgtcccagctacttgggaggctgaggtgggaggatcacttgagccttagaggttgaggctacagtgagccatgattgtgcctctgcactccagcctggactacagagtgagactctacccacccccccaaaaaaaatcaagaattgtacacaatttttctgcattccctatgcacagattcaccagttgtttacatttggcctcgtgtactgtatctttcactccctgtccccgaacacattcacatttacttatgtatatgttgttttgtctgaattatctgaaatcaggctacagtcatcaagccacctggctcctgaaaactttcgtgagaatttcttacaaacaagggcactctcttagagaaccacaatactgatcaaaatcaggaaatttaatatccatgaaatactgttctttaatctgcagatcttattcaatttcaacagttgtcacaattatattgtctagagttgtctttcccagttctggtgtctgatcaagaatcacagtttccatgtgtctggtctccttcagtctgaaatgtatggcagcctttctttgtatttcatggcatgaaacatctagaggcagagagcccatttattttatagaatgtatctcagtgtgggtctgtctattgtttcttcaagatagatttcagctgtgcgtctttgtcagggctgccacaaagggaggctgtgtcctcactgcatcattccaggtgagtcctgatgtcagcttgctttatgattggggtgttcccttccatcacttgattgcgawgcaggctgagacgtttttgcactttgagtttttaccattgtgattgtcaagtcatttgtgatgagatgcttcgagactacagaactatcctgttcatcaccattccttgctgcctgctgcttgcctcactccttaatatcatcattgcaaaggtgtgatttttatgctctatttttttttctaaatttatgagttggtctattctgtaagggagagcatttttgtcttccttctagcttttgtatgc

SEQ ID NO: 57140 - DNA, 620 bp, Homo sapiens
gagaaaatttgatgaaggtttaatcacatagcctcatcctcaagctgagaccctaagactgacccaatgtgactgtcaagctaaccagaatatagtcaagtacagtagcaggacaaagagacagtaaagctcagagctgcaaggaactaagtgagaaaacaagtcagaagtacttccacctctaggaagatgaagtagacatacttttccctattcttcctgctaagtgcaactgaaagcactgagatatatattctgaaagacggaaagaagaagactrtctaggaaactcaagatacaaggaattacacagtggctggttttctgggttttcttttagccacacatatcccagacttgtagctgaagaagctggtaacccagaaacaccaacagtcacaatcaaaaaagcttctcaaaagctggctctgtagtcaaagggccagaaagcagcagcctaataagacagaaatattttagtcaataacttttctactccagtcaaacacaactgagagtattgtggctacatgctcttcagcaaaagcctagtgagaagctgaaacatcacctttacccagcggtagagaggtgcttcgagcctcccctgtggtgtcaga

SEQ ID NO: 57141 - DNA, 895 bp, Homo sapiens
ttttaaatccaactttgatttgacaaacaacagttctcagcttttaaaaatgaaacaattttgaacaattcaacttaatggatgccttaggaataaagaaaagcaatcagtcaaatataaagcaaaactgaaaaaaattctaaaacataatctaatttaaaataagaaaacattttacttgtacggctatgtgcataagatcaaaggcttattttgtttaaaataaatattccaaactatcagttcctcaaaacagctacctttttaactttgaaaagcctgaatcattacataaattcaatttccttacattttaagaggtcagatgtgttacttacaatagacgctccccaaaactaagagttatgaattgattaccacctcactataaagcaaattgtctttttaaaaacatgtaatttactatcgaatatctctctacaagacacaatttaccaattaacacaaattacaattatcaagttcagaaatgaatctaatgaatttttaggaggggctttcgtacccagttcgggcaaaggtcaaaagacaagcttyctggccaggacacagtatatatatgcagctttaaccataaaggccagttcagattagaactcagaatatgtaaaagatctagaaactaggatccagaaatcaagaccaacaaaggtctcagcagtatctaagcagaagcttccaaaatgtaattcaccccttcttcatttccctaaattcttatattccaaagccaattattctgggtatctaaagaatatatacctagcctcaaagtcccaaaaaatttggttgcatcaatggttgaaagagcatttttgaaatgctaatttcaaagcctacccaaagaatctcttttgcaaaatctctctgaggt

SEQ ID NO: 57142 - DNA, 692 bp, Homo sapiens
ctgcgtcagcatctgatgaactcatatgtctgtgtcactgagtctggggacatgtgattatgcacctccctgagrgagtgcatctcaagctgttgaccgacaccccgtaaccatgtgtggggtgggtattaacatgtgaccagctggggcaacccagtgaaaccccatctctacacaaaacatttaaaaattagccaggcatggtggcacatgactgtggtccccagctacttgggaggctgagcccttgagcctaggacgttgaggctgcagggagctgtgatcacaccacagcactccagcctgggtgacagagtgagaccctgtctcaaaaaaacaaaaaatgtgaccagctgcatgtctggctgctgtgtgtgtgaacccacatgtgtgtgtgtcactaaatgagcagtggtatctggggaaataagtggagcaagatcaaggctgttctggctgcttagggccacagtgggcccctctgagacccctctgcattcccttgtgagtcctcatgacctctgttaaccaggtagcccaggaggcagtgccgccagcagacatcgttttctcagtgaagagcccaccgagtgccggctacctggtgatggtgctgcgtggcatcttggcagatgagccacccagcctggaccccgtgcagagcttctcccaagaggcagtggacacaggca

SEQ ID NO: 57143 - DNA, 724 bp, Homo sapiens
aatgcaacccatcttcacttccaggacccactgatgatctcttctggagttttggcctgaagctaaaactggcagcccctggactaagttcagcatatagactagatccgatatttagccattatgcaccctgcaccatattgatggttaaaatgttgaaatatttcgagggtaaatagtatagtaattacaataaatattacaattagttaatagaaattttaatataaactcattggtttgtgctaatagttgtaggatgtcagtaccattgataacaggcctcctgttgtttccacattatgacacaatctggcctgtgtcactgcagggactgcagccaagttacgtgtgttaaatcactgattgytttaggagaatcactagtttaaaatatttttattggactgggtgcagtggctcacaccagtaatcccagcacttcgggaggccaaggcaagaggatcacttgagcccaggagtgcaagaccagcctgggcaacatggcaaaaccctgtctctagaaaaaaatacagaaaaaaattagctaggcatggtggcgcatgcctgtagtcccagctactggaaaggctgaggtgggaggatcccttgagcctgggaggtcgaggctgcagtgagctgagatctcaccactgcacttcagcctgggtgacgacagagtgagactctgtctcaaaaaataataaaatatttctattgtaag

SEQ ID NO: 57144 - DNA, 1064 bp, Homo sapiens
atttgtggatgggcactgagcttgtttccagactttgctggcatgttttggtgatgcctttatgtgcccgtgggagtctgtctgtaggatgcttttacagaaacagctgctgggcaaagggtatgggtgtttaaaacatatcctgttgtcaaattgtcccccagaggttttgccaattcctactgcacccatggcatctgagaaggcctgtctcccacccccagcccagcctctgccatttcagcccctgccctttcagcccctctatcttggggcagatagcagggcctaaatgatcaaggccatgcccgcttccccagcttgggggcaatcctgagcccccctgggatccctgtgccagccccgtgctgagaagcaacaaatattgtcaaatgaactggcagtgatgtttgaagctatggaggaaaatggcttctgagggccaggtcagttgyaggctttaaatacaagggaatggaggcttcacatctcagcagagtaaatcaggctttctgggaacagccaaccctggggccccaggacagatgggggtaactcatacccactccttgaccaaaagtgacagtgaactggcctggttatgcaggcagcaaagccaggagagaagtggcccagggcttagggaccagactcccactttcagagtgaatgacggcccagcctgatctggttatctgtcccacaggcagcaagcatctgattaataggtcacttcatggctaattaatcacactcctttttcttcgaattttggtgttcctagccatgtggggccatctgaacaaacaacaggggttgatcaggacacacactgctgggctcagcgggcgtcagcattgcagggatgggctccttgttagctccagtggtctcacgccaaagtccctgtccagtcccccaatgctggtgaggctgatgacctcccaggagagcatctttaaggtcctgtctggcctagagtatctattatgctaaggaaccaatgagaccttttagacacccctttattttaacacattttaaatgtcaaacacttagcattt

SEQ ID NO: 57145 - DNA, 1064 bp, Homo sapiens
atttgtggatgggcactgagcttgtttccagactttgctggcatgttttggtgatgcctttatgtgcccgtgggagtctgtctgtaggatgcttttacagaaacagctgctgggcaaagggtatgggtgtttaaaacatatcctgttgtcaaattgtcccccagaggttttgccaattcctactgcacccatggcatctgagaaggcctgtctcccacccccagcccagcctctgccatttcagcccctgccctttcagcccctctatcttggggcagatagcagggcctaaatgatcaaggccatgcccgcttccccagcttgggggcaatcctgagcccccctgggatccctgtgccagccccgtgctgagaagcaacaaatattgtcaaatgaactggcagtgatgtttgaagctatggaggaaaatggcttctgagggccaggtcagttgtaggctttaaatacaagggaatggaggcttcacatctcagcagagtaaatcaggctttctgggaacagccaaccctggggccccrggacagatgggggtaactcatacccactccttgaccaaaagtgacagtgaactggcctggttatgcaggcagcaaagccaggagagaagtggcccagggcttagggaccagactcccactttcagagtgaatgacggcccagcctgatctggttatctgtcccacaggcagcaagcatctgattaataggtcacttcatggctaattaatcacactcctttttcttcgaattttggtgttcctagccatgtggggccatctgaacaaacaacaggggttgatcaggacacacactgctgggctcagcgggcgtcagcattgcagggatgggctccttgttagctccagtggtctcacgccaaagtccctgtccagtcccccaatgctggtgaggctgatgacctcccaggagagcatctttaaggtcctgtctggcctagagtatctattatgctaaggaaccaatgagaccttttagacacccctttattttaacacattttaaatgtcaaacacttagcattt

SEQ ID NO: 57146 - DNA, 1064 bp, Homo sapiens
atttgtggatgggcactgagcttgtttccagactttgctggcatgttttggtgatgcctttatgtgcccgtgggagtctgtctgtaggatgcttttacagaaacagctgctgggcaaagggtatgggtgtttaaaacatatcctgttgtcaaattgtcccccagaggttttgccaattcctactgcacccatggcatctgagaaggcctgtctcccacccccagcccagcctctgccatttcagcccctgccctttcagcccctctatcttggggcagatagcagggcctaaatgatcaaggccatgcccgcttccccagcttgggggcaatcctgagcccccctgggatccctgtgccagccccgtgctgagaagcaacaaatattgtcaaatgaactggcagtgatgtttgaagctatggaggaaaatggcttctgagggccaggtcagttgtaggctttaaatacaagggaatggaggcttcacatctcagcagagtaaatcaggctttctgggaacagccaaccctggggccccaggacagatgggggtaactcatacccactccttgaccaaaagtgacagtgaactggcctggttatgcaggcagcaaagccaggagagaagtggcccagggcttagggaccagactcccactttcagagtgaatgacggcccagcctgatctggttatctgtcccacaggcagcaagcatctgattaataggtcacttcatggctaattaatcacactcctttttcttcgaattttggtgttcctagccatgtggggccatctgaacaaacaacaggggttgatcaggacacacactgctgggctcagcgggcgtcagcattgcagggatgggctccttgttagctccagtggtctcacgccaaagtccctgtccagtcccccaatgctggtgaggctgatgacctcccaggagagcatctttaaggtcctgtctggccyagagtatctattatgctaaggaaccaatgagaccttttagacacccctttattttaacacattttaaatgtcaaacacttagcattt

SEQ ID NO: 57147 - DNA, 724 bp, Homo sapiens
ttagaatctccttaaatatcttcaaataaacaactttgtaacattgtatggtgtaaaagaatggatttattttgcttataaaaaattcccactgggcaattctttcattcactttcccgtgtgaggaaaaaagaaacatacataatgttttggttggtggagaatataatagactawaattctaggcttacttttagtaaaagcaacaagaagtcataattagctctagactaaagtagactaaattgatatgaatatgaaatcacctgcagctacaaaagatagcacatttctaaaaataccagagaattatattttttcccttttttgcctaacgcagagcctccaaagaagaaaaacttaattacctttgtgacctagtgttggcagatctcaatctataaaattagttattaaatatcttttcctttaggaagcaaagagggcagtagagtgtaacactggaaatctgagaactaagtggtactaaaatcactaaataaaggtaatggacttgaacttcggagtatttgattacaagaaaattagatcctccaaaaatatgtataataaatatgcaattaacaatacattagtcagtggacctttttctttcttcttttcagtggcaaagaatagattaaaacaatgataactaagcaccctaaaattcctatctgtttagtattgaaaaatgtgtaagtagataattaaaacacttaaa

SEQ ID NO: 57148 - DNA, 724 bp, Homo sapiens
ttagaatctccttaaatatcttcaaataaacaactttgtaacattgtatggtgtaaaagaatggatttattttgcttataaaaaattcccactgggcaattctttcattcactttcccgtgtgaggaaaaaagaaacatacataatgttttggttggtggagaatataatagactataattctaggcttacttttagtaaaagcaacaagaagtcataattagctctagactaaagtagactaaattgatatgaatatgaaatcacctrcagctacaaaagatagcacatttctaaaaataccagagaattatattttttcccttttttgcctaacgcagagcctccaaagaagaaaaacttaattacctttgtgacctagtgttggcagatctcaatctataaaattagttattaaatatcttttcctttaggaagcaaagagggcagtagagtgtaacactggaaatctgagaactaagtggtactaaaatcactaaataaaggtaatggacttgaacttcggagtatttgattacaagaaaattagatcctccaaaaatatgtataataaatatgcaattaacaatacattagtcagtggacctttttctttcttcttttcagtggcaaagaatagattaaaacaatgataactaagcaccctaaaattcctatctgtttagtattgaaaaatgtgtaagtagataattaaaacacttaaa

SEQ ID NO: 57149 - DNA, 645 bp, Homo sapiens
aacaaaccacccaagctttgtaggataaaacaacacaatcgtttattattattattattattattattattgttgttgttgttgttgttgttgttgttattctctgtcatggtcctggtgccagctgggctcagctaagtggttcttgtttggcaggagtgagaaggtctgtcatacagttacagtcagaagttgtctggggctaagtcatctccaaggtttgcgcactcccatacctggtggtcagtgtggactgtcagccagaccactcaaatgtagcctctccaagtggcctgggcttcctcacaacatggtggctgggttccaagagggagcttcccaggaaagggccagcragaagctgtcttgcctttcatgccttagcctcataagtcatgcagcattacacattccattgcactgaagtccctggggccagcccatattcaaggtcggggggaattagacaccacctcttgatggggaaagagtgttgaagaatttgtggacatgtttgaaaagcactccatccaccccagttcctcttccagcagggtgactggttagtagtacaagacgtgctgttggccggccgcatcacctggattccagaagatactgggtgaaatctcacaatgtcctcat

SEQ ID NO: 57150 - DNA, 1792 bp, Homo sapiens
tcttttaggtgctttaaataaagggggagagaggaaatcttctgaagcagatgacaattatttcccccaagcacagccaccaagccatgctcttattttgaatgatctgcgtcattttccaacatgaagcctcagaaggacatgattacaggctggactcaccgactgtagcctgtgcagctattgtaatgttttaatcagtgattaagtcaagaggtttaatttagtaccgggctccgttaagcttgtgaaaatggttttctgcctcctcaaactaaaaatgtgtctctcccccatgtgtccagcccgaagcatcttaacctttgttctatcttcaacaccgctggctctaacaaattactcagcagtgaatgaattagctgagtccaatgtgtgaaaaaagattaggctggacctaggaaaattagcttctaagcacagcacaggatgaggcataaagatacctggactcgtgccctgcatgacaaagaagctaagcttcattagcgtcagtcatgacatccgtcattggcattatctcattgaatccctgcgacaacctcaggggcagatgctattattattcgcattttgtagatgaagaaaactgagacccagagaaggtaaataacttgtccatggtcacacaggcagtcttggtcccaggatttgagttgaggcagcctagctctgggatccccacactgtccttcctccctcgctggatctgagactacgttagctttgcattcattcattgattaactctgttggggaaaggggacattttagggagctaccccagaatagttctgcaggagggacctgtctttaggtcattgcaagcagagatgactaaggaggtgagtgccaggagtcctgaccatgcaagctagaactggacaagcatcatttggtatcacggagagcccagccgagcttkcaaatctggagtaacaggatggcctatggggctttttctgcagcctggggaattggtgcctgaggccatggctaaaaaaaaaaatgagagttgctaaaaactacagcctcaaactcttaatgggggcccaagtgctgccccccagcttcaacccaatggcttactatgaacaggagaagatgctttatagtgctcaaatccacccgaccccactggatttagagaggcagcagggaagtggtagagggagctgtccacattatgagatgttggcctcatagagagggacgggagggacatttctctaaactcctaaagccaagtgaggggctccaaagatgaggaacagagttcaaatcagagatctggcaatgtcatggtggggagtcttgaaggtgacccagctgaacccaagaagtaggaaaaagcagagaaaagccacagcaagaagtagggaaaagcagagaaatgccacagtaagaagtagagaaagcagagaaacatcacaactagaagcagcccaggtccccgacccttcttgttggccctgcgttagtttcctagggccaccataacaaaatgtcacagactagatggcttgaaacaatagaaatttattgtctcacagttccagagactggaagccctaaatcaaggcatcgcaaggccaggttccctctgaaacctgtagggggaatccttcctttcctcctcccagcccctgatagtgagtggcagtccttggctttccttggcttctagatgtgtccctccagccctgtcttcacgtggccttctccctgtgcctgtcttcacatggccgtcttcttacaaggacaccggttatat

SEQ ID NO: 57151 - DNA, 1284 bp, Homo sapiens
atgtgaaatacttcttgcctgacatgtatcatctacttgttgactgacctattgaggtgccttcatgacaccttttacattcatgataggtctcaggaagacagcagtgtacttggtggaaactcatgtaaaaagtgggttgtagggagctaaacagtgagtacacatggtatatggatacggaatggaataatagacattggagacttcaaaaggtgggagatgaaagggggatgaggtatgaaatcctacctgttgagtacaatgtacactacttacgtgcacagtacactgtttgggtgagaggcacactaaaagcccggacctcaccgctacccartatgttcatgtaacacagctgcacttgtaccccctaaatgtatacaaataatctaaaaatagcccggacctcaccgctacacaatatattcatgtaacacagctgcatttgtaccccctaaatgtatacaaataatctaaaaataaagtggatatggtggctgtcgtgtccaccaacagcgtatgtaactttttaaaaagtgggtaatagatttatcaaacttgaaggcttgtgtgaaaatatgaaaaatactttgcgtcttaacagatgcagtctttgggtgcagcgcaccagcacggcacatgtatacatatgtaactaacctgcgcattgtgcacatgtaccctaaaacgtaaagtataataataataattaaaaaaaaagatgcagtctttgggaggaaggggtgctattaaaaaatcctcctttaggattttgtggtgctaataggttataaaagactcgtttgctcttgttttccttgaaataggatatgcacttgtggaatgttttcttttctctctgccctcagaggaaaatggagcctagtggtcatgtgtacctatttcaggttgaattgtcttgtcagcctttatggacggcagttggcaactcatttattcttatatgagcactggggagcaggctggcctgcatcattgtggggttaagagcaaagcttggaatgggagtataggcatagctctcaggtgaggcaggcagggcccacacccctttaggggagatgacaagtgtaatccctggtttctacaggctggaggtttgggaacatatgtaccataggaaacaaactccaagtttcctgactgtggagaaggaaaggaaagaatatcatgctctgttactgaaacagcttattcctcagggtcaggctttgaaaaacaaacccagtaaaaagtatctttattctcatgtttaaaagt

SEQ ID NO: 57152 - DNA, 561 bp, Homo sapiens
ctttcccacgggggaataaggtgggcgggcgcacccataccctgagactccctcagctgcctcagtccagcyatttcccatgactcagagcctaggaaaccccctagcccagcccgggatcacacagaggagggtgcctggcccaggagtccaacagcaggcactgagctgcatcaggaccaacactagaaagaggaagtgatccacctgtagacaggtcttaactgtccttccatcaggcaccaaatcggaatcaatcctaatgtcatttacggatacttttccatataacattccttctagaagccctgggcacctgcctttcaagtaagaaagacagcccttttggccctgggagccctgaacttgccaggtgtctggggaggaaaggggtcatccctgacccaggcccagagctatgaggtgcccctggagagggagtgagaggactatggcctttctctggggccagaggaatccagctgggtccagcttatgaacctgacagtgtgctgggggtaccacccagcttcttggcccgcagtgcccccatctccacac

SEQ ID NO: 57153 - DNA, 642 bp, Homo sapiens
agtaatagttatcttgtttatggaagagttacttattttcatgtgggaaagaagtcacccgatttctatttgtttcctcatttgtctaatgtttttatcttaagaaaaatacatattcagtttaattttttttgcaagaaacttctgtattcaaaccctgattactagtttctcaatggagacrtactttaagagaataatatttcatataaaacttgcattttaaaatcattttctgtttactttttcaggcattatacagacctctaaagaaatttcaaaaacatggacatcatatttagtgtttttccagtccttaaagtcctttttggttatatcatgtatggttgtaaacagaaattctttgcacagtattattcagcttgacagttcagtcatgtctatttcagtcactcaaagcaggattaaggatgttacttgttattggaatattcctgacatggaggcagctattttcaccaaaatgctgtcttaaaagcccaaaaagcaataccaggcaaaattgtttgagaaaaaagagatccaagaattgaactggtgcatagaaaagaaaatgaaatttttaatctaaaatcagagctaagtgggagcttttaacatcatataatttgcaaatgttaa

SEQ ID NO: 57154 - DNA, 903 bp, Homo sapiens
tataacccaagaaccttcctctgctataactcacttttattctcaaattggattgtaggtaagtcttttcttctctttccaggttataatttactaggccagaattttctcttgtatccctacattgagagaatgccaatggatcttaaaagaagaatcgtagagatccattttccagtccaatgcttggctccccacccagagcccagtacaagactggctcacagtggcactcggtaaatgtctggcaactcaatcaagaggttggtcaaaaggctgactggggtttgccccgctcaaaggcagcttcaggttcttggctctatgtccttgattaggctagagctagagaagaccccagccattatctaataaacacatgcacacacaaaattgtaagctctacaggacaggttagcatgtcccagtcccttcaagggccagcccctgagccaaggatacaagcaccagtagttcatttgggaggtgatcccagaaagcaccagtaggagatttggaaagtaggatggaaaggaaggcagccaaaacatgatgtgttaatgggcaactgagtcatattcccagtggggacctctgggtgacaatgtagcacatgcctcagagttgtccctaccaaggaatattttctaccaacttccatctgttaactgaaggcttctcctgcagatctcagtccctagcacccccagactgccctgagcattggccaagcatgctgagaaagccctgkggcagagtcctgggtgcatgcagcaagaagctggggagtaaaggaaagttgagtccctgtgggtaggagcagggctataagagcagccgacacagctggaatccctggtgcctatagcagtgcctggaacatagctggtgtcaaaaaaacaa

SEQ ID NO: 57155 - DNA, 1158 bp, Homo sapiens
tatggaaggggatgaatgcttgttatcaacattggcaattcacatggcagaatctttgcctatggaattagtaaagaaaaatataaaagccaaaagactgataaagtagtcagggaataaattcacctttcaccaaaagacttgtagagtctctccaagcttaaaaacaaacaaaaaaagatgtcaaagctttacgatacagagactcactctaacattttttgtggtgtttgtcatatctagatatgatatacattgwtactagcacatgcaaccagtaattcctcacttaacgtgttcattcaggaactcagagatgtaataaaagtaagcactacaaaaaactgaagccaaaccccttttaataatgtggctgtacaactgcttctgctgaaagtctttcaaggttgccttatatatatcctgctgttttaaatagaatatactaaatataattgccagctcttttttgattactcagggccactgtcattaatgagctgcacagtaatatagttctgtgtttgctttttcggctttccatttcttccctagacatcaggccatcagctgtcactgagcctgtatccaatagcctgcctccacacatgatcttcctctagtttgggcctcctaatttgctgtgacctaggaaaacagataacatagtttgttaagaagtattgttctcattaacccaaagctttttattttatttacttttttggcttgcttctggtttcatgctgaattttagggagttgagattattataacacatctctggataaatgaattttattacattcatattagatagttaagagatagctatggagtcaggtggactttgattcaaatccaagccttgtcaataatcagctgtgggacctttggaaagtcactcaacctctgtgaccttcagtttccttattggggaaagggggagagagtaggatgggacttgttatctgatagtttattacaaggattaattgacacaattcctgtaacaagtgtaggaaaaggcatcacttgtatcaatcagtcaacacgtgttacttctattactactcaatcttcaccatcaccaatagatttacattaagacatttatgtgcatacttattacacaacaattatatctaaatataaact

SEQ ID NO: 57156 - DNA, 830 bp, Homo sapiens
aatgcatgggatagtccccataaatgaagaaccccaacatgtcaataatgcaatgtagaaaaccctgtgaccagcaaaagagaatcaggcccaagagctattgttaagaattcacagacccatgtagaccaaggcaagacatacaaacgaatgcagcagctcaggmtctcagaacaagcatgagattaatggccactgtttctcaacatctgtaatgcaacgggaaggtgctggtgaattgcacgtgccccagggaaaggtgacagcactgctcagcttcagcctttggtgaccccataaaaatgcaggcctagcatcgtctgggtttctggtgatctttccaaagaagccaggaagccacatttttatgtcaaatttttcaatctttcaatgttggaaacgaattcagtatttttttaatgcgtaggccaaacaaaatgtttgtgggctggctttaactcacaggctgctattttacattttaaccctactcacaacacaactgccaggctaaaagaagacctggaaatacttgcaattgtggctaaaactataggtacccaaatgttcattgcggtattgacagcaaaaaattcagatgtctaggtgctcccagtagggggtggttaaagaaattatggtatattcacacgatagaatactaggagtgtcattaaaatacacaaaacaattctataaactgatatggaaagatttcaaaataggttagcaggtgaaaaaaacaatttgcaaactaaaggacagtgtaattaagttgatttttaaatgatatatatgaacctgtatatgaaccagtatgagtatgcatg

SEQ ID NO: 57157 - DNA, 1227 bp, Homo sapiens
tgattattaatgaatgtactgcccttctattctttcatttccctctattattttccactcaaacctccctacctatactagaataactcagatcctcatcaactgagcccacatctttgccaggtttaactttcatgtccatttttatcccatccgtaatctataaatcactgaagtaatattcctaaatcaaaaatcctctctgatattttagacccctgcttgaaattccccagtggcttcatactacctagaagatgtaacttaaactcctaaacatagaatttacagattttcatgattatactgcatactgtttagcctcatttcatgtcactgttgctcacacaccacccatgtcatacagagccctttgattttccactcatgtattcctaatactaatgatttcctctattattaaactcaccttaacactttgtaattgtctattatcagctagataatgaacttcttgaagaaagtaccatgtatccccagaacctagaataagygtggcatgtagtaagttctcctgaactgcatgttagatggatagattaatgcctgctacttggaagctaccatttcaaataggtgaacatatctgatccacatgtctcctgtattcccttttgaatcctgctgcacttttactttcacttgcctgcctctcttccaacaatcggcctcctgatttatttaacaattgctttgaatactccgtttgatactcacattcaaaacagttttctagaacactatcttatcatcttaatggaaaccatttttttacctcataaattttcattcctcacaagccttccagatgaaagtcatttgttctcttagtcattatcagttggctggcatgaagtagtaatctctcagagagactccctaccattcagatcttaatgccatcaccagcaggtctctgagtttttaggatgtcacttaaatttttgcaattttatatttattctagaataggagaaataaccatgtccaattaacacagtatgtgtgaaataaattgatcgttatgaaagggttgtatgatttggaaaatatgaaggtattttttttttatctccctacaacatctcagctctgagaattccacatcctctattaaaaatgtctcatcattctcattaatgactctgttctcacctgctagtcaaagggtacttatattcacaggcttctgccatttagctcaca

SEQ ID NO: 57158 - DNA, 880 bp, Homo sapiens
ttagctcatcccctatacaagagtcaactcaaaattcattaaatactttaatgtaatacccaaaactaaaactactagaagaaaacagagggggaagaaagagctccataacattgatctggacaataatttcttgggtataaccccaaaatcacaagcagccaaagcaaaaatagacaaatgggacaataccaaactaaaaagctttgcacagaaaaacaaaacaaaacaaaacaaacaaaaaaaacyagagtgaagtgacatggaaagagagaaaatatttgcaaatcatatatctgataagggactaaaacttgaaatatgctaggaactcaaacacatcaatagcaaggaaacaataaaccaactaaacagtgggcaaaggacttgaataaagatttcttaaaagaagacacacaaatggccaatacatacatgaaaaaatgttgaaagttatgttaagcagtggatatttattaaatacgtagatcatttctagctaagaaactactgaaacattcattgctaaacctaaatttgagctcatataattttggcttctaatttttatagaaatattaatattattaattactaaacgtggaatttttcaattccacattgaaaaattgcactattacagcatatttataaaatttgctaatcttctataaaattcttatatatgacagataaatcacaacaatctactttctcattttctctgtaaaagaaaggttactaatgattgaacattataatcaatatatgtgcataaaaacactagaaataatgagggtgaagggaagcaacattgcatacatgaaaagtatgcaaggaatattgtgtgtgtttctattcagggggaaaataaagggta

SEQ ID NO: 57159 - DNA, 1551 bp, Homo sapiens
aaataaattgcataaaacaaagaaaatggtatgggacatgtggcataaagtagggacatgacattaaatcagaagctttcactggagtctaaagagcttaggtaaataatgatgttagcaggatcacagagtcccctgtatggaactttttctatctttctccacaaccaaggtctggagcaggaaaataagaagctgaatttatcccaacttggaagaaagaaggaaaaatagagagcaggacatcaagagaggatggacgtgttaaggagctaattattaacgtcagactgtggaattcaagctagtacaggaacacaaagccacaaaagagtgctaactactctaggagagattaaagcctgtgaaatagaacttttccagataatggcgagtttttaggcttgctcatgctgaagcttaatataagctaataagtagagaaattaggaggcttggatattgcaaactttattggttggggtgttacccaggctaatagaaaaaaaattatatcctagaaagacagaacaggtgcgacttctgagaagaaaggttagagaagactagaaaggctgggaccaccttgaatttggcacacacacacacacacccacacgcacacacaaaatcaccaaatgatctggaatgtggtaggtcattaatctgctttgcaaatgtcagaactttaggatcccagtacttcttgttctcaggatccacaaccagaaatcacaagtacagaacctccaggtctgtctcttcctgctggaacaggacacatcagaggggttggttccggagagggatcaaactcagaaacagccattaaagtaaactcatgccaagcaattggtcactcagctatgcgatgagtcagcctccactgctgtacgtccttggctacagactcctggaacagcagctcttctcaaggctagttgtgacagactcctggaacagcagctcttctcaaggctagttgtgacatccaaagtgacaagagcaggcccatattcagccacctcatccaggtaacyactctttgacttctctctccttagtccaagtcagcggtgggatctcttcagccttcctctctgtcagtgggtttccctctttttcctctaacaccctccttttgtttcctctgcatattaaagtagagaaaatgtcacacttatttatggttctccttcatttctctttatgcccctgctacaattttgaaaggagacagaatggatagagtagggcgtgagcaagttaaggaaatggacggggaaggtatcttctccctgggcctaaatatttcactcctagcaaagaaaagttgggctaaacaaattgtcaatttaatatgtttaaactctacttatattaatatcagttgattctttcaatatcctatgaagttcatactttctgaggcctacacttctcagagacattaaaccaagaatttgaactgccatctctctaactccaaactctgatttctagcatctcactcaattcaaggtcatatgtcatatgttttttgtttttttt

SEQ ID NO: 57160 - DNA, 649 bp, Homo sapiens
catgatgagatgctgacctctcattcatcagtcaacctgtccagaacgaaaccatgggtccaccactctgaaataaaggtggcttcaccctagcttgaccccacagaggaggctgcttggacatgtgagccaaaagaagagattaaaatactacttaagaaaaacyacaaataagtaaagccctatttttaatttcctgtagaatgaatagaatgaaacacttgcaggctgggcaacatagtgagactttgtctttataaataataatgataataataatattaataaacaattagccgagtgtagcagtgcacatctgtggtcccagatactcagaaggttgaggtggggggatcacttgagtccaggtggtcgaagctggagtgagccatgattgcaccactgcattctagcctgggtgacaatgcaagaccttgtctcaacaaacaaacaaacaaacaaacaaacccttatttctctgccctgctgggtatcacctacacaggaaaatgcctggccacacttgcaagtcttcacagaagaccttaagtagtggacaggggaatagatgtcaggtgtaactggaaaagatacagcccaatggcccataaataagactctcaatgactctggacttgggaagcctttc

SEQ ID NO: 57161 - DNA, 1129 bp, Homo sapiens
ccagtgggaacctaagggctaaaccttatcatggtgcaaaaaaaaaaagcaaaaaaccaattacacagtttcctgttcatttgaatcaccaactttgatattacatacttcttgaagaatattagtttgagcgactcacataattttaacatttgaacatacattaagaagctaatattttaacttatcatttcaaaatgtggatataaattaagaaactaatattttgtgtcacattattttaaaaatcacaaaactgaaatactcaaaaactgtgattatactgtatttcctaacaatgataagttaaacaaagaaccctattcaaaccactttactactgtaccaattacagttacttttaatatatccttaaattatcaaagttatgtgtgtgttcatgaacagagctacacgataattcttttccccaacaatgagagaagacaaccagaatggagaaaacctcttgtttatatactatagcaaatagtttatatcrctgattgtatacttagcagaaaaatattttccccccttgattcaacactacatttctagtcctttgtagagtttatggcaaagtggaaataagggaatagtgagagatggaggttttgagtaggtgggattaatggtctttctaaagaatgttggtggacagtcacccattagacctaagcaacaggctggggaccagctttggagtccaatacctggctctgtttattcctaactacactttctacggtgcattttataatttgagagttagttttctcatctgaaaaacagtgaaagtaatactcatgcccatagtgcacgtgaagactaaatgagataatatataagaaagcactgagtccagttctgtcatagagtcaggacttagtaaattgtatttgctgttttagttacttttactatggtgaccacagctatttgttcatggccagagaagatattaaagatctcagtgactaaagttaagcacatcatcagaatcctgtctttaacaagtgtgacatatctcattcttcttgctttacagagaaatcctgataattttgctcacataagcattaagaacctcaaatgcaataaatctttgagcctgctttaactaaaa

SEQ ID NO: 57162 - DNA, 1129 bp, Homo sapiens
ccagtgggaacctaagggctaaaccttatcatggtgcaaaaaaaaaaagcaaaaaaccaattacacagtttcctgttcatttgaatcaccaactttgatattacatacttcttgaagaatattagtttgagcgactcacataattttaacatttgaacatacattaagaagctaatattttaacttatcatttcaaaatgtggatataaattaagaaactaatattttgtgtcacattattttaaaaatcacaaaactgaaatactcaaaaactgtgattatactgtatttcctaacaatgataagttaaacaaagaaccctattcaaaccactttactactgtaccaattacagttacttttaatatatccttaaattatcaaagttatgtgtgtgttcatgaacagagctacacgataattcttttccccaacaatgagagaagacaaccagaatggagaaaacctcttgtttatatactatagcaaatagtttatatcgctgattgtatacttagcagaaaaatattttccccccttgattcaacactacatttctagtcctttgtagagtttatggcaaagtggaaataagggaatagtgagagatggaggttttgagtaggtgggattaatggtctttctaaagaatgttggtggacagtcacccattagacctaagcaacaggctggggaccagctttggagtccaatacctggctctgtttattcctaactacactttctacggtgcattttataatttgagagttagttttctcatctgraaaacagtgaaagtaatactcatgcccatagtgcacgtgaagactaaatgagataatatataagaaagcactgagtccagttctgtcatagagtcaggacttagtaaattgtatttgctgttttagttacttttactatggtgaccacagctatttgttcatggccagagaagatattaaagatctcagtgactaaagttaagcacatcatcagaatcctgtctttaacaagtgtgacatatctcattcttcttgctttacagagaaatcctgataattttgctcacataagcattaagaacctcaaatgcaataaatctttgagcctgctttaactaaaa

SEQ ID NO: 57163 - DNA, 1129 bp, Homo sapiens
ccagtgggaacctaagggctaaaccttatcatggtgcaaaaaaaaaaagcaaaaaaccaattacacagtttcctgttcatttgaatcaccaactttgatattacatacttcttgaagaatattagtttgagcgactcacataattttaacatttgaacatacattaagaagctaatattttaacttatcatttcaaaatgtggatataaattaagaaactaatattttgtgtcacattattttaaaaatcacaaaactgaaatactcaaaaactgtgattatactgtatttcctaacaatgataagttaaacaaagaaccctattcaaaccactttactactgtaccaattacagttacttttaatatatccttaaattatcaaagttatgtgtgtgttcatgaacagagctacacgataattcttttccccaacaatgagagaagacaaccagaatggagaaaacctcttgtttatatactatagcaaatagtttatatcgctgattgtatacttagcagaaaaatattttccccccttgattcaacactacatttctagtcctttgtagagtttatggcaaagtggaaataagggaatagtgagagatggaggttttgagtaggtgggattaatggtctttctaaagaatgttggtggacagtcacccattagacctaagcaacaggctggggaccagctttggagtccaatacctggctctgtttattcctaactacactttctacggtgcattttataatttgagagttagttttctcatctgaaaaacagtgaaagtaatactcatgcccatagtgcaygtgaagactaaatgagataatatataagaaagcactgagtccagttctgtcatagagtcaggacttagtaaattgtatttgctgttttagttacttttactatggtgaccacagctatttgttcatggccagagaagatattaaagatctcagtgactaaagttaagcacatcatcagaatcctgtctttaacaagtgtgacatatctcattcttcttgctttacagagaaatcctgataattttgctcacataagcattaagaacctcaaatgcaataaatctttgagcctgctttaactaaaa

SEQ ID NO: 57164 - DNA, 1129 bp, Homo sapiens
ccagtgggaacctaagggctaaaccttatcatggtgcaaaaaaaaaaagcaaaaaaccaattacacagtttcctgttcatttgaatcaccaactttgatattacatacttcttgaagaatattagtttgagcgactcacataattttaacatttgaacatacattaagaagctaatattttaacttatcatttcaaaatgtggatataaattaagaaactaatattttgtgtcacattattttaaaaatcacaaaactgaaatactcaaaaactgtgattatactgtatttcctaacaatgataagttaaacaaagaaccctattcaaaccactttactactgtaccaattacagttacttttaatatatccttaaattatcaaagttatgtgtgtgttcatgaacagagctacacgataattcttttccccaacaatgagagaagacaaccagaatggagaaaacctcttgtttatatactatagcaaatagtttatatcgctgattgtatacttagcagaaaaatattttccccccttgattcaacactacatttctagtcctttgtagagtttatggcaaagtggaaataagggaatagtgagagatggaggttttgagtaggtgggattaatggtctttctaaagaatgttggtggacagtcacccattagacctaagcaacaggctggggaccagctttggagtccaatacctggctctgtttattcctaactacactttctacggtgcattttataatttgagagttagttttctcatctgaaaaacagtgaaagtaatactcatgcccatagtgcacgtgaagactaaatgagataatatataagaaagcactgagtccagttctgtcatagagtcaggacttagtaaattgtatttgctgttttagttacttttactatggtgaccacagctatttgttcatggccagagaagatattaaagatctcagtgactaaagttaagcacatcatcagaatcctgtctttaacaagtgtgacatatctcattcttcttgctttacrgagaaatcctgataattttgctcacataagcattaagaacctcaaatgcaataaatctttgagcctgctttaactaaaa

SEQ ID NO: 57165 - DNA, 833 bp, Homo sapiens
ccagcatttaagtactaagaggattttcagacccggaaacctcatatgacataattctttgtaatgtcttgtaatgtcaaagtaattcatcaccatcatccacagtagaatagcattagtcagcatcaggactgggcatggcaccccatgggccaatctttcattttcatttatgaagtctggagtagtagtggggcttagacattactcttyatccaactcttctaattattctgatatcatgggaatctggatttgaaatactagtaaaatgttgagattcaactagcagtagctaaaatttactggaagatcaatccaattaatgaatcttgtatactgattactgttaagaattgcataaaaaccttatagcaaattataataaaagcggaagatatggctttggggtaaattattaaaccacattttacttgttaaaatctaaatactgtgtaatccaacacgattttgcctcttttgaaggataaatttttatgaggagataaaagaaaaaatatgtatgtaaatttatatgtgtgtgttatgtgtatatttatatagtgtgtatgtatgtgtgtacacacacaatataagtatatacgcacacacccaatcataggttttcattgaatttcaaaataaaatgctacttagaagcatgtaataccctatataaactataattgctttatgaaagagagatagaacaaatggtttattttaccagacaaagcaccagcctggcagagaagccacagacttgtatgtgcttctcagcaaatagtcatcaacactggtttatgcaagtgactttggagacatttctcaga

SEQ ID NO: 57166 - DNA, 647 bp, Homo sapiens
ctaaaacagggacatcagaagcttagctctgcaaactgagggactttacgcggtcagagaggagggtgataacacatcaaatatctaatgcaggagacgacaaataggctgcatgctccacacaatcaaggctaattatttgagcacgcttctagattgggaagggaagttaaaaaaaaaatgaaaaagtaaggaaaaaaaaaagcaagcttcttatctgaaattgcaatcctacccctgaagaagcacacatctggaattcattccctgagrcagtgagccatagaccagctctgtaccaggacccggcccagctgccacgcgctagtgactgagcgcaggctgtgctttgcaaggggttgatagaatgtttcttggataaatattcctgccaaagttagtttttgagccatggctcgtaaatatacagtattccagggaaaaagtacagaatgtcctcctggggttgacaagcaaatagtttcataaataacccttttgacacgtgtaagatgttaacatttctgaggttttgggcaggggcaaatgtggatttgattgctcgattcagtctggagccacaactggacttggatgttatttcttgggggcccatggaaatgttttttttggcttgcgagcccttg

SEQ ID NO: 57167 - DNA, 647 bp, Homo sapiens
ctaaaacagggacatcagaagcttagctctgcaaactgagggactttacgcggtcagagaggagggtgataacacatcaaatatctaatgcaggagacgacaaataggctgcatgctccacacaatcaaggctaattatttgagcacgcttctagattgggaagggaagttaaaaaaaaaatgaaaaagtaaggaaaaaaaaaagcaagcttcttatctgaaattgcaatcctacccctgaagaagcacacatctggaattcattccctgagacagtgagccatagaccagctctgtaccaggacccggcccagctrccacgcgctagtgactgagcgcaggctgtgctttgcaaggggttgatagaatgtttcttggataaatattcctgccaaagttagtttttgagccatggctcgtaaatatacagtattccagggaaaaagtacagaatgtcctcctggggttgacaagcaaatagtttcataaataacccttttgacacgtgtaagatgttaacatttctgaggttttgggcaggggcaaatgtggatttgattgctcgattcagtctggagccacaactggacttggatgttatttcttgggggcccatggaaatgttttttttggcttgcgagcccttg

SEQ ID NO: 57168 - DNA, 783 bp, Homo sapiens
atgcagttcaaacccgtgttgctcaagggtcaactatttatgttgcacagaacattgacctaagtggccatgcagccttctggggagcagggaccatctttttatgcatatgagatgtttcttgactcttgagacttttacactgtgaaaacaggcagggccgtaattgtttkactcaaacacaattgcttttctaagtatggtaactgagcatgcttttagattgtgaagcactgtgataatttagtagagattgtattgtaattattgctggcttggtgtacagccagaaattcttatagttaaaattatgtggtgatctcagatagaggtatagaactgctgatacaatggatggaattaaggataagacataaagagaagacatttacaagaaattttccaagaaatgtacaaatatgttaaagcaatggctgtgttacccatggcatttgtaaatattggcatgcagaatcagtcttcctagatgtcagtttcctcttttaatatgagctagagctcatgaaagctgcttcctgatggaaaaaagattcctttatgtgaatggctgctgagcttaacaacatgttattctgtgaaaggatgagtcaggagctaaccctgcaatctgaggcttattctaaatgttgacacacccctcagctttccagtttaggagtttgggacaaacctcatggaggagacagtagggctgggacaccttgttgcaatgctctgctagaagaccagtgtaaatataaaggtaacccaactcttaagagg

SEQ ID NO: 57169 - DNA, 783 bp, Homo sapiens
atgcagttcaaacccgtgttgctcaagggtcaactatttatgttgcacagaacattgacctaagtggccatgcagccttctggggagcagggaccatctttttatgcatatgagatgtttcttgactcttgagacttttacactgtgaaaacaggcagggccgtaattgttttactcaaacacaattgcttttctaagtatggtaactgagcatgcttttagattgtgaagcactgtgataatttagtagagattgtattgtaattattgctggcttggtgtacagccagaaattcttatagttaaaattatgtggtgatctcagatagaggtatagaactgctgatacartggatggaattaaggataagacataaagagaagacatttacaagaaattttccaagaaatgtacaaatatgttaaagcaatggctgtgttacccatggcatttgtaaatattggcatgcagaatcagtcttcctagatgtcagtttcctcttttaatatgagctagagctcatgaaagctgcttcctgatggaaaaaagattcctttatgtgaatggctgctgagcttaacaacatgttattctgtgaaaggatgagtcaggagctaaccctgcaatctgaggcttattctaaatgttgacacacccctcagctttccagtttaggagtttgggacaaacctcatggaggagacagtagggctgggacaccttgttgcaatgctctgctagaagaccagtgtaaatataaaggtaacccaactcttaagagg

SEQ ID NO: 57170 - DNA, 1673 bp, Homo sapiens
gaaataactgtgagcatatttttactttgctgtttccttgtaatttcaaccctaataatagtatttattaatttgtattcacataaaggtagatatattgagcacatttatttttctttttaattttctctactaaaattcaaaagcaacttaaatgcaagctatgaaactgaagcttaaaagtacaacacattgaacctgggaattatatctttaataggcctaaaaacatttataagtaaaaatattattcattctttactttttaatcataggaggtgtgtatgtgtgtgtatctctttcttgtttaaattccagaaggtaatataaatgaaccaaagagagtgtacaaaatccgccccacttaaacgcttgaagttggtttttactgacatatatgatatctgcatggagtgaattcactatgttctgtttcacagctgctctgactttcaagtgcctgggagatcagtggccagtgtactgccgagtgatacgtgaaaagaacctatgtcaggacatgcggtggtatcagcgctgctgtgaaacatgcagggacttctatgcccaaaagctgcagcagaagagttgacctctagcaggctggctggatcacagctcttggcaattacattatttataaacacacacactagcatgtttttcagaccaaatattatcagattacatataatttaatcaaattaatttatttttttgcctgccaaacatccaatgtggtgcttgttttggttacacaaacattttgatttatactatatggcttcataaataattttatatgaatgaattagttggatccagtaatataataaaaagaaaaaggaaaaaaatagatcattatacttaaaacaagktttcgttgtttgttagggctatctctaaggtgctactctctccccaccaataacattgaattatccagaatgtatactgacttagcataatagtttaggtgtatatgaagagaaactatttttgttttttggtgtcctgctgcagaattagcccattttctgtcacctgcaggagatgtgtaaacataatgaacctcatgctgttgaacaggtttttagagaatgtattatgaatttggttcagatttatagacatccataggaaaaattctgctgtaattataaccttattttgatatggaaaagaaaagtcaaaatagagactttgatcatgttcatgaacatgtacttgaacacaagtattgtaacaatgaaacactgtaatgatttacactgaatcacaattgcactgttgatatagtgtagagaaatcgttagaaatggtgacatcttacaaaaaatgtgtattattttaacatgttatcactagattttagctttttttaaatatttttaacaaagaaaacattgatccacccatttccctgtatctttttagcagatttattaaagagtatagtacttagcctcacgaatcataattagaaaatttactagtatttctcagccttttccctaggaacaaggaaaaacagaaagcatataatacggtggtcgtttcattgtgtttttcttccttttaaaaattaaaaagttttacaattatgtgaaacgttcaaaagccagcttaaaatttttcttgtgagaaaatattatacatgattcacatgattt

SEQ ID NO: 57171 - DNA, 710 bp, Homo sapiens
tgggcaacacagtgaaaccccatctctactaaaaatacaaaaaaattagctgggcatggcggtgagtgcctgtaatcccagttactcgggaggctaggataggagaatcgcttaaacccaggaagcagtggttgcagtgagccaagatggagccattgcactccagcctgggtgactgagcttgactctatctcaaaaaaaaaaaaaaaaaatcagaaaccagtttaatattgtagatgttgaatcacagtgtaaaacagtggtattgtttgaaaaatcgtaggactggaagaatgagggagagggaatttggaacaaataggagtgaatgtgagatttaaggctttaaaattccactgagggacttctgcttccagttattataggattcagcagaccatgtctcctattgagaatacttagccagttatacaatgctccaaatacagaatcatctgttagagggtatgacgagcttccaagcaaccagaatatgagaaacaagatcacaaatgtaagagaagtatggataagtgaactgaattctgccttttcccctcagggtatttgacaatttttgtaagatgttggaggacaaagaaactgggaaraggactacaggtaataagtagagaagccagcagagcttttggcaactgcttagaagtagggagacaaagacgaaatttgggactgccaaaatgaccagg

SEQ ID NO: 57172 - DNA, 733 bp, Homo sapiens
atttaaaacttatgagttgtatatttctgaaatttttcgtgtaatatttttgaactccagttgaccatgggtaactgaaaccgagaaaagcaaactggggatcaaaaaggctactgtacactagagattgttctgagctattgttaacaggaatgtgccaggtttatgtaaatatatttcatttaatacttaaattcagatttacgttcatatatttgtattcaacatttacctccaacactatcctttcccctgtcttgcaattttaaaacttcactcactctttgttcctcccacaaagttgcccctctcatcattgaggaagcatccacttctgactttctgcacatgggggagatccctcaccatcacaaccaagccataaacagacaggagctctctgagcatcagttttctcatctaccacagtgtcccatgcggacggcctttccaaatactrtttaataatattgcatcctaataatgtccaactattttaaaccaaatcgtaaatcacacatttgtattatgctttctggttgtccaattacctttatttactgggtttatttaagcttcagaggaatatatacggattttatagctaaagctcaattagattaagctcattttacagactggtctcacagtttagactcaacactaagcctacaaagttcaatcatctcattgccgtctgtgattaagcaaccaccctttccgtttccacagg

SEQ ID NO: 57173 - DNA, 1066 bp, Homo sapiens
aattttcacacagggctctccacttacacattttcagcttcattttgtaacactacttcatggatgcaatgcatgctctaaaccatttataggagtagcactgttggggtcaaggccaagtctttcagaccaaaaaccaaattctcccagacgttcacaaagtcagaaaaatttgtagaactgacctaatatgaaaacaaagaacagatttttatattattaaagaaaacactttgaaacttaaaaaaaaatgtaactgattcacataatcttattgaaacattggcaaatattcagcctacctatactatccttaattaaaatgacttattttaccacgataaatttaaatttaaattatttcaaaatacttccggcattgggaggctgcggtaggaggattgcttgaggccaggagttcaagaccagcctaagcaacatagtgagcctctgcctctacaaaaagctttaaaaaataaaaaaaaaatagctgggcaaagttgtgtgtacccatagtcccagctacttgggaagctgagacaggaggattgcttgagctcaggagtttgaggatggaatgagctatggtcatgccactacgtgacagacagcctgacagagcgagttgctgtctcaaaataaataaataaataaaatccaaacacttcctgaaaacaggtaattttattttagcaagtaaaatgttacttctattatgatattactatctaataatctatgtgccctgaacagcacttcaaatgcaaataactattctgtcgatggctacacctgtaaaatagaccaaatgatattacattaacagtttatcaacctgccattattaattttagaatcatgagaatcatgaaatagcagaaggagtatgctgactgcctatggaatcccaacaaattagataaatgtaaatgtcagaaccaaccaaagtagtcaagctttggaatcattgtccaaactttggcagatacagcaggctatggcaacaatggggaacagggggcaaattttccaactcacaggcagagctggtraaaaatctgggaag

SEQ ID NO: 57174 - DNA, 1245 bp, Homo sapiens
acaatactgcatatggaaattaaaataaactaaacattgctttatattgtttgggataaacatatatatgaaaagtataaaaattgatggatatataaaccctaccttctgaatattggttacttgtaacaaggratgagggaaaggagtacattcatcagactgtcaggaaattttcattctgttggcaatgtgttctttcttgaggtgggtcttttaaaaattattctctatatgttttccacatatttcatattatcttataatgaaaaatagatgtaatggcttcttaaaaattttagtgaaaaataaacgaaccgtacacttcaaacagttatcatagggttaaacacatgcagaacagagtttcaagaagtttctgtcctcttctttttctcttctatcttcttggtaggaatcacttcctcctgtattcttttcccttgtctctattttaataagtgaggaatgcggtggcaaatgtgtgtactctaacttatagcctagactcaaatttgtgatatcagtcatacctgacctgtcatctagtgtcaattattcaatctctttgtaacttaattttttccatatgaaaaataaaaagagaaattgtgtttatgttgcaaatttaattctatgttaatttaatccagatgaaatacttaatgtagactctggccaaaaatgaagtccattaatctgtctattttgtaaccaaccagataaaaattacagtgctagttaatgacacaaagtctactaagattaagatatatcttttaggaataatatgtgtcacgcactgtgccaaattatgtgtttgatatattatctcatttaacactcataatgtaagagtcaggtgctagcattatctaatttgcagatatcgaaatggaggtatagtacctaaatgggtcctgagataaaggggaagaatctggatacaaatttattctggttgaatctaaagcccagtattttaatcattaaattttgtctgctagttttatgctgtttctttaatgccttacaaacatatggtaaagatggaaaaatgaaatgttggctcttctcactgaccgatgatgtcattgtcttgtgaaaaaaaagtggtgcttttatttatttattgttttatttgactttaagttctgggatacatgtgcagaacgtgcaggtttgctacataggtatacatgtaccatagtggtttgctgcacctatcaactcatcttctaggtt

SEQ ID NO: 57175 - DNA, 1245 bp, Homo sapiens
acaatactgcatatggaaattaaaataaactaaacattgctttatattgtttgggataaacatatatatgaaaagtataaaaattgatggatatataaaccctaccttctgaatattggttacttgtaacaagggatgagggaaaggagtacattcatcagactgtcaggaaattttcattctgttggcaatgtgttctttcttgaggtgggtcttttaaaaattattctctatatgttttccacatatttcatattatcttataatgaaaaatagatgtaatggcttcttaaaaattttagtgaaaaataaacgaaccgtacacttcaaacagttatcatagggttaaacacatgcagaacagagtttcaagaagtttctgtcctcttctttttctcttctatcttcttggtaggaatcacttcctcctgtattcttttcccttgtctctattttaataagtgaggaatgcggtggcaaatgtgtgtactctaacttatagcctagactcaaatttgtgatatcagtcatacctgacctgtcatctagtgtcaattattcaatctctttgtaacttaattttttccatatgaaaaataaaaagagaaattgtgtttatgttgcaaatttaattctatgttaatttaatccagatgaaatacttaatgtagactctggccaaaaatgaagtccattaatctgtctattttgtaaccaaccagataaaaattacagtgctagttaatgacacaaagtctactaagattaagatatatcttttaggaataatatgtgtcacgcactgtgccaaattatgtgtttgatatattatctcatttaacactcataatgtaagagtcaggtgctagcattatctaatttgcagatatcraaatggaggtatagtacctaaatgggtcctgagataaaggggaagaatctggatacaaatttattctggttgaatctaaagcccagtattttaatcattaaattttgtctgctagttttatgctgtttctttaatgccttacaaacatatggtaaagatggaaaaatgaaatgttggctcttctcactgaccgatgatgtcattgtcttgtgaaaaaaaagtggtgcttttatttatttattgttttatttgactttaagttctgggatacatgtgcagaacgtgcaggtttgctacataggtatacatgtaccatagtggtttgctgcacctatcaactcatcttctaggtt

SEQ ID NO: 57176 - DNA, 1245 bp, Homo sapiens
acaatactgcatatggaaattaaaataaactaaacattgctttatattgtttgggataaacatatatatgaaaagtataaaaattgatggatatataaaccctaccttctgaatattggttacttgtaacaagggatgagggaaaggagtacattcatcagactgtcaggaaattttcattctgttggcaatgtgttctttcttgaggtgggtcttttaaaaattattctctatatgttttccacatatttcatattatcttataatgaaaaatagatgtaatggcttcttaaaaattttagtgaaaaataaacgaaccgtacacttcaaacagttatcatagggttaaacacatgcagaacagagtttcaagaagtttctgtcctcttctttttctcttctatcttcttggtaggaatcacttcctcctgtattcttttcccttgtctctattttaataagtgaggaatgcggtggcaaatgtgtgtactctaacttatagcctagactcaaatttgtgatatcagtcatacctgacctgtcatctagtgtcaattattcaatctctttgtaacttaattttttccatatgaaaaataaaaagagaaattgtgtttatgttgcaaatttaattctatgttaatttaatccagatgaaatacttaatgtagactctggccaaaaatgaagtccattaatctgtctattttgtaaccaaccagataaaaattacagtgctagttaatgacacaaagtctactaagattaagatatatcttttaggaataatatgtgtcacgcactgtgccaaattatgtgtttgatatattatctcatttaacactcataatgtaagagtcaggtgctagcattatctaatttgcagatatcgaaatggaggtatagtacctaaatgggtcctgagataaaggggaagaatctggatacaaatttattctggttgaatctaaagcccagtattttaatcattaaattttgyctgctagttttatgctgtttctttaatgccttacaaacatatggtaaagatggaaaaatgaaatgttggctcttctcactgaccgatgatgtcattgtcttgtgaaaaaaaagtggtgcttttatttatttattgttttatttgactttaagttctgggatacatgtgcagaacgtgcaggtttgctacataggtatacatgtaccatagtggtttgctgcacctatcaactcatcttctaggtt

SEQ ID NO: 57177 - DNA, 1245 bp, Homo sapiens
acaatactgcatatggaaattaaaataaactaaacattgctttatattgtttgggataaacatatatatgaaaagtataaaaattgatggatatataaaccctaccttctgaatattggttacttgtaacaagggatgagggaaaggagtacattcatcagactgtcaggaaattttcattctgttggcaatgtgttctttcttgaggtgggtcttttaaaaattattctctatatgttttccacatatttcatattatcttataatgaaaaatagatgtaatggcttcttaaaaattttagtgaaaaataaacgaaccgtacacttcaaacagttatcatagggttaaacacatgcagaacagagtttcaagaagtttctgtcctcttctttttctcttctatcttcttggtaggaatcacttcctcctgtattcttttcccttgtctctattttaataagtgaggaatgcggtggcaaatgtgtgtactctaacttatagcctagactcaaatttgtgatatcagtcatacctgacctgtcatctagtgtcaattattcaatctctttgtaacttaattttttccatatgaaaaataaaaagagaaattgtgtttatgttgcaaatttaattctatgttaatttaatccagatgaaatacttaatgtagactctggccaaaaatgaagtccattaatctgtctattttgtaaccaaccagataaaaattacagtgctagttaatgacacaaagtctactaagattaagatatatcttttaggaataatatgtgtcacgcactgtgccaaattatgtgtttgatatattatctcatttaacactcataatgtaagagtcaggtgctagcattatctaatttgcagatatcgaaatggaggtatagtacctaaatgggtcctgagataaaggggaagaatctggatacaaatttattctggttgaatctaaagcccagtattttaatcattaaattttgtctgctagttttatgctgtttctttaatgccttacaaacatatggtaaagatggaaaaatgaaatgttggctcttctcactgaccgatgatgtcaytgtcttgtgaaaaaaaagtggtgcttttatttatttattgttttatttgactttaagttctgggatacatgtgcagaacgtgcaggtttgctacataggtatacatgtaccatagtggtttgctgcacctatcaactcatcttctaggtt

SEQ ID NO: 57178 - DNA, 2223 bp, Homo sapiens
atgaagatccatgaacaggagtcatttgtaattttgctgaggcataaatttgaatcacccatgctaatgaggatgaggttggttggaagaagtacaaaagcaagtttgttacctgtgagtgagcctagataactactcagcatccacatcacatcatatcacatcgcaactttgttctgacagagcaggagcatcgccatcttggacaagcccctcattctaaagttcaccttaataaaaaaaaaactgcctaaatccaaagggcatcagtctaatgactaaggtcggcatgaccataaaccacaaataacatctctaaccagaaacattccaaactcctccccagccagagacaggctagcccyaagataaaccccctccagctgggaagatgccagtctcgagatgacatccctctggccggaaagatgcctgccccaaggcaaactcccctccacccagagacattccaaccccaccataaaacttctccctcaaacagtaacattcgaagcttctgataagccccctcaccctaaaactaatacatactcttaatctgtaagagaaagcactcctgatagaaattggccaggagtgtctctcaggttttaactaaagaaaacctgtctttaactgccagctgcatttcgtgtttctttcctctttaactcttacatgttctacattgttgcatgtgtactaatgtttaaagcatatatttgcatttcacaggggaaattatctgctgggattcccagagttcttggaacatactcagttttgaacataaggatcctttcattgatccattgatcacagctatggaccaaggcaaatgttaatatcggcttctattctcagccataatcctgctccattcctaaaatgcagagtgactaagatgcatactgacagggaatccagtgagtccaatttgtcagagaggtattcacccatcaaagtggtctgaacactgtggaactcttcattccaaattgttagagagtacgacatgggaaaaagcactggatttggagccaaacacttactatctgaataatctggggcatgacattaaatcattcttagccttactgttttcgttagtaaaatgaggctaattacaacatggcaggtcatttctcccttcctcactatactttgttccttctacccctcactacttttgaaattatgctatgagaagttgtcaaatttagcaaagaaaagagtttttgtctccattacgatgaatcagaaatacctgcgcctctttctataaaagaaggcacaggccataaaggtctacctttccctctcagcagggaccagaatagaggacttcatgtccctgattccagggggaaatctgaaccctcaggagtagaagggagataaggagattaaagacagcagaagcctctgaattatctcctagagtacacttttgtagaccgaaggatagttcaatgaggaaagtaaaaagctgctatatatcaccttctgtgttttcctcctggtaatgagctatacctgcataccagtctggacattctgtgacaatggttacaataattacaataataacactatcactaaaggtagctataaataaataggtgctcgaaatctgaagtgttatatttaaattttggggattatacttgtggcctccttgattacagtttatgtcactgtagaattccaccagagagcaactgattaggaacacattttgcagtcctttatcttgctgaatctagaaccattgcttacagttttcatgtcctgagcctgtctcccatctactttatcagagactccctaacacacttttgagaaatgagttactccacacatgtaaaaaggcatgacagatacagaaaagttttccaaccaaaactaatcattagtgctagaggtggaagagttcatatagatcactagcacagtgttgtccaatagaactttctacattgatggacatgttctatatccgcactgtcctgcacaaatgtgccactagacacgtacaactactgagcacttgaaatgtgactagtgagacctagaaaccaaaattttaattggatataatgttaagtaattttaatttgaatttaaatagtcacatgagcctgacattcactgtactggataattcagatttatggcaaagtttcttgacctgaggcctatagatcctctagtatccaaaaa

SEQ ID NO: 57179 - DNA, 2223 bp, Homo sapiens
atgaagatccatgaacaggagtcatttgtaattttgctgaggcataaatttgaatcacccatgctaatgaggatgaggttggttggaagaagtacaaaagcaagtttgttacctgtgagtgagcctagataactactcagcatccacatcacatcatatcacatcgcaactttgttctgacagagcaggagcatcgccatcttggacaagcccctcattctaaagttcaccttaataaaaaaaaaactgcctaaatccaaagggcatcagtctaatgactaaggtcggcatgaccataaaccacaaataacatctctaaccagaaacattccaaactcctccccagccagagacaggctagccctragataaaccccctccagctgggaagatgccagtctcgagatgacatccctctggccggaaagatgcctgccccaaggcaaactcccctccacccagagacattccaaccccaccataaaacttctccctcaaacagtaacattcgaagcttctgataagccccctcaccctaaaactaatacatactcttaatctgtaagagaaagcactcctgatagaaattggccaggagtgtctctcaggttttaactaaagaaaacctgtctttaactgccagctgcatttcgtgtttctttcctctttaactcttacatgttctacattgttgcatgtgtactaatgtttaaagcatatatttgcatttcacaggggaaattatctgctgggattcccagagttcttggaacatactcagttttgaacataaggatcctttcattgatccattgatcacagctatggaccaaggcaaatgttaatatcggcttctattctcagccataatcctgctccattcctaaaatgcagagtgactaagatgcatactgacagggaatccagtgagtccaatttgtcagagaggtattcacccatcaaagtggtctgaacactgtggaactcttcattccaaattgttagagagtacgacatgggaaaaagcactggatttggagccaaacacttactatctgaataatctggggcatgacattaaatcattcttagccttactgttttcgttagtaaaatgaggctaattacaacatggcaggtcatttctcccttcctcactatactttgttccttctacccctcactacttttgaaattatgctatgagaagttgtcaaatttagcaaagaaaagagtttttgtctccattacgatgaatcagaaatacctgcgcctctttctataaaagaaggcacaggccataaaggtctacctttccctctcagcagggaccagaatagaggacttcatgtccctgattccagggggaaatctgaaccctcaggagtagaagggagataaggagattaaagacagcagaagcctctgaattatctcctagagtacacttttgtagaccgaaggatagttcaatgaggaaagtaaaaagctgctatatatcaccttctgtgttttcctcctggtaatgagctatacctgcataccagtctggacattctgtgacaatggttacaataattacaataataacactatcactaaaggtagctataaataaataggtgctcgaaatctgaagtgttatatttaaattttggggattatacttgtggcctccttgattacagtttatgtcactgtagaattccaccagagagcaactgattaggaacacattttgcagtcctttatcttgctgaatctagaaccattgcttacagttttcatgtcctgagcctgtctcccatctactttatcagagactccctaacacacttttgagaaatgagttactccacacatgtaaaaaggcatgacagatacagaaaagttttccaaccaaaactaatcattagtgctagaggtggaagagttcatatagatcactagcacagtgttgtccaatagaactttctacattgatggacatgttctatatccgcactgtcctgcacaaatgtgccactagacacgtacaactactgagcacttgaaatgtgactagtgagacctagaaaccaaaattttaattggatataatgttaagtaattttaatttgaatttaaatagtcacatgagcctgacattcactgtactggataattcagatttatggcaaagtttcttgacctgaggcctatagatcctctagtatccaaaaa

SEQ ID NO: 57180 - DNA, 2223 bp, Homo sapiens
atgaagatccatgaacaggagtcatttgtaattttgctgaggcataaatttgaatcacccatgctaatgaggatgaggttggttggaagaagtacaaaagcaagtttgttacctgtgagtgagcctagataactactcagcatccacatcacatcatatcacatcgcaactttgttctgacagagcaggagcatcgccatcttggacaagcccctcattctaaagttcaccttaataaaaaaaaaactgcctaaatccaaagggcatcagtctaatgactaaggtcggcatgaccataaaccacaaataacatctctaaccagaaacattccaaactcctccccagccagagacaggctagccctaagataaaccccctccagctgggaagatgccagtctcgagatgacatccctctggccrgaaagatgcctgccccaaggcaaactcccctccacccagagacattccaaccccaccataaaacttctccctcaaacagtaacattcgaagcttctgataagccccctcaccctaaaactaatacatactcttaatctgtaagagaaagcactcctgatagaaattggccaggagtgtctctcaggttttaactaaagaaaacctgtctttaactgccagctgcatttcgtgtttctttcctctttaactcttacatgttctacattgttgcatgtgtactaatgtttaaagcatatatttgcatttcacaggggaaattatctgctgggattcccagagttcttggaacatactcagttttgaacataaggatcctttcattgatccattgatcacagctatggaccaaggcaaatgttaatatcggcttctattctcagccataatcctgctccattcctaaaatgcagagtgactaagatgcatactgacagggaatccagtgagtccaatttgtcagagaggtattcacccatcaaagtggtctgaacactgtggaactcttcattccaaattgttagagagtacgacatgggaaaaagcactggatttggagccaaacacttactatctgaataatctggggcatgacattaaatcattcttagccttactgttttcgttagtaaaatgaggctaattacaacatggcaggtcatttctcccttcctcactatactttgttccttctacccctcactacttttgaaattatgctatgagaagttgtcaaatttagcaaagaaaagagtttttgtctccattacgatgaatcagaaatacctgcgcctctttctataaaagaaggcacaggccataaaggtctacctttccctctcagcagggaccagaatagaggacttcatgtccctgattccagggggaaatctgaaccctcaggagtagaagggagataaggagattaaagacagcagaagcctctgaattatctcctagagtacacttttgtagaccgaaggatagttcaatgaggaaagtaaaaagctgctatatatcaccttctgtgttttcctcctggtaatgagctatacctgcataccagtctggacattctgtgacaatggttacaataattacaataataacactatcactaaaggtagctataaataaataggtgctcgaaatctgaagtgttatatttaaattttggggattatacttgtggcctccttgattacagtttatgtcactgtagaattccaccagagagcaactgattaggaacacattttgcagtcctttatcttgctgaatctagaaccattgcttacagttttcatgtcctgagcctgtctcccatctactttatcagagactccctaacacacttttgagaaatgagttactccacacatgtaaaaaggcatgacagatacagaaaagttttccaaccaaaactaatcattagtgctagaggtggaagagttcatatagatcactagcacagtgttgtccaatagaactttctacattgatggacatgttctatatccgcactgtcctgcacaaatgtgccactagacacgtacaactactgagcacttgaaatgtgactagtgagacctagaaaccaaaattttaattggatataatgttaagtaattttaatttgaatttaaatagtcacatgagcctgacattcactgtactggataattcagatttatggcaaagtttcttgacctgaggcctatagatcctctagtatccaaaaa

SEQ ID NO: 57181 - DNA, 579 bp, Homo sapiens
tatgcttcccatgaatggaggtttccagcaggcaacagatgatcaaatgttataaatgtcatggatggacatggcactgggggagaggccatattttgcatgaagtgcaagtgaggaaaaataaaattataygcaggtcaaattttttaaaattcaaaatgaaaatagattaattgagtcacattggaaggtggcggaagtaactttgtaaaatagaaaaacaccagcgacttaaatcttcatgttaggttagggtttatttgaaaatcagcaacatgatttattaattgatctttcattctgttatttgattgcaggaaatctctttaaatcagatggaccatttttgattctttgcttagagtttcctatccggactagaaaatataaggtcctttccagtttttagactttattatttgaggatatattcttttccattataaattgtgaaaattaaatattctctttaaggagagagaaagctttataatgtgaagcaaagacatctgaattattgtatcagtttaatgttctgcagttacacctaaagattttgggttacttataaaaataaaa

SEQ ID NO: 57182 - DNA, 786 bp, Homo sapiens
acagtttgaaaagcataagcttttttataagcctaaggtagtaagaattatctttttggcaaaatacacttttatttttctttcagtctttatgatttttttttcaaaggaaagcacttggcagaagcgacaatcatatgaggatcactgggaagcatttaatctgattttgcacaatggtatgtttgaagctgctttagcactgaggaagttctattttaaatcagatcyactgatctatggcttttggtttgttaggagttgccttccaagttataatatactacggtttttaaaacctgaagaatgtttgctcttcttacatctgcctgttgaataccacaggcaaaatattagctgcatgctttcaaagctaagtgacactgtgaaaacaaacaatatgatactctttgttcctaaaatacaatatttctcaataaactcttcatggaggaatgttatgaaacccaaaatagtttattcattggatgctgaactgtatgtactttccaagaactatagtgtcaatgcacttgacagtgtattttggtttctttctttgtgtgattcttagctttctagctcttatcacttaccactgtttccttccttttacttaaaatcatctacaaagagaacacaaagttgcatagatgaatgtagcagtgtagaaagtgggtcttctctggaatctcacttagacctttttaatgggcttgcctttcatgagctggattcagagaacttcttaaatttcatctgcctgaaatttaaactcattaaaaa

SEQ ID NO: 57183 - DNA, 1044 bp, Homo sapiens
tgtggctatgattttaagtcagggagcttcttgattttaagttagtttccacgcttgctcctataacctcttagctgtgtgacaacaatgacaatgacaaaaaaggtgatgacagtggtcaagggcttgctctagaccaccattcatgcttgttccctatctcacaatgaccctctaaggttggtcataatctcaattttactttacagattgagagactaaggttttgagggttcagtgatttcctcaagttaatataggaagtcaccttaatttgaaccttgtttgaacccaggcctgatagctatgtctatatccttctttgcctcctttgaaaagtataaggttgaatttatgatgagattatatagatctgtctctgaagtattttctaggcaattcaaatgaaactcttcaaaatacaaattgccctctgtgacaaggaggactttcccttcccaatgccttccttcaagagctttttcatagactcccctcagggttcagcctggggcctggtggagaaaatrgggcaacagaacaataaaacaaaagaaagcaacagatcctaatgcctgtaactgatcatgaatgaaataacacttccccagcctggaaaaatgtcagtttgatgctctttgttctaaaagctctggttccacagagcatcaatttcccctaataataagcttttttattcctcatctaatgatgcagccttgtcttgaggattcttatcatctttattgctcatccacgatgacagacacacgtacagtcagtttgtcacttcccttcttttctttttctttctcgtcacacatgatttctgccccagcagaagcaggggctttgagcagcgccccccgcttcctccacctcctcgcctcccacacaaccatgcacagctctttgaattctctgcagagcatcatctgcttccccatgaataagcttgtctttcttttcttccctccccgcatggtgactctgtgtcagctgggtgtgcatgggtaccctgcattgttgaccagttgtgcattt

SEQ ID NO: 57184 - DNA, 1044 bp, Homo sapiens
tgtggctatgattttaagtcagggagcttcttgattttaagttagtttccacgcttgctcctataacctcttagctgtgtgacaacaatgacaatgacaaaaaaggtgatgacagtggtcaagggcttgctctagaccaccattcatgcttgttccctatctcacaatgaccctctaaggttggtcataatctcaattttactttacagattgagagactaaggttttgagggttcagtgatttcctcaagttaatataggaagtcaccttaatttgaaccttgtttgaacccaggcctgatagctatgtctatatccttctttgcctcctttgaaaagtataaggttgaatttatgatgagattatatagatctgtctctgaagtattttctaggcaattcaaatgaaactcttcaaaatacaaattgccctctgtgacaaggaggactttcccttcccaatgccttccttcaagagctttttcatagactcccctcagggttcagcctggggcctggtggagaaaatggggcaacagaacaataaaacaaaagaaagcaacagatcctaatgcctgtaactgatcatgaatgaaataacacttccccagcctggaaaaatgtcagtttgatgctctttgttctaaaagctctggttccacagagcatcaatttcccctaataataagcttttttattcctcatctaatgatgcagccttgtcttgaggattcttatcatctttattgctcatccacgatgacagacacacgtacagtcagtttgtcacttccyttcttttctttttctttctcgtcacacatgatttctgccccagcagaagcaggggctttgagcagcgccccccgcttcctccacctcctcgcctcccacacaaccatgcacagctctttgaattctctgcagagcatcatctgcttccccatgaataagcttgtctttcttttcttccctccccgcatggtgactctgtgtcagctgggtgtgcatgggtaccctgcattgttgaccagttgtgcattt

SEQ ID NO: 57185 - DNA, 1044 bp, Homo sapiens
tgtggctatgattttaagtcagggagcttcttgattttaagttagtttccacgcttgctcctataacctcttagctgtgtgacaacaatgacaatgacaaaaaaggtgatgacagtggtcaagggcttgctctagaccaccattcatgcttgttccctatctcacaatgaccctctaaggttggtcataatctcaattttactttacagattgagagactaaggttttgagggttcagtgatttcctcaagttaatataggaagtcaccttaatttgaaccttgtttgaacccaggcctgatagctatgtctatatccttctttgcctcctttgaaaagtataaggttgaatttatgatgagattatatagatctgtctctgaagtattttctaggcaattcaaatgaaactcttcaaaatacaaattgccctctgtgacaaggaggactttcccttcccaatgccttccttcaagagctttttcatagactcccctcagggttcagcctggggcctggtggagaaaatggggcaacagaacaataaaacaaaagaaagcaacagatcctaatgcctgtaactgatcatgaatgaaataacacttccccagcctggaaaaatgtcagtttgatgctctttgttctaaaagctctggttccacagagcatcaatttcccctaataataagcttttttattcctcatctaatgatgcagccttgtcttgaggattcttatcatctttattgctcatccacgatgacagacacacgtacagtcagtttgtcacttcccttcttttctttttctttctcgtcacacatgatttctgccccagcagaagcagggrctttgagcagcgccccccgcttcctccacctcctcgcctcccacacaaccatgcacagctctttgaattctctgcagagcatcatctgcttccccatgaataagcttgtctttcttttcttccctccccgcatggtgactctgtgtcagctgggtgtgcatgggtaccctgcattgttgaccagttgtgcattt

SEQ ID NO: 57186 - DNA, 725 bp, Homo sapiens
tgcatttctttctcacttgaaagtcttaaagtataggagatamacctttatttatattccatgtaggagacattacctaaaagtacatattttaacaaatctcctctcccctcccctccactctcctctctcctccctccctcccttccttccttccttccttccttggctgtttaactttgtcgcccaagctggagtgcgtggcgtgatcttggctcactgcagtctccgtctcccaggttcaagcaattctcctgcctcagcctcccaggtagctaggattacagacacatgccacatgccaccatgcttcagctgtgtttttttgtttgtttgttttttgtttttatcattagtagagacagggcttcaccatgttggcgaggctggtcttgaactcctgacctcaagtgatacacctgcctccgcctccaaagtgctgggattacaggtgtgagccaccatgccttgccctgaatttatttctattaacttcttccatattcaacattgcctctaaaagaaaaaccttcaggatagtcccaaatggccaaatgggtagagttcaaatatggccaaataggcttcttccatctaataaacccaattttgtacaggatccacatgtgggattgaaccaaacatagatttaaaaaactcaaaagtaacaatacaacaataaaaaatacaaccaattaaaaaacaatacagtatatagcaattat

SEQ ID NO: 57187 - DNA, 714 bp, Homo sapiens
aatgctaaatgacgagttaatgggtgcagcacaccaacatggcacatgtatacatatgtaacaaacctgcacgttgtgcacatgtatcctaaaacttaaagtataataaaaaaaaatttccattacaaaaagcaaacaaacaaaccaaagaactatgcccgagtttgaatctgagctcagttaacctagagaacagggtttcttaactgttcttgcctcatttgttaaatagataataaaagcacctattttacagggtttttttgagtagtagaaagaaataatagatatagaacacttagaaaaactgcctatggcacataggtgtttaatccagttatctgttgtaatctcttcttgatattttatactattatgaagtcatattttaaaagaatcctagaaaatgtgatctgtgctcaacatttaagcactgatcaacaggtagaaagcactaagtttcattcttaaatgaaatttggagaagcctgtcagggacaggtcccagtgcaaatctagcaggaaagaggaactttctctggttctcaagagcaggcaaggttagaagataggttgctaccttttgctttaactgaggtttgacatcactgaactgggaaggtaataaatttctccctattggatctcaactctttgttggcaaaatgctcctctaagtaccttaaaatcartacatactttcactgcagagga

SEQ ID NO: 57188 - DNA, 633 bp, Homo sapiens
  misc_feature (1)...(633): n = A,T,C or G
gggccttaggagttgagagcaatgcttgtttccctcatggtgcacaaaggggcctggtggctgagaggtccataatcaagtggtaaccacgtttgttgaggactttctacttaagtgtccayagatgtgattgatgatgatcggtatttctgggaagagttgcatggtttactgcagtggttctcaaactttggtgtgcaggagtgtaacctggatgtgtcttaggaattcaggttcctggattgcaactgtaatgaatctttttcagtcaatttgaggtagctctgggggatctgtgctttgaataagctccctatgaaatgctgatgcaggtgggccacaaatcatgttttgggaagtatgagtgttatgggacaagtcctaggttgctactcagaagaagggagttctggccttggatctccccctaatgtactgtgcaaacatatgtaagttatttccagtttctgggcttgtttcctctataaaataagaagattggactagatcagcaagtctcaagccaagctgcatgacagaattacatggagagcttagacacagtgcttgtgcctgagccatatttcgagaccctggtgcntcagcctatcataaagttgcnacacacttgga

SEQ ID NO: 57189 - DNA, 720 bp, Homo sapiens
ttctgtgccttggtttccttatctgtaaaacagacctataattgtgcccacctgagcggattgttgtgaggatgaaattgagayacaactaagtgcttagaacagtgcctattacgtccttggcacctgatgaatgtttaaagatcacttataattattattattattactgatgcatggtccatcaacccttttactgctctataaccttttttggtgttatgctattgaaatggtttggctgtgtccccacctaaatctcatcttgaattgtagctcccataatccccatatgtcgtgggagggactcagtgggaggtaattgaatcatggggccgttacccccatgctgctgttctcatgacagtgagtctcatgagatctgatggttgtatcaagggtagttcccctgccatttaagatgtgcctttgctcctcctttgccttcagccatgattgtgaggcctccccagccatatggaactgtgagtccattaaacatccttccctttatagattacccagtctcaggtatgtctttattagcagcatgagaatgaactattacagttactaatacaaaatagacaccaaatgcatacctattgagtgaatgcatgaatgagtgacaacagtggtaactttaaatcatcgaaaagattttgatgttttgtttataaagaaaaatcaaagtagagtgaaagttttaacaggttggtg

SEQ ID NO: 57190 - DNA, 1047 bp, Homo sapiens
tccttattgtttctcagagaggtgcccttctggctcatgggatccgaggcctctggtgaattggcttgagcattctcacactctagaagacatcagaaatacccaaagtgctaattaaaaacacacacctcagaactctactcctagatatttcaaggtagagtaagtagagaggggctccaggaatattataaaattcagcttttcataaaaatgtaccattaacacatatacaccatagaatactatacagccataaaaaagaatgagagcatgtctttcatgagacatggatggagctggaggccattattcttagcaaactaatgcaggaacagaaaacaaaatgccacatgttctcacttataagtgggagctaaatgataagaacttataaacacaaagaggaaaacaacagacactgggatctacttgagggtggaggttgggaggagggagagaagcagaaaagatcactattgggtactgagcttcatacctggctgatgaaataatctgtataacaaacctccatgatataagtttacctaagaaccaaaccttcacatgtaccccgaaacctaaaataaaagttaaaaaaaaaagaatgttgaggtcagtaaaggctttaagaggattaaaaaaaatttaccatttatatagaattgtgcatgaaatcatgtgtacagtgtggtgacttttcacaagtgaatatactcatcgatattgttttatacagtggcaattcattcattctcattgttgtattggatttatttatttatttaatttttgggggatgggtcttgctatgttgtccaggctgggcttgaactcctgggctgaaacgatcctctagactcggcctcccaaatagctgagattgcaggcatgtgccaccatgccmggtttgctgtgttaagatttaattatatattatatatacatcatttacttgtccattctagtgtaaattgacatttgaattgtagccaagtttgggttcttataaatagtgctgttctgaatattttagtggatgtcttt

SEQ ID NO: 57191 - DNA, 1235 bp, Homo sapiens
atacatacacacacgtgtacatatacacacacaactgtgaaggaagccctgaacagcagaaatcctgtcatttgtgcaactaagtccttgagtcatgagacccccgcctcaagtaccactgtctttgccactaactaccaatgtgtctgggagaaagttacccttctgttcctcagtttactcacctgtaaaaagaagataatataattgagctataaaaatatattatttcatctctccaatactatttctcatcctattcatacagtataaaaatagcactgctgaaaaacccagaggtgaggttcttttatcagaggacaaatatctgagatgtgtagaggttaagtgacttgcccaaggtcgcactgcaatttaatatcaaaatcaagaccaaaatacaggttccctttagtgataggcttcctgatccctcatcctaacaccctccattcctgcatattcccttccccaaataaacttctgccaaatgaggtgcattatatttacaaagaggaagaaaatgaacacacacacacacacatacatatatatacacatgcacaatataaaggcatcttaaaataatggaaaagcaaataagaaaaggacaaaagcaatattggatttcagaatgttaatactgttggacagggaactagtatacctgaaagctgagaaaacatgttacagggttttccacaatgttgcaatgcccttcttgttctttatttagattagatgtaaggagccagcagtcacacagcccatataagatttgagggaacaattagaataaagagggtaactagatcatgtttggctatgatacacttatttttttaaatgtttaagtagagaccaaatccaatcaccactttactctctgtggatcatgaaaaaaagacagcatcaacatgtttccaaagggaatagctggcccacatttcaaaaatgaaaattttaaacactttttaaaagagttttagcaagcgrtttacatatagaatgtagtaattgcaattatatagcacaatgtttttcttattttaaaaaaatagtcttacccttgtctttggaaacatgctaaacatttttataactgacctggttatgggtaaattcatcagatttataggtaaatcaaagtgcacagaattgggaaattttagctaaaatttccaaggagatgtaacatggatagaaacaacgctcttcacgtatgtgtgtgtatg

SEQ ID NO: 57192 - DNA, 663 bp, Homo sapiens
ggagtcagagtcatcagacattctggagccttggatgggaaagaatttagcatgctgaacacctccagcatrcacactcacacacacacaccacacacacacccaacatagtcacccactctcgtgtatacacgtatatagatttataccagaaacttgctgaaggaggcacacaaacagacatttacccacaaacataagcataaggacctttataaaaatgatatatgcagacacgtgcaacatgcacataaacatatatacaaacaggcacagacacacaagcacacacatacatacaagctgatgtctacaaccacgtcttgattctctcttctcttcccagaaatatgtgtgcacaccctagcagccacacaatatgcgtgtgtatacacacatatgcatgacatgtgcttccaagaaagcatgcacaaacaataatgtacatacacatttacacacagccccagtggggctccagtccctgctatcacaggacaaacctgatcaacatggctggactgagcttagaattggcaaaagcatctcacctatacacacacacacaccaccgtggcaccatttgggacagaaaagatcatgcctgtgctctctcatccccacccctctacctgtaagatgctgaggatgtaacttgatcgg

SEQ ID NO: 57193 - DNA, 663 bp, Homo sapiens
ggagtcagagtcatcagacattctggagccttggatgggaaagaatttagcatgctgaacacctccagcatgcacactcacacacacacaccacacacacacccaacatagtcacccactctcgtgtatacacgtatatagatttataccagraacttgctgaaggaggcacacaaacagacatttacccacaaacataagcataaggacctttataaaaatgatatatgcagacacgtgcaacatgcacataaacatatatacaaacaggcacagacacacaagcacacacatacatacaagctgatgtctacaaccacgtcttgattctctcttctcttcccagaaatatgtgtgcacaccctagcagccacacaatatgcgtgtgtatacacacatatgcatgacatgtgcttccaagaaagcatgcacaaacaataatgtacatacacatttacacacagccccagtggggctccagtccctgctatcacaggacaaacctgatcaacatggctggactgagcttagaattggcaaaagcatctcacctatacacacacacacaccaccgtggcaccatttgggacagaaaagatcatgcctgtgctctctcatccccacccctctacctgtaagatgctgaggatgtaacttgatcgg

SEQ ID NO: 57194 - DNA, 1143 bp, Homo sapiens
caggaggctgaggcagagaactgcctaaatccgggaggcggaggttaaagtgagccaagatcatgacactggcactccagcctgggcaacagcgcaagattccatctcaaaaaaaacaaacaaaaaaacaatcrtcctagtctttcttcttttgttctcctaatcgtagtctttctttaaggtgccattgtcctctgtatttcattttatttatcaatgtgcatgcctcatgtctctattaggctggaaattatacaaaggcaatgatgttctacttgtctttgaaattcttcaatgcctaatagagtgatcagcctgtaataggggcttaaaatccgaaggagtattgatgaataaatgagtcaggaaatatgaacaacactatgagttcttttattaattaccttcttgaacacaggcaaaccattaatttacttggaatccagtttactcatccttacaattacagggtggatttagttattcttcaaggtatcatacagattttttgtttcacatattaaaattttttcatattataaatgctttataacattattgtgatatatggattctgctgaaacatacaattttatcactgcttccatcaaatatattagctatcaaaaaaagaaagttaaaaagactaaaatcaggaggtataaattttatatacagcaaaatgtcagggagaagaaaaagatttaaggagcacaggcttaaaatcagtagtcctagaatctagtctgggctttacgacttactagctgagtgatcttcacaaataagtcaattaactccttaggctccatttcctggtctgtaaaataaagattataatacttgctttatctccttctcagggttgttgtgaggtccattaagataatatatgtgaaagcagtttatatagtgctgcataaaggaatgttgtagttttacccctcaataccaatgttttaatggcattaaactatgtattgttatggcacaatgaattcaaaattcaccaaggctctgctaaagaaaaacataaaatgatagatgtgatgggaaacagttctgaaatcttaattacattatgcaaatgtgaggcaatattattttatatcttgatgcagatttctgaatcggttataggga

SEQ ID NO: 57195 - DNA, 1143 bp, Homo sapiens
caggaggctgaggcagagaactgcctaaatccgggaggcggaggttaaagtgagccaagatcatgacactggcactccagcctgggcaacagcgcaagattccatctcaaaaaaaacaaacaaaaaaacaatcgtcctagtctttcttcttttgttctcctaatcgtagtctttctttaaggtgccattgtcctctgtatttcattttatttatcaatgtgcatgcctcatgtctctattaggctggaaattatacaaaggcaatgatgttctacttgtctttgaaattcttcaatgcctaatagagtgatcagcctgtaataggggcttaaaatccgaaggagtattgatgaataaatgagtcaggaaatatgaacaacactatgagttcttttattaattaccttcttgaacacaggcaaaccattaatttacttggaatccagtttactcatccttacaattacagggtggatttagttattcttcaaggtatcatacagattttttgtttcacatattaaaattttttcatattataaatgctttataacattattgtgatatatggattctgctgaaacatacaattttatcactgcttccatcaaatatattagctatcaaaaaaagaaagttaaaaagactaaaatcaggaggtwtaaattttatatacagcaaaatgtcagggagaagaaaaagatttaaggagcacaggcttaaaatcagtagtcctagaatctagtctgggctttacgacttactagctgagtgatcttcacaaataagtcaattaactccttaggctccatttcctggtctgtaaaataaagattataatacttgctttatctccttctcagggttgttgtgaggtccattaagataatatatgtgaaagcagtttatatagtgctgcataaaggaatgttgtagttttacccctcaataccaatgttttaatggcattaaactatgtattgttatggcacaatgaattcaaaattcaccaaggctctgctaaagaaaaacataaaatgatagatgtgatgggaaacagttctgaaatcttaattacattatgcaaatgtgaggcaatattattttatatcttgatgcagatttctgaatcggttataggga

SEQ ID NO: 57196 - DNA, 1358 bp, Homo sapiens
  misc_feature (1)...(1358): n = A,T,C or G
tctgggacttcacctctttctttgaaagtatgtgtgtgtttgtgtgtatgtgtgtgtggngggtgtttgtataagagagaactgcagctgaccagtgatgacagaagcctctggacatcaaagtgggcagagccctggatggatgggctggaggcaggcctgggtcccattaggctaattcctctcaaggttggaagaggccagggcgggaacttctgagaacatggagaacaagtcctttcatacgacctccctttgagcaggccttggggtgggaccggggtcgggtgggtggagggtggggagtgtgtggagaggtgaggccacagtcaggctgggcaaacagattgggcagcggctgtgagcacagagcgcccattgtgtacccagagctctgctttcaataatcttctcggaagaatgtttcattgagcgccagagaaaggagccattgaaatgccagggctgggccctatgaagggttaaagacaaggaggccatgggtacctgggctcttgcctatcctggctcaaagacctgatatagggatcctgatcactaagacaagggcactcagtgagaccacccagaggtctggaagcgagggtcagagggggagatgtatgtctgccccagaaaggctaaagtaggtgccccagtatcaaggaggaaaacccctgtcttcccagcaccattttgcccaagtaatatccaagaagatgttagataccttctcagataccccttcagcctgccttctgtggagagcaacccatcgggcagacgtgtctctgcgtggacttcctgcgtggacctcctgcgtggacccataccacgggtcctgcaatccattctccacaatgcagccgtatggcttccttaaacacctgtggcctttccattaatcagtaattaattataatgaatgatgctgaagcagagagtgtgggagttacggtaagagccagtggtcactaaactaggtgaccaagggaacatgtagagttttctcttccaaatagaaagacctgctcattagagggatatggcctggctgtcagagagggcaccagagtgggattctctgcttccacacygagtcccacgtgtctttgccagctactgaagcttgtggggcttgaagtgtgggtaacaccatgctggcctcagtgggctgcacagaggaggcagaaggtggatgagaggggcctgccactggggagggagagcactcttgttgggcagctgagaatgacctccggcaccaccatggaacccgctgaagatgttgctgcctcactgagcctgtgtctgcagagaggatgttctgcaactgaagctgaccttgcactatgaac

SEQ ID NO: 57197 - DNA, 746 bp, Homo sapiens
ggatccacagggcacgtcccttcagtgagcaggcatgagcagaagtaattctaagcagaatctgaactcctctgagaaataaggcagcttgcacaaaaataacataaaatgagacatcacatacacacctggacttgcctttggaggggcagctgtgtgtgcatgggctgagccagagcaccctgtgctgttcactcacacctttcctggcctggcccagaaacagacttcacttgggccctcagctggcccccgggagagcaaatattttgggcttagtcctcaatattttggccagtgctgacaaggcctgggcctagagaccagacataagctttttggaggacaaagactgccagccaaggcagagttatttttgcctgttgggttaaattgagttgggcataacctggctggggtttgctccttgggcagcctgttcctgatttcyaatgtgcccagagctgaagtttgcctctcaaaggcttggcagaccaggtgcattcttttttttttccctttttttttttttttttttttttgagacggagtctcactctgtcacccagactatagtgcagtggcacgatcttggctcactgcaacctccgtctcccgggttcaagtgattctcctgcctcagcctcctgagtagctgggattacaggtgcacgccaccacgcccagctaatttttgtatttttagtagagacggggtttcaccatgttggtcaggctggtctcga

SEQ ID NO: 57198 - DNA, 588 bp, Homo sapiens
atgagtagagaagcaagttgtctggggtcacccaaacagaaaggacagagcagggacagtgcaccctgtgaatgctttctccagctcagacggtgctgggcctgacaccttctcctgggtgtctccaattctaccctgggttgggagctttgcttktcctgggacatttcctgcccctggcttcattgctattgtcacaggggtccatgttataccacaaaagatcccacagacctggagatgggaaagacagcttgttcccttcccctgcctggctgtcaggatctccgagaagactaagacctggaagggaataacagctgaaaatacacagcctccgtcatgccctgtgcttctcctcccagatattacctcatctaatgctatttttctcatcttacagaagaggaaactgaggctcacagccaaggctgctgttaacaatagggcacctttgttcaaattagaaaactcgccccttccaggtatatacctggcttgatgagcagaagtcacttttatgtgaaggaaaaggcagtgtcccccatcccgaccccacaggaagacaaattagaaaaagccccctct

SEQ ID NO: 57199 - DNA, 563 bp, Homo sapiens
atcccccttccatggaaagagttaaaattggggaggatagcagggcaagctgaagacccatagaggaagcatttatttgagctctttaagttcaggttttgatatttttgctctgcrtggtgaaaacaaattaataatgttaatatttgtagcccatggagaaaactcttcttaatctcttctctgaaacctacaccaggcctatgattcatctttgggctctgtttagattcctgattattgagccagaaagattttatttaattactatttgaaaagtttccaatgacaccatctcaatggtgttaattccacttggatcagtgcttactatccccctgatgttcacaggtctggatatagcatttgcccctttgctgacatttcatgcttgttgaagggagtgatgatcacaccagtggctcagggctgcgtgtccttaggctggtcatatttcataactggtctcagttcagacagaaactggcccctttccaaaacccagtttagttcagttctttgctgggaagatgaagaaaatcaggaaagcattgagttatgag

SEQ ID NO: 57200 - DNA, 719 bp, Homo sapiens
tccatgtctgggaaggggcaagaaggtactttctggagtgctagaaatatgctgtatctgagaggtggttgcgtggaggcatatacatgcgaacatttaaccagccgcgctcgaaaaacgtcttcccttcactctatatatatctcagtaaacaattaaagctatacatgtgtgtagtcaacaatcccaaggtggaacatggtgcagtggagaaaggctgtgagctccagaggaagagacaggacagcttctagttttttccacctgtctgaagtagttcctgcctgccacttggtagacaccaaataaatactgttgaataatcaaataaattaatttgatgctgtgactatatttcttaacatggaaacctgtcaatgatatctttccaagtgcaataaacaggctgtagaagagcatgtgagaattatctcatttttgtaaatatttatgttcatagtttttgtgtatctagtctggaagaacacaccaaaatcctaatgaaagttatgttgggtgaaaagataaagacaatatattttcattctttttttcttctttgtacttaaatttttttctagcaagttaaactgggtgaaaaagcaaatatatatatctatatagatatatatagatatatctatatctatatmtatatctatatagatatatatagatatatctatatctatatctatatctatatctatatagatata

SEQ ID NO: 57201 - DNA, 689 bp, Homo sapiens
ataatacataagcatatacacatttttttgttggatcagtgggataacacaatatatttgatgtgcttttatttatttgtttgttttttttttttttgagacatggtttcactctgtcacccaggctggagtgcagtagtgcaaacaygggctcactgaatcctcgacctcctgggctcaagtgatcctcctggctcagcctcctgagtagctgagactacaggttgtgtgccaccacacccaactaattttttttttgtagagatgggatctcactatgttgcccactctggtcttgaactcctaggggcaaggaatccacccgccttggccccacaaaatgctgtgattacaggagtgagctacctttcccagccatgctttgtttttaattttaaatatcactcataggctgggcacggtagctcacgcatgtaatcccagcatgttgggaggccaaggtgggcggatcacttgaggtcaggagttgaagactggcctggccaatatggtgaaacccctatctccactaaaaatacaaaaattagtctgggcatggtagctcacacctgtaatcctggcactttgggaggccaagtgggggtggatcacctgagttcaggagttggagaccagcctggccaacatggtgaaaccctgtctctactaaaaatacaaaaaattagctg

SEQ ID NO: 57202 - DNA, 845 bp, Homo sapiens
agtgggaggtaattgaatcatgggggtgtgtttttctcatgctgttctcgtgatagtgaataagtctcatgagatctgatggttttacamaggggagttcccctgcctacgcgctcttgcctgctgccaagtaagatatgactttgcttttcctttgccttctgccatgattatggggcctccccagtcatgtggaacggtgagtccattaaacctcattcctttataaattacccagtctcaggtatgtctttattctcagtgtgagaactgactcacacaaaggcactgtcctatgcattgtaggttgtttagcagtatccccagcctctacctgccagatgccattagcaccaccactcccaagctgggtcagccaaaagtatcttcagacattgccaagtgtcccttgagggtcaaaatcacctccagttaagaatcacagcagtagaaaccattttttccccctaacttgcaccctgtcttttattttctgcccagggtttcgggagttttccaccatgactattgccctgctgggttttgccatattcttgctccattgtgcgacctgtgagaagcctctagaagggattctctcctcctctgcttggcacttcacacactcccattacaatgccaccatctatgaaaattcttctcccaagacctatgtggagagcttcgagaaaatgggcatctacctcgcggagccacagtgggcagtgaggtaccggatcatctctggggatgtggccaatgtatttaaaactgaggagtatgtggtgggcaacttctgcttcctaagaataaggacaaagagcagcaacacagctcttctgaac

SEQ ID NO: 57203 - DNA, 862 bp, Homo sapiens
ctctgtattctgtagaggagccaaaaataaaactgaaaatagtggctttcccaatagactgcatccctcacccccaaggccaaacctttccattcagccacagaacaggccatsaggaccactacctggtaattttgaaatgacactctagatcgcgaggggtgtgactcagcagggcccaagccggaggcaaaaccttgggcaaaatcttgacccggcagcgctaactatggaaggcccgttaccttccttcccgcctgacctatactggagaattcaaaccctaaagggcgcgcggcctgccgcagcgaagcccgaggcccaaggcccgaggccgtgaccccattcgggaaggtcccagttcctcacctggtggcgggcggccgtagggccccgggaggctgcggcgcccacgagacgggctgctgcagctcggctggcacttatcatggcggataaatggaggagtacgaggcagcaaacaagcgctccgacggcaaagagctgcgcgatgcggtggcggcagcgcttctggaaacctccaaccacgtggggtgaggggcgggggttggtcactgcggcccagaggcccgctcttccgctgaggcgccgcccgcgccgcctgaccagaggatactcgactgccgctcccggagccagggcgtacaggtaatatgctccgcagcatgatggttggagaaagcctgccctcctgtcccggctgcggcggctctgagctcagaaagagtccaggggaggaagagggatatgaaggccgtatctcggacagccccggtcctcggcgacaggaaagactcaaggtcacacgggataaattgcgaaccgattacagtcttcttgc

SEQ ID NO: 57204 - DNA, 970 bp, Homo sapiens
agtgtgtcctgcccagagctcttggaccagcattatactgtggacatgacagaaactgagcactctatccagcacccagtcaccaagactgccacgcggcgcatcgtccatgcaggcctacagcccaatcctggtgaccccagtgctgggcaccactccttggccctgtgccctgaattggcaccttacgcaaccatcctggcctccatcgtggacagcaaaccaaacggtgtccgccagcggcccattgccttcgacaatgccactcactattacctctacaaccgcctcatggacttcctcaccagccgcgaaattgtcaatcgtcagatccatgacattgtacagagctgccagcctggtgaggtggtcattcgtgacaccctctaccgccttggggttgctcagatcaagacagagacagaggaggagggtgaggaagaggaggtggccgcagtggcagaataagccaggctgttgtacagggactacaccatctctcaagccatagtaaggcccttgcctgaggcagagctatccaggggacctgcagaagtggtctcctgtggggagggcctctgactgctgggactgaccaaagagcttccattccctgagcatggtgggacccagggtcctcagttctcaaccctccaggggtcaggagtggtaccaggaaacctcttctggccccgagagagcacttgggggacacggtatgtttaatggaggggaggctgagggaaaggctcgtagctggtgggttccgtggggcctgckgtgtgggtcagggtggaggtcctgggtgggctaaggcgtgagccccagcactaggtgggaaggctgctgaggtctctcccacccctgaggagccctggtttcagccccctcagtctgatgaattgcttagcctgttgcctttgactaggggcctgggtggcctcattaactctaggggtccctttgggct

SEQ ID NO: 57205 - DNA, 807 bp, Homo sapiens
tggatccaggtgttcagctgatgctggaaagaatctatgactccccaactctcagccctgccaggaaggctttccccttgtaggactccgactatccgccttgtagtatctgatccagcaacaccagtaaaatgagggcttctcttttcccagagtcttaacaaaaatcatggaattgagtgttatggactcatggattcatggtaacccaaaccaatcaccgggccagaggggacagagtaccctcactggttggcctgggttacacacctactccagagctatatttggaagccgcattgactratttatgaccagaagaaagggaaatggatgaggacacgtgaaattgtgtgtgtatgtgtgtgtgtgttttcttgctgccaaaaatttttcaaaaacttggaaaatcacagatatattcaatctcttcattacacaaataaggagatggaggcacaaatggggatagggatttgcccaggttctcctagggcttcagtgagaaaagttttgatccagggattctgaagggggtggtgagaagaggggtgtcagaggacctgtcttgggtggtggggactatgtacctgtgacatagctgctcagggactggatcaatgggtggatgacaaaatggacaaataaacaaggacatcttcccactaatgccagatgcttgtgtgttctgctttccagagagtgcctacttgaacttgagctctgagcagaacctcatccaggaggtgaccgtgggggaggggctcaacctcaaagtcatggtggaggcctacccaggcctgcaag

SEQ ID NO: 57206 - DNA, 2037 bp, Homo sapiens
  misc_feature (1)...(2037): n = A,T,C or G
cttgagcccaggaggtcacagctgcagtgtgccatgttcacgctactgcactccagcctaggtgacacagcaagaccctgtctcaaaaaataaaaattaaaaactatttagaatttttatttttaaaaatgcttttcctagtcttgtaataagaaagcaactaattttacatgtcagtctagaaataaataaatttattnnnnnnnnnnnnnnnnnnnnnnnnnnnnnnnnnnnnnnnnnnnnnnnnnnnnnnnnnnnnnnnnnnnnnnnnnnnnnnnnnnnnnnnnnnnnnnnnnnnncctgggctcaagtgatcttcccacctccgcctcccaagtagctgggactacaggtgcacaacaccatgtccaactaatttttaaattttttgtagagacaaaatctcgctatattgccaggctggacttgaagcaattctcctgcctgggactcctaaagtgttgggattacaagcatgagccaccatgccctatttttaattgtggtaaaacatacagaacataaaattcctctttctaaccatttttaagtgtataattcagtggcattaaatatattcacaatgttgtacaagcatactcagagttcttaactgttgtcaactaatcaaaaaatattttgaatactttagggactgaataaaatgtgtctgtagacccagttctgccagcatgtggctctgcaggacaccatgctccctctcccaagcctgcagtccatgctccctcagcttccacttcatagcccttctcttctcatgcatgccttggctgctctgagggccctttcagctcagaatctttggtcccagataaagggtccgttggtggataaagcagtgaggcaagtggtgtatacctgtgtwatgatacaaaaaacagacacttggtttcctgcggtggggatatcggggagcaggcagcagctacaaaacctttctttgcaaagaattaaactcctcagcatctgtcaaagaaagggtcatcccaggaggctgggtctagaagtagattacaccaggaagaacccaccatctatacatgcctacagtgtgcacattcctatccttgcaacaacactttcagccagaaagcagggattctatatgcccatttcccaggctcactggcttagtgatggctcattgcctgtaatcccagcactttgggaggccaaagtgggcggatcacgaggtcaggaattcgagaccagcctggccaacatggtgaaactctgtctctactaaaaataccaaaaatacaaaaattagccgggcatggtggtgggcgcctataatcccagctacttgggaggctgaggcaggagagttgcttgaacccaggaggcggacgttgcagtgagccaagatcacgtcactgcactccagcctgggcgacagagcaagactccatctcggggaaaaaaaaaaaaaaagctaagaaagaaaagggttgatatgtactattaaggaataatcttttttttttttttttttttaaatacagggtcatattctgtcacccaggctggagtgcagtggtgtacttatggctcaatgcagccttgacctcctgagctcaagtgatgctcccacctcagtctcctgagtagctgggaccacaggcatatgccaccacacccggctaatttttgtattttttgtagagccagggtttcaccatgtttcttagtctggtctcaaactcctgggctcaagtgatcctcccacttaggcctctcaaagcaatgcgattacaggtatgagccactgcatctggcccaggaataatctctaagatattttataaagtgagaaaagcaggatgcaaaactgtgtatactatgccttttgtttaagaaggagaggtcagggtaggaggaagacctacttttcactgtacgctactttgtgttatttgaaaattaaacagtaggtacattgggattccacctgcaaatcctacacttatccaagataacttctagtaacattggctgtggttcatttcatgctta

SEQ ID NO: 57207 - DNA, 2037 bp, Homo sapiens
  misc_feature (1)...(2037): n = A,T,C or G
cttgagcccaggaggtcacagctgcagtgtgccatgttcacgctactgcactccagcctaggtgacacagcaagaccctgtctcaaaaaataaaaattaaaaactatttagaatttttatttttaaaaatgcttttcctagtcttgtaataagaaagcaactaattttacatgtcagtctagaaataaataaatttattnnnnnnnnnnnnnnnnnnnnnnnnnnnnnnnnnnnnnnnnnnnnnnnnnnnnnnnnnnnnnnnnnnnnnnnnnnnnnnnnnnnnnnnnnnnnnnnnnnnncctgggctcaagtgatcttcccacctccgcctcccaagtagctgggactacaggtgcacaacaccatgtccaactaatttttaaattttttgtagagacaaaatctcgctatattgccaggctggacttgaagcaattctcctgcctgggactcctaaagtgttgggattacaagcatgagccaccatgccctatttttaattgtggtaaaacatacagaacataaaattcctctttctaaccatttttaagtgtataattcagtggcattaaatatattcacaatgttgtacaagcatactcagagttcttaactgttgtcaactaatcaaaaaatattttgaatactttagggactgaataaaatgtgtctgtagacccagttctgccagcatgtggctctgcaggacaccatgctccctctcccaagcctgcagtccatgctccctcagcttccacttcatagcccttctcttctcatgcatgccttggctgctctgagggccctttcagctcagaatctttggtcccagataaagggtccgttggtggataaagcagtgaggcaagtggtgtatacctgtgtaatgatacaaaaaacagacacttggtttcctgcggtggggatatcggggagcaggcagcagctacaaaacctttctttgcaaagaattaaactcctcagcatctgtcaaagaaagggtcatcccaggaggctgggtctagaagtagattacaccaggaagaacccaccatctatacatgcctacagtgtgcacattcctatccttgcaacaacactttcagccagaaagcagggattctatatgcccatttcccaggctcactggcttagtgatggctcattgcctgtaatcccagcactttgggaggccaaagtgggcrgatcacgaggtcaggaattcgagaccagcctggccaacatggtgaaactctgtctctactaaaaataccaaaaatacaaaaattagccgggcatggtggtgggcgcctataatcccagctacttgggaggctgaggcaggagagttgcttgaacccaggaggcggacgttgcagtgagccaagatcacgtcactgcactccagcctgggcgacagagcaagactccatctcggggaaaaaaaaaaaaaaagctaagaaagaaaagggttgatatgtactattaaggaataatcttttttttttttttttttttaaatacagggtcatattctgtcacccaggctggagtgcagtggtgtacttatggctcaatgcagccttgacctcctgagctcaagtgatgctcccacctcagtctcctgagtagctgggaccacaggcatatgccaccacacccggctaatttttgtattttttgtagagccagggtttcaccatgtttcttagtctggtctcaaactcctgggctcaagtgatcctcccacttaggcctctcaaagcaatgcgattacaggtatgagccactgcatctggcccaggaataatctctaagatattttataaagtgagaaaagcaggatgcaaaactgtgtatactatgccttttgtttaagaaggagaggtcagggtaggaggaagacctacttttcactgtacgctactttgtgttatttgaaaattaaacagtaggtacattgggattccacctgcaaatcctacacttatccaagataacttctagtaacattggctgtggttcatttcatgctta

SEQ ID NO: 57208 - DNA, 2037 bp, Homo sapiens
  misc_feature (1)...(2037): n = A,T,C or G
cttgagcccaggaggtcacagctgcagtgtgccatgttcacgctactgcactccagcctaggtgacacagcaagaccctgtctcaaaaaataaaaattaaaaactatttagaatttttatttttaaaaatgcttttcctagtcttgtaataagaaagcaactaattttacatgtcagtctagaaataaataaatttattnnnnnnnnnnnnnnnnnnnnnnnnnnnnnnnnnnnnnnnnnnnnnnnnnnnnnnnnnnnnnnnnnnnnnnnnnnnnnnnnnnnnnnnnnnnnnnnnnnnncctgggctcaagtgatcttcccacctccgcctcccaagtagctgggactacaggtgcacaacaccatgtccaactaatttttaaattttttgtagagacaaaatctcgctatattgccaggctggacttgaagcaattctcctgcctgggactcctaaagtgttgggattacaagcatgagccaccatgccctatttttaattgtggtaaaacatacagaacataaaattcctctttctaaccatttttaagtgtataattcagtggcattaaatatattcacaatgttgtacaagcatactcagagttcttaactgttgtcaactaatcaaaaaatattttgaatactttagggactgaataaaatgtgtctgtagacccagttctgccagcatgtggctctgcaggacaccatgctccctctcccaagcctgcagtccatgctccctcagcttccacttcatagcccttctcttctcatgcatgccttggctgctctgagggccctttcagctcagaatctttggtcccagataaagggtccgttggtggataaagcagtgaggcaagtggtgtatacctgtgtaatgatacaaaaaacagacacttggtttcctgcggtggggatatcggggagcaggcagcagctacaaaacctttctttgcaaagaattaaactcctcagcatctgtcaaagaaagggtcatcccaggaggctgggtctagaagtagattacaccaggaagaacccaccatctatacatgcctacagtgtgcacattcctatccttgcaacaacactttcagccagaaagcagggattctatatgcccatttcccaggctcactggcttagtgatggctcattgcctgtaatcccagcactttgggaggccaaagtgggcggatcacgaggtcaggaattcgagaccagcctggccaacatggtgaaactctgtctctactaaaaatacyaaaaatacaaaaattagccgggcatggtggtgggcgcctataatcccagctacttgggaggctgaggcaggagagttgcttgaacccaggaggcggacgttgcagtgagccaagatcacgtcactgcactccagcctgggcgacagagcaagactccatctcggggaaaaaaaaaaaaaaagctaagaaagaaaagggttgatatgtactattaaggaataatcttttttttttttttttttttaaatacagggtcatattctgtcacccaggctggagtgcagtggtgtacttatggctcaatgcagccttgacctcctgagctcaagtgatgctcccacctcagtctcctgagtagctgggaccacaggcatatgccaccacacccggctaatttttgtattttttgtagagccagggtttcaccatgtttcttagtctggtctcaaactcctgggctcaagtgatcctcccacttaggcctctcaaagcaatgcgattacaggtatgagccactgcatctggcccaggaataatctctaagatattttataaagtgagaaaagcaggatgcaaaactgtgtatactatgccttttgtttaagaaggagaggtcagggtaggaggaagacctacttttcactgtacgctactttgtgttatttgaaaattaaacagtaggtacattgggattccacctgcaaatcctacacttatccaagataacttctagtaacattggctgtggttcatttcatgctta

SEQ ID NO: 57209 - DNA, 634 bp, Homo sapiens
tgctcttccaccgctgcgtcctcgttggctggcgcttaataaaaattgactcggtgaataaatgagtgaaactgtccttttagggatggatggatgatgtcctgttcaaggcggtgcccttctctggcattccctaacacaagcttgacccgaagtaggcgttctgaaaaaggccgacagtcgatggaggccaacgcagcgcccctctcacctcctctctccgtccaggccgggtgaccacgggcccggcccgcagaaaggaggcggcgcggccggcagggatcaggactggagggggcggagcctccctcgcggccgggcccggagtgggaggggcctccgggaccaggcctctagygcgcactctcggaagcgcagccgaacccgccctccgaatccagagaggcgctgctgacaccgccgccacaccgccgccacaccgccgctgcctcagtcatgccggtgagtggttgcgccgtccccgccacgcagacttgcagtcccgggttgcttctcggctgcacagccgcttgaccggatgctgatcttgaagggctcaggcggcggccggagccgctgttgtcccctagcttaccccacccagcccccagcttttgcgacccttcagaaaatg

SEQ ID NO: 57210 - DNA, 1079 bp, Homo sapiens
gttgtcttgttatgcagataaacagtctccagagtaataaaggttgtcttggagcacccctcagaacaggtgatagtttgtgataatgtctgggcttggcaattaccttcagtctgttctcctcctgtgatacagttaatttttcctaattaatgagattcctggggaggaaactcatgrcaattgagtgcctttttggaagatctatctttaggcagacgaggcaagttcagagaccacccttccctgtgcttttgaaacaggggtgagagacagcagggcagaagttcagggaggctttttggttctcccttagttcaaagcactctgcatgaaagccccaaactttggggtatcattttcagagccccaacagtaaacttacaaatttgcctatttgtgtagacttgcctcttgagggtcagtagtcagtatttttcttactcagtgaaatttcaaaatttacagaattgaaatcactcggacttaaattttaaaatgtacttgtgtaaagaagatacatatagtaaaatcctttgaaagcagacattgaatctttctgaaaaatgataggacatttgcagtttttatgtgatgatctagttaaatccatttgatttcttccccctgttctgccttctcttactgtccattcctcttctggtagaaagagttgactgcctgtgtacaggtggcagagttgttttctgttcatcagagtcagtagtagtaaaattcagttgctggattagccaagtgtgctctgaattctgacctcttcaatacaataacattttgcatgactaagtctgtacagtttgttccaaaacattaccctgcaaagcagtctgcaaagcagcttgatccatgcttggacagccatccccagcttggtcctccaggtttgtggacaaggatctgggacactgagggcttgtagagagtagatatggattggattaagcacaaatggcaaccctagactacacaggaaagtcgtagtcggccacaccttgggcttcctatgacagcagcatatcagtgctaacgagccagggcttgcaagccaaggcacacca

SEQ ID NO: 57211 - DNA, 740 bp, Homo sapiens
ttcgtagtaggcatagtttataatgggcagaaagtggaaacaagctacatatccatgagtggataaatggcatgaacaaaatatggcagacccatacattggaatgtcatccagccataaaatggaatgaagtgctgatacttgctacaatatggatgaaacttgaaaacactatcctaagttaaagaacccacacgaaaggccacataatgtttcaatttatataaaatgtctagaataggcaaatctatagaggcaaaacatagattagtggttaccaggtggaagtgggggcakgaattgggagtgactgcttaatgtgtatggagtttctttttggggtgacaaaaatcttctgaagttagatagtagtgatggctgcacaacattgtgaatgtactaaaagccactggtttgtatacttcacagtgtttttaaatgaattttacctcaataaaaaactttattaatcctcaacacaatctccattgtctgaggcattgttaatatctccaattcccagatctcattctcctatgtaagaacagcagctcaatctttcatcttctgcaagtttttttcagtttattcactttactcactcttttttatcttagcttcttgtgaaagcagatttatgcttttacaaaaatatgctttcatccaggccatcttttattgccaccttaagttttttttaaaatttatctgatatattttaaaggatgcttttgttgcag

SEQ ID NO: 57212 - DNA, 1877 bp, Homo sapiens
aaaaaaaaattaaagttatcttggggtaaattaagttaggacttgggtttttttaaagttgtatctgtaatacattttaatttattccttctgcagagctgaatgtttgaaagtacaggtaaccttgtaatgaataaaactgataaaaggttgtgttcaatgaaagggaaattatggaatgattattcactttgcaaatgggtttgtcatagggaagctttcctaaagcatttcaaatttagtttagtttataaaacgttcatttacacacaaaatttcaggaacaaatttagtgaggaaatgagatgaatagtcataataagatagagctcccttacactgctaacattaatgctttctctgcgtcccttcttgcagcactgatagccattgggcgatacagcatgacaatagagactgtggatgtcggatggtgtaaagaaatcacagaccaaggagccaccctgattgcacagagcagcaagtctctgagatatttggggctgatgagatgtgataaagtaagagttgactatcaagttgtttgctttctacatatcagtatagttaatagcttgatgtcatatcctctctccttctctatctccacccccgtgtattatatattatatatacattttatatgtatatatgcaattatagctatgcattgtttgcctgcttttgtaaactaatctgagattatctttgtatttccccacttaataatgaattttgtgcttaagtagaaagaaaaagtaatcatatacatagtcaactagagtttggcatcctattcataagtccatggaccaaaatgtaaaagattacatgacaaactgcaatttgcaggktctaaccgtaaaattgtattctgggtttcaagtttccagcaacagtaaaggtggaaagaacagtgccaaattggtttttcacaagtgtgtaattttggtactgaacatctatgtattctggccattcgggaccaacaaagggccagtaagggggtatgtgggaatttgcatctccccatacatcagatgccactcccagcacatgataagaagtggttccagaggtcctggtggaaggcctgtagaaccagccagggatgtgagcatgagtttaggaaatggtgtagcatttaacgtgggaccctttgaagactgagaaaacagataataaaaatctatactgacacctgtaatcccagcacattgggaggccaaggcagaaggatcacttgagcccaggaatttgagaccagcctggacaacatgggaaaaccctgtctctatccccctctcccccaacaaaaaaaaattagccaggcataatggcacacacctgtagtcccagctactcgggaagctaaggtgggaggatcacctgagctcaagaggccgaggttgcagtgagccgtgattgtgccgcaaccacctcagcctggatgacggagcacgactgtgtcccaaacaaacaaaaaaaacctatactggacaccaggcactccacaggtgttttcttctttgtttattccatgttttacctataacaagtctaagaaatagttatttgcattgtgaaggggagaaaatggaggctcagaaagaccagtcagtggccccaggatactctggcaagacttcatgccgggtctttggagtctgtatccagtgctgctggcacaacccagggggcagtctgtggccacggggactgcttcccttggaaaaggtccagttcagatacttgctcagaaagtgccgccatcttgtactaatttacacatgtgtgctacttttgtaaatggtgattaggaacaaatctagcaaaataatgtgaaactaaatagacacgccattcaaagggcatgc

SEQ ID NO: 57213 - DNA, 1877 bp, Homo sapiens
aaaaaaaaattaaagttatcttggggtaaattaagttaggacttgggtttttttaaagttgtatctgtaatacattttaatttattccttctgcagagctgaatgtttgaaagtacaggtaaccttgtaatgaataaaactgataaaaggttgtgttcaatgaaagggaaattatggaatgattattcactttgcaaatgggtttgtcatagggaagctttcctaaagcatttcaaatttagtttagtttataaaacgttcatttacacacaaaatttcaggaacaaatttagtgaggaaatgagatgaatagtcataataagatagagctcccttacactgctaacattaatgctttctctgcgtcccttcttgcagcactgatagccattgggcgatacagcatgacaatagagactgtggatgtcggatggtgtaaagaaatcacagaccaaggagccaccctgattgcacagagcagcaagtctctgagatatttggggctgatgagatgtgataaagtaagagttgactatcaagttgtttgctttctacatatcagtatagttaatagcttgatgtcatatcctctctccttctctatctccacccccgtgtattatatattatatatacattttatatgtatatatgcaattatagctatgcattgtttgcctgcttttgtaaactaatctgagattatctttgtatttccccacttaataatgaattttgtgcttaagtagaaagaaaaagtaatcatatacatagtcaactagagtttggcatcctattcataagtccatggaccaaaatgtaaaagattacatgacaaactgcaatttgcagggtctaaccgtaaaattgtattctgggtttcaagtttccagcaacagtaaaggtggaaagaacagtgccaaattggtttttcacaagtgtgtaattttggtactgaacatctatgtattctggccattcgggaccaacaaagggccagtaagggggtatgtgggaatttgcatctccccatacatcagatgccactcycagcacatgataagaagtggttccagaggtcctggtggaaggcctgtagaaccagccagggatgtgagcatgagtttaggaaatggtgtagcatttaacgtgggaccctttgaagactgagaaaacagataataaaaatctatactgacacctgtaatcccagcacattgggaggccaaggcagaaggatcacttgagcccaggaatttgagaccagcctggacaacatgggaaaaccctgtctctatccccctctcccccaacaaaaaaaaattagccaggcataatggcacacacctgtagtcccagctactcgggaagctaaggtgggaggatcacctgagctcaagaggccgaggttgcagtgagccgtgattgtgccgcaaccacctcagcctggatgacggagcacgactgtgtcccaaacaaacaaaaaaaacctatactggacaccaggcactccacaggtgttttcttctttgtttattccatgttttacctataacaagtctaagaaatagttatttgcattgtgaaggggagaaaatggaggctcagaaagaccagtcagtggccccaggatactctggcaagacttcatgccgggtctttggagtctgtatccagtgctgctggcacaacccagggggcagtctgtggccacggggactgcttcccttggaaaaggtccagttcagatacttgctcagaaagtgccgccatcttgtactaatttacacatgtgtgctacttttgtaaatggtgattaggaacaaatctagcaaaataatgtgaaactaaatagacacgccattcaaagggcatgc

SEQ ID NO: 57214 - DNA, 2278 bp, Homo sapiens
tccatccatccatccatatattcatgtgacaaaaaagtataacacatgctttttaggccatgccagccatgagaaacaacacaaaacaaaaaactcccagagttttagttagagccatatgcagacttcctggaactccggctccaccagatctccccagaggtcatcagtgctgttcttactactgatcacctccaggagtccacactgactcttctaaggcagtgctggaaagcyggaggtcttctggggtatgaggcctcctttcttgagtactttcagtccttctacaaatatgtttcctgtggataggctctatgcttggcactgcagtgaccacaggaaacaccacagtcactgccatcaacacagacaggtgggcattaggcagtcaagaaagacagacaaatcaacaggccacctgaacacggatgtgccactgtgacctgcagacgccctgcagcttctccctgccttctctctggacactgttatacccaccgtatctatggtggatgggggttgtcatgtgatgtcaagtcagcaggccatgccggtcctgcatgctccaaaccttcatagccaaggatccttcagccctggaagtagcttttcttttttaggtctagactgatgccctgagatgccttagaagctttcctttaaagctctactttgccacgtgatagcactgctttaatcatttctaaccagtgattgcttcaggacagaccctggcctgcaaggtgacttcctaagcatccatgacaagcatggggaggcaatctttatctcctgcccttgatgcctggctttggggccaaagattctttcagagatagcaatggaatgcattctccagaagcagaagcttagatggcatttggggttcaagatgttttttagggaatcatagccgtgagtagaagacatacagtgcagaattaggcagagggagaagtagaactatgatgcaggagtgaccgacctcagccaagccagtgggtgctttggagagggtactgcccattggagtgcaccgagtttggctgaaatggccagcttcacgctactctgccttattctgtcatcaatgagagctgtcttgggagcatgtgacctcaagcaagcagtgctctgcatcttggctggatggtaacaaaagtgacaggggagtcatctgtccactatgctgcccacagctgggtggcaagtccttccctgaaagaggatctgggaggtgtatctctgtccttccacccagagggatctgtccactacagcccaccctttggaccacctgaattcatttctccatatatgttcaggaaacaactcttccaggatttccatggacttctcttcctggggagaaacttagaaaagggaaattcacggtacagcacactggctcccaccagcaatcccagcactttgggaggttaaggagggaggattgcttcagcctaggagtctgagacaagcctgggcaacatgacaaaaccctgtctctaccaaaaaaataaaataaaataaattctttcaaaaattacccagacatggtggcaagaccctgtagtcccagctacttgggaggctgagacaggaggatccctggaaccccgggaagtcaaggttgcagggagctactatgtcaccactgcacttggcccaggtgacagagggagaccttgtctcaaaaaaaaagaaaagaaaaggaaaattcatgaataattatagcacccatgtgattgtgtgggcagggcaggtgttttgggacccacaggtgaccatcattgactcctcctccactattcagtttagattccactcactctcaggtcccacctctgtgcacctttgtggctgggcccagatcatcctctccaggggggcagggcctctggtcaccatgtccttctcagaccaggattgctgaccctgtccactgacagttacaattgggcaagggagtaaaaaagcacccagtgggtttctcacatatttctcctgctcccacggtgaaacagcagcccattctctgctgatgatcggggtcagtcacctctacctctgttcgtgccctgtggtccctggatacaaggatcttgaaatgcctgaccagagagcagggacatcactagagcccaaaattctgtgtctatttcaatcatggctcatttctttttctgcacaagttgatgccaggtatgacccttgaaactgccctttgggagaattgtccctcgacgctgtctttcaaggccactgctgatga

SEQ ID NO: 57215 - DNA, 731 bp, Homo sapiens
cattatctttttggagaggatcaatgacacttagcaatagccatccaatcccactctcttaatgtctgcaccttcttaagtgtcaagcgtcctgtagatttctctcactagttcgttcccttctactaacacaccatcccaattcgcaactaatgaaagtgttaacaacaggaccaccacctggtgcaggggctgtcagtactccacctatcaccagaaaaacaggccctaattgccaggcaggtggtgagtgattcaacttcaaactctgtcttatctccaccagctttctcagcccccctctcactgccaagtgttgcaaggctggctgtctagaagcagtcactgacacagagtttggggagcacaatacttattagagattaatacccataaaaggaagagagaagagacaggattggtcagaggaagaaggtgatcagcaacacagacccacaaagctttggctaacctggcagggcattctggaatgaatattccctatcagagtctcttgcaggctgccctggaggagcaagaccagcgaaatggcttctgcagctgaagctgatgctggagctgatactggctgctagcttcactcactctctgcagctggccctacgtccctctgggaaggggggtctgcacagcacatttccacamcgcccaccttccctctcctcagacaactcagaagacctcatgaaacagggcagtggcattgcaca

SEQ ID NO: 57216 - DNA, 2642 bp, Homo sapiens
cccgaactagcacctgccttcacccctggcctcaggagccccatctataaaatgggcacaatgacagggggcggtggctcacgcctgtaatctcagccctttgggaggccaaggcaggcgggtcacaaggtcaggagatcgagaccatcctggctaacacggtgaaaacctatctctactaaaaataaaaaaaattagccgggcgtggtagcgggtgcctgtagtcccagctactcaggaggctgaggcaggagaatcacttgaagccaggaggtggaggttgcagtgagccgagatcgcaccactgcactccaacctgggggagagagtaagactctgtctcaaaatgaaataaaataggcacagtgggggcagtggctcacgcctgtaatcccagcactatgggaggccgaagcaggtggatcatgtgaggtcaggagctcgagaccagcctggccaacatggtgaaaccccgtctctactcaaaatataaaattagccaggcatggtggtacatgcctgtaatcccagcaactcgggaggctaaggcaggagaatcacttgaacctgggaggcagaggttgcattccactccaacctgggcaaaaagagcaaagctccatctgaaaaaaataaaaataaaaataaataaataaaatgggcagggccgggagtgttggctcacgcctgtaatcccaccactttgggaggctgaggcgggtggatcacctgaggtcaggagtttgagaccagcctggccaacatggtgaaaccccatctttaccgaaaaatacaaaaaattagccagacatggtggcgggcacctgtaatcccagctactcaagaggctgaggcagcagaatcacttcaacccaggaggcagaggttgcagtgagcagaaatcgtgccatagcactccagcctgggcaacaagagcaaaaccctgcctcaaaaaataaaataatataaataaaataggcacaaaatggggatgaaaacccctccctgcagtgaggattcctaggtaatggagggagctggaggtgttaagtacttcataaacaagagcagctgctgttaccatcatcagcaacagatcaatgccagcctcggaagagaatcccaaaccccagaaccctaacccggcctggcctccctctcctgccgtaacctgagtcggatcctccgatgtcgtcctcggagaagctctggagcagctgttccactgtgctgcccagccccgggtatctgaggaccatgaggtcaccctgggctcctctggcgcagccctggcctctgggcgaatcccaaccccactccagcaccggagctgggtgtccaggagccctgcagccatggccctgaacgggcacttccccagcacatcagaactatgtctgagcaactgatcaaaaacttccggcccagaaatccctttgcagggccttatgtatgctacaagctctacttgcagagatacacctggatctgaatgcccccaaagcagaaaacckaaatatccatcaattaatcaaagaatgaataaatgaagatgtggcaaattaaaagagatcaatttccatcggtacacactgacatgttaaatgatcgagccacaacgtaaggcacagagtggtgtaaaacctacgcaccacaggtgtacagatgggcggggaagggacagagggaggaggggcagtgcacactgcattcatggggcttgtctggaaacacaataaagtgacttcagtgctgcctccgggaagcaagtcatacttttcaatccgcaccctcctttgccattgtgtgaacgtgcataacttgaagcccagcaggttggaggagagatttatgcgtgcgcgcttgtatgtgcctgagaaaccacaggtcacgggcagtgcggagagaaggagagactgacttttcatgttacaccctcctgagtggcttgaatttctcccttgtacatgaaagatagccagacaaaaggcaatggcgaaggctgggggcgggagggccggcgtctacgcaagttatctgggcccctccctagagtgggcaggccggactggggaccacccccccaacatccttttggaccctgctggctgggggaggggagtgggaacaggccctgagcctcttctgtgacccagctggaggctggcggacagccctgctttcctcagcttggaatctcccagaacaagccctgcacccaccccacggccctcagtgggtgtgatggacgtggggcagtcagcccaagggcatcggggctccctgacctgcattccagcaagggaggcctcccaaacgagccaggtgcagtaagatccaggtttgaacctgagctctgccacctgcaagcaagggaccatcacctcccgacacctcagctttagtgtctagaaaaataaaataacacatggttcactgtgtagccatgaggacgaacccacccatgcccggcccaagacccacgggcacacagtagtgtggcattggcacaaaacaccagtcttggttcctgtgtccccacagtgctccggctcaaggcaaagggtcgagagaaggagccaccgagagagttctggacacaaggccatattgggcccagaacaagtgtctggccctgtccc

SEQ ID NO: 57217 - DNA, 677 bp, Homo sapiens
cccaggggagtgggtggctaaacagaaggggtgcacccccaaaattcctgtccagacagcaggtaagaaaaacaataataagattcataatacaaggctgggtgtataaatagcaaattatggacataaaacaatggtcctcattttgcaaggttaggagactcatttgcatattagcatggctgccactggggagggagaggggtgagggaaagaatgaatgaactgcagatcttgggagaaatgaaggccttgaaggccacactgaggcttggttctctaagcaaaggggaactcccttttgtgtggcttggggcctggtcacaggtatttaatataaaaataagccaggtgatcctaacatacagccaggattgagaatgggagaatgggctgggcaaggtggctcacacctgtaatcccagcactttgggaggcagaggtgggtggatcacctgagtttaggagttccagaccagcctggccgacatggtgaaaccccgtctctactaagaatacaaaaattagccacgcatggtggcgggcgcttgtaatcccagctactcgggaggctgaggcaggagaactgcttgaacctgggaggtggaggttgcagtgagccaagatcgtgccattgcacaccagcctgggcaacagagcgaractcgtcctcaaaa

SEQ ID NO: 57218 - DNA, 1249 bp, Homo sapiens
ataacgtagcctcagggcatgggggtaggggtagaaccacagggccttgccctgccccttgctatgttctcagggattggagtgtggtagtctctcagtaaatgctggttgactgactgactgactgactgactgaactgtagtaagctgggctgccagagcgtctaatggggacccgccctgggtggggcacaccgggaaggttttcctgaggaggaaatgccacttgaaggatgaacttggcctcgactaagggaggaggctgaggcagctgccattgcagaggtctcccggcgggggagtgcagggggcctttgaggaattgaaggaagacaggtaggtcggttcttgggttggtctggattccagtcttgacagctgcttgggcctctctctgcctcagtgtcttcctctctagaaggtggctgcttcaggtgttcctggacattcctgaagttctgctcctaacacacttatcctggtgcctgatacataaatataaatgtgattgtttatttttttccaacaaatttggtggagtgctgacccgtgtggcctccagggatgcggtggtggataaacagacccggttgccgcccatttggagcctggcctctggagccatctggggcacccctgcttggaggcaggagaaggcctggtgtgaccttgggcccggggagtccttattctagatccgggaagctcttcagggtgatgaataggaaagacgaatggagggtttgtgcgtgccggccctgtgycccggccagtgctcccaagctgctgcctgggcctccctgaaatcccaggaggtagctgcacccgtgtgacccatttcacagattgggaggtgaggggggcaccaatgctaagtccttcgcccattttgcaaactagagtagatctggtggtgtttcctctgtggtctgatgtgtttttctggtagccagtcaggtggggcagctttcaatttgttcttccagactcctgtgaaggaagggccagttcaggtcactttcctttttttttttttttgagacagagtctcactctgtcacccaggctggagtgcagtggcacgatcttggctcactacaacctccgcctgccgggttcaagcgattctcctgcctcagcctccggagtagctgggactacagtcgtgcgccaccatgcctggctaattttttgtgtttttaatagagatgaggctttgccgtgttagccaggatggtctcgatctcct

SEQ ID NO: 57219 - DNA, 787 bp, Homo sapiens
ggagtttaccatgataattatatattaatgatctaaaggtaaccgtgggtcactgtgtctggtttgcacttgttttgccccagccttttcttcctccagtaataagcaaaggaagcgtcctgaagctcgtgtggcctttcgggcatctgcagttcttttaatcaatgcacccatagataaagagactagaaaaaaacggtttaagaaaataatgaggccaggtgcaatggatcatgcctgtaatccaagaattttgggaggctgaggcgggcagatgtcttgagctcaggcgttagagaccaacctgggcaacatggcgaaaccaggttgctacaaaaaatggtggtggcacccaccggtagtcccagctactatggagaatgaggtgggaggattgcttgagcctgggaggttgagtctgaagtgagctgtgactgcaccactactacaggctgggcaacaaagcaagactctgtctctgaaataaaataaaataaaataaaataaattaagcgttctctttctcagctacacctccagggctgccctggtacaaaaatgagatgatatgtctgtgtcaattacatagaagagagcctgatgcacagtcaacactacacaagggctggttgtgattgcagaacgaagataaagacaaccagggtgaagcaaagaaagaggaaacagacagtagaracagggacagagacaatttggaaaccgagtgttggagggcagccatcccgggcacaggccaacctcgggttgaagtcctcacacccgactg

SEQ ID NO: 57220 - DNA, 772 bp, Homo sapiens
tctatcacaatcagattacataagtatgtgtgtttgtctgtaaatatgaccccaattttagatattttttcttagctgaatttcaatgggagttttatcttgtctaagtgagtagtcatggagatagtcttactttcaccatgtgtttaatmattaatatatatttttccttttgtgagagaaacacttttgtgatctgaaggtaattttcagaaagatgtataattctggattttttttcaatttttctttaaaagcattgttttaaaaacacataacataaaatttaccatcttaaatttattaaagtgtacatcacagggtcaggcatggttgtggctctcgtctgtaatcccaggacttcgggaggccaagacaggaggattcctgtagcccaaaggtttgagaccagcctgggcaacatatggagacccatttctgtaaaaaaaaaaaaattaataatagccaggcatggtggtgtgcagctgtggtcccagctacatgggagattgaaggggagtcaaaattgtgcctctacactccagcttgggtgacagagtgagactctgtctccaaaaaaaaaagctgtttatttcaggcatgttgttatgcaaaagacttctagaaactttacatcttgcaaaactaaaacttagtacccattaagaaacaactgctcattttaccctctctccagcccttgacagacaaaccttccactttctgattttatgattttgactacttatttcatataagtgaaatcatacag

SEQ ID NO: 57221 - DNA, 772 bp, Homo sapiens
tctatcacaatcagattacataagtatgtgtgtttgtctgtaaatatgaccccaattttagatattttttcttagctgaatttcaatgggagttttatcttgtctaagtgagtagtcatggagatagtcttactttcaccatgtgtttaataattaatatatatttttccttttgtgagagaaacacttttgtgatctgaaggtaattttcagaaagatgtataattctggattttttttcaatttttctttaaaagcattgttttaaaaacacataacataaaatttaccatcttaaatttattraagtgtacatcacagggtcaggcatggttgtggctctcgtctgtaatcccaggacttcgggaggccaagacaggaggattcctgtagcccaaaggtttgagaccagcctgggcaacatatggagacccatttctgtaaaaaaaaaaaaattaataatagccaggcatggtggtgtgcagctgtggtcccagctacatgggagattgaaggggagtcaaaattgtgcctctacactccagcttgggtgacagagtgagactctgtctccaaaaaaaaaagctgtttatttcaggcatgttgttatgcaaaagacttctagaaactttacatcttgcaaaactaaaacttagtacccattaagaaacaactgctcattttaccctctctccagcccttgacagacaaaccttccactttctgattttatgattttgactacttatttcatataagtgaaatcatacag

SEQ ID NO: 57222 - DNA, 772 bp, Homo sapiens
tctatcacaatcagattacataagtatgtgtgtttgtctgtaaatatgaccccaattttagatattttttcttagctgaatttcaatgggagttttatcttgtctaagtgagtagtcatggagatagtcttactttcaccatgtgtttaataattaatatatatttttccttttgtgagagaaacacttttgtgatctgaaggtaattttcagaaagatgtataattctggattttttttcaatttttctttaaaagcattgttttaaaaacacataacataaaatttaccatcttaaatttattaaagtgtacatcacagggtcaggcatggttgtggctstcgtctgtaatcccaggacttcgggaggccaagacaggaggattcctgtagcccaaaggtttgagaccagcctgggcaacatatggagacccatttctgtaaaaaaaaaaaaattaataatagccaggcatggtggtgtgcagctgtggtcccagctacatgggagattgaaggggagtcaaaattgtgcctctacactccagcttgggtgacagagtgagactctgtctccaaaaaaaaaagctgtttatttcaggcatgttgttatgcaaaagacttctagaaactttacatcttgcaaaactaaaacttagtacccattaagaaacaactgctcattttaccctctctccagcccttgacagacaaaccttccactttctgattttatgattttgactacttatttcatataagtgaaatcatacag

SEQ ID NO: 57223 - DNA, 772 bp, Homo sapiens
tctatcacaatcagattacataagtatgtgtgtttgtctgtaaatatgaccccaattttagatattttttcttagctgaatttcaatgggagttttatcttgtctaagtgagtagtcatggagatagtcttactttcaccatgtgtttaataattaatatatatttttccttttgtgagagaaacacttttgtgatctgaaggtaattttcagaaagatgtataattctggattttttttcaatttttctttaaaagcattgttttaaaaacacataacataaaatttaccatcttaaatttattaaagtgtacatcacagggtcaggcatggttgtggctctcgtctgtaatcccaggacttygggaggccaagacaggaggattcctgtagcccaaaggtttgagaccagcctgggcaacatatggagacccatttctgtaaaaaaaaaaaaattaataatagccaggcatggtggtgtgcagctgtggtcccagctacatgggagattgaaggggagtcaaaattgtgcctctacactccagcttgggtgacagagtgagactctgtctccaaaaaaaaaagctgtttatttcaggcatgttgttatgcaaaagacttctagaaactttacatcttgcaaaactaaaacttagtacccattaagaaacaactgctcattttaccctctctccagcccttgacagacaaaccttccactttctgattttatgattttgactacttatttcatataagtgaaatcatacag

SEQ ID NO: 57224 - DNA, 1742 bp, Homo sapiens
atgttgactcagactgagggtagctcaaaattcaggagcctgagggagggagataaataaagtttgattaagaaatattttattttaggccaggcgcgatggctcacgcttgtaatcctagcaccttgggaggctgaggcaggccgaacacctgaggtcacagcctggccaacacggtgaaaacatggtgtctactaaaaatacaaaaattagccaagcgtcttggcaggtacatgtaatgccagctacttgggaggctgaggcaggagaattgcttgaacctgggaggtgaaggttgcagtgagcagtgagtcaagatggtgccactgcactccagcctgggcagcagagtgagacttcatcacaagaaaaaaaaaagaaatttgaccactgaagacatattcagctgatttttctaatgagaaaaaggagaaaatgtgcagtgtatgtctggctgtgtgacaggtaagaaaagagagcaccatctaagtcataatgggaagggtgtttctgtccatcagctttttctggagtacacaacaaatggagaattttattaatcacaaatgttttccatgattatctatgtgtttcatctttcctcatgtcttttctttgttgtatgcatttcttccttttggcttttcctgggctgcatcttatatattaaaccggtaaacataactacagtgttttgttcagttctgtgaatagctctaccaaattattgaacttcaggaaggtttcaggagtcccgagttttcaaacattagttcaaaagaatagatgggcccatagggtttgtgactggcatctgcagtgaggacaatgttgtgggaccgagggtctatgctgactttaggtgctgtcagaattcaaatattaggcaataagtttgtgttggagaaatgtttgatgttcagcaaactctacagatatggtgccagtaaaaagatatcacagaggcctggcctggaacaaaactctgggtgtttgggattgggaggctccactctcctgtacacaggctgtcacactgcccattgtcctgtgattccaggtcttctsccagggtgacagaggactgaaaacttagagaaaaggagctctgattacagacccccttttattgcagctatcaccacggtgttcccacccactcacaaacacacacactagacattaacgtgtccacactcctcccaggactaggcatcaccctcagaaacttcaccacggcatttttgatcctagtgtttcttgtgtttcttgtcaagaacccacaagtctctacaagtctactggcatgtctccaccccagacactgaatctgcagcagcaacctgttttctccaccatcctaggatctgggccacatgtttataatttcatctgcctacatgcacacagaaataaatcagagtacagccccacctgggccactatctgtagtgaaaatcattccattcacctacattgcactctctcccacccaggaattattttttttcttttagcttttatttttggttcgatgtacacatgtgggtttgttatacagttaaaattatgtcatggggatttgttgtgcagattattttgtcactgaggtactacccatagcaccaaacaggtgtgttttctgatcctcttagtcctcacaccctccaccctcaactaggcctcagtgtctgttgttctcctctttgtgttcatgtgttcttattatttagctcttaata

SEQ ID NO: 57225 - DNA, 748 bp, Homo sapiens
gatccagtttcagagacttcttcattaggttagtgaatgtggccaagttacaccgcccgtccatgcctctgttttccatccataaagagggcaacataaaaacgctcttgaaggagaagaaggggaacccctcccacggctccaggagacccctgtgcagatttcacctggggtctgcatggcctgaagggtggctctcccacaggcaatcccgcctccagggcatcgccccgccccattgtctccgtcttggtatcgccccgccccttctgcctttcccgggggacgctgggatctctctactagctttggaaagtcgcggctgtagcgcccttctaacgtcaccacgcggctctcgtggctcctgtttctcagcccattccaggtcacctcccccccytcccccgttgccctcatgcctggaaacggaagtgcgctcccggaaacggaagtgaatgccgtactccgcgtgcaggcccgcctccttccacatcaaccagtctaaggttgctcccaccagactaggaggactggagagtagggttggggtcaaagggtagcctcctgcaggtcgcctcctcctgtggctttcccggacgtcgcgctgggacttcctgccgacaccgcacttcttcccagactcccacctgcgccgctgggggcttgggtccaggtaaaaggcgggtcgggagtgcgggcagcgagcttcggtggggccttttcgtccgcggtctcccctttcccaagc

SEQ ID NO: 57226 - DNA, 732 bp, Homo sapiens
caggggtttgagaccagcctggccaacatggtgaaagcccatctttactttaaaaaaaaaaaaaaaaattcaaaaagtagccgggtgtagtggcaggtgcgtgtaattccagctactcaggagtctggggcaggagaatcacttgatcctgggtggcatacattgcagtaagccgagatcaagccactgaactacagcctgggtgacggtgagaccccatcttaaaaataaataaaaaaaaaacccaaatattatccaggtgtggggatgggcgcctgtaaatctcagctacttgggaagctgaagcaggagaattgcttgaacctgggaggcggaggttgtagtgagccaagatgggatgactgcacttcagcctcggtgacagagagagactctggcccccaaaaaggaccatttaaatccaagagacctaggtgggatgtgccaccgcactccagcatgggcaacacagaccctgttttagaataamaaagcaaaaccaaaacagaaccccgccaccgtccaagtgtgataagcatgctctgcaaatgtattaccgagatcagcatcaacttcaacgctgcttttctcaaaccgtaacactccaaagggaagcgatttcttttctttcagacaacagaaagcgctttcctttgtagactcacagcttgagatcttcttgctccagcactctgggtttcttgttgaaattttccttgaccaggttaaaat

SEQ ID NO: 57227 - DNA, 662 bp, Homo sapiens
atagacacaaaaataaagatgcatttatttgtccggtttgtgtgttttctagaatccagaacataaacccctaaaaggaccatctccagttccttccctcaaagaatcaacaggttagctttgttcatcaaggggcaatcctcctgagttttgttcccaaagagaaaaagcaatgcttactactcataccttacctttaaccaagagaattaggctggatttctagagaacagcaatggattttgagccaagtgttcacttgagttccagtacagggacacacagtcccaatgagggcatccaaaatggaatctacgatgttgaagaatatacattgtcgtaaacaaaaacattctcccggagagaccacaggctatgctgtaaaagctcctcaatacaatttgaacggaaacacacaagtactgttgggacacggtggctcacagcactttaggaggctgaggcgggaggatcacttgagctcaggagttcaagatgagcccrggcaacatggtgaaaccatgactgtaaaacaaatacagaagttagccaggtgtggtggtgcacgcctggagacagctgttcaggaggctgaggtgggaggtagaggttgcggtgagccaagatcgcaccactgcacttcagcctgggtgacagagcga

SEQ ID NO: 57228 - DNA, 662 bp, Homo sapiens
atagacacaaaaataaagatgcatttatttgtccggtttgtgtgttttctagaatccagaacataaacccctaaaaggaccatctccagttccttccctcaaagaatcaacaggttagctttgttcatcaaggggcaatcctcctgagttttgttcccaaagagaaaaagcaatgcttactactcataccttacctttaaccaagagaattaggctggatttctagagaacagcaatggattttgagccaagtgttcacttgagttccagtacagggacacacagtcccaatgagggcatccaaaatggaatctacgatgttgaagaatatacattgtcgtaaacaaaaacattctcccggagagaccacaggctatgctgtaaaagctcctcaatacaatttgaacggaaacacacaagtactgttgggacacggtggctcacagcactttaggaggctgaggcgggaggatcacttgagctcaggagttcaagatgagcccgggcaacatggtgaaaccatgwctgtaaaacaaatacagaagttagccaggtgtggtggtgcacgcctggagacagctgttcaggaggctgaggtgggaggtagaggttgcggtgagccaagatcgcaccactgcacttcagcctgggtgacagagcga

SEQ ID NO: 57229 - DNA, 728 bp, Homo sapiens
tccctaaattttggctaagaaatctgagtctccatttaagagtgttcccagaaatgatgacatccacatccaggaacctcctccttccttcayttgaactctcttgcttctggggagccaggacctatggagtaaaaatcaagttcatttggtgacacattccctccgggcccagatgctgtctctgctgctgtaaactctcctgcagtcaaggccaagcaatatatctaagcatccctttgtcaggtgtccccaagtctttacatcccagggcaataaaacaacactctgaatgtggggagtcatatggcagtgggcttaaccaggagccggcatatctggccactttccaatgcttcaaaggagtgtctttctccttaagcacagtgtttataaataagagagcaggtcacgctctggtcatgagaacgtgatggtaataaggaggctttcctcctcagaggcctcctgtgattttccaaaacttattgtcccatatttttatggccagtttatgccagcaccccataagcctttttcccaacaatcgtgagacacacagagaagaaacacacaggtaaaagagaaggccatgtgaagatggaggcagagactggagtgatgctgccacaagccaaggacacctgagagtctgttagaaaaggggagacaggtgaatgaatgtgggcagctgtgccggagcccctcaagaccactcccagatgcag

SEQ ID NO: 57230 - DNA, 549 bp, Homo sapiens
tttaagactaggagagtcaatttctatatttattcaaaaagactgttaacatcatttctgtggggaaatccagccagtttaaaaaatgatcagcaaagatagggaatatggtagaaatgtaaaggaaatagaggttaaagtgatatatagagcatagggaatgatggcatgatatgtaaaaggcatgtctaaattttgaataaacataatgaagggcagagaatgaagrgattaaatggaaaatttgtcaggccatgagggagaatgccaaaagatttggtccgaagccaaccatatgaaagccaatgttagaaggtgtctgtaggggaagtagtagaatagaaatgtggataagtggggtaatcatagcaacattaacttttattgccaggccgagtggattttgtgttagtaattgaggtagcatggtagagggtaggtttcttttgtatttttctagcctatgggtagtcttatctttcacccagtgacagcaatgatgcaataataaggaacagccagagtttcatatataaataaatatataaa

SEQ ID NO: 57231 - DNA, 1661 bp, Homo sapiens
taaaaatacaaaaatgaggcaggaggtgccagccaggttgtggagagccttgtcatgcatgataagactttggcttttaccctgagtgaaatggggaccactggacgggtctgagcagatgggacctgacttaggtgttcacagggttccagctgcatgtggggtgcaaactagaggggttggcaaaggggaccccagagacaaggtccctgtcatagtccaggtgatagatgaacttggacagatcaaggtgcagggcgacaaagaggtgagaagtgggatttagggtgtatttcaaaagtagaggcagtaagatttcctgatggacaaaatgggggcttgagaaaagagaatgcaaggctggtgccaccactaggggaccaggggccccaagagctgaaaggttagagctgtctacctcacccacacagcatccagaaataaataaataaataaatacattttccccagctccagcttaaaggacagaaagatcatttaaaagtgaaacctctgccaggtgcagaggctcactccagcctgggcaacagagcaagattctgtctcaaaaaaaaaaaaaaaaaaaagtaaataaataaaataaaaaagaaaatacaaaaagtagctgggcccaggcgaggtggctcatgcctgtaatcccagcactttgggaggctgaggcagaaggatcacatgaggccaggagttcgagaccagcctgaccaacatggtggaactccatctctactaaaagcacaaacattagctagatatagtggtgggtgcctgcaatcccagctactaaggaggctgagacagaagaattgcttgaacctgggaggcggaggttgtggtgagcagagatcatgccactgcactccagcctgggcgacagagggagactctgtcaaaaaaaaaaaaaaaaaaaaaaacccggccggtcacggtggctaacgcctgtaatcccagcactttgggaggctgaggcgggtggaccacctgaggtcaggagtttgagaccggtctggccaatatggtgaaaacccgtctctactaaaaatacaaaaattagctgggtgtggtggtgcacgcctgtagtcccagctactcgggaggctgaggcaggagaatctcttgaacccgggaggcagagattgcagtgagctgggatcgcaccactgcactccagcctggatgacagggggagacgccatctcaaaaagtaaaaaaccaaaattataacgagggtacaacatttcaataggataacatttatattaaacaattcaatggaatacttcactagttgatatatgcattattaatggggtctccctatattcgaacttctggcctcaagagctcttcccgcctcagccttccaaagggctgggattacagtyatgagccaccgcgcctagccaatggtagcttgtaaatactttgtatctattggcctggctgggtggctcacgcctgtaatcccggcagtttgggagggagaactgggaggatagctagagcccaggaggtcaagacaagactgggcaacatagcaacatagcaggactccatctcttaaaaaaaaaaaaaagaattagccagccgtggtggtgcatgtctgtgataccagctacatgggaggctgaggtaggaggatc

SEQ ID NO: 57232 - DNA, 654 bp, Homo sapiens
atgctgttacgtgcctgtagttccagctgcttgggagactgaggtgggagaatcacctgagcctgggaggtcgaggctgcagtgagycataatcacactactgcaatccagcctacatgaaagagtgagatcccatctcaaaaaaaaaaaaaaaaaaaagattccaggcaaagggaacagcctgtgcaaaggcctggaggccagggagagcctaactaactcatttgatctgtccaggagatgattgtctctgtctggtttctggcagggcccatggtgcccctatctctctccctcacctccctctcatttatgcttttattcaataattgcccacaggttcctgctgtgtgcctggccatgtgctgggtggtgtgggggacatagtgataaccaagacagccctcagttctgccctcatggggcccacagtcacttctggacacctaagagatcttgtcaaggccccaccaggcaggaatgacctagaatgatcaagaatgggatggggaggcaccagcagggaggacaaggctgggacagggaggcatgcaggatgggggaacgccctaagtgctgttgggagcccagagaaggcacctggacccatctggggagtctaggagggcttgctgggtgagggtgattgtgtgg

SEQ ID NO: 57233 - DNA, 1453 bp, Homo sapiens
catggaggatgtcagtggggtcaccagcagggagagttccaagcagccaggagctggagttgctctgaccactgtggagaccctggtgagaaacgggcccaaaggggaggaagaaaagagtaggatgagctggaatttcctcgagaccctattgtttctgcagctccacacaggatcataggagcctgaacccagagggcttagatgacgtctgggccagagcatccattggctgagacacagcagctcctcagcctcctttggaagaggggctgggagagtcttgctcccagcaccactacagcataccctccctggcatgcccgcagaaacacacaggtaccccactccacagacagagcccctgcttttgcatgtggaggtgtgcctcactaatcttggcttctcgggcacctgaccacagttgtgctgagtacacccacacctactagggtcagactctggatgccagtgccttgaaagacaccatttcccatccatcaagggcaggaggagcatttgagaaactcgctgcaagaccataggtctcttcagcatgggcccttccctgtagcacaaaccagaaagcataagggggacctagaactccgagtagggtacagcagggaaggggtccccagcccggggctctctgtggcctggacccaatgttggccattggggcagctcaggtgcattgccaataccagaaccactgggtgaacatggatcccctgagggcaagagagcaggagaggacctkgaagatgagggagggagccagcaaggggtgacagggagagggaggccaggggctttcagactcagcaactgcgtctgctcaatcccagccatgggcctttggaactaggacattgtgaagaagccatacaatctttcaagacagctttcttaaaaagagtctaccagcagaaagaagaaaggaagttttccttgtgggaagaatgggttcagtggtggtaaagcaggtggttgtaggaaagacctcagagcataccagaaaaacataatggaacatctcaccagagtgctgtcctgagactgaaggaattaaaacatcttctaaagtattagattcaccctgccacaccactgtccatataactcaatgtgccccttggggatgtggggacagaaagagattgattgcattagtacctacaaggctcatgcctccttcatccatgccctctgctaggttcctcccacactgactctgggtgtggccatgtgactgtggccggtgggatgattgatggtaactttgcaagcagaattgggcagaagtgcctctgcgtttccatttgctctcttggaagagcctccatcatgagaacgagcccaggctaacctgctggagatgagagaccacacagaacagaactaaggaaccccagtcaaagccatcctagaccagccatcctccagctga

SEQ ID NO: 57234 - DNA, 1063 bp, Homo sapiens
gagtgtatttatgaatgaacaaataagtcacagagtggcgtggtgatagggaactacctagcttcagggagacaggcttcagtacaatcttacgaggggattttctcatggtgcaaacaccagcgtaaaacaaacagtctagagccgcagcacacagtgggtggtttagctctgccacctcggactcaccagcctgtgaccagagagtctactgcgaggcaacacacctaaggaaataatggtgcagaagatcagaatgatcgatgaggtcacaaatgctgcagaaacgtacacctcagaggttgcatctcaggcaaaaaaaaaaaaaaaaaaagaaaagaaacaagtcccgtgttcacgaatcagagattggctaaaccattttatagatatagagtttttcttggattctccatctttctagcatttcctccatgtgcatattacttgtgtaaagcttggggaaaaaaaagtataactattactattaggacaggaatctgcaagcaacagcccagggtccaaatctgaaccattgccaatttttgcaatttcaataaagttttattgaaataccatcacactcttatttatgaaagaattgagtgtttactacagaaaccacrtggcccccaaagccgaaaatactcattagctggttctttacaggaaaactttgctgatcctggtgggaaatgttcaatgacaagaaaaaatatgacatacatttcagtaagaacttacacagaagtatgtactttttggctaactacatttttagttgcataaaaaggactggaaaagtatgaattaaaaatgttcacctcgagtttgatagatcagtagggtgacgagagttaacaataatctattgtacatttcaaaatagccaaaagagaataattcaaatgtttctagaatagagaaaagataatactttttgagacagggtcttgctctgttgcccaggctggagtgcagtgacacaatctcatctcactgcaacctctgcctcttgggcgtaagcgatcttctcacctcaccctcccaagtagctgggact

SEQ ID NO: 57235 - DNA, 1433 bp, Homo sapiens
aaaacgcgctttaaatctgcaatacttaaatactatctcaaggaataaaatgcagctgcatatcttggtgtcgtaaatacacagaaaactgctgaaatacctactctaatttactatctctgtcctttgtttataactaactaatgaactgacttctctgcacagtatattaccccaacccccaagaacaccaggctggctgaagttgtgtcactatttccatgataaatcctgtttttcgggggtttataactcagctgtaaatatgtaattcagactaaaacttggcatacaaggccttaaccatgaagcaaatttacaccacaactgccactccacccccatctaattttttaaagctttcttctatgtgtgatattttggtattaaagagccggggtattaaaatgaaggagaaaaaaacatgcacaataaataatcgttgaagagttggtggcttttgctttcatttcttattcaaatcaaaaagctacttttcaagatgctgtttgcaaaacctatcaaggtgtttaagaaacaaaacaacaacaacaacaaaaamcagacttcaaatcccaaacaaataaaaccaggcaaaagagtatttaaagtacaactgtgaggagcatgtgaaccagggaaactgaggcagggatgtgccggcttgcagagtgcctccctaaagagacatgcaactccaggaaaggccggatcctcttgtctgactgttccccttggaagacggctgagttgctgaaagcattgcccaggacaagaaagcctccagtccccacgtggaccaggtggatttgcaggaagaaaactccacaagcctcactgtgagcacccagtcccctgggactggacactgtgggctgcagaggaaagtgaggcagggggtatggatggtgcatggcagtgggtccccatgaccaggaacagaacctggctgtccagcccacagtatcagacatgagcgccactagcgtagaagagcacagcctatctgcagcttctggacagctgtcaattccccaggaggtcagaaagaagtcaataaagaagacagagggaaaagattgaagttcaaccatgaaactggggctcccaagatgtcaaggacaggggtggggctctggagaaggaggacccaggtggggcttgagatagcagtggagatggaggaacgatgggggaaggagacagagcgggagacgcaggcttggaacagagtgtcctatctgcatcgtcactgacaccggaacaaggacctccatcctgggctcagtcaccacaacagcctccttcccggcctcctaccttcccacccatgggtcccccacgcccagcagcctgctctctccaaatcgtctcatgctctgcagaggctttccttcctgcctggtggaaaagccagggtcagaggcactatg

SEQ ID NO: 57236 - DNA, 1433 bp, Homo sapiens
aaaacgcgctttaaatctgcaatacttaaatactatctcaaggaataaaatgcagctgcatatcttggtgtcgtaaatacacagaaaactgctgaaatacctactctaatttactatctctgtcctttgtttataactaactaatgaactgacttctctgcacagtatattaccccaacccccaagaacaccaggctggctgaagttgtgtcactatttccatgataaatcctgtttttcgggggtttataactcagctgtaaatatgtaattcagactaaaacttggcatacaaggccttaaccatgaagcaaatttacaccacaactgccactccacccccatctaattttttaaagctttcttctatgtgtgatattttggtattaaagagccggggtattaaaatgaaggagaaaaaaacatgcacaataaataatcgttgaagagttggtggcttttgctttcatttcttattcaaatcaaaaagctacttttcaagatgctgtttgcaaaacctatcaaggtgtttaagaaacaaaacaacaacaacaacaaaaaacagacttcaaatcccaaacaaatmaaaccaggcaaaagagtatttaaagtacaactgtgaggagcatgtgaaccagggaaactgaggcagggatgtgccggcttgcagagtgcctccctaaagagacatgcaactccaggaaaggccggatcctcttgtctgactgttccccttggaagacggctgagttgctgaaagcattgcccaggacaagaaagcctccagtccccacgtggaccaggtggatttgcaggaagaaaactccacaagcctcactgtgagcacccagtcccctgggactggacactgtgggctgcagaggaaagtgaggcagggggtatggatggtgcatggcagtgggtccccatgaccaggaacagaacctggctgtccagcccacagtatcagacatgagcgccactagcgtagaagagcacagcctatctgcagcttctggacagctgtcaattccccaggaggtcagaaagaagtcaataaagaagacagagggaaaagattgaagttcaaccatgaaactggggctcccaagatgtcaaggacaggggtggggctctggagaaggaggacccaggtggggcttgagatagcagtggagatggaggaacgatgggggaaggagacagagcgggagacgcaggcttggaacagagtgtcctatctgcatcgtcactgacaccggaacaaggacctccatcctgggctcagtcaccacaacagcctccttcccggcctcctaccttcccacccatgggtcccccacgcccagcagcctgctctctccaaatcgtctcatgctctgcagaggctttccttcctgcctggtggaaaagccagggtcagaggcactatg

SEQ ID NO: 57237 - DNA, 1433 bp, Homo sapiens
aaaacgcgctttaaatctgcaatacttaaatactatctcaaggaataaaatgcagctgcatatcttggtgtcgtaaatacacagaaaactgctgaaatacctactctaatttactatctctgtcctttgtttataactaactaatgaactgacttctctgcacagtatattaccccaacccccaagaacaccaggctggctgaagttgtgtcactatttccatgataaatcctgtttttcgggggtttataactcagctgtaaatatgtaattcagactaaaacttggcatacaaggccttaaccatgaagcaaatttacaccacaactgccactccacccccatctaattttttaaagctttcttctatgtgtgatattttggtattaaagagccggggtattaaaatgaaggagaaaaaaacatgcacaataaataatcgttgaagagttggtggcttttgctttcatttcttattcaaatcaaaaagctacttttcaagatgctgtttgcaaaacctatcaaggtgtttaagaaacaaaacaacaacaacaacaaaaaacagacttcaaatcccaaacaaataaaaccaggcaaaagagtatttaaagtacaactgtgaggagcatgtgawccagggaaactgaggcagggatgtgccggcttgcagagtgcctccctaaagagacatgcaactccaggaaaggccggatcctcttgtctgactgttccccttggaagacggctgagttgctgaaagcattgcccaggacaagaaagcctccagtccccacgtggaccaggtggatttgcaggaagaaaactccacaagcctcactgtgagcacccagtcccctgggactggacactgtgggctgcagaggaaagtgaggcagggggtatggatggtgcatggcagtgggtccccatgaccaggaacagaacctggctgtccagcccacagtatcagacatgagcgccactagcgtagaagagcacagcctatctgcagcttctggacagctgtcaattccccaggaggtcagaaagaagtcaataaagaagacagagggaaaagattgaagttcaaccatgaaactggggctcccaagatgtcaaggacaggggtggggctctggagaaggaggacccaggtggggcttgagatagcagtggagatggaggaacgatgggggaaggagacagagcgggagacgcaggcttggaacagagtgtcctatctgcatcgtcactgacaccggaacaaggacctccatcctgggctcagtcaccacaacagcctccttcccggcctcctaccttcccacccatgggtcccccacgcccagcagcctgctctctccaaatcgtctcatgctctgcagaggctttccttcctgcctggtggaaaagccagggtcagaggcactatg

SEQ ID NO: 57238 - DNA, 779 bp, Homo sapiens
ggataaattctgctgcagagtacctcctgaccatgtttcctgacaactcagtaatcccctgcacagacaacaaggagtggaggtaaggactacatgagcagagacaggctgtgtagacctgtcccagtgtagactgacaaacccagatgacgaactacagcccacagccttcctgccatcactttccgatgcatggctgcactagactaaattcaagccacgctagaccttagcctctcacctttaaaaaaaaatcgaataggatttagcagaagtcaggagggaaaaactcattgattaaaaaatgtatttttagttttattttataacaaatacatagatattatagtatacaaacagatagatctatacacttgatcatgatgaagtgcataccttcagttttgttgctgtgacatggcctggcctggcatgagctcttcacagcatgggattacatgggcttcaagctaagtgagcatgcaagctcccctgtaagaagaaygctggattgaccggaagccagaaaggccttaaggcaacgcctgtctctgctgaatcctgcccttgctattcaagcccaatgtctttggctggaccttgggcatcagtgagggaaagaggtcattgctattgtgaccaaccgttagcatcagttgagcacctaatgggggccacccacaagccaacttccccaaggcaaggtatagctcagcagcaggaggcagtgggcttgggagttgcacctctgggcctttctttgcagaggaacccacctg

SEQ ID NO: 57239 - DNA, 1401 bp, Homo sapiens
gggcgtgtgttcgagaaacaaatgagacagcaagtttctcagctggagccctcctgagagctgcttgtatgagagaggacctggcctgtcacttctaacttggaagaaaggaggctttgaattgagcgggattaatttaggggctggggctggacctgtgcagcagacacaatctcttaccaggctcccttgasaatagcttttgcattcctgagtttagatcaatacatggggactatgacaagtcttaaacattgaaagcatgccaagaattatgtaagtacttcataaatgtctctggtctgaccaccttcatcaactccaggaactaatacaaagacagcacttggaaagataatttacctgaaactttaaatgttctgttaggagcaagtctcatctggtgtagggggacaggtcattattatctgataattaatcttttgagaagctagaatagagtgatattctgggccttataaaactagtctcctctgaaacatccctcctgtgttactgctggtctgtctgtctccaactttgtcatactaacgtttttctccactccacttcctgctccttgttggctgctgtaaacctctgactacaaaatgcaaactgcttaaagtaaaattacagatcttagagaagaatttcatgaagttaatgaaagtgatgagagagaactgtttgcatcctatgcacacccgctgataaccaaggatccggtgcattaaagtaacaatggaagagaaaattaacaaggaggatacagaaaaggcccttaacaaaggaataatttgaaaatcaacaaataaagagggcccctggaaaaaggaatgaaggattttttttgtgacaattatctttttatagcagtattgagaaaataaaatatgaaacaaaagatggtgtatcttcctgtcatacttactatcagcttagtggtacccgcaacgcagccactggttgaagggtggggtcagaggaactttcagaaccagccatacatgctgggatgaaatacgctcttcgttaacaccccctttcctccacgtcttaatttcaagagccttatagccctgagccctgtagggggcccctgctgggccacccagtaggattcaaaccttggaaaatgggatgaggaggcgcagccagtgacgcacatgctactgaaacctgggtggaaatgacagcttccatttctgggaagaagcttactcttctgacttcggaatgcccatggaggcatctgtcaagacaaaatcccacagacatctcactccagggtgatgtgcctgccatgtaccctcatacacactccacatctctgtataaaatcttatagctccatggtggctctccatgaccaaaacacgatgaatagtatttagtgat

SEQ ID NO: 57240 - DNA, 1401 bp, Homo sapiens
gggcgtgtgttcgagaaacaaatgagacagcaagtttctcagctggagccctcctgagagctgcttgtatgagagaggacctggcctgtcacttctaacttggaagaaaggaggctttgaattgagcgggattaatttaggggctggggctggacctgtgcagcagacacaatctcttaccaggctcccttgagaatagcttttgcattcctgagtttagatcaatacatggggactatgacaagtcttaaacattgaaagcatgccaagmattatgtaagtacttcataaatgtctctggtctgaccaccttcatcaactccaggaactaatacaaagacagcacttggaaagataatttacctgaaactttaaatgttctgttaggagcaagtctcatctggtgtagggggacaggtcattattatctgataattaatcttttgagaagctagaatagagtgatattctgggccttataaaactagtctcctctgaaacatccctcctgtgttactgctggtctgtctgtctccaactttgtcatactaacgtttttctccactccacttcctgctccttgttggctgctgtaaacctctgactacaaaatgcaaactgcttaaagtaaaattacagatcttagagaagaatttcatgaagttaatgaaagtgatgagagagaactgtttgcatcctatgcacacccgctgataaccaaggatccggtgcattaaagtaacaatggaagagaaaattaacaaggaggatacagaaaaggcccttaacaaaggaataatttgaaaatcaacaaataaagagggcccctggaaaaaggaatgaaggattttttttgtgacaattatctttttatagcagtattgagaaaataaaatatgaaacaaaagatggtgtatcttcctgtcatacttactatcagcttagtggtacccgcaacgcagccactggttgaagggtggggtcagaggaactttcagaaccagccatacatgctgggatgaaatacgctcttcgttaacaccccctttcctccacgtcttaatttcaagagccttatagccctgagccctgtagggggcccctgctgggccacccagtaggattcaaaccttggaaaatgggatgaggaggcgcagccagtgacgcacatgctactgaaacctgggtggaaatgacagcttccatttctgggaagaagcttactcttctgacttcggaatgcccatggaggcatctgtcaagacaaaatcccacagacatctcactccagggtgatgtgcctgccatgtaccctcatacacactccacatctctgtataaaatcttatagctccatggtggctctccatgaccaaaacacgatgaatagtatttagtgat

SEQ ID NO: 57241 - DNA, 1401 bp, Homo sapiens
gggcgtgtgttcgagaaacaaatgagacagcaagtttctcagctggagccctcctgagagctgcttgtatgagagaggacctggcctgtcacttctaacttggaagaaaggaggctttgaattgagcgggattaatttaggggctggggctggacctgtgcagcagacacaatctcttaccaggctcccttgagaatagcttttgcattcctgagtttagatcaatacatggggactatgacaagtcttaaacattgaaagcatgccaagaattatgtaagtacttcataaatgtctctggtctgaccaccttcatcaactccaggaactaatacaaagacagcacttggaaagataatttacctgaaactttaaatgttctgttaggagcaagtctcatctggtgtagggggacaggtcattattatctgataattaatcttttgagaagctagaatagagtgatattctgggccttataaaactagtctcctctgaaacatccctcctgtgttactgctggtctgtctgtctccaactttgtcatactaacgtttttctccactccacttcctgctccttgttggctgctgtaaacctctgactacaaaatgcaaactgcttaaagtaaaattacagatcttagagaagaatttcatgaagttaatgaaagtgatgagagagaactgtttgcatcctatgcacacccgctgataaccaaggatccggtgcattaaagtaacaatggaagagaaaattaacaaggaggatacagaaaaggcccttaacaaaggaataatttgaaaatcaacaaataaagagggcccctggaaaaaggaatgaaggattttttttgtgacaattatctttttatagcagtattgagaaaataaaatatgaaacaaaagatggtgtatcttcctgtcatacttactatcagcttagtggtacccgcaacgcagccactggttgaagggtggggtcagaggaactttcagaaccagccatacatgctgggatgaaatacrctcttcgttaacaccccctttcctccacgtcttaatttcaagagccttatagccctgagccctgtagggggcccctgctgggccacccagtaggattcaaaccttggaaaatgggatgaggaggcgcagccagtgacgcacatgctactgaaacctgggtggaaatgacagcttccatttctgggaagaagcttactcttctgacttcggaatgcccatggaggcatctgtcaagacaaaatcccacagacatctcactccagggtgatgtgcctgccatgtaccctcatacacactccacatctctgtataaaatcttatagctccatggtggctctccatgaccaaaacacgatgaatagtatttagtgat

SEQ ID NO: 57242 - DNA, 1401 bp, Homo sapiens
gggcgtgtgttcgagaaacaaatgagacagcaagtttctcagctggagccctcctgagagctgcttgtatgagagaggacctggcctgtcacttctaacttggaagaaaggaggctttgaattgagcgggattaatttaggggctggggctggacctgtgcagcagacacaatctcttaccaggctcccttgagaatagcttttgcattcctgagtttagatcaatacatggggactatgacaagtcttaaacattgaaagcatgccaagaattatgtaagtacttcataaatgtctctggtctgaccaccttcatcaactccaggaactaatacaaagacagcacttggaaagataatttacctgaaactttaaatgttctgttaggagcaagtctcatctggtgtagggggacaggtcattattatctgataattaatcttttgagaagctagaatagagtgatattctgggccttataaaactagtctcctctgaaacatccctcctgtgttactgctggtctgtctgtctccaactttgtcatactaacgtttttctccactccacttcctgctccttgttggctgctgtaaacctctgactacaaaatgcaaactgcttaaagtaaaattacagatcttagagaagaatttcatgaagttaatgaaagtgatgagagagaactgtttgcatcctatgcacacccgctgataaccaaggatccggtgcattaaagtaacaatggaagagaaaattaacaaggaggatacagaaaaggcccttaacaaaggaataatttgaaaatcaacaaataaagagggcccctggaaaaaggaatgaaggattttttttgtgacaattatctttttatagcagtattgagaaaataaaatatgaaacaaaagatggtgtatcttcctgtcatacttactatcagcttagtggtacccgcaacgcagccactggttgaagggtggggtcagaggaactttcagaaccagccatacatgctgggatgaaatacgctcttcgttaacaccccctttcctccacgtcttaatttcaagagccttatagccctgagccctgtagggggcccctgctgggccacccagtaggattcaaaccttggaaaatgggatgaggaggcgcagccagtgacgcacatgctactgaaacctgggtggaaatgacagcttccatttctgggaagaagcttactyttctgacttcggaatgcccatggaggcatctgtcaagacaaaatcccacagacatctcactccagggtgatgtgcctgccatgtaccctcatacacactccacatctctgtataaaatcttatagctccatggtggctctccatgaccaaaacacgatgaatagtatttagtgat

SEQ ID NO: 57243 - DNA, 713 bp, Homo sapiens
tgggtggggctgcctccactgcaaaggccagcctgggtcgaggcagggcggggagactctaagaaagcttggttctagagcaggaagctctgtgggagcaggagctgggagacaggagtatggccatgatgagaatcagtcctcagtttggaaagtgtgttcaggggcctacaggaagctggctgctgaggcagcagggctcaggtcctgcctgggtcctcggatgccagcttgccaggtggggccttgtcaatagcctctgaagaatcattgacaatccctgtggccaggcctgggccctgctgagcctcagctctcttgaagaaggtgcaggaaagaaacactgatccaraagccatttctagggcctgaacaaggccagcatatgtgacagcctgctgtgagctcaggcgaggggctttgggggagaagggcacagattgaaggaccctgaagcctctagagggaaggggtcattagctggttgcagggagaggcagaggaggccacaggccagctgctgccagagagaagctgaggacaggcctgtcggtgctagtggttagcgctgcagtccaggcacaagcttgccacggagctccagcctccagcgcttagatggtttgggtgtgtgtcccctccaaatctctgttgaaatgtgattcccagtgttggaggtggggcctggtgggagctgattgggtcatgggggc

SEQ ID NO: 57244 - DNA, 713 bp, Homo sapiens
tgggtggggctgcctccactgcaaaggccagcctgggtcgaggcagggcggggagactctaagaaagcttggttctagagcaggaagctctgtgggagcaggagctgggagacaggagtatggccatgatgagaatcagtcctcagtttggaaagtgtgttcaggggcctacaggaagctggctgctgaggcagcagggctcaggtcctgcctgggtcctcggatgccagcttgccaggtggggccttgtcaatagcctctgaagaatcattgacaatccctgtggccaggcctgggccctgctgagcctcagctctcttgaagaaggtgcaggaaagaaacactgatccaaaagccatttctagggcctgaacaaggccagcatatgtgacagcctgctgtgagctcaggcgaggggctttgggggagaagggcacagrttgaaggaccctgaagcctctagagggaaggggtcattagctggttgcagggagaggcagaggaggccacaggccagctgctgccagagagaagctgaggacaggcctgtcggtgctagtggttagcgctgcagtccaggcacaagcttgccacggagctccagcctccagcgcttagatggtttgggtgtgtgtcccctccaaatctctgttgaaatgtgattcccagtgttggaggtggggcctggtgggagctgattgggtcatgggggc

SEQ ID NO: 57245 - DNA, 713 bp, Homo sapiens
tgggtggggctgcctccactgcaaaggccagcctgggtcgaggcagggcggggagactctaagaaagcttggttctagagcaggaagctctgtgggagcaggagctgggagacaggagtatggccatgatgagaatcagtcctcagtttggaaagtgtgttcaggggcctacaggaagctggctgctgaggcagcagggctcaggtcctgcctgggtcctcggatgccagcttgccaggtggggccttgtcaatagcctctgaagaatcattgacaatccctgtggccaggcctgggccctgctgagcctcagctctcttgaagaaggtgcaggaaagaaacactgatccaaaagccatttctagggcctgaacaaggccagcatatgtgacagcctgctgtgagctcaggcgaggggctttgggggagaagggcacagattgaaggaccctgaagcctctagagggaaggggtcattagctggttgcagggagaggcagaggaggccacaggccagctgctgccagagagmagctgaggacaggcctgtcggtgctagtggttagcgctgcagtccaggcacaagcttgccacggagctccagcctccagcgcttagatggtttgggtgtgtgtcccctccaaatctctgttgaaatgtgattcccagtgttggaggtggggcctggtgggagctgattgggtcatgggggc

SEQ ID NO: 57246 - DNA, 2243 bp, Homo sapiens
cctactttagtttgactctgtgaccattagatgaggtaacatcttataaagctctgctcttaataaacaacatctgcaactgttgttgttgctgctgttatttttatatcagtcaaggttttttaattgcaagcaacagaaatcaactctggctagcttaagcaaaagtgaaatttaatgggaagatattacagaatgcatcaaatcaaaggaacaccgagacagagacatgcaagaaacagaaacaggggccactccagggacccaggcaggcggggctaattggcagctcatcaaccctaaccattctattcatccttgcctcatgtaccttgagagtcgaagtcccaagaaagaagccaactgggctgtcttttgtcacattcctattccttgcctaatgcagtgagagtggcagggtgccctggttgacaattgcagccagcctgcatgcaacagagcagagggaaccaaagggaaccagggatccttttaccagaagaaggtatggmtgccacacaaaataagcacatctgatgcaaaccatctttgacatgtgcagaagcttactgtcctctgttcttggtatgactggatgatgtaggcagagcagccagaggcatgaccgtcagctttcattcctcaagaatgggatttttcttgtgcacttctcttttcttatgcatagtcctcaatcaccttggccccagagcctgcccagccagacttagcaggactgggtcacccagttccccgtggcagaaatgtcacagtcattcaggagcatccacatttgggctgggatgacaacacaaatcctgcagtaatttaacacctgctctgcttttatgctgttattaaagagttttagcttaaatatttgaggtgtgactctgctccctcatgcaaatacgggtgcagaatttcccacctggctcattgattggtgggatctgaaatagcccctttatggaaaatggtaaatttcttattactgcctaatgaataaagtgcatatgatccagctgcagcagctccccactcccctctccttcccagggaaactcatcccattggtaattgggggaatgtaaatgctgcttcatggcttaattttcagatgttttgaaagacaatatctgcagcaataaaaggctcaaagacatctgagatatgttttgtctcttgtcctaattatactaataaataaatagtatttgtttccctgcactgtaaaattaaatatctttctgaatatctcccctcctattttaatgaggagaaagatgctcccttgatgagaatgacactgtagatgaaaaacgagaaagaacaaagaatgttaaccatctaaatacaataacatgagaagaactgtttcctaagttctgagtatgatctctgggtgggatattctccttctcatcctctttgtctggagaaaatgtctctcaaatgtatgctgtttgggatctctgtaaatttgagtcctcaagggaattactgttgccttacctacagatggcaccttgtggggtatcctcgaacactgccaagccttggcacccaggaaccaaatctccttgtaacttctgcggaaattgtgagaacagggatctttccatcttactttccaccgtcacctgagtgcctaaagcagtgctcagcctgtaacgggtgcccagctatgtcacatttgtttcaggagcactcctgtggccctgccaagtctcatgttcaagttggatcccagcgttgggagtggtgcctgacgggaggtatctgggtcatggctgtggataccccacgtgtggcttggtgtgattctcactcttagttcctgtgagaagtggtcgctgaaaagagcctggcacctctcctttcttgctctcttgctctgtgatctctgcaaatgtcggctcccccttcaccttcccctctgagtggaagcttcctaaggccacaccagaaacagatgctggcaccatgcttcctgtacagcctgcagaaccatgagccaaatcaacctcttttctttataaattacccagtttcaggtattcctttataggaacatggactgagacaagcacagatcccaggaactgggcagatatctgttttccataggctgatggttgaggtcgcagctctgcccctcactgaccggcaggtttgcagcaagcctcattctccatctgttaaatggggatagtcccaaagaaagacagctgtgactgaat

SEQ ID NO: 57247 - DNA, 611 bp, Homo sapiens
gcaggcccctgtcttgagagcacacagggcatcttctcactccttagatctcctgagaggtgcctggcgctggggtgttatcaaccatggtgatgtgatgggagaggcgcaccagggagtgcagggaagascaggctgacttctggctctacgaagctggagaaccctgctagcatagcacaaagagcgccggactgggtgccaggacagcgggtcccaggcttgactctagctgcgtgtcatttggcattgcttcctctctcagtgtcctcatttgcataattaggagacagaatatttttccaagagttgctcattcattcatttaagaatattgcagaggccggaagtggtggctcacgcctgtaatcccaacactttgggaggccaaggtgggcggatcacctgaggttgggagctggataccagcctgaccaacatggagaaaccctgtctctactaaaaatacaaaattagctgggtgtggtggcacatgcctgtaatcccagctactcgggaggctgaggcaggagaatcgcttgaacctgggaggtggaggttgcggtgagctgagatcgtgccattgcactccagcctgggcaacaagagca

SEQ ID NO: 57248 - DNA, 611 bp, Homo sapiens
gcaggcccctgtcttgagagcacacagggcatcttctcactccttagatctcctgagaggtgcctggcgctggggtgttatcaaccatggtgatgtgatgggagaggcgcaccagggagtgcagggaagagcaggctgacttctggctctacgaagctggagaaccctgctagcatagcacaaagagcgccggactgggtgccaggacagcgggtcccaggcttgactctagctgcgygtcatttggcattgcttcctctctcagtgtcctcatttgcataattaggagacagaatatttttccaagagttgctcattcattcatttaagaatattgcagaggccggaagtggtggctcacgcctgtaatcccaacactttgggaggccaaggtgggcggatcacctgaggttgggagctggataccagcctgaccaacatggagaaaccctgtctctactaaaaatacaaaattagctgggtgtggtggcacatgcctgtaatcccagctactcgggaggctgaggcaggagaatcgcttgaacctgggaggtggaggttgcggtgagctgagatcgtgccattgcactccagcctgggcaacaagagca

SEQ ID NO: 57249 - DNA, 1395 bp, Homo sapiens
tattcctagtttacagaagcacttcatcgccagtcagagttaatcatggggtgcaaaggagacccgctgccttcacaaagtctccgagaaaataaatgcatgagaaaataaacccaaactttctgaaaccaaccccccgcatgccagctccgaaaccccacagccatcgccgctggacactcacctccttcccggcttctgcctccgaccttctcggtctgggatgcgctctccaaccggcctggagctgaactgcgwctatttatggagaagcgggactccaggccgcgtttccggttccctgcgccgcgccgtgattggtttagggccacagagtccattttcgtaatcggcgttgattacatttcccactgaaaccccacccacaggaaattaatgtattaaacgtgcctactgtgcaaataatacaggttttcccgctctactgagttgtcatattgctgaagtatgtggaggcctcagaaaatatagatctgcaagttttaaccactttgggtcccctcatgccacagacagtaatatcctaacaagtaaaggacgtgttaagagctggttgacttcgcttattaaaacaaaacggaaaaagaaaaaaaaaagaaaaattcaaaatagagttggttgattaatatcaaaccagtgatttaatctcatttttaatctcatttgagcgaagctttcacacgcgaattccaagatgttgaaaattgtggacactcgttgatatgtaatgaatgtttgtgataattttttacttttttatttttttcaaaatcttggaattggcatgtgaaagctttgttcaaactaaactaaatcactgatttgatatcagccttatataaaagcagtgggaaccagagaaaggcacatggtccccactctgcattcattccaggacggtgatagggtggtttatagatacactgagggtcctacggggttccctagttctcagccccctcagttagggctctcaagcaagaaaagccttaacggtgggtgtgaattttactgtgtggatcatggagttaatgtggaatgataattaagtgctaggcaggattagattacaatttgggaagttcacaccatcagttggatgacactaatccattcaagtagtgactcattcattttaatttcagaggaaaccttctcgtctaacctttaggacaaattggagggctgttaattttacactgattctggtttaaatccttggaaaatcttaagccgcttcactctgggaacttcaaacttcttgtgactagaaccttcctgatgtgttgttttgaagatgcaataagactgggtcaataaagtgctcgatacaaggtcattttgccaaacagttgtgacaattattttctggtg

SEQ ID NO: 57250 - DNA, 1395 bp, Homo sapiens
tattcctagtttacagaagcacttcatcgccagtcagagttaatcatggggtgcaaaggagacccgctgccttcacaaagtctccgagaaaataaatgcatgagaaaataaacccaaactttctgaaaccaaccccccgcatgccagctccgaaaccccacagccatcgccgctggacactcacctccttcccggcttctgcctccgaccttctcggtctgggatgcgctctccaaccggcctggagctgaactgcgtctatttatggagaagcgggactccaggccscgtttccggttccctgcgccgcgccgtgattggtttagggccacagagtccattttcgtaatcggcgttgattacatttcccactgaaaccccacccacaggaaattaatgtattaaacgtgcctactgtgcaaataatacaggttttcccgctctactgagttgtcatattgctgaagtatgtggaggcctcagaaaatatagatctgcaagttttaaccactttgggtcccctcatgccacagacagtaatatcctaacaagtaaaggacgtgttaagagctggttgacttcgcttattaaaacaaaacggaaaaagaaaaaaaaaagaaaaattcaaaatagagttggttgattaatatcaaaccagtgatttaatctcatttttaatctcatttgagcgaagctttcacacgcgaattccaagatgttgaaaattgtggacactcgttgatatgtaatgaatgtttgtgataattttttacttttttatttttttcaaaatcttggaattggcatgtgaaagctttgttcaaactaaactaaatcactgatttgatatcagccttatataaaagcagtgggaaccagagaaaggcacatggtccccactctgcattcattccaggacggtgatagggtggtttatagatacactgagggtcctacggggttccctagttctcagccccctcagttagggctctcaagcaagaaaagccttaacggtgggtgtgaattttactgtgtggatcatggagttaatgtggaatgataattaagtgctaggcaggattagattacaatttgggaagttcacaccatcagttggatgacactaatccattcaagtagtgactcattcattttaatttcagaggaaaccttctcgtctaacctttaggacaaattggagggctgttaattttacactgattctggtttaaatccttggaaaatcttaagccgcttcactctgggaacttcaaacttcttgtgactagaaccttcctgatgtgttgttttgaagatgcaataagactgggtcaataaagtgctcgatacaaggtcattttgccaaacagttgtgacaattattttctggtg

SEQ ID NO: 57251 - DNA, 1395 bp, Homo sapiens
tattcctagtttacagaagcacttcatcgccagtcagagttaatcatggggtgcaaaggagacccgctgccttcacaaagtctccgagaaaataaatgcatgagaaaataaacccaaactttctgaaaccaaccccccgcatgccagctccgaaaccccacagccatcgccgctggacactcacctccttcccggcttctgcctccgaccttctcggtctgggatgcgctctccaaccggcctggagctgaactgcgtctatttatggagaagcgggactccaggccgcgtttccggttccctgcgccgcsccgtgattggtttagggccacagagtccattttcgtaatcggcgttgattacatttcccactgaaaccccacccacaggaaattaatgtattaaacgtgcctactgtgcaaataatacaggttttcccgctctactgagttgtcatattgctgaagtatgtggaggcctcagaaaatatagatctgcaagttttaaccactttgggtcccctcatgccacagacagtaatatcctaacaagtaaaggacgtgttaagagctggttgacttcgcttattaaaacaaaacggaaaaagaaaaaaaaaagaaaaattcaaaatagagttggttgattaatatcaaaccagtgatttaatctcatttttaatctcatttgagcgaagctttcacacgcgaattccaagatgttgaaaattgtggacactcgttgatatgtaatgaatgtttgtgataattttttacttttttatttttttcaaaatcttggaattggcatgtgaaagctttgttcaaactaaactaaatcactgatttgatatcagccttatataaaagcagtgggaaccagagaaaggcacatggtccccactctgcattcattccaggacggtgatagggtggtttatagatacactgagggtcctacggggttccctagttctcagccccctcagttagggctctcaagcaagaaaagccttaacggtgggtgtgaattttactgtgtggatcatggagttaatgtggaatgataattaagtgctaggcaggattagattacaatttgggaagttcacaccatcagttggatgacactaatccattcaagtagtgactcattcattttaatttcagaggaaaccttctcgtctaacctttaggacaaattggagggctgttaattttacactgattctggtttaaatccttggaaaatcttaagccgcttcactctgggaacttcaaacttcttgtgactagaaccttcctgatgtgttgttttgaagatgcaataagactgggtcaataaagtgctcgatacaaggtcattttgccaaacagttgtgacaattattttctggtg

SEQ ID NO: 57252 - DNA, 1888 bp, Homo sapiens
gcaaccaaacactgatgttggctgacaacttccgctcaagctcaagcctaagacattggactgtaggtctctggaaagtagaggatggggaggctttgacagctgagtgccaactcccccaggggatgataatgctgggcccccagccccgcaccccagaagagagggactaacccctgtggatccaagtcttcatactcactgggactctttggaagctgaggctctggggatgtcagtcctgggttctcttccctgttttccttcagatccttctccaaggtctgcttgggtctcagagactttgggtcacctgttacgtcaatactcttgtgtagcagaaagtcctctccctgaagaggaaaaaccaagagtaatgactgctgtgtccaaactggtggaagcagggacacatctgtccccttctgattggatgcaacaactcttctaatgacacaggtgtggaaatacgtgcagacttcccctggaccaccccatcaccccacgtaaacatcaccatctcatttctgtgtctgtccctaatctgcaccctccatattccaaatcagctcctgtgcctggtggttttcactgtttggttctctgagcatatttctccccgccgtgccaacgtctccctgcacctgacrctggaaggagcatgactctagtcgaggcccctcagctgtggcaccactggcattggggctgcatcaccctgctggagggggcgctcctgtgcagagcagagaccccacctccaccctctagatgctattaacaccccaccatcccctacaatgacacacaaaagcatctccagacatggccatgtgtccggaaaggcagaatcaccccagttgagaaacactcctcaaattaagaaattgacaatctgtagaaaatggtttccttgctgaattattacattaaatgtctttgaggaaactggctacggggaaggaatcttcattcatctgtgcaaactgcctccctcatttcactgagatcatttcttatgccccaccctaaatgctaaaagctctcatggtggagagaaaagtagatgaggcttccctctctgtgatggctcaggaatgaatgtttggggatgtatcatgtccatggggaatggctctaatcttgtcctgtgtcaaatctctcaatcagtccagcggccacacgatttcctcctgttccttctcccacctctgcccagacaccaaggcctcacacactcacctgcctcctggacaatgcagggaccctgggcaggatctgcagctctcggtgggcctggccttcccctggacgcatctggttcaccgaggaggcccgttggctggacacgtctttcagatcatctctgacactggagggggcttcagccatctcgatatctgagtcctgcacaatatattcctttccgtggaaggtgaccacagactgtagagagaaaaaagacaatcagactcaccatgagaacctgaaagtagctctcatattccctgggtcctgccataatgctcacactttactgtaattaatgttcaaatctgccttcccaatagagagtcagctctgtggacacagcaatcctgtctgaattttttcctctctagactccagcacctgcctgcgcctggaatattctagttaagtacataaacatgggtcctttagatgaaatagtctctaaaccaaagagaagacaaggagaaatattctgggtgaatccaactcaattggccgatggcagctcaccttgtattagaacttaggggctcatttggggacctgggggcagatccctgcatctgataccaaccactttccctgcttcaggatgggactcctgggccccccttcagttcactctaatgcctcc

SEQ ID NO: 57253 - DNA, 945 bp, Homo sapiens
aagcctgaaacgggagtgctgagctcacaaagcagagtcatctgggatatttgggtggaagctctggggcgccagggaaagtcccaaaggagggttctgggaagagggtgctgcagacagcaataagaggaggagattggaaggaggggcaaagcagttcatggggatccctggaactgagtccagctcatccaaagcttctatcttctgcttttattttataatatttaagttataagtggatgctgccaattaggtatacagatatacagcctctctctctctcttcctcctctccttccttcttcctcctctccttccctcttcctcctctccttcccctttccttttaggacactaagatcaacaggaataaaattcctgagtatttatctcctgaggggcagagctagaaagaggagatctatgcagagtttccaatttagaattatattaaatggggtgggggaagctgagtgttaatgtccttttcctttttgggatttgagtcctctgggagccaggactcagagagcagtaggcgtggggcctgggctgcagaggcagctaggggctggagcaagtgccccagggaaggagggccaggctgagcatgggtgagagacctgmgagcccaggacaggccacttccaatggggaagaccccggtgctcccggctgcccccagggccagtggccagtctccgaggggcctaagagctggaggaaaagggctgtcaagtccggagggcaggagctgggctggggtgaggggaggtggcagatgaggggtccatttaggaacaaggccctgctgatatggaggaaacagaaagaaggtgagagtcagcacggtcgcttcaaaatggtgacaactgaaatcttctactcaacaggaatggaaaaccaggtaggaatagaaacctggaagagccagatgaccag

SEQ ID NO: 57254 - DNA, 945 bp, Homo sapiens
aagcctgaaacgggagtgctgagctcacaaagcagagtcatctgggatatttgggtggaagctctggggcgccagggaaagtcccaaaggagggttctgggaagagggtgctgcagacagcaataagaggaggagattggaaggaggggcaaagcagttcatggggatccctggaactgagtccagctcatccaaagcttctatcttctgcttttattttataatatttaagttataagtggatgctgccaattaggtatacagatatacagcctctctctctctcttcctcctctccttccttcttcctcctctccttccctcttcctcctctccttcccctttccttttaggacactaagatcaacaggaataaaattcctgagtatttatctcctgaggggcagagctagaaagaggagatctatgcagagtttccaatttagaattatattaaatggggtgggggaagctgagtgttaatgtccttttcctttttgggatttgagtcctctgggagccaggactcagagagcagtaggcgtggggcctgggctgcagaggcagctaggggctggagcaagtgccccagggaaggagggccaggctgagcatgggtgagagacctgagagcccaggacaggccacttccaatggggaagaccccggtgctcccggctgcccccagggccagtggccagtctccgaggggcctaagagctggaggaaaagggctgtcaagtccggagggcaggagctgggctggggtgaggggaggtggcagatgaggggtccatttaggaacaaggccctgctgatatggaggaaacagaragaaggtgagagtcagcacggtcgcttcaaaatggtgacaactgaaatcttctactcaacaggaatggaaaaccaggtaggaatagaaacctggaagagccagatgaccag

SEQ ID NO: 57255 - DNA, 657 bp, Homo sapiens
aggttggtgagctaacagcctttacctgagagtggtggccccttgtccatcttcatccagacaccagcagagactgacataggccaaccagtctgtgaagaggaagaggatgtcagggtcttaaagccaagggctcagggagaacaggggttctggcatgagccccgtttcctctcctctcctctttccacacccaggtcagtgtctagccttcaccctcaaatcaaagcctgttgtctttgtaaaagggctcctgttcagtgatactaagccagcttccttccctggactggtggagcctccggtaaatgcaggtttaaacgygagtgtgcagatgacatttcttggtagagagatggcccctggagaggagacttagagcccttcttgggcctgtgccttggcctgggtcagttcgtcctgggagcacttggtctggctgccctggcttaaccaggggagaatggtgggcccctgtcaaggcaactgctgagggaggctgaccccttttcactggaacaaaccaaccgcctctcctggcaccggagctcctgtgcaccagcctcccaccccctacctcacctccccctagcttttcctctccaaccactgtggttattccttttgtttcagacgatgcctatgtggacccaccca

SEQ ID NO: 57256 - DNA, 657 bp, Homo sapiens
aggttggtgagctaacagcctttacctgagagtggtggccccttgtccatcttcatccagacaccagcagagactgacataggccaaccagtctgtgaagaggaagaggatgtcagggtcttaaagccaagggctcagggagaacaggggttctggcatgagccccgtttcctctcctctcctctttccacacccaggtcagtgtctagccttcaccctcaaatcaaagcctgttgtctttgtaaaagggctcctgttcagtgatactaagccagcttccttccctggactggtggagcctccggtaaatgcaggtttaaacgtgagtgtgcagatgacatttcttggtagagagatggcccctggagaggagacttagagcccttcttgggcctgtgccttggcctgggtcagttcgtcctgggagcacttggtctggctgccctggcttaaccaggggagaatggtgggcccctgtcaaggsaactgctgagggaggctgaccccttttcactggaacaaaccaaccgcctctcctggcaccggagctcctgtgcaccagcctcccaccccctacctcacctccccctagcttttcctctccaaccactgtggttattccttttgtttcagacgatgcctatgtggacccaccca

SEQ ID NO: 57257 - DNA, 1239 bp, Homo sapiens
gcataaaaagcagcaagacattgttaaatgaaacagcaatagtgcagttyagacctgtgaccaactatatatgattaaacttacttcccacattcacatcacaataatcatccatcatttaatagctcaaccaaaatgttatacagtcatcaacaggcaaggcacatgaaaaccccgcacaaccaagaatgatttgggcccaaatgtcagtagatttgagtttggaaaaaccttcttgtagttgttaaggctcaatggctctggttaatttaatataataaacaacaacttcataatggaaaaaaattaaatcctctattgaggtataaaacctaattaatttataaggataaagtaagtgactaccttgaagtcaaaacacattatggacaatgaaagagtattacgattgttccaaattgacaagggtatttaaacctaggtacacaatctttcttaaaattaatttatagaaagtcataacctgtgggtacatgaatatgaatatacatcttctccaacttgacaagtacattattgctgggacaggtaccttttaataacaagtaacttattagcctagaaaggccaaacttctctttttattgtcagcttttggtttttaatatacctggggttatataaacaaaaacacagtcatagtagttttgggctaagtaaattctggattatgtcaaagaaacctgattgtttctagtatcttttgtaagcgaaagagcaaatctttgtgcttgctcagtggccttttaggaaacctgaaaggcagattttatgtgaaagacataatctgttacaatctgtttcattattctgaattggaaaaggcattaacaaaaagagttgtcagaggagcttttgacaagaacaatagttgtgactaattaatcagaacatcaacacaatatttaaaataatgagaaggtagcaagattttaatttttatttaaataaaaaattctgttctatttaaaaatagtttagatgtgtagtataaggtagctaaaagcatgaaaattatttgactcttaaaatttgaagcatacacagaagtgtggcaaaattatgcagatttattttcttcatgtattgaagaaaaagaataatactttaatttcctcatatagagtggacagtttactccaagatcatcattttcccttagctagcagtcttttctatcatatcatacttatgtcacttttttcatacattatatga

SEQ ID NO: 57258 - DNA, 1239 bp, Homo sapiens
gcataaaaagcagcaagacattgttaaatgaaacagcaatagtgcagtttagacctgtgaccaactatatatgattaaacttacttmccacattcacatcacaataatcatccatcatttaatagctcaaccaaaatgttatacagtcatcaacaggcaaggcacatgaaaaccccgcacaaccaagaatgatttgggcccaaatgtcagtagatttgagtttggaaaaaccttcttgtagttgttaaggctcaatggctctggttaatttaatataataaacaacaacttcataatggaaaaaaattaaatcctctattgaggtataaaacctaattaatttataaggataaagtaagtgactaccttgaagtcaaaacacattatggacaatgaaagagtattacgattgttccaaattgacaagggtatttaaacctaggtacacaatctttcttaaaattaatttatagaaagtcataacctgtgggtacatgaatatgaatatacatcttctccaacttgacaagtacattattgctgggacaggtaccttttaataacaagtaacttattagcctagaaaggccaaacttctctttttattgtcagcttttggtttttaatatacctggggttatataaacaaaaacacagtcatagtagttttgggctaagtaaattctggattatgtcaaagaaacctgattgtttctagtatcttttgtaagcgaaagagcaaatctttgtgcttgctcagtggccttttaggaaacctgaaaggcagattttatgtgaaagacataatctgttacaatctgtttcattattctgaattggaaaaggcattaacaaaaagagttgtcagaggagcttttgacaagaacaatagttgtgactaattaatcagaacatcaacacaatatttaaaataatgagaaggtagcaagattttaatttttatttaaataaaaaattctgttctatttaaaaatagtttagatgtgtagtataaggtagctaaaagcatgaaaattatttgactcttaaaatttgaagcatacacagaagtgtggcaaaattatgcagatttattttcttcatgtattgaagaaaaagaataatactttaatttcctcatatagagtggacagtttactccaagatcatcattttcccttagctagcagtcttttctatcatatcatacttatgtcacttttttcatacattatatga

SEQ ID NO: 57259 - DNA, 1239 bp, Homo sapiens
gcataaaaagcagcaagacattgttaaatgaaacagcaatagtgcagtttagacctgtgaccaactatatatgattaaacttacttcccacattcacatcacaataatcatccatcatttaatagctcaaccaaaatgttatacagtcatcaacaggcaaggcacatgaaaaccccgcacaaccaagaatgatttgggcccaaatgtcagtagatttgagtttggaaaaaccttcttgtagttgttaaggctcaatggctctggttaatttaatataataaacaacaacttcataatggaaaaaaattaaatcctctattgaggtataaaacctaattaatttataaggataaagtaagtgactaccttgaagtcaaaacacattatggacaatgaaagagtattacgattgttccaaattgacaagggtatttaaacctaggtacacaatctttcttaaaattaatttatagaaagtcataacctgtgggtacatgaatatgaatatacatcttctccaacttgacaagtacattattgctgggacaggtaccttttaataacaagtaacttattagcctagaaaggccaaacttctctttttattgtcagcttttggtttttaatatacctggggttatataaacaaaaacacagtcatagtagttttgggctaagtaaattctggattatgtcaaagaaacctgattgtttctagtatcttttgtaagcgaaagagcaaatctttgtgcttgctcagtggccttttaggaaacctgaaaggcagattttatgtgaaagacataatctgttacaatctgtttcattattctgaattggaaaaggcattaacaaaaagagttgtcagaggagcttttgacaagaacaatagttgtgactaattaatcagaacatcaacacaatatttaaaataatgagaaggtagcaagattttaatttttatttaaataaaaaattctgttctatttaaaaatagtttagatgtgtagtataaggtagctaaaagcatgaaaattatttgactcttaaaatttgaagcatacacagaagtgtggcaaaattatgcagatttattttcttcatgtattgaagaaaaagaataatactttaatttcctcatayagagtggacagtttactccaagatcatcattttcccttagctagcagtcttttctatcatatcatacttatgtcacttttttcatacattatatga

SEQ ID NO: 57260 - DNA, 646 bp, Homo sapiens
tgcatcatatccttggaagagtatctggtatgtagcctatgcttaatacatattagctattgttcatattgtctttattattagtattactactggtgaattcttaggagaggcacaaccgttttgaggaatgaattcagaaaagcttcccataaccactcatccatttgaatttcagatagktcattctggataagatctagtacagtataaagaatttgaggggattttaattcagagtttatcccttaagctgagctaaaaaaatgagacttgaaaaaatccagacttttgaagagtttaggaaagctgttttatagaatgtcacacattagtttcattcctcatggtgaaatttgatatgggcctctccttcacatttctcgtaacatgaagttggaaatagaggcttaaacattttttaccagaacacttcatagatggtgatgtgtacttcatcttgcaatacctcagaagcagatagtatccatttcccccagtatcaccagtgccaagtttgatcacttatggtaactactggagttgtctgttataaagatccattatatacctaataggattggtcagccttgatcaatgatctttggaaatgtgtgatcatatggtatgtattttactttttttt

SEQ ID NO: 57261 - DNA, 646 bp, Homo sapiens
tgcatcatatccttggaagagtatctggtatgtagcctatgcttaatacatattagctattgttcatattgtctttattattagtattactactggtgaattcttaggagaggcacaaccgttttgaggaatgaattcagaaaagcttcccataaccactcatccatttgaatttcagatagttcattctggataagatctagtacagtataaagaatttgaggggattttaattcagagtttatcccttaagctgagctaaaaaaatgagacttgaaaaaayccagacttttgaagagtttaggaaagctgttttatagaatgtcacacattagtttcattcctcatggtgaaatttgatatgggcctctccttcacatttctcgtaacatgaagttggaaatagaggcttaaacattttttaccagaacacttcatagatggtgatgtgtacttcatcttgcaatacctcagaagcagatagtatccatttcccccagtatcaccagtgccaagtttgatcacttatggtaactactggagttgtctgttataaagatccattatatacctaataggattggtcagccttgatcaatgatctttggaaatgtgtgatcatatggtatgtattttactttttttt

SEQ ID NO: 57262 - DNA, 646 bp, Homo sapiens
tgcatcatatccttggaagagtatctggtatgtagcctatgcttaatacatattagctattgttcatattgtctttattattagtattactactggtgaattcttaggagaggcacaaccgttttgaggaatgaattcagaaaagcttcccataaccactcatccatttgaatttcagatagttcattctggataagatctagtacagtataaagaatttgaggggattttaattcagagtttatcccttaagctgagctaaaaaaatgagacttgaaaaaatccagacttttgaagagtttaggaaagctgttttatagaatgtcacacattagtttcwttcctcatggtgaaatttgatatgggcctctccttcacatttctcgtaacatgaagttggaaatagaggcttaaacattttttaccagaacacttcatagatggtgatgtgtacttcatcttgcaatacctcagaagcagatagtatccatttcccccagtatcaccagtgccaagtttgatcacttatggtaactactggagttgtctgttataaagatccattatatacctaataggattggtcagccttgatcaatgatctttggaaatgtgtgatcatatggtatgtattttactttttttt

SEQ ID NO: 57263 - DNA, 646 bp, Homo sapiens
tgcatcatatccttggaagagtatctggtatgtagcctatgcttaatacatattagctattgttcatattgtctttattattagtattactactggtgaattcttaggagaggcacaaccgttttgaggaatgaattcagaaaagcttcccataaccactcatccatttgaatttcagatagttcattctggataagatctagtacagtataaagaatttgaggggattttaattcagagtttatcccttaagctgagctaaaaaaatgagacttgaaaaaatccagacttttgaagagtttaggaaagctgttttatagaatgtcacacattagtttcattcctcatggtgaaatttgatatgggcctctccttcacatttctcgtaacatgaagttggaaatagaggcttaaacattttttaccagaacacttcatagatggtgatgtgtacttcatcttgcaatacctcagaagcagatagtatccatttcccccagtatcaccagtgccaagtttgatcacttatgrtaactactggagttgtctgttataaagatccattatatacctaataggattggtcagccttgatcaatgatctttggaaatgtgtgatcatatggtatgtattttactttttttt

SEQ ID NO: 57264 - DNA, 533 bp, Homo sapiens
gttgtcgctactccttgtggcttcccagggaaggcttttgacccctctccaccccatcacagatgaataaacaggctcagctggcttaaagggcattggtaatattactgagcacatcctgaaccaggcatgggtctgggcgctggggcggcgggtgaagacgaagcctctgcccttgggaagtttacactcggcactcaaaaccctgccaccaggagcgactttgtggccggccctgggccaagcgcttctcacatgtcatctcatggactcacacctccttccgtagtggcccagagaaattaaatcatttgctcaaggtttcagagccagaaaactcaagagcccagtcgagccttgaacctacacycatctgactgcccccctgtgctgagctcgctgcctcccaccccccttccccgctgtcccagccgcgggagtcagccgtgtccccagtgctgtggggaggcttcaaggagcagatgggcatccccctcggtggtggctgaaggcctcaagcgctgaaaggaaag

SEQ ID NO: 57265 - DNA, 1498 bp, Homo sapiens
ccagcctgggcaacacagtgagatcctgtctctacaaaaatttaaaaattagccaggcatggtggcacacacctgtggtcctggctactcgggaggctgaggcagcagggtcattcaagcccaaaaagtcaaggctgcagtgagctatgatcatgccactgcactccagcctgggtgacaaaacaagactccgtctctaaataaaataaaataaaggtcaccccggccaccaagcagcactggactgcagaggggtaggggtcgttcaaaaaattccctgcccccgcccccaacaccttctccctcatctccccatctatctgccaccccgtcccatccagtctctaccctgaggtcagaacgatctttgcaaaatggaaatccaattacacccctccctgcctacaaccctccatggctccctattgcctgtgatgctctaacatggcatctcaggccctgctgtcctgccaccttcccatcacttctactcagcgtctgtctctctctcacacacagttccttattctgctctccctccaaagggctctgcccagaggacagcattcgtatctctcatatccactctcacagcacacagggtctctgtgttttgctcccctaactggacttgggctcagctgttaaatgtctgtcttccccaccatcgagggactctgacgggaaagtaccattgtgggttgggctggctcttgttgcatacccaaccctgggcaaggagtggatgcttattcatttgtttaatgaatgaagatgaaatagacccaaaaagcagatcatctattcagtggatgtttaccgagttcccaactggtcacaagtgcaatggaggaaggtgtgcttgacagggggtatacatgtaggtgcaactgtagacagggtggccaggaaatgcctcccctaaaaagtgacatttcggcagaggtcttgaggaggtgagccatctaggtacctgtgcaaagagcattctgggcagaggaaacagcacgtgcaaaggtcctggggtaggaatgtgctgagatgtggctggggccctgcaagcaaggggaagagtggaaggaggtgagggcggctggggaggggggtcacagaggccatacagggccttgtggacctcagggaggactttggctttctagagaggtgggagccatcgggaatcctgaacagagggatgggatctggctcgggtgttcacaggtgtcctctggccgcagaggtggagatcagactgtgtgtggggagggttgctgggagtggagggtactctctaccccacctgtcccttgccttttgtccacagggctgtcaaagccagaaacctgaagcttccaccaagcactggctgcttctggcccccaccttgctggttgcctcctggcctcccttctggcctcctggcctcccttcctgccaactatggctctctcccaygtagcagctagagggagctcatgctaaacattctcaccctgcc

SEQ ID NO: 57266 - DNA, 541 bp, Homo sapiens
ataacctctttagagaccggctcctggatgcagaatcctatgaggttctggccacacctgtttcttgtccctcaggggctgacacccatgttccatccctctgaacccctgtccctaaacctaccccatctcatgtgactctggggttccttggtcattagagggttttcaggtctccctggtcctggtctggggcagccaagaggctcctggtccctggggtctctgaggtcactgtatcccccactgctcactgccatgggtatctctggctctttctgctcctctctgtccctcattttcytcccctttcattctagctgggatgccctgccctgcacagcttcctccacccttaggccttccccagaaaacccctctaacaaggctggctgtcctgttcccttcctgctcacactgtgtcctggcccacatcccaggcaacagagaaggcacagaaatcagccggagcagccgcccctgccgggctccatcacgagccaatgtccccaagtcaacaggagaatgagcttccactgtg

SEQ ID NO: 57267 - DNA, 1375 bp, Homo sapiens
gggaagaggtcaccctcgcctgaaaggggctgactccggaaggcatcaggtctatttgctgttgtgtcccggctctcggtaagataaagacagatcaggcagacagtggcctgggggcagggagaccccatttctctctgaaatgtctgcagagagcctggtgcccacccccatctcagccctggggaaatgagagccagcctcctggggagggcagtttccgttcctgtgggctgcggatgagataaccccatgacaagaaagacccagcctctgaggggccacaccctgtgtgtctctctgtcctgccagcaccaacggctcatccatttgcaaagctgaaaggaggcagaggagacgccatgaccgccgccctcacagccttgctttgctttgctttggtgagatttgaagaggagagaggaaaccccacaggccctggtccatcaagagatcccagggctttagggagctcccaggcaggggaggacttgctcaggcttcasgggacaaatccctcactgggaattctcttccagggctgagtctgggccccaggacccgcatgcaggcaggtgagtctgtccccagctctcccaggtccctcctcctcaccctggacagttggggatggagacagcagttctgggcaggcagctgggatgatctgaggggtggggaaggtcttgggatccaggctttgatttccttccatgtactctccccaggcccaccctctgggctaagccaggctctgtgatcagctggagaagccccatgaccatgtggtgtcaggggaccctggaagcccaggagtaccatctgtataaagagggaagcacagagccctgggacagaacgaatccactggagaccaggaacaaggccagatactccatcccatccatgacacagcaccatgcagtgagatatcagtgttactatctcagccctgcgggctggtcagagcccagtgaccccctggagctggtgatgacaggtgagaggacactcaggggtcccagccccaggctctgccctcaggaagggggttggctctcaggggtgtctccctctcacagcccagccctggggatgatgtgggaggtgggagccccatttaacatggtgcctccttctctcctaggattctacagcaaacccaccctctcagccctgcccagccctgtggtggcctcaggggggaaagtgaccctccgatgtggctcacagaagggatatcaccattttgttctgatgaaggaaggagaacaccagctcccccggaccctggactcacagcagctccacagtggggggttccaggccctgttccctgtgggccccgtgacccccagccacaggtggaggttca

SEQ ID NO: 57268 - DNA, 1375 bp, Homo sapiens
gggaagaggtcaccctcgcctgaaaggggctgactccggaaggcatcaggtctatttgctgttgtgtcccggctctcggtaagataaagacagatcaggcagacagtggcctgggggcagggagaccccatttctctctgaaatgtctgcagagagcctggtgcccacccccatctcagccctggggaaatgagagccagcctcctggggagggcagtttccgttcctgtgggctgcggatgagataaccccatgacaagaaagacccagcctctgaggggccacaccctgtgtgtctctctgtcctgccagcaccaacggctcatccatttgcaaagctgaaaggaggcagaggagacgccatgaccgccgccctcacagccttgctttgctttgctttggtgagatttgaagaggagagaggaaaccccacaggccctggtccatcaagagatcccagggctttagggagctcccaggcaggggaggacttgctcaggcttcaggggrcaaatccctcactgggaattctcttccagggctgagtctgggccccaggacccgcatgcaggcaggtgagtctgtccccagctctcccaggtccctcctcctcaccctggacagttggggatggagacagcagttctgggcaggcagctgggatgatctgaggggtggggaaggtcttgggatccaggctttgatttccttccatgtactctccccaggcccaccctctgggctaagccaggctctgtgatcagctggagaagccccatgaccatgtggtgtcaggggaccctggaagcccaggagtaccatctgtataaagagggaagcacagagccctgggacagaacgaatccactggagaccaggaacaaggccagatactccatcccatccatgacacagcaccatgcagtgagatatcagtgttactatctcagccctgcgggctggtcagagcccagtgaccccctggagctggtgatgacaggtgagaggacactcaggggtcccagccccaggctctgccctcaggaagggggttggctctcaggggtgtctccctctcacagcccagccctggggatgatgtgggaggtgggagccccatttaacatggtgcctccttctctcctaggattctacagcaaacccaccctctcagccctgcccagccctgtggtggcctcaggggggaaagtgaccctccgatgtggctcacagaagggatatcaccattttgttctgatgaaggaaggagaacaccagctcccccggaccctggactcacagcagctccacagtggggggttccaggccctgttccctgtgggccccgtgacccccagccacaggtggaggttca

SEQ ID NO: 57269 - DNA, 1375 bp, Homo sapiens
gggaagaggtcaccctcgcctgaaaggggctgactccggaaggcatcaggtctatttgctgttgtgtcccggctctcggtaagataaagacagatcaggcagacagtggcctgggggcagggagaccccatttctctctgaaatgtctgcagagagcctggtgcccacccccatctcagccctggggaaatgagagccagcctcctggggagggcagtttccgttcctgtgggctgcggatgagataaccccatgacaagaaagacccagcctctgaggggccacaccctgtgtgtctctctgtcctgccagcaccaacggctcatccatttgcaaagctgaaaggaggcagaggagacgccatgaccgccgccctcacagccttgctttgctttgctttggtgagatttgaagaggagagaggaaaccccacaggccctggtccatcaagagatcccagggctttagggagctcccaggcaggggaggacttgctcaggcttcaggggacaaatccctcactgggaattctcttccagggctgagtctgggccccaggacccgcatgcaggcaggtgagtctgtccccagctctcccaggtccctcctcctcaccctggacagttggggatggagacagcagttctgggcaggcagctgggatgatctgaggggtggggaaggtcttgggatccaggctttgatttccttccatgtactctccccaggcccaccctctgggctaagccaggctctgtgatcagctggagaagccccatgaccatgtggtgtcaggggaccctggaagcccaggagtaccatctgtataaagagggaagcacagagccctgggacagaacgaatccactggagaccaggaacaaggccagatactccatcccatccatgacacagcaccatgcagtgagatatcagtgttactatctcagccctgcrggctggtcagagcccagtgaccccctggagctggtgatgacaggtgagaggacactcaggggtcccagccccaggctctgccctcaggaagggggttggctctcaggggtgtctccctctcacagcccagccctggggatgatgtgggaggtgggagccccatttaacatggtgcctccttctctcctaggattctacagcaaacccaccctctcagccctgcccagccctgtggtggcctcaggggggaaagtgaccctccgatgtggctcacagaagggatatcaccattttgttctgatgaaggaaggagaacaccagctcccccggaccctggactcacagcagctccacagtggggggttccaggccctgttccctgtgggccccgtgacccccagccacaggtggaggttca

SEQ ID NO: 57270 - DNA, 3582 bp, Homo sapiens
aacaaaagagcaaactgagtctcagagagggcaggcctctagcccaagttacagagctcacaggaagccaggtttgtgagatcctcaagcccaaacctttttcctctgccatgctgttctgcacccattcattagggtcaatgccatattaatacagggacatgtataaatggaggaatctcaggcaatgtcatggtcccagaggggaaatatcttgaggtctttgaatcagcacctggctcctcctcccacaccccggatgctccacccagcagacccagggctcccctcctggccctccttgtatcctgtccagaattgccctgccgggtggacttgggtgagggggtgcttgaaggatggggctcctagcacagctgctaagcaggagggcagggaagacagtgctcctgacactggctgggtgttggggagccccaaagcctcccccaccccaccaccactgccagctcaatcaaccaggggattcaggctcctggccctacagcctcagtggggtagggtgcatcccccaaaatccctactccctctgcaaggacagacctcacctactggcagttccatccctgttaggctcagggagcaaagccagagtttgatgaacaggcggggttatagggacacagaagaaagcgctcccagtggctagaggggtttggcacactgtagaccacctgtgtgcctgggatgagcaggcagcctagagcaggaatggtggccaccaccatttgccgacataacctacacagcctgttttaagtcctttaagtatattagtcaccttgtttttcattttacaaatgaaacattaagcctggaagatacttaagtgaccacccacagttgcacagctggtggagccgggctatacacccagacctcccacccagcctcacattgtgctaccctcaccaccgggccgtgctccttcacgtctgtaaatgggcgtttcagcagcacccacctcacatggttgtcataatacttaaaaagacaatgcatgcaaaatgcacaaggcagactaaaggttcagcaagtgcaactcactgttcctgctgttgttgcagttgctgtgtaagctgcatatggggtttgacctggatcccacagggggcagagacatggccttgcactgtattagagaagggacctaaaggtccagcctgtcctcaccacgtgttctctttggctgtagattatggctaggggagcaacctcctagacacaggaggcttggcctgaatccagaagagttatctgtggtgaagtagtaacagaaaatttgaacacctgttaggtgttaaggcagactcacaggtggattcttgcaggggagatgccagctgttctggttctgggaactgaacaatccgtggagcccagcctcccatctagtgaagaagtgagctctacacagcccagctactgcatccatgagagtctctgcttgaatgtcccccaacatggagacctcagcacacacacacacacacacacacacacacacacacactmtgcctttacagcagtggtccccaacccttttggcaccagggaccagtttcgtggaagacaatttttccacaagttgcagcagggggaggagaggcaaagatggtttcaggatgattcaggtgcatcacatttattgtgcactttatttctattattattacattgtaatatattatgaggtaattatacaactcaccgtcatgtagaatcagggagccctgtgcttgttttcctgcaactagatgatcccatgtggcggtgatgggagacagtgacagatcatcaggcattagattttcataaggtgcacacaatctagattccctgcatgtgcatttcacagtagggtttgcactcctttgagaatctaatgctgctactgatctgactgagcattactgagctcaggcagtaatgcgagtgatgtagagcgactctaaataccgaagaagttttgctcatttgcccaccgctcaccttctgctgtgtggtacagtccctaacaggccacagaccagtaccagtctgctgcctggaggttgggggtccctgctttacagaatattagagggtagatactctacggaaatgagcctcaaactcaaccagttctaaatcaatgagaaaggggatcatttaaaatgcatcttcctctatgtacacacatgtcaagggaggcaagatatgaggctaagggattgaggtacagaacagcaggtatgtctgcaagattttcacagaaattaggtgaacagtgcacacatgcatacacttctatctgtcatatttgtataaataaactctagcatgaataatttttaagcttagagtatagaagtttatgggccgagcacggtggctcatgcctgtaatcccagcactgtgagaggccgaggtgggtggatcacctgaggtcaggagtttgagaacagcctggccaacgtgatgaaaccctgtctctactaaaaatacaaaaattactaaaaatacaaaaagtatctaggcatggtggtgggcatctgcaatcccagctactcaggaggctgaggcaggagtaccacttgaaccctcttgaacatggaaacccaaaagaaatcttaaaaactgagttcccagctatgatgggaggggatgtcggctatgcctcagtatgtcccttccttattaatctttaaccagaattatctccagtcctatctcctttgagactggaatcttcccatcctttgcaggagctaaagcctccctgggcagagagcccttgtgtgctggaggaagaggtggaggctgcaggttcctgaacgccccctgaggctcctcctggcccctccagacccagaggacagcccttccagggtggtttcctggggaggcccatgggaatgacctgctgggaaggccactgcaggaataaagctcacagcaccagtttaaggaggcctttgtctggctcctacacttgcctacaggtaccccctgaaaacaccttaaaaggctgctttttctgcatttgccttatggccacttgattgaaggcagccccaggtggaggggaaccaagaggatatgggtacaagggcagagtcagagagttgtggatggagctgcccagccggcggttggggtgcagaactgaggagacagggaagagagagatctcaggcttaggtggctgcctggggtctgtttttcccacacagagcacctggctgttcagccagcccaggtacccattgcagcttataggtcaacggtcctcaagtgaatgtgattgtggcccccaggagacatgtggtcatgtccagagatactctggttgtcaggacttgtggggagggggtgattttcctactagcatttgagggattgaggtaaaggatgccgctaaatgtcagacaattcacaggacagctcccactatgaagaatgatccggtcccaaatgtcacgagtgctgagattgagaaaccctgttctaggtatattttgtctccactgttgtgtccttgctaacctggttgcaagaggtaggatggagctggatgca

SEQ ID NO: 57271 - DNA, 1102 bp, Homo sapiens
caagaaaacagatattgaaaaatctagagatactactgctagtaaacagagrgtatatcgcttatgtaaccacagctcagttacccaaatcaggaaatttgacattgatatggcactgtttcctaaatttacacatttcttggaaatatgtggattaccattaccaaaactgtcaacaaaagtagtattgaaaaatctaaagataccactactaataaacagagggcattctcttacataaccacagctcagttacccaaatcaggaaatttgacattgatatggtactattaactaaatttgcaagtttcttggaaatatatggattaccaaaactgtcaacaaaagaaatattgaaaaatctaaagatactactactaataaacatagaagaactggaaagactgtcaaaggactgcttccgaaacaagacactagattaaaattttaaggctaatttcttccaaacatcaaggcatggacaatccctgtgccatttgtttcagaggaaagagaaacttggagattctcccagtccattattcaaaacaagcataatccattttcaaattttgtcaattgtcccaatattgtcctttctagttattattttttcccttgcagtatctggtccaggatcaagagttgcattcagttgtcctgtctctttagccatcgttaatctggaacagttactcaattgggtgtatttcatgactcttcatttatagattcggtttatgcacttctaacaggaatacccacaagtgacatcgtgcctttctgagtgcatcttatgaagaggcacagaacttggtttcttccaatatcggtgctgctaactttgatcacttggttaaggtggtgcctagctggctcctccactgtaaagttactatcttctcctttgtaactagtaattaattgtggagagatacttttgcactgtgtaaatattcttcatcaaattcccacccactagttttactatacactgatggttttataacctcagcgttcattctatattatcaatgagcattgtactgtagggaagagctttttctccccacttacttaatttaaaaaaaaattacttatt

SEQ ID NO: 57272 - DNA, 1102 bp, Homo sapiens
caagaaaacagatattgaaaaatctagagatactactgctagtaaacagagagtatatckcttatgtaaccacagctcagttacccaaatcaggaaatttgacattgatatggcactgtttcctaaatttacacatttcttggaaatatgtggattaccattaccaaaactgtcaacaaaagtagtattgaaaaatctaaagataccactactaataaacagagggcattctcttacataaccacagctcagttacccaaatcaggaaatttgacattgatatggtactattaactaaatttgcaagtttcttggaaatatatggattaccaaaactgtcaacaaaagaaatattgaaaaatctaaagatactactactaataaacatagaagaactggaaagactgtcaaaggactgcttccgaaacaagacactagattaaaattttaaggctaatttcttccaaacatcaaggcatggacaatccctgtgccatttgtttcagaggaaagagaaacttggagattctcccagtccattattcaaaacaagcataatccattttcaaattttgtcaattgtcccaatattgtcctttctagttattattttttcccttgcagtatctggtccaggatcaagagttgcattcagttgtcctgtctctttagccatcgttaatctggaacagttactcaattgggtgtatttcatgactcttcatttatagattcggtttatgcacttctaacaggaatacccacaagtgacatcgtgcctttctgagtgcatcttatgaagaggcacagaacttggtttcttccaatatcggtgctgctaactttgatcacttggttaaggtggtgcctagctggctcctccactgtaaagttactatcttctcctttgtaactagtaattaattgtggagagatacttttgcactgtgtaaatattcttcatcaaattcccacccactagttttactatacactgatggttttataacctcagcgttcattctatattatcaatgagcattgtactgtagggaagagctttttctccccacttacttaatttaaaaaaaaattacttatt

SEQ ID NO: 57273 - DNA, 3038 bp, Homo sapiens
ctgccttgtgtatgcagcactgtccagcagaactgtctgcaacaatagaaatgttatatacccgccctgactggtggagtacccactagactcagaaaacatggctagtgggtctgaagaactgattatttactttatttaattttaattagttaaaatctaaatttaaatagccactcatggttagtggctactatattagacttttgagtataggtttgaaatgtttgtatgtgtgtgagtgtgtgtattcaagtttattaataatactattcaaatgtattttgttcaaatactgtattagacctttgggtatatggtttgtatacgtgtatgtatatatgtgtaaatataccatatatatattcaattttgttaataatattggttaaatcttctttttttctctcggtatacctggcaaagatcaagagaaaaatgttcactttgaccattttgctttaatctctaccttgttaaatattaatattatcgtctctgatttatttttgtttgtgtttgcctggtaagtcgttgcccatcactttatttggcacatggaaaaaactcaatatttatttgttgaatgaataaatgcataaatttttaaagcttttcggaacattttattataggtttgttcctctgtaatagctcaaagctggattttgtttttgacccaaactaagtcttttaatagaagcttccagctcatttacattttgtgcttagttacttacagggcttttgtctttttgtgtgaaattgaagcatagcctgtatcagttccttctgggtaaggattttgttcccagagatccttttctaccttgaagacgtccctattcatgtgccctaaggaagatttctgttttccttttaattattgcttttccactcttcttttctttccttttaaaccactgttatatccaggataagtgcctgctgtttcttttttcttttctttttgagacggagtgttgctctgtcgcccaggctggactgtagtggtgcgatctcagctcactgcaagttcctcctccctggttcatgccatactcctgcctcagcctcccgagtagctgggactacaggcacccaccgccacgcccggctaattttttgtgtttttagtagagatggggttttaccatgttagccaggatggtctcgatctcctgacctcgtgatccgcccgcctcgcctgctatttcttatttctttctcatttgcatttatctttgagtcctggtactatctcttgagcttgtcttctaattctccatttaaaaatttgtcaatcatatttctcgrtccaaaagcaatatttttagatttttctcttttatactacctgccagagttttgtagttgaaatgtctcggaaggacacacctagagcatctttgcacttgtctcctgtttcttgcactaactctgccatataatgtgatgtttgctctaattgtgcagatttatgtatgcatcttgaatggctacatatttccacctgtcttgtgatttctctgttttttctctcccacatgggggaggtcatagggttatccagtagggggttctgagagagagtgtggcatgcctatgtagatatttcaggcccagtcaaagagggtagggaaaagtgtagattggcagttgctttcctttgccaagttaacttattttattaaaactcttaaatattttttctttttttttatacagggtctcactctgtcacccaggctggagtgcagtggtgcaatcttggctcactgcaacctctgcctcccgggttcaagagattctcctgcctcagcctcctgagtacctgggactacaggggtgcatcaccacacctggctaatttttgtatttttttggtagagatggggtttcatcattttggccaggctggtctagaactcctgacttcaagtgatctgcccaccttggcttcccaaagtgctgagattacagatgtgagccaccatgcccagcctaaaactaatttttatttacttattttgtaacactccattttatttttttgagacagtcttgctctgtccctcaggctggataactgcttactgcagcctcaaattcttgcctcaagtgatcctccttcctcagcctcacaagtagccgggactacaggaatgcttcaccatacctggccccaaatttagcttctgtgacccacaaccagaggctcctcaagcagggaatttcccctgtgttgaagagcacctgtttcttgtttgttatggcagccccaagtaaaagggaagcatgtcttccttctctttttgccaccatgacagaagaagagaggtatttaatgatatcaaccttctagaatgtgtgtgtgctcccagtgttttgatagtgtataacagagaaactaagcttcaaaacttgtacagaggccaggcatggtggctcatgcctgtaatcccaacattttgggaggccaaggcaagtggaccacctgaggtcaggagttcgagaccagcttggtcaacatggtgaaacctcatctctactaaaaaaaaaattagccaggcatggtggcgggtgcctgtagtccccaggctgtggcaggagaattgcttcaacccaggaggcagaggttgcagtgagctgagatagcgtcactgcactccagcctgggcaacagagcgagactgtctaaaaaacaaaaaaaaggactagcagagagttccctgaatagagggtggctctatgtagagaattaggtgccatcattgtccctgtctggccactaacttgtcatgccctcattacctcctctggatggatcagggtcaaatggactcaacccaaaggcattttctttccctttctctttgttcctctttgggtctgaggttgaaagtgagaaaactccagggctgcagggtaccaggtgaaagcataaagtttggtttgttttggaacataggaaactctgtgtgtgtgtgtgcatttgtgtgtatttgtgtgtgtgtgtgcatgtgtatgtgtgtatg

SEQ ID NO: 57274 - DNA, 563 bp, Homo sapiens
cggggcattcgaatctagaacccacaataggagcctggaatctggtgtttggaatctggcaatcgaggctggaaacctttgcacctgctatgagaagcctggggcctagactacaaatggtagatttgggattttgaattgtggggtctggattctttttttttttttttctgagatgaagtttcgctcttgtcacccaggctggagtgcaatagcgygatctcagatcactgcaacctccacttcctgggctcaatagattctcctgcctcagcctcctgagtagctgggattacaggcgaccaccaccacgcccagctaatttttatatttttagtagagacagggtttcaccatgttggccaggctggtgtcgaactcctcatctcaagtgatccacctgactcagcctcctaaagtgctgggattacaggcgtgagacaccatgccaggcttggggtctggattctacagggtggatctagcctctgagctttcaggagtagactttggaacatacagtctggagtttcaaatctgtttttgcattgaaaacctggact

SEQ ID NO: 57275 - DNA, 1158 bp, Homo sapiens
aaagcccctgcaagaaagaatgatccagccaaaatgtccgtggggcccaggtcaaaaggccctggtctacgaggacgggaaatctgaacactggaggtgagtgacaaagcttccaggagccttgttgactacttaacatgcctctttcagctactgctttgaactgtacaggaatctgcgcctaaaaggaagagggcagaatgcccgacagttgggaagactatagtgaagccattccgsgggacctcctccctctacttgcagggcggcctggtgcagctgcgtctccagcccctccaagtccacgtggaaactgtcccctggttttctggatgtgcaagaaggcgtctgctggagcagtcttgctctcccaagcctctcacgctgtcatgggtgcacagaagcagtgggggagggggagggcatgggaggaggagagccacccataaatgaaagaacagtggagcatcgatcagcgctttttcgcagcgcgggagctgcttcgctgagccccagcaccgtcagacagacccctgattaaacatatgcagctgcacggatggatggccctgctcagctcccatcagcaactctgccagaaaggaagaggcaccacggaagttgtgaaggggcccagggctggcggctgggtatctggagggctggcaccctcttccttccaccagagctggctccaaattccagactcaaagcagaaagtttattctatgtttttccaggagatggggcaggttggagatgagagcaaggggaaggcgcgattccctgggaatgccctgttgttttcctctctgggaggccttggggtgcaggttccagatactgccctggttcttgttatagggacatggtgagtcctcaccaaattccaaatgcctccacagagagggaggctccgtgtggtaatgaagcctgctctgttcatttcgtcatttggaattctcttggatggcctgtgagttttctattatagaatcaaaaccacattttcttaaaacatgagaggctgtggtctattctgcctgagatccccatgtgatgccagaggagccacaactcacaggccctgcatcacctgctgctgtgtgcggatgaggaagtctgtcttcctggagggggttcttatgagcacaaaca

SEQ ID NO: 57276 - DNA, 1503 bp, Homo sapiens
aaaaccgtatgcacacacagatgcacacacatgcacacacacatatactgagctcctgcagccctgggtaccctgtccaatactgtccagaaacatctatttgcccagttgtcacactgtttgactatgcagctgtcagtcctgtccatgtttttgaactgaagctgtgtaaatattagcgcaaccagttcatagtccgacttccttgagtgaaagcctgaaaatcctagcagggctagccagggcctccagaggcctccatcacaacattggggttctcctgtaggctccccatgtgatattctggcccagtctctgggttctcttagtgtgtgtacccttaaaaaaacgaggataagaagagtcctgtgtttcacaaggctcaaacagcaaagtgccacacacgctcttggaaagaagcctgttatttgtagagtggtgcatggtggcatggctggacttgggagtggttatcttgggcccgttacagactaaggggggtcccctgaggtttctggaccgtgctgcatcccatccgggtttagagagggggagacggccagcttaaagggctctggcccctgggagccagcccaaggagcatctagctctgcctccacaggccaaggactgggttgatttcctctacccctcccccaagcttcccatggaaccacataccaggtgctccagagcaaatgggatccacctgctctgaggctgatgcgtgaactatgggctacacctgagcgaggcttctcaacctccaagacctctgcctcatgttctgagactgggggagcagctgttcatcaccaacccagaccacagaaggatccaagcaggcttccctgaagctggaagattgagatgagatgcccggagggacttctaatgagaagggatgtgggactgagaagtatgcaagagaggtggcctggacatgtcaactggaatggtcctaatggaggggcagaaacccctccscagttactttcagctcagagggaggcgggaggtgcagccaggagagcacgctaatggtttcttgttccccactagactgctggttccatgaggacaaagactccatgttttgttcactgctgtgtctctggtgcctagagcagggactggtacatagcaggcactcaataaaccacagagctttagtactgacaagactgaatgctcagcctcgatttgctctcctgcaatatgaggatgctggtaccacaagggtaagaagcaattgtaataccaggtgggacagctgatggactatgagggccgcgggtgtgtgtgggatatgaataacatgacccccatgtccagactgctgccactgattccagacagatggtcttgcagctgcagcatgcctggcctccaccccagatgcaaggagcaatggggtccttgagaagccccccaaccccacttggaggctcaggctcagcgctccaggcctctggggtgaggaaggggcagagggagacatat

SEQ ID NO: 57277 - DNA, 2658 bp, Homo sapiens
tccgcgtgggggcagcagcgtctggagggaggtggccccggccgccctcagaaatcaggctcagcccgggggtccctggctccgcctcccaggccgggctctctttgcccaggctgggcggggctgatggccgttggaagccccgccccccgccgctcaccaccttgtggccccgcttccgtctccatggagacccgatgcagctggacagcctgtcagcggctgctctggagcctggggcctgctccgtgcgccctgtctgccctccgcgggccgtgctgtccaggctggcccgacagcctgactcgagacaccgggatgcctgtccacgcctccactcccgggccacttccccgtggggcgggcagtggggcagggcggggtgggaatctgctgcaaccagggaagggaattgccccccrggcacagagagtttggagcctggggtactgtcaccaacagcccaggaccccgcagctgggccctcccctagagtcttcctgcagcagggctctcctcccgaagggctgtgaatgttcctcggaggtggggctaagctagagcccagaggtttgccctgggcacggatcccccaggtcactcgcctcccatgggctgcagtgaaggaggctttgaagggaggatggccgcctcctcccctgcaaggatatgagccccagggaaggcattcctgctctggggattgcctccctcccagacatcacagccagcccttgcagaagcttggccaagctgaccactctgtcagtgatctctgcaagggaagctgaaagaacatccagccccaattgtgttccctttctgcctcaggctaggccatatctaggcctatcagggaagttggtctcttcatgagcccccctgcacagacgtctaaatgtccagagtcccaacagaataacaaagggttaaaaaccatctccatattgaagcaggccgagctgaaggctgacttctagggtgccctagaatggtggaagctgcacacacctgacaccacctagcagagttggcttccagaggaacctttcggtgggtacccactgaccacaggatgcaggccttcaagatgtgccttcaagacctctgttcctgatgtgccgtcaggacctgcgccatgggcacctgctggcctccccattgctggaatccatttgtgcagcccctgtggtgatgtgcacactgggactggtgttcccaacttgcctgatcataaaaccactggggacccgttccgtggaaccaatactctccacacctcaggggcctttcttgtccgtgcatctgtacctctgttacctctgtctgggatgcttttccactcaaattttgtcccaagaaaaccccttctgcaacaagaaaagcaaatcaaaagccaacggcatttattatatctttcccaggggccataggcttgcaggcctacctggccaggcagatgatccaaatctgcctgagaggcatgaggtgaggagctggtgctggagggtatggtggccctgccagggagcatctgtggttccagcggctgcagcaagcagaatggaggcctggggctgcaagacgttttgaagagacacaggaatcagcatttttgtacatgatcttgggtgtgtgtgtgtgtgtgtgtgtgtgtgtgtgtgtgtgtgttaaacactggagtcataaaacttcagattaaaagaaaaactgcagaacataaaacaaaacccacctgcagctcagggctggcctgcaggccgcctgtgactggtgcaatttcccacctgtgctgcccgtgaccatggtaagtctccactgcacaccccacggacacagtctcagtctgtggctgcagccccgagtgtcacagaggtccctccccattgccagggctgtctgaccctgagtctgtgagctcctgtgggacaggcgtcagcttcttgacctggttttccttcataactgctctctgagggtagtggctggccagagatcctttgccgaatggatcctggaatccagccctggtccctaggcctctccccactagagctacttgtcattggcaggctggccaccaggccatgctcttcttcccttgactttctgtcccaggcctggaaggaagcatccagaagactcctcctagcaccacaggacccagagagcaagacaacagagcagcagggtcacaccctggcttgcagggccagcttctggcaactgccacaggcctgccacactcagccgtaggttcccaaacgcagcccagaacagctgcaactccttcttgggcctcctctgactggtctatgtgctaactagcaacctgcctctgtccacaacccagcaccccatgtagacacagcagctcagaggtctcactgttcctgggagcccctgcctcctccagacctcagccctgcctgcctccagaggggacagtagaattacaacttcctccaggaaacatattcacaaacatactagaagggccaggtggaagagcagttctgctggctttgggccttgatgtgttgcgggatttttaaggaatcagagagaccaatggggctcaggaggatatttattaattacttaggtgcaccggcccagtcggattaacatccaaaggactgagccccaaacgaagag

SEQ ID NO: 57278 - DNA, 963 bp, Homo sapiens
gttggcagaggctctggaaacagctggtactaaagccaaagatctccctctggacctgtgcatgagccaatgaagtctgtcttcatgtgcatcagtgtgaaagacaccaggcaaaccctcccttttgcacccccacatgcatgcacatcttccccacgcagacagccagacgtggaccytgggctcaggcttgaggtccctgctacaatgccttgtgggtgagccacataccaccaggaggtcgttgaacaggaagatttctcgctggtgtagtccgagtttctggggcttgtttgggtctggaacctcaaagagccggcagtagcagaccaaccgacggtggggcagagagagcacctgtgtgggaagaggctgtcctgccacggccgcccagctctcctctaggagccctgggggccgcagtggagaagtctagcccttcaagctagaaacccggcacgtgggccttgagttaaaaaatgccttccctcacagacattgaagagcagatacgtcttttggctcatggcagtttcccgtactctgttctcaggagccactatttaaaatcccgtatctctgctctcctgaaggactagggacgtgccccagcttctgctgagacctcctttccattcttttgggcaggtaccaggcttcttaaactatcacgttcacctgggagcctctggccagacagcgagtcacattttgagtccccacaagtgccggtcataaacatgaggccactcagccctgcaaaagtctttacagagagaatctgctctagatgaggaaaaactgaggcacagaagtaacgacaaaactaggaagtggcagagccaggatccaattccaggccccaggacttttcccacccaaccaagcctccccataaaagattcctatggtcctgatgcctgaaagactctccaaaatcctgagccagcagccaacactctg

SEQ ID NO: 57279 - DNA, 1076 bp, Homo sapiens
tctattataagaacgatagtaaatcaaagaagagtaactaaacaagttgcctggggctactttaacttatgcaccaatggcaggcacaggattcacgtggtgctttgtctaactatcatttttctctttctactcaaaggcagatgcagcaggatgcacttaaacattagtcttgtcaaattgatgctggatttctcttctttcctgaaagcaattatactagcacaatatcattattattgttgaagaagctgagactagctctgtgctcaagatgccaaaataatttagtcactgccaatgaatagttcagcattttacaaacacggctttacttggactagtctgaatcttttgagatttttcagaaataaaatataagccacttgctcaatcaacaaaagcaatcaaagagaaatgaagtcaagcttcaatgcaaataaaggttaggacaatagtcatttggggatagaataacacsaagctcactactgagaattattttaagaacaaagaaatgcaatttagtctatttagtggaagaacaccctagctagaatttaatcatggaagaaataaacatacctgggcttaagtgcttgaacggggtgttactccatcaaacttctggcaatatttttttttttttgagacagagtctctctctgtcacccaggctggtgtgcagtggtgcaatctcagcccactgcaacctctgcctcccagggttcaagcgattatcctgcctcagcctcccaagtagctgggattacaggcacccgccaccatgcccagctaaattttgtgttttttgtagagacgggttttcaccgtgttggccagactgttctcaaactcctggcctcaaattatccacccaccatggcctcccaaagtgctgggattacaggcatgatccaccgcacctggctctggcaatgaatttttaaagctacctttttccactcctgttatgctgccttcattcacatacaaattacaaagcttctactacatgccggtgcttgctggtcatgtggaggatgaggcacctactttggaaggctgaaaattgt

SEQ ID NO: 57280 - DNA, 572 bp, Homo sapiens
tgaaacaagattattcctgaagaacataggtctcttcttatacccagctttggctctaggactctctgatgatcatgctgaaccttcttacattgcagagcaaactgtttcctttcaacctcttttcacaaggggtcagattttcatcccccagttttatccagctccctccccatttctgtcacagaggcattttttttccaataaaagccttgcctgtaagcccgccttaatgtctacctcttgttggacctagacaaacataagaggtacataagttgagtgatccaaaaaaaccaggccattaaatgggtaaagagactgactcactcgccactcaacagttggagaggaacatcattctcctttataaatgagaaatggatactccttggcacaaagtgctagcacattgccaatgatgttacctgtaatgatagaaagacaaggaaggaaggaaggaaggaaggaaggaaggaaggaaggragggagggagggagggagggagggagggaaggagcaggggatgggaggggaatggaatggaaggaagggaaaaggagtagaaggg

SEQ ID NO: 57281 - DNA, 1134 bp, Homo sapiens
ttttgatatttcaataacatcattaataatttttgtctctaatacttccattgtcaaatctaggctctatactttcttctctttaataaaaatcttaaggcacacactgattgacagttgccttgattgtaggagaatctttgtgtgattgtaaaagaacttttaattttgagttgcgttgcatcctaatgagccagttaagagtaaatcatctgttgatttcattgaaagaaaacatttagcaaccaggtataaatacaaacttcaatttgtwatgaaattctaatgctttcaattcacccacagcatggcttttgacctggtatttcatgatacccttgtagggcataagaaaaatatgtgtaaataattcattccttttttcacttattagacagttatttagacaggatatgatgttcgatgaagaatatttcctagtaagtaaaaccaataaggtacttgttttctcacagcttagaaaatgacaagactgatgtgagacaaataagtataaaaataaacacataattacaaattgctgtttgtcttaataaggaaaaagactgccaattaaaggaataaaaagagaaactaaatttaggattaaagtaaggggatgtgaggggaaagactcccagagtacatctcaaaagaagtgacattatatctaaagatgtaaagaaaaagccaaatgaagggctttcagggagagggtctaggtgctgtttccttaagacaggaaagagctagaatttttgaggaatgaaaagaagccagtttattggaacacactgagtgagaggggtatggcagatgatgtttggagagttgaggggaagcagataatgtgtgccctactggccaaaataagcacacaatcacctaaaacgggaaacatgtaaagacatgcatgtagatcttaaaaatatacatgataagtagagtgacctggggtaacacctaattgtacttttaaaacctactagttgatcggaagttcatggccagccaacagcatgacatggtagaaaaaaaaaaagcaaccaacaatgtgttttaacttttgttaatatgaatataaacctgtaaactaagtcagtttacagttgttaaattttcaccctgcctgca

SEQ ID NO: 57282 - DNA, 1134 bp, Homo sapiens
ttttgatatttcaataacatcattaataatttttgtctctaatacttccattgtcaaatctaggctctatactttcttctctttaataaaaatcttaaggcacacactgattgacagttgccttgattgtaggagaatctttgtgtgattgtaaaagaacttttaattttgagttgcgttgcatcctaatgagccagttaagagtaaatcatctgttgatttcattgaaagaaaacatttagcaaccaggtataaatacaaacttcaatttgtaatgaaattctaatgctttcaattcacccacagcatggcttttgacctggtatttcatgatacccttgtagggcataagaaaaatatgtgtaaataattcattccttttttcacttattagacagttatttagacaggatatgatgttcgatgaagaatatttcctagtaagtaaaaccaataaggtacttgttttctcacagcttagaaaatgacaagactgatgtgagacaaataagtataaaaataaacacataattacaaattgctgtttgtcttaataaggaaaaagactgccaattaaaggaataaaaagagaaactaaatttaggattaaagtaaggggatgtgaggggaaagactcccagagtacatctcaaaagaagtgacattatatctaaagatgtaaagaaaaagccaaatgaagggctttcagggagagggtctaggtgctgtttccttaagacaggaaagagctagaatttttgaggaatgaaaagaagccagtttattggaacacactgagtgagaggggtatggcagatgatgtttggagagttgaggggaagcagataatgtgtgccctactggccaaaataagcacrcaatcacctaaaacgggaaacatgtaaagacatgcatgtagatcttaaaaatatacatgataagtagagtgacctggggtaacacctaattgtacttttaaaacctactagttgatcggaagttcatggccagccaacagcatgacatggtagaaaaaaaaaaagcaaccaacaatgtgttttaacttttgttaatatgaatataaacctgtaaactaagtcagtttacagttgttaaattttcaccctgcctgca

SEQ ID NO: 57283 - DNA, 1431 bp, Homo sapiens
gaagatatcaattaaattaataatgtgcatgcaggcaaatgaatattctgagttcttaaaaaaaggaaaaatctttttacttactaatatggaaggctattcacaatatattggtatattcacatatatattatgtgaaaaaaggaagcattacatgaaaaatgtgtgcggaatatgctattatttatgtaaggtggggaatatttcttagttcaggttagatctctggtgaaaactccctggatctaatttactaaaagaactttcttctacctgatgtgtaaattcactgtctaacatccccaacaagtaatgatccagatttttctggaattacagtaaagcagcattcagcagcccacagacattctcttaaatttaaaataattatagaaaatctttccctaaatgggagatttctttcctccctccctccccttccttctttccttccttcccttcctttcttcctcccccttcccttccccttccttcccctcccttccccttccccttccccttcctcttctcctcccttcccttcccttcctttttttttttttttgagacgcagccccactctgtcatccaggctggagtgcagtagcgaaatctcggctcactgcaacctccgactcctgggttcaagcaattctcttgcctcagcctcctgagcagctgggattacaggcgcccgccattacggcaggctaatttttttgtatctctactagatacggtttcgccatgttggccaggctagtctcaaactcctgacctcaggtggcccgcccacctcagtctcccaatgtgctgggattacaggagtgagccactgctcccggctgggagatttcatttctatttataaaagtatggaaaaaaataacaaagaaaaacttaataaatttactttaagaaaatatttattttaattgaaatcataattcattttaaggacaactggcaagatgctccccagaatctccccgaagcaataatcaccaagtccaagcattagcataacattttgaaatggtgatactttagttatgttagtttcagtatgaaaaggccactaaaacattgttttaaaaactgtactacttctttttccttcagtaaaggtttaggtaaaagtaaaaggaaatgaaaagtggaattttaaagtataataaaaaaatttwaaaaagggcagttcatttgccagttaatacactgaaagttaaataattaccttatgatttttaatagattttattttttagaatagtttcagaatcacagtaaaattgaggagaaagcacagagatttcccatatcttgcctgctcccgcatacatgcatagccttccccattatcaacatctcccatcaggatggtacatttgttacaattgacaaaccagattgacacatctttatcactca

SEQ ID NO: 57284 - DNA, 1431 bp, Homo sapiens
gaagatatcaattaaattaataatgtgcatgcaggcaaatgaatattctgagttcttaaaaaaaggaaaaatctttttacttactaatatggaaggctattcacaatatattggtatattcacatatatattatgtgaaaaaaggaagcattacatgaaaaatgtgtgcggaatatgctattatttatgtaaggtggggaatatttcttagttcaggttagatctctggtgaaaactccctggatctaatttactaaaagaactttcttctacctgatgtgtaaattcactgtctaacatccccaacaagtaatgatccagatttttctggaattacagtaaagcagcattcagcagcccacagacattctcttaaatttaaaataattatagaaaatctttccctaaatgggagatttctttcctccctccctccccttccttctttccttccttcccttcctttcttcctcccccttcccttccccttccttcccctcccttccccttccccttccccttcctcttctcctcccttcccttcccttcctttttttttttttttgagacgcagccccactctgtcatccaggctggagtgcagtagcgaaatctcggctcactgcaacctccgactcctgggttcaagcaattctcttgcctcagcctcctgagcagctgggattacaggcgcccgccattacggcaggctaatttttttgtatctctactagatacggtttcgccatgttggccaggctagtctcaaactcctgacctcaggtggcccgcccacctcagtctcccaatgtgctgggattacaggagtgagccactgctcccggctgggagatttcatttctatttataaaagtatggaaaaaaataacaaagaaaaacttaataaatttactttaagaaaatatttattttaattgaaatcataattcattttaaggacaactggcaagatgctccccagaatctccccgaagcaataatcaccaagtccaagcattagcataacattttgaaatggtgatactttagttatgttagtttcagtatgaaaaggccactaaaacattgttttaaaaactgtactacttctttttccttcagtaaaggtttaggtaaaagtaaaaggaaatgaaaagtggaattttaaagtataataaaaaaattttaaaaagggcagttcatttgccagttaatacactgaaagttaaataattaccttatgatttttaatagattttattttttagaatagtttcagaatcacagtaaaattgaggagaaagcacagagatttcccatatcttgcctgctcccgcatacatgcatagccttccccattatcaacatctcccatcaggatggtacatttgttacaattgacaaaccagattgacacatstttatcactca

SEQ ID NO: 57285 - DNA, 667 bp, Homo sapiens
aataataaatccatgaaggcatttatcatttctgttacagttttcttatctgtattctttcattttggttcttagaatttttatctctttacttaaattgctaacctttcttacattctgtctacattatccattagaccacttracaaattaataatagttgttttaaatttccatccctgatattccctgacatatctgggtctggttttaagtcttattcttttcagactgtgtttattgtcttttagtatgtgacttgcaaatttttcttgacagccagacaaaatgtattgggtaaaaggaattgctgtatataagcctttattaatgtggtgtaaggcgatgaagacaaagtagcatcctgtagttctatgataaggcctcaatcttttagtgagcctgtacctctggactgtgaacttcaaacttgcttctcagtttctgtctcccactccttaggtagaatgagatggcttgagggggctggagttatgtattttcctccctcccaaaggaaggctagagacagctggggtttagtttctgtagcttcatatgtttttttaataatagaaaaatatcttatgcccccaatgaaaataataaatagaattgttctcttaatatttgtatgtgtaacttgtttttctttcttttaagatat

SEQ ID NO: 57286 - DNA, 553 bp, Homo sapiens
tcagaggaaagcctgccaaataagaagacaacttctcaatctggtctaaggctttaacttgtagcctggcttttggactttaaactgtcatcagcttggaggtggggtttcacyggaaacctgcccctatttgcctaggcatttggctgtctcctgtcactatcaggagcaacatctctacttagtgaatgctagaggttgtagtttataattctcaattggttaaaagatgttttgtatcagaatcaactgtaaaaatatattttaaaagaaatataattatatacctactgtagagattccaaattcaaacatgtgtgatatcgcttggatatctttaaaacattccacatgatgctaggattccttgatagaccaccatggtataggaaaaggtgtacctgagtgtagtaaagtcacaagaaattattactagaatatgggaactggcctggaagatatatagatatatacgtgtgtatgtatgtgtgtgtgtgtatgtgtgtgtgtatatatatatctttatacctgttctcagactgtaatcctaagg

SEQ ID NO: 57287 - DNA, 966 bp, Homo sapiens
tttattattttaagatgtgctcttttacacttcatgtaaaatattggaaaaaactgaagtcttaggaaaagatatatattttactaaaatttactctcacaatcagagaggagaaggaacatattgaaaaggggatcgaaagaggggtaaaggagatatgtgaagaagctccccaaagagattctgatggccatgcccaaccttaccaccaactgagaatcaccagcctagagtctgaatagtcttccagcaccccagaagttgaaacgagatgaagacagtgcaaagattatatatattttaaatcagatatatgagaaatgtggtgtgggtttgtttactccatcctcctaggcttggtgacttaaatatgaatctaaataccgtaattcattatttttcattaaatataggagacatgttagtcaaagtgtgacttcaggatttagttgacatgacaaaattgatttatactgatattygtgaatttagtgactttttaaaataccctagggtggtcatcaagctacctatctttccactgaggtttagaagatttctatgtcacatattctaaaagattgggatactaattcctatgagcaggaattgttggttgactgtacaacatccatttccttccttgcttgctaagggatccctatatcattcaaagatttcttgctcctaggccatcatgtgtttcacgtgagggagtctgaacctatcctcagctctacctgtgggcctgattgaggtagaaataatgtatgtcttctcacttgtgattggatagaaaatgggtatgtgaccttattctggccaatgagagatgagaggaagtcacatagggcttctaggacaagtttcctaattcttttgagagggcaacagaagagacggtctctcttctttctttggaaagcattgtttctgtaggcgatgccaagatccatcatcttgcct

SEQ ID NO: 57288 - DNA, 751 bp, Homo sapiens
attgctgaggagcttgtgtgattttttggggagtgtttaagaaccttgttttgtctttctgatttgaaagaattgtctggtttgaaagaattgtctttctggttccttttcatttgggtaggctgtgtcagaggaagatctggggctcaggctgccccagatgttcagattcttttttttttttttttttttgagaccgagtcttgctctgttgcccagattggagtgcagtggcacgatttcggctcactgcaacctttgcctcccaggttcaakcaatcctcctgcctcaggccccctagtagctaggattacaggattacagacacgccccaccatgcccagctaatttttgtattcttagtagagacagggttttgccatgttggccaaggctggtctcgaactcctgacctcaggtgatctacctgcctcggcctcccaaagtgctgggattacaggcatgagccactgtacatggcctgttcagaatcttttgtcccacaaggtgttcccttgacgtaatactctccccttttcctaggcctatcctggactgtgggcatcacagttgtgggaaaattagaactgacctaaacgtccaaagtgagcacttggttgagtgacttggtgttcactgtagtgcttaacaacaaagtggtaggtttatttcatggaacaatcctcaggatacatttttgaacaaaaaaagcagatacgaaagagtacaatcctattttttgcattaaaa

SEQ ID NO: 57289 - DNA, 751 bp, Homo sapiens
attgctgaggagcttgtgtgattttttggggagtgtttaagaaccttgttttgtctttctgatttgaaagaattgtctggtttgaaagaattgtctttctggttccttttcatttgggtaggctgtgtcagaggaagatctggggctcaggctgccccagatgttcagattcttttttttttttttttttttgagaccgagtcttgctctgttgcccagattggagtgcagtggcacgatttcggctcactgcaacctttgcctcccaggttcaagcaatcctcctgcctcaggccccctagtagctaggattacrggattacagacacgccccaccatgcccagctaatttttgtattcttagtagagacagggttttgccatgttggccaaggctggtctcgaactcctgacctcaggtgatctacctgcctcggcctcccaaagtgctgggattacaggcatgagccactgtacatggcctgttcagaatcttttgtcccacaaggtgttcccttgacgtaatactctccccttttcctaggcctatcctggactgtgggcatcacagttgtgggaaaattagaactgacctaaacgtccaaagtgagcacttggttgagtgacttggtgttcactgtagtgcttaacaacaaagtggtaggtttatttcatggaacaatcctcaggatacatttttgaacaaaaaaagcagatacgaaagagtacaatcctattttttgcattaaaa

SEQ ID NO: 57290 - DNA, 780 bp, Homo sapiens
ggatcctcacaacagccctgtgaggtaggtgttattctgatttcacaggtggagaaactggggctcagagcacagctgaacagggcacccgagagagggcaggccccagagctgggaacccacagtgagggaggacacagggatgactcttctgagactgtgtttatgtaactatcattgaacactcatctggggaggctggtcagaatctcccccattcccaggtgccaaggaggtcagaagcagaagggttgcaaggtcgggaagccatcctgatcatggcagatctgctaggttttccaaagcaaagataaaatgtgacctgtggactcccaagaaactgctcacttacctatctgtaggtgtacctacctcatcaacccaccctcatccacccacccactttcctagctattcatccattcatccrctcacttatcaatccatccacccatctgtttatcccttcatccatccatctacccatccatccatttatccattcacccacccacctacttatccatccacacatttacccattcacctacctacctactcacacattcatccatccctccatccattcactccatggccccttcacatgcccactcctccagacacccaagtaaaagaaaaatggaaaaaaatgtccaagggaagaaaccatgcaaccatccagtcacttttatttgcccatgctgtgatccaggctcagtgtggacactgaggagtcagacacagcctagatactgaagggctcccagcaggtggggc

SEQ ID NO: 57291 - DNA, 734 bp, Homo sapiens
ccactcagtggccctgcttgaaaggcctgagcttaacaggctgaggctggggatttgatttctttcccggctaacatggatgagatgatgcctcaaccccaggcatccaggggcagcttgtgcccacttggcaaacagaactcaagaatccagctgtgcaaggggccccatggggcctgacgccacaaccaggcatcgcccctccttacccctaagtgagtaccagaattaagaagaagcacaggccgtggaatgatacagtagactcgatataaataaaatattcatataaaaatagtctcttacaaaatattctctcttatccggtggctcactttccgaaagatggaaactgctgggaatttattatttttcctctctatttattccaaactggatttttctaatggtgaagtttgaactggggagggcaaaaggatggaaaacatactctggaaaaaacgtctccaaatctggaccagcttaaatttctggataagtagcagcaamcagcaaaaaaaaaaaaaaaaatgtgtgtgtgtatatctatatatgcataaaagatgtctcctcttgtacttaaacatctagtgctgcaaggtgggtacctgcaaaatcagctagtagaaatatctgcataaagaatagttatgtacacttctacacggctccttgtcctagcaacaaaatcatcctgctaggaaagcaagcagtccactttgattgcagaaaac

SEQ ID NO: 57292 - DNA, 451 bp, Homo sapiens
ctaagcagttactgtgtgcccartgtgatgccaggtgctgtgcaagctgagcctgggtagggatggggaggagtcctggggaggctgggaccagaactagggatatggactcaccttccacttgctcttggcaaagttcttcttgatctgctcactcaccgactggtggatattcttatctagagctgtatctcctgcaatcctaggatggggttatgtggtgggttgcctatgagggcagaagcagacctgagggccccaaatcccgccccagctcacaggttgtgtgaattctcaccatgggtgctgcaaggcctgctcacaggtgaatcttttctctgggtccttctccatcaagtgccggatgaaatctttggctaaacccccaagacaaaagcaaagataatgacagcatggtactgcctgtgtactccccaagagcatacccact

SEQ ID NO: 57293 - DNA, 645 bp, Homo sapiens
ctttttcttagttctcatctgcttatattggggttcatggggacactttgtcaagaagttctgttatgtttcacgagttttagttttgctgtctagctggttctatttttatgtggaaattcagaaagatttaaaaaaaaaaacaaaaaactaacctgccaccatcagtgctatcatcctagactccacgcaagacctaagataacctcttaaaagataactttgcggccaggtgcggtggctcaygcctgtaatccaagcactttgggaggccaaggcaggcggatcatgaagtcaggagatcgagaccatcctggctaacacggtgaaaccccgtctttactaaaaaaaaaaaaatacaaaaaattagccaggcgtcgtggtgggcaccttagtcccagctactcaggaggctgaggcaggagaatggcataaacctgggaggcagagcttgcggtgagccgagatcaggccactgcactccagcctgggcaacagagcaagagttcgtctaaaaaaaaaaaacaaaaacaaaaacaaaatcaaaacataactttgcttgcttctgtattttctctgattcacagaaatatccgcattaatgtcttaacttttgatttaatgagtacacatttcacattcatg

SEQ ID NO: 57294 - DNA, 645 bp, Homo sapiens
ctttttcttagttctcatctgcttatattggggttcatggggacactttgtcaagaagttctgttatgtttcacgagttttagttttgctgtctagctggttctatttttatgtggaaattcagaaagatttaaaaaaaaaaacaaaaaactaacctgccaccatcagtgctatcatcctagactccacgcaagacctaagataacctcttaaaagataactttgcggccaggtgcggtggctcacgcctgtaatccaagcactttgggaggccaaggcaggcggatcatgaagtcaggagatcgagaccatcctggctaacacggtgaaaccccgtctttactaaaaaaaaaaaaatacaaaaaattagccaggcgtcgtggtgggcaccttagtcccagctactcaggaggctgaggcaggagaatggcataaacctgggaggcagagcttgcggtgagccgagatcrggccactgcactccagcctgggcaacagagcaagagttcgtctaaaaaaaaaaaacaaaaacaaaaacaaaatcaaaacataactttgcttgcttctgtattttctctgattcacagaaatatccgcattaatgtcttaacttttgatttaatgagtacacatttcacattcatg

SEQ ID NO: 57295 - DNA, 592 bp, Homo sapiens
ttgaaaaccaccggtttggaggaagaaatagactagccataaactcaatgaacagatatggtaatcaaagcaaaagacagcactaaacaagagagtggcagtgaaatttataaaaaatattaataccagagaatgatgatacaattaacagaaacaaaaaactccagaataaaagtgggtttgggagaaatagtgatgaattttgttgccatttttatccttgaaacagagaaaacaaaaggtaattaaaataagaattacaaattyagcactcactatagagtattattgtctggttttcccttctttaggtctattttaaaataaaactgtttggataaagacaatcataaatatatttattacaaagaacaaaatggactaaatttttactttctaggatttagttttctccagtgaaatataatatcaatatatgctgctgcaatatagttagattaaaaccagtaaactggacattagatgaggtttcaaagtccatttgatcaactacatcaattacatgaagacaaagcaagtctagatattttttcacatgtgcttcagtataaagagaccatctagtaaccta

SEQ ID NO: 57296 - DNA, 592 bp, Homo sapiens
ttgaaaaccaccggtttggaggaagaaatagactagccataaactcaatgaacagatatggtaatcaaagcaaaagacagcactaaacaagagagtggcagtgaaatttataaaaaatattaataccagagaatgatgatacaattaacagaaacaaaaaactccagaataaaagtgggtttgggagaaatagtgatgaattttgttgccatttttatccttgaaacagagaaaacaaaaggtaattaaaataagaattacaaatttagcactcactatagagtattattgtctggttttcccttctttaggtctattttaaaataaaactgtttggataaagacaatcataaatatatttattacaaagaacaaaatggactaaatttytactttctaggatttagttttctccagtgaaatataatatcaatatatgctgctgcaatatagttagattaaaaccagtaaactggacattagatgaggtttcaaagtccatttgatcaactacatcaattacatgaagacaaagcaagtctagatattttttcacatgtgcttcagtataaagagaccatctagtaaccta

SEQ ID NO: 57297 - DNA, 592 bp, Homo sapiens
ttgaaaaccaccggtttggaggaagaaatagactagccataaactcaatgaacagatatggtaatcaaagcaaaagacagcactaaacaagagagtggcagtgaaatttataaaaaatattaataccagagaatgatgatacaattaacagaaacaaaaaactccagaataaaagtgggtttgggagaaatagtgatgaattttgttgccatttttatccttgaaacagagaaaacaaaaggtaattaaaataagaattacaaatttagcactcactatagagtattattgtctggttttcccttctttaggtctattttaaaataaaactgtttggataaagacaatcataaatatatttattacaaagaacaaaatggactaaatttttactttctaggatttagttttctccagtgaaatataatatmaatatatgctgctgcaatatagttagattaaaaccagtaaactggacattagatgaggtttcaaagtccatttgatcaactacatcaattacatgaagacaaagcaagtctagatattttttcacatgtgcttcagtataaagagaccatctagtaaccta

SEQ ID NO: 57298 - DNA, 1918 bp, Homo sapiens
gtacttcagagtgcactagtcaaagtatggcttaaatacttattctttctattggaaaatgacacctttgcatcctttgaataggatrttgttaatcgggttattggcctacccaattttgtctaccattagaagtaaaccgttccaccagtcctcacataggtcactggatctcttgtttgaggctgtccatccattgtggttgtgcctctttctttttctacctaatttagactctttttcagcagaatcattataattctcctgcacacttatttattttctttcactatcacctacaaagagctttcagtggtgatgcacttcagtgtccctaaaacattttgtttcctcttttcactccaaattgcctttagccaataacttgttgtagcttaaagtattctgctctaaaaggagtttaactctttttaactgtttcggcaaaactcagacctcatgtaattttactagcttgtttaatccaattctttctattttaaagccaaatcctttttaaaaaatccacaattacagtagaaaatatcaaattatagaagagatagatcttagtgcctatacaaattacacacaaatggcaaatatggtctgaatgagctgcacgagaaaaatcagcacgtaatatacaaaaaaggaaaaggagagataggtttaaaatggaaatgagttgataatctggtataatgctcaagagtgaatttacctaatagtctccctaatgctagaggaacactagattagttttagcatgactctggcataaacattctctaaaagtcatgcaataagaattaaaattcacaagtcttgggatatgatatgccttagtggcgatatgcatatgaatacaaacacttatataaggaattattttaactaggatttgaaatgagagaataaattgaaatagctctgttctacattttctaaccgctggaccaaacttggcagcctgtattcctttcttcctttatgtatcaagaactaatgattaaccagggaggatgcaaagagaaggaatcatcaggcaggaagcagaaaaggtataactatagagaatactcaagagttgtcagtaaggcagaatttgaatgtaaatctgttcaggaaatgaaaccagatgtcaatattaacagatttttgtactttcaaacctaccatccattcttgattttgagtttttttcctgaaatatagttgtttcaggtagaaaatttggggccatctaacttctgctatacttacatctttcacatctagtgacagggttcaatcaattcaatgttataaatacgtcttcattcaattttagtgccttcattaaaagtgactttatcatctttaatccaagttaagacagcagtctactaacaggtctcctgcctccattcccttcccttgctattatcctcctccagtacgctttcaaaattagccctttaaaattcacgttggatcatatgactttctatttgatgtccttggtgattcattatctgtggcaatataaaatttgaatttcctggtatagcacagaaagctcttcacaacatggcccctgaccatatctctgcatttttacccttagtcaactggcaaacttcttagtattccttaagactcaactcaaatatccctttatttgatttcagtacttaatatgatgctgaccagaaaaattcccattttattttctcaatttccctaaatataatctcataatattagctatactcttcttttggaagatgataaagagcatttgggatttagtgtatacacaaattacacaaaaaggcaagtacattggaatgagctgtatgagaaaaatcagcacataatacacaaaaaaggaaagaagagataggtttaaaatggaaatgagttgaaaatctgg

SEQ ID NO: 57299 - DNA, 691 bp, Homo sapiens
ctgatcttgaactcctgacctcaggtgatctgcccgccttggcctcccaaagtgctgagattacaggtgtgagccaccacacccagmcatatgttacatgtgactaggtaaatcagcattgttatgtgccaaagaaaggtaaaggatctgagaaggtctgcagtaaaaataaacttttggcttttgacttttacaattttcaaaatttcttgatttagccaattccaaaatcacttgaccatataacccttctcatttctctctcccaccctcataatacctattagcttcctggagaagcagcagagtggggaaaatgctgtcaaacagttcccatttcttaaagtatatctctttttccttatgcagcaccccctcttatgctgcccctggctggaggccccatttttagaacttctcagcagtagccaccaccctgggccagccacctgggcagctcccagactgcctggcctgcagcaggtgaacgcagcagtcctggtcactctctagtgggttagcataatccagaacagtggataatctaaaagccatttatttttggcatgctttagtgagtttatttttactgtagtcttactttcctaatttggcctcactcagacacatgctaaaatgagtgtgctttttctgaacacactctgagtaaaggggggaaggggatccagag

SEQ ID NO: 57300 - DNA, 474 bp, Homo sapiens
atgcataaaagaattaaataaaacatgtacacaggggtcattaaggttctgaaccttaaagcttgccaaaaaagcaggcaaagaacaaaaatgtcaccagtgcaaccaaaattttcaagaaaacacaaactctttacactttttccacaaagcaattcctaaasaggcactggacttcaacaaaataaaaaaaaaattaagaacgtcacttaaataccagtgcatttactacaaaatttcatttccagcaggcctgatgtttcctttatcaattgatccaactatgtgatgagaatacaactaagcaatatatctctgaatattactaaaattgctattagggctggtacaaaaagtaattgctggttttgccattgaaaagtatgggaaaaaccataattacttttgggcccaacctataatcctgttgctgggtccactcataaaacacaatgtaaatatttataaaactgg

SEQ ID NO: 57301 - DNA, 532 bp, Homo sapiens
ttaacctaattctaacaacagccctaggtgcttggtatagcaagcctcgttttacagatgagaacactgaagttctgagaggttacagaacctggtcagtgagtgaaggcaaagtgggactcaggtccaggtcagatgaayttgaaggccctgctccaacctgcaggtgcctcctccagagccagctctgatactcattttaaaaaccatcccagccaaccaaccgtaggagaacctcgaaggcatcttggaggtccctgtctctgccaggcactccctccctgtcttctcagcaccctgctggcatcacaaggaaatgtgggccaaagaccctcatcccacactaagaatggtccaacagaaaccagcctggtcccaggtggggctcaggctcaggccacgtgccaccaagtcatctatgtgaatatagtgataaaaatgcccaacgttgacttatcttttcacagctttcagttcacctgagccctaaaactgctccttgaagtcacaagagagtctagattatcatccc

SEQ ID NO: 57302 - DNA, 915 bp, Homo sapiens
tgcatgacatataaatgaatcagtcatgagttacagaatatgttcactgtgatgttattaatatatattttatatctatatctacataattagaaataatattcaacaaacttttttaaacttaagacaggatctctctatgttgcccaggctggtttcaaactcctcagctcaagtgatcttcctgagcctcctgagtagctgggactgtagatgtataccatcacccctggctaaacacaaacttttaataatagtcatctctatgaaaattggtaagtggaggaggggttttcattctcaacttgtgttttaccattgtttgaggttttaaaaatttagcaattttactatggctttttaacatttaacatgtgcaatttttgtaattaaaaagttgtcttcttattaaataaacataaacaagactgcctagccagtggaggggtataggattgtggttaaggcctgagattttgaagtcagactctaaattcaaacaccggctgtactgcttataggctatgtgacctagagaaaattgctttacttctttgtgcctcagttattcttgtttcaaatgggataagagtagtgtccatctgagaaagtggttgtgaggattaaacaggatgatcataaggttcttaaaacagtgactggcacatagaatacactaaacaggaatgttatgaataayactctaccatgaaatataccaacataaaagttatagagtgatttatttttatagcatgaaaaaatatgtgtgtggttagggaatgtgtgcaaaggtggtgggctgaaataggagaaaaatggtaatcgaggaagcataatttgatagcttcaaagatcaatagaatgagataatgttgaatttttaaaaaaaaggaatccccatgacaaaagata

SEQ ID NO: 57303 - DNA, 1143 bp, Homo sapiens
gtcttaatagtatatcaaactattcttattttccaaaataccttcttaagtcattctcttgtaaaaatccaaatcaagactagtttctagttaaaagcttaaggaaaactgttactcttaaagaagctttcaaccttgttttacaaaacatcagtaagcaaagctcttcctgcctatcttattcatgagaaatggttgtttatttctgtatgactcaactgtccagttttgttttgtccttttactacttcttacacaccgaaacacacaaaccatttcctctcaaggaagtttggcttgccatgttatagtcagatgtgtttatttagtctaaaagctggtcagtaagacttggaaggcatattttatttgtgatcaacaaagatataaaagtcattatgaccatctactgaattcttgcaaacagaaacagcagagaagtcaaaaatttaaaatactcccatctttggccttagaggcaccggcacaagctgcaaagaaacgtatcaagaagctcctaaacctgatttkctgattctccaatctgttaatgaataacaacatgacagggaaaagtctaatgctaaggcatgattacaatttatttttcaaacagtaattataaactttatactattctaaatttaaaagattgatctgcaaagccctgaagagctcattccaacaacctcatggaaaatcttccaaagagaacatgtaaaaagatgacacaaagccagcgggtgtaatttaaccttacctgtgtgtctgtgattataccctcattataaagcttcaatccctgtgataatggaaccttgccagccctgaatatctgaggaccatttctaatgagatactctcccttagaagtgttaggtagtaattttcctattggttaacctagaattaacagagatgcaactcttttctcagagtttgatgctgtagaaaagaatgttagatgggagagaggcatttactactataaagaaagcagatgttggacaagtgaaaatacggtagataagtgaaaacttctgtgcagtggcagaatttgtgacattatttgtcaaatgagcacaagaaggtagcataatatggtggaaatcatgtgggacttagagttagggagacataggg

SEQ ID NO: 57304 - DNA, 961 bp, Homo sapiens
gtgatgatgttggtttatcctgttattattgatgtaattgatcacttggttaagtcatgtccatcaggcttctccatcgtaatggtacttttttgccctttgtaatttctaagtaatttttcagaagatactttgaaaatatattcatattctgttgtgtaacaaacttttacccagtggttttagcaatctctgatgattcttcctgagtcaattgttactatgrtagttgcaaagtaatttttaaactgaataaatgaatctaaaaaatagacggttttagttggttaactatttgagcaatatatttttgagagaaatcttttctattgcaaaactattaaagttatttgcagaaagaatcagtattctatgctatccctatctaattccatttcatttaatggctttatttcttgcctccatgaggagtcccatgtgttcagatgcaaaatctcttcagcagcttaagatataaacatcttaatgaaatagtacatatcacgtagatattaaatctctaatacatagatacttaactcttcattgatataacacagacttgcccagctgtaaaatgtttacaaccgtttataaatgtttatcattttgactttcccactagagtttcataaacagctctagtgctttatttacaattagctaaaaatgctcattttttatgactaatcgcatgaatagtaataattgggacataatggaaaatgaaaatgtagacataatatctatatttaggttttatacagtaaaacctttacttaaaggttttgttttttccaataactttattaacccaagtgtttcaaaattggaagtgtaatattttattgcaatgatgatgatgaggatcatgttgatgatccattaatttattttggatcatttttcacaccttcagactctcaagctctttaccctcatacagttattaattcactag

SEQ ID NO: 57305 - DNA, 648 bp, Homo sapiens
ccctccatctagaactctgcatctcagcttctaggagcaacaaggcccagcagggagacattgggttgcccactgcatctcattagttctgattgtggtggcagcttgatgktccacagccgggaatgaggtcctcccgaaaaacacaggcagtaaaggatggccccggccaaaataaaccccgaagaatactttctctcccgtcctccggcaccttcgtctctccttctcttctccactctggctctttcctttgcccctctctcctggctgcatctcactctgggttttctctctccccacctctttctctgtcccttcgggttcgctctccttccagggcccgggcggccatccacgaagcacagcccgcacatcgcggccgccaggaaggtctacatacagactcgcaggcagaggaagctgcacttcgtggtggggggcttcgcctacctgctccccaagacggcggtggtgctgcgctgcccggcgcgcagggtccgcaagcccctcatcacctgggagaaggacggccagcacctcatcagctcgacgcacgtcacggtggcccccttcggctatctcaagatccaccgcctcaagccctcggatgcaggcgtctacacctgctcagcgggcccggcccgg

SEQ ID NO: 57306 - DNA, 648 bp, Homo sapiens
ccctccatctagaactctgcatctcagcttctaggagcaacaaggcccagcagggagacattgggttgcccactgcatctcattagttctgattgtggtggcagcttgatggtccacagccgggaatgaggtcctcccgaaaaacacaggcagtaaaggatggccccggccaaaataaaccccgaagaatactttctctcccgtcctccggcaccttcgtctctccttctcttctccactctggctctttcctttgcccctctctcctggctgcatctcactctgggttttctctctccccwcctctttctctgtcccttcgggttcgctctccttccagggcccgggcggccatccacgaagcacagcccgcacatcgcggccgccaggaaggtctacatacagactcgcaggcagaggaagctgcacttcgtggtggggggcttcgcctacctgctccccaagacggcggtggtgctgcgctgcccggcgcgcagggtccgcaagcccctcatcacctgggagaaggacggccagcacctcatcagctcgacgcacgtcacggtggcccccttcggctatctcaagatccaccgcctcaagccctcggatgcaggcgtctacacctgctcagcgggcccggcccgg

SEQ ID NO: 57307 - DNA, 648 bp, Homo sapiens
ccctccatctagaactctgcatctcagcttctaggagcaacaaggcccagcagggagacattgggttgcccactgcatctcattagttctgattgtggtggcagcttgatggtccacagccgggaatgaggtcctcccgaaaaacacaggcagtaaaggatggccccggccaaaataaaccccgaagaatactttctctcccgtcctccggcaccttcgtctctccttctcttctccactctggctctttcctttgcccctctctcctggctgcatctcactctgggttttctctctccccacctctttctctgtcccttcgggttcgctctccttccagggcccgggcggccatccacgaagcacagcccgcacatcgcggccgccaggaaggtctacatmcagactcgcaggcagaggaagctgcacttcgtggtggggggcttcgcctacctgctccccaagacggcggtggtgctgcgctgcccggcgcgcagggtccgcaagcccctcatcacctgggagaaggacggccagcacctcatcagctcgacgcacgtcacggtggcccccttcggctatctcaagatccaccgcctcaagccctcggatgcaggcgtctacacctgctcagcgggcccggcccgg

SEQ ID NO: 57308 - DNA, 1079 bp, Homo sapiens
taattctgtcccttcatcctctctctctgactcagaccctcctgcctccctcttctaaggaccactgtgactacctcaagcctacctggataatccaggatcatttccccctctcagaagccctcatcacatcagtaaagacccttttatgcacagggtaatgtgttcacaagtaccggggattgagatgaagatatcttcgggggccattgttcagcccatcaccacctgctatattgtsagtgaagcacttagtccccactagcacaagctccttgagattgggaacctgtcttccactacccttttgcctctctatatctaatatatcaatgtatatatcatatgcatcaatattccttcatttggttttggtctaaaaattaaattgaaacaagggaattaaagaaaaaaggtgctgaagggttaaactgaaaagaaattggtccacttttgaaacacaatttatatttctctatattgcatatgttttatgttcaagattgcgtccacccaactgtacacacatgttgcacacatctgtgcagagacagaaacaattgccacaatctctggatccctgccttgcttaaaactgtgacagtgttgccatttccctctaaacctttcttaatcagggtcacaattgaaaatgcctgcagttcaactatgtaaaaaagcataagggagaggagtccctgctagtgatacaaagaaaaagagaattttaatgataactataaatgcctgagaattaaagttttcattttctagatttaaacatacatacataccttcaagcaaagacaaaaatacctttggtttggattagagaactgaattctggcagagtcacatagtaatcagttttgttatattccagtgactaaaatgtaaatccacataagttagaggctatatttatttaaaattttctgtcccagggaggaaaaaactcttaggatgtttatctcattttcaatagtgtatttcataaggaaatggacacttgatcctatcttttgaggcagcaataaacatagcaaaacaaattgaaagtccagcttcacatgtggttg

SEQ ID NO: 57309 - DNA, 751 bp, Homo sapiens
acccaacacaggaaaggtcaccaacagcccacagcaaagcagtcctaatggcagctctgtgcctcctgcatgatctgtgcagatacattcactcttttcttaaacagaacttgaaagatagagaaaactaagctccagccgtatttcttattgaacagccaacaaaaatggaaaaattgtgatgtcaaaggtcagaaagggaaatgtcttatttttccttaccacatgccattaacgtgcattgaaaagcttagtcaagcctagatccagaaaaataaaaaatgtgatggcagcaaaaactgtttgttcctgcctctcaggtatcttccctcttaccctcttagtgctaccctcccccacaacgatgtcctggatgatggagaatccaggactttccctctgcttgcctaggcccagtgctttagtgttctttgcacctggctgccamgtctctgtttctatcaagattccactgaaccttctccatcttaaagccattggagttagactctcaatgcccattaaggtaaaaattaaaagggccaaagtgtgtttcctaagtgctatttcaagaattattggtgttcctgagattactaagccgaaaaattgttcagtgattaaaggagaactttgaaaccacagcatactatattgtccacttggaaagtcacaacacacattggaatgcttaaaagagtaaaataaaaagaaaaatcccaaataattttcagttgggggatagttaaat

SEQ ID NO: 57310 - DNA, 732 bp, Homo sapiens
ccctccttaggctttctagagttggcacacttagtggtgtctagtttattattgtcagattgctgtccacctcccgacctcagaggcattctaagggaaacaaatatctttggaagacaagaaaatcacaggacagaagtgttgggcagaaatgtcacacaagtttaaagaatacttctaaaaaataacttcagtttacaataacttcagtttgctcctaaccaaaacttcattttacatttctgamtaaagaaaaactttgctgcaaaagtcgaggtaaaagaaggttcttagggcataatagctcagggtgggaagggtctgccattagaaattatgaacatttataccagcaataaacaatgagtttctggaggcaacagtcatcaccctctctgaaagagcagaggagcaaaaccttggcaactcacataatgagcccttgtccaaaggaaggcaaaaaaaaaaaaaaaaaaattcctccttttgtatagctaatacaaacacaagctgccaagaagggtcaaccatcatgggtcgttgattacccatattaaccctgatggctgcctttacaaaaaactaacacttggggaagaccacactctgcctttgcccatttggctgccaagtacactgctgctttactgaaataacaactgcaagtggattcatggccctgggtggtatcagtgtgtttgtttctattatttagaaatagatctgtcattt

SEQ ID NO: 57311 - DNA, 568 bp, Homo sapiens
agaaaggaggaaatagaaaataaatataagctattgttattataattggtatttaggcttttttgaaagtgatagattggaagggaaggagggcttttaaattcaaagacaattatcacctaaacacaaaggttgtataactctagtgactttttcaaggatgttttgtcttgtgaaggatgaagacattattcaagaagtcataaaataataagatatgggtttaagactgccgacaaattcgtataggcaaagtggtttagaagaagacggaatgrtgattaattttaaccatcagagatggctttatggaagagagagcatttgagttagatctgaatgaagagaaagtaggtgttcagttgacttacttgattattttctgtgtgctggatattgtgctagggattgtgcatatattgtctaatcataacacctgtgaggaaactgaagctcagagaggttaaggaacgtgttaaaggtcacacacagctagtaagtaagatctgggtcatacctagatttgcctgacaagaacccctttcaagatagcacgctgattgtaggg

SEQ ID NO: 57312 - DNA, 568 bp, Homo sapiens
agaaaggaggaaatagaaaataaatataagctattgttattataattggtatttaggcttttttgaaagtgatagattggaagggaaggagggcttttaaattcaaagacaattatcacctaaacacaaaggttgtataactctagtgactttttcaaggatgttttgtcttgtgaaggatgaagacattattcaagaagtcataaaataataagatatgggtttaagactgccgacaaattcgtataggcaaagtggtttagaagaagacggaatgatgattaattttaaccatcagagatggctttatggaagagagrgcatttgagttagatctgaatgaagagaaagtaggtgttcagttgacttacttgattattttctgtgtgctggatattgtgctagggattgtgcatatattgtctaatcataacacctgtgaggaaactgaagctcagagaggttaaggaacgtgttaaaggtcacacacagctagtaagtaagatctgggtcatacctagatttgcctgacaagaacccctttcaagatagcacgctgattgtaggg

SEQ ID NO: 57313 - DNA, 987 bp, Homo sapiens
aggttatatgcaagtactacaccattttatgttggggacttgagcatgggcaaatgttggtatctgtgggaggtcctggaagcaatcccccatggatactgagggacaactgtttgactgtttgactataaaattggcaagagttatgtgtcaatattgatgcagggaattaggcacttataaattgctagtgggaatataaactggttctacatttttggaggagaatgtgcagtatctatcaaaacccttaaattatgctttaatttgacccagcaatacaagtttaggaatttacattaaaaaattgtacaaataatttaaaaatctgtggggaaagattcactacatcatcattcataatactgaaaaattgaacatattatacacacacacatataggctacaaccttgctgaagtgactccaaagaccatcagtgtcagcatcacctgggagctttttagaaatgtagaatctaggccagggtgtggtggctcwtgcctgtaatcccagcactttgggaggctgaggcaggtggatcacttgaggtcaggagtttgagaccagcctgaccaacgtggtgaaacctcatctactaaaaatacaaaaaaattagccaggcatggtggcaggcacctgtaatcccagctacttgggaggctgaggcaggagaatcacttgaacccaggaggcaaggttgcagtgagctgagatagtgccgctgcactccgcctgggcgacagagcaagactcgatctcaaaaaaaaaaaaaaaaaaaaaaaagtagactctaactcaggcacggttgccaagtggtaatgtgcctgtctcgtagaaatgtagaatcttaggccctaccccagacctgctgcatcagaatttgtattttgacagttccgtatggcatttgtatgagcattaaaattcgagaaacactggaaaggatagacaccaaaatgttagcacattgctgggtggttatgtt

SEQ ID NO: 57314 - DNA, 690 bp, Homo sapiens
cctgcatccctctgacaatcacctcaatccccttagctgcaagatctgactccatccggcccaccttcctagccacgcctctctactccaatcttaatgcacctcctggagtttctcacgaagttggtctgtgacaagcttccaagcctttgtacatgttccattggaaaacctttccctacctttaaaaactaactgctactttggctgggcatggcggctcatgcttgtaattccagcactttgggagactgaggtgggtggatcacctgagatcaggagttcaagaccagcctggccaacatggtgaaaccccgtctctactaaaaatacaaaaattacctgggcgtkgtgtcgggcacctgtagttccagctactcaggagggtaaaggcagaagaattgcttgaacccggggggcagaggttgcagtgagccgagatcacgccactgcactccagccttgcgacagagtgggactccatctcaaaaataaacaaaaaaaaactaactgctactcattctacgaaacactctgaatgccacctcctccaggaagccttccctgggtcagatgctgccttggtgtggtcgttgctgacttacgcatttctcttcgcagcttgttctgggtctccttcatctgtatccctagaagttccacaatttgacaacctggtaggacttgtct

SEQ ID NO: 57315 - DNA, 690 bp, Homo sapiens
cctgcatccctctgacaatcacctcaatccccttagctgcaagatctgactccatccggcccaccttcctagccacgcctctctactccaatcttaatgcacctcctggagtttctcacgaagttggtctgtgacaagcttccaagcctttgtacatgttccattggaaaacctttccctacctttaaaaactaactgctactttggctgggcatggcggctcatgcttgtaattccagcactttgggagactgaggtgggtggatcacctgagatcaggagttcaagaccagcctggccaacatggtgaaaccccgtctctactaaaaatacaaaaattacctgggcgttgtgtcgggcacctgtagttccagctactcaggagggtaaaggcagaagaattgcttgaacccggggggcagaggttgcagtgagccgagatcacgccactgcactccagccttgcgacagagtgggactccatctcaaaaataaacaaaaaaaaactaactgctactcattctacgaaacactctgaatgccacctcctccaggaagccttccctgggtcagatgctgccttggtgtggtygttgctgacttacgcatttctcttcgcagcttgttctgggtctccttcatctgtatccctagaagttccacaatttgacaacctggtaggacttgtct

SEQ ID NO: 57316 - DNA, 803 bp, Homo sapiens
cggatcccatccaggctcttttctttaattaccctgaggcactgagagtaaaaggaggttgctgacccctgaatttggagttcaaacaagtaacctcaccacggscagtttccatttctgctgcatgccaaactagctggccagcctggctggaatcctgttctccccagaaacacctgagcaggtctggactagctccaaaagtataagccaggtaaatttccgtgtcagctcattgagagactttccaggggcagctggggccaattcacatttgctctatactccctccaaagacacccccttcaacacacacacacagaacacttaattctggtaccaccagccaaaaggggcccgagttcccttgggagcagcccagccgctgagaggcggaaatctctgaaagggccactcagatgaccaaagcaataggcgcctacgtaccttacaacaagccaacctcaagttccaacctagagaaatgcatggactctggtgggagagtcttattccgtttttgttttcttctttttttttgttttgttttgttttggtttggttttcttccatttcttctcagccttgtctcttcagaaaatacccctccaccccttccttggcgcgtaaactgtcttcagggtggccttaggagttctgggacaatgtggagggtacccaataggatttccttaagtttcctctactgcttttccacacatattaatgctgagatcctgtatttgattaaagcaccttccatttccaaagttaaaatacaaacgggtctggtaacttacaaa

SEQ ID NO: 57317 - DNA, 803 bp, Homo sapiens
cggatcccatccaggctcttttctttaattaccctgaggcactgagagtaaaaggaggttgctgacccctgaatttggagttcaaacaagtaacctcaccacggccagtttccatttctgctgcatgccaaactagctggccagcctggctggaatcctgttctccccagaaacacctgagcaggtctggactagctccaaaagtataagccaggtaaatttccgtgtcagctcattgagagactttccaggggcagctggggccaattcacatttgctctatactccctccaaagacacccccttcaacacacacacacagaacacttaattctggtaccaccagcmaaaaggggcccgagttcccttgggagcagcccagccgctgagaggcggaaatctctgaaagggccactcagatgaccaaagcaataggcgcctacgtaccttacaacaagccaacctcaagttccaacctagagaaatgcatggactctggtgggagagtcttattccgtttttgttttcttctttttttttgttttgttttgttttggtttggttttcttccatttcttctcagccttgtctcttcagaaaatacccctccaccccttccttggcgcgtaaactgtcttcagggtggccttaggagttctgggacaatgtggagggtacccaataggatttccttaagtttcctctactgcttttccacacatattaatgctgagatcctgtatttgattaaagcaccttccatttccaaagttaaaatacaaacgggtctggtaacttacaaa

SEQ ID NO: 57318 - DNA, 803 bp, Homo sapiens
cggatcccatccaggctcttttctttaattaccctgaggcactgagagtaaaaggaggttgctgacccctgaatttggagttcaaacaagtaacctcaccacggccagtttccatttctgctgcatgccaaactagctggccagcctggctggaatcctgttctccccagaaacacctgagcaggtctggactagctccaaaagtataagccaggtaaatttccgtgtcagctcattgagagactttccaggggcagctggggccaattcacatttgctctatactccctccaaagacacccccttcaacacacacacacagaacacttaattctggtaccaccagccaaaagrggcccgagttcccttgggagcagcccagccgctgagaggcggaaatctctgaaagggccactcagatgaccaaagcaataggcgcctacgtaccttacaacaagccaacctcaagttccaacctagagaaatgcatggactctggtgggagagtcttattccgtttttgttttcttctttttttttgttttgttttgttttggtttggttttcttccatttcttctcagccttgtctcttcagaaaatacccctccaccccttccttggcgcgtaaactgtcttcagggtggccttaggagttctgggacaatgtggagggtacccaataggatttccttaagtttcctctactgcttttccacacatattaatgctgagatcctgtatttgattaaagcaccttccatttccaaagttaaaatacaaacgggtctggtaacttacaaa

SEQ ID NO: 57319 - DNA, 1224 bp, Homo sapiens
tgaatccttcataaggcatctattaaatacctactatggggcggtatacattattgattaaatcaatccatatttccctgagaaagaccaagaaaaatttcaaggaaayatgtatcacagctacatgcattgagtactttatatgttccaggcactgtgaaaagccatgtatcaatctgtttcatcctcacaaaactctgcaggattgttgttagtatcttctccatatgatagactatgaaactaagatttatcgagatgaaacaccttgccaaaggctgcatgtttaattagtgacacacttctggcccaaatctgactccagaacccaagagattgaccagtgataggtggatgttaatgtatcacacagacttctctctccggaatttcttcaaagtggtgaaaacgtgagccaagaattttatatccactaaaactgactttcaagtatttatactagaataaagtgacattagttaagaaagaattcttaaaggagatgagttcttagcttgaaaaaatataagatttgaatgggaagagtgaagaatattcttttttcagcctctcaagtagctgggactacaggtgcatgctcccacacccatctctacaattctttttgttcgttttgtagagatggggtcttgctatgttgcacaggttggtctcaaactcctagcctcaagtgatcccccaacctagccctcccaaagtgctgagattacggcatgagccaccatgcccagcaagaatattcttcaaagggtacagtggaatgagccacaaagtagaggtggtgagtcaataaaccattcttagggaaccctgggatgtgtgactttttaatttttattttttattccaatatcacagtcacttaaggatattctgggtcctttattttgctgtaggaggtctgcgtggttgctatgctatttcttttcttgcccttgacaaggcctgttcaacttctctgaaccacaatttaggggcttgacattctattgatcttttttttcttcttcttctttttgtggcctgaagatgcagggtagagtgggaaagaacttacctagagctgtgtgtcgcctttatcataggaatttagtttcttctttcttctaaagctctgtgccagagttcagcccttagtggatatttaaaaagacaaaattcacccggacttgcacccctagtgctacttatatatttaattcc

SEQ ID NO: 57320 - DNA, 530 bp, Homo sapiens
aaagtaaaacaaacttaaattcagtaattaaaataaccttggtagtcataaaactctctctctctctctctctctctctctctgtctctcatcttctacctttatatataaatagagaggctttttgaattatgttaatactcatttctgggtggtgagattttgagacgtgctgcttttcttttttgtacttttccatattgcttaaaattttttttaaggaacagatatcatttttatttaaaaataattactttttaatgataaatgaatatggctcctaagtataattcaacatggaaagtcatccatgatatattgctgagtgaaaaggttggtttaaaatttcatctgtagtataatctcatttaggtaaaacctacatatcatrcatgcttacgtgttcattaaaaagtctagaaagatgaacaccacaatgttaacagtatttatttctaaagttggtgtagagaattgggcttataatttctcagtatcattttctaaacctttttatttaaaaataaaac

SEQ ID NO: 57321 - DNA, 530 bp, Homo sapiens
aaagtaaaacaaacttaaattcagtaattaaaataaccttggtagtcataaaactctctctctctctctctctctctctctctgtctctcatcttctacctttatatataaatagagaggctttttgaattatgttaatactcatttctgggtggtgagattttgagacgtgctgcttttcttttttgtacttttccatattgcttaaaattttttttaaggaacagatatcatttttatttaaaaataattactttttaatgataaatgaatatggctcctaagtataattcaacatggaaagtcatccatgatatattgctgagtgaaaaggttggtttaaaatttcatctgtagtataatctcatttaggtaaaacctacatatcatacaygcttacgtgttcattaaaaagtctagaaagatgaacaccacaatgttaacagtatttatttctaaagttggtgtagagaattgggcttataatttctcagtatcattttctaaacctttttatttaaaaataaaac

SEQ ID NO: 57322 - DNA, 528 bp, Homo sapiens
tcccaaacacagatcactcagctccttgacatatattctacttttttttttttttaaattagagacaaggcctcactatattgcccaagctggtctcaacctcctgggctcaagtgatcctcccaccttggcctcccaaagtgctgggattacaggcatgagccaccacacctggcccaaaatatattctactttaaatcagagtaaggggtgcaaactggtggctccagggccaagtcgaggtaggagctatgtacagtgttgtcttctttcctcccttgctccctctctcccttctgtcctttttttatgtataatatttgagctagattttcttttttctttttttgagatggagtttcgctcttgttgcccaggctggagtgcaatggcgcgatctcagctcactgtaacctctgcttcctgagttcaagtgagtctcccgcctcagcctccygagtggctgggattacaggcacctgccaccatgcccagctaactttttgtatttttagtagagatggggtt

SEQ ID NO: 57323 - DNA, 1179 bp, Homo sapiens
ccagggaccccagtccctctccaccttacacagcaaaggagagtgaggtggaggctatttataaggattgatgggggaaaaacacatttagaatgaatgggtgattgccatttgagtctgcatgaatttaggattctccagctactaagaagagagaaaatgtccagttttgttgttgttttgctcccctgcctcccagcgaagaggactgaaaacacattttggctgagagataagcgatcacacttgagagggaagagcagtgatgtaggaaggaagagactggctggggtgctgtgggaccagttatgctggtcatttgttttgtgattttgggacatgtggagaatgtggtgtaggggaaaattttagggggattggcagacataggtcctgggttctagttctaggtctgccataaattcattgtcatcagaattgaatctttttcttttttttttttttttttttttttgaggctgggtcttactctgtcgcccaggctggagtgcagtggcgtgatcttggttcactgcaacctctgcctcccaggtcaagtgaatctcctgcctcagcctcctgagtggctgggattacaggcatgcaccaccaagcccagctaatttttgtatttttagtacagacaaagtttcatcatgttggcaaggctggtcttgaactcctggcctcgtgcgatccacacgcctcggcctctcagagtgctgggattacaggtatgagccactgtgcccagcccagaattgaatcttgagcattcatttgggtatagggtcttttgattgtttaggaaacagtgaagttggtttccacatgggtttgacatggagttttcctcaatgtgaagcaaaggcagaaggaaaatggtgatgtgtttggcttttcgtgaaggtaagtatatttaatgtaatggactctcctttattctaatattgggaatgccctacttttaatgttaaattcctttatgaagtgatggtgaaagaagtagatggtggttggattttgtttttgtttttgtttttgtttttgttttgagacagagtctcgctctgtcacccaggctagagtgcagtggtgtgctcttggctcactgcaacctccgcctcccaggttcaagcaattctcctgcytcagcctcccaagtagctgggactacag

SEQ ID NO: 57324 - DNA, 684 bp, Homo sapiens
tatctggagaaaaaggtttgtgtttcaaaaagtagtgggtagtaaataaactagctcttgagtgttgaaaaaataagatggtatccacaaaccaggcaaaggaggttgctcatctaccaagtgcataagtggaatttttttttttttttttagacagggtctcactctgttacccaggctggagtgcagtggtacgttcccagctcactgtggcttcgggctcctgagctccagtgatcttcctgcctcagccttctaagtagctaggactacmagtgtgtgccaccacaccagctaagttttttttttttataagatggggtctcactatgttgccctggctgttgtcaaacttctggcctcaagtgctcctcctgcctcagcctcccaaagttcaaagttctgcattacaggtgtgagctaccacacctagccatggtgtaatacttttaggaaaagaggttggcggcttggtaaaattcatagttttaggaagagaaacatgaagtttaaaaatactttttggttattaactctttttattgttttccctgcctttgagcaaaaattcctttgaaaatgtcaatttacttattagatatgccttaagaaaggggtttgggctacaaagacaggtgggaattagaatctctggtggaccagaggaagtggggatggttgcag

SEQ ID NO: 57325 - DNA, 1280 bp, Homo sapiens
gccaagaaatattctatcctcaaaatcctgaggtaagtaaagaaacaaataagtcatccttaaaccccagtttatagatgccagaaaaggaaggagattgtgccaaaaataatctcggaagtggttgtatgtgtatcaattgtggaggtacgtttgcttacagtatctccagtgcttccttctgcacatcacagatttgctattgatcagctgtggtcagatattgtaagtataaattaacctgctccagtgaaaaatacccaggggagctattacactctgaagaaatcttctctttaggtttaactgtamttacaagtacaattcaataggaggatgcgggatggttagctccaatttcaccaaccacttttttttttccagtccctgattaaaagattctgcagtttatgaccagcaaaaggctttgccttggtaccacttcaagactgaaggaatgatacaagaaagagaatttatcatcggcagggggcaatcagctgtccagaggtgcactctttatctaaagaatcttaagagtcagggggctgctctttaaatgactttggcaactcctccagaaggcttaaaagctgtctctgaagcctgtggtgtggtatccatattaatccatttgagtgaaaattaccagttccaaggaaaatacccttaggagataaaggtagtaagggaaagaagaaagacacagtcaggagacctgtgtcctagctgagaaaaagatatgtcaaaagatttactgaaaacagaaggcaggttttaaagtaagagtacaactcattagtataggaaaacaggaaaaaagcattatccaaagcactaaaataaagaaagagtcaaactctatcattttctaagcttttaaaggtcacatggagcactatgctaatattttgcaataatggactctggggcagtgctttaatgaaatgaaatgaattccaaggctctctgaatcttaatcagactgtgcaggggatgcaggaaggtcaggctgacaagcaaatgatgcaaactatactttcatattacaatgagtacgttttcccaaaacaagtttagtgtcttctctatatttaaggtcctagtaacttatcacattgtgaaaggtccttccatgtcactctgtatgcctaacaggccagcaagtgggtcagctcatggtccatccataagacattctagtaaatcaatttaaaagtatggtgttagcagtggacatcctcaatttctttttttttttatttttcaaacggacaaaa

SEQ ID NO: 57326 - DNA, 1280 bp, Homo sapiens
gccaagaaatattctatcctcaaaatcctgaggtaagtaaagaaacaaataagtcatccttaaaccccagtttatagatgccagaaaaggaaggagattgtgccaaaaataatctcggaagtggttgtatgtgtatcaattgtggaggtacgtttgcttacagtatctccagtgcttccttctgcacatcacagatttgctattgatcagctgtggtcagatattgtaagtataaattaacctgctccagtgaaaaatacccaggggagctattacactctgaagaaatcttctctttaggtttaactgtacttacaagtacaattcaataggaggatgsgggatggttagctccaatttcaccaaccacttttttttttccagtccctgattaaaagattctgcagtttatgaccagcaaaaggctttgccttggtaccacttcaagactgaaggaatgatacaagaaagagaatttatcatcggcagggggcaatcagctgtccagaggtgcactctttatctaaagaatcttaagagtcagggggctgctctttaaatgactttggcaactcctccagaaggcttaaaagctgtctctgaagcctgtggtgtggtatccatattaatccatttgagtgaaaattaccagttccaaggaaaatacccttaggagataaaggtagtaagggaaagaagaaagacacagtcaggagacctgtgtcctagctgagaaaaagatatgtcaaaagatttactgaaaacagaaggcaggttttaaagtaagagtacaactcattagtataggaaaacaggaaaaaagcattatccaaagcactaaaataaagaaagagtcaaactctatcattttctaagcttttaaaggtcacatggagcactatgctaatattttgcaataatggactctggggcagtgctttaatgaaatgaaatgaattccaaggctctctgaatcttaatcagactgtgcaggggatgcaggaaggtcaggctgacaagcaaatgatgcaaactatactttcatattacaatgagtacgttttcccaaaacaagtttagtgtcttctctatatttaaggtcctagtaacttatcacattgtgaaaggtccttccatgtcactctgtatgcctaacaggccagcaagtgggtcagctcatggtccatccataagacattctagtaaatcaatttaaaagtatggtgttagcagtggacatcctcaatttctttttttttttatttttcaaacggacaaaa

SEQ ID NO: 57327 - DNA, 1280 bp, Homo sapiens
gccaagaaatattctatcctcaaaatcctgaggtaagtaaagaaacaaataagtcatccttaaaccccagtttatagatgccagaaaaggaaggagattgtgccaaaaataatctcggaagtggttgtatgtgtatcaattgtggaggtacgtttgcttacagtatctccagtgcttccttctgcacatcacagatttgctattgatcagctgtggtcagatattgtaagtataaattaacctgctccagtgaaaaatacccaggggagctattacactctgaagaaatcttctctttaggtttaactgtacttacaagtacaattcaataggaggatgcgggatggttagctccaatttcaccaaccacttttttttttccagtccctgattaaaagattctgcagtttatgaccagcaaaaggctttgccttggtaccacttcaagactgaaggaatgatacaagaaagagaatttatcatcggcagggggcaatcagctgtccagaggtgcactctttatctaaagaatcttaagagtcagggggctgctctttaaatgactttggcaactcctccagaaggcttaaaagctgtctctgaagcctgtggtgtggtatccatattaatccatttgagtgaaaattaccagttccaaggaaaatacccttaggagataaaggtagtaagggaaagaagaaagacacagtcaggagacctgtgtcctagctgagraaaagatatgtcaaaagatttactgaaaacagaaggcaggttttaaagtaagagtacaactcattagtataggaaaacaggaaaaaagcattatccaaagcactaaaataaagaaagagtcaaactctatcattttctaagcttttaaaggtcacatggagcactatgctaatattttgcaataatggactctggggcagtgctttaatgaaatgaaatgaattccaaggctctctgaatcttaatcagactgtgcaggggatgcaggaaggtcaggctgacaagcaaatgatgcaaactatactttcatattacaatgagtacgttttcccaaaacaagtttagtgtcttctctatatttaaggtcctagtaacttatcacattgtgaaaggtccttccatgtcactctgtatgcctaacaggccagcaagtgggtcagctcatggtccatccataagacattctagtaaatcaatttaaaagtatggtgttagcagtggacatcctcaatttctttttttttttatttttcaaacggacaaaa

SEQ ID NO: 57328 - DNA, 1280 bp, Homo sapiens
gccaagaaatattctatcctcaaaatcctgaggtaagtaaagaaacaaataagtcatccttaaaccccagtttatagatgccagaaaaggaaggagattgtgccaaaaataatctcggaagtggttgtatgtgtatcaattgtggaggtacgtttgcttacagtatctccagtgcttccttctgcacatcacagatttgctattgatcagctgtggtcagatattgtaagtataaattaacctgctccagtgaaaaatacccaggggagctattacactctgaagaaatcttctctttaggtttaactgtacttacaagtacaattcaataggaggatgcgggatggttagctccaatttcaccaaccacttttttttttccagtccctgattaaaagattctgcagtttatgaccagcaaaaggctttgccttggtaccacttcaagactgaaggaatgatacaagaaagagaatttatcatcggcagggggcaatcagctgtccagaggtgcactctttatctaaagaatcttaagagtcagggggctgctctttaaatgactttggcaactcctccagaaggcttaaaagctgtctctgaagcctgtggtgtggtatccatattaatccatttgagtgaaaattaccagttccaaggaaaatacccttaggagataaaggtagtaagggaaagaagaaagacacagtcaggagacctgtgtcctagctgagaaaaagatatgtcaaaagatttactgaaaacagaaggcaggttttaaagtaagagtacaactcattagtataggaaaacaggaaaaaagcattatccaaagcactaaaataaagaaagagtcaaactctatcattttctaagcttttaaaggtcacatggagcactatgctaatattttgcaataatggactctggggcagtgctttaatgaaatgaaatgaattccaaggctctctgaatcttaatcagactgtgcaggggatgcaggaaggtcaggctgacaagcaaatgatgcaaactatactttcatattacaatgagtacgttttcccaaaacaagtttagtgtcttctctatatttaaggtcctagtaacttatcacattgtgaaaggtccttccatgtcactctgtaygcctaacaggccagcaagtgggtcagctcatggtccatccataagacattctagtaaatcaatttaaaagtatggtgttagcagtggacatcctcaatttctttttttttttatttttcaaacggacaaaa

SEQ ID NO: 57329 - DNA, 758 bp, Homo sapiens
atacactggcctatttagccatatgtttttctaccagttaatctataaacataacttcctagaagcatgaagcagggtgtacttttttaggtaatatgtagcaagggttttttttatagtkaggttatcaatacacattttaaaataatacttataaattaagaatgataagtttaataaatactgttatgtatattcagttactgatttaagaaaggactgcttatgtttattttaatccgacttttactatttaacagactcgacctgaatttgatttatatgtaccaaaaaaaaaatattttaggaaaatattaatttcaattttgaattttatcattcaaaatctgttttctctcagttacacttgtattatatcgaggataccaaaatagatactaacttcctttccaccaaattattcactgtcttttcatgttattaggtatcatctgttgaaaggcccccatcttctcatgcttggggtgcagtctccttgtgtttggttttgacctcaccgtagttgcttctgtgctctgcagccagcatgatctttaagaaactcaaatctgatcacgtcattccttgctttcaaatatttcagtggctccctgtttctgtctgtaaaaagcatgaaatattccttaccaaaaggcacctggcctttgatgtcctttcctctgctttgtctcttgccaccttgccatactcatattcattttctcttccccactccttccatccctaacacacacaca

SEQ ID NO: 57330 - DNA, 884 bp, Homo sapiens
tgaagttcctactgtgttacagacgtggatccaggcactgaggatgcagcaggccatccaaatataaagttacttccttaggaagcttccattctaatgggagagtgttgttaaagagatatataataatatgtaaaatgaatccataatggtgagtattatgaagaataaaattgccaggtgaagtggctcatgcctatggtcccagcactttgggagtctgaggagggaggatcacttgagcccaggagttcaagaccagcctgggcagcatagagagaccctcgtctctacaaaaaataaaagtaaaaataaattagctggatgtgtgacacacacctgtggttccagctactcaggaggctgaggtgggaggatcacttgagcctgggaggttgaggctgcagtgaaccatgattgtgccactgcactycagcttgagtgacagagtgagacctgtctcaacagcaacaacaacaaaacaaaagtaaaacttgtcagggcaaagggctgtaaggaaatcagtctatcagtgtatgcggtgaggttgaatcactgttgctttaattaatgtggtcaagggagactctaagaagccgactctctgggcaagaagagtttagtagagaccttggtgcttggtgcttgggtgcgttattcaactcttttgaaaagcaaattttctcctcagctgtgtttgtagagactaccattctagacatatcccattctctgtgcccacgcacctgaaatgcagagccagatccatctgtgatctttggtctcatcttgactatagctggtacccataaactcaggtgatgtctagctatgccaggagctggggtcatttcgtttcttcgtccaccccatgctttgctttg

SEQ ID NO: 57331 - DNA, 884 bp, Homo sapiens
tgaagttcctactgtgttacagacgtggatccaggcactgaggatgcagcaggccatccaaatataaagttacttccttaggaagcttccattctaatgggagagtgttgttaaagagatatataataatatgtaaaatgaatccataatggtgagtattatgaagaataaaattgccaggtgaagtggctcatgcctatggtcccagcactttgggagtctgaggagggaggatcacttgagcccaggagttcaagaccagcctgggcagcatagagagaccctcgtctctacaaaaaataaaagtaaaaataaattagctggatgtgtgacacacacctgtggttccagctactcaggaggctgaggtgggaggatcacttgagcctgggaggttgaggctgcagtgaaccatgattgtgccactgcactccagcttgagtgacagagtgagacctgtctcaacagcaacaacaacaaaacaaaagtaaaacttgtcagggcaaagggctgtaaggaaatcagtctatcagtgtatgcggtgaggttgaatcactgttgctttaattaatgtggtcaagggagactctaagaagccgactctctgggcaagaagagtttagyagagaccttggtgcttggtgcttgggtgcgttattcaactcttttgaaaagcaaattttctcctcagctgtgtttgtagagactaccattctagacatatcccattctctgtgcccacgcacctgaaatgcagagccagatccatctgtgatctttggtctcatcttgactatagctggtacccataaactcaggtgatgtctagctatgccaggagctggggtcatttcgtttcttcgtccaccccatgctttgctttg

SEQ ID NO: 57332 - DNA, 1449 bp, Homo sapiens
ggacactagagggagaaaaagattgaaagccattgaactttcttttatttctttttatttatttattttttatatttttaaggagtcttgctctatcgcccgggctagagtgcaatggcatgatcttggctcactgcaacctccacctcccgggttcacatgattctcctgcctcagcgtcccaagtagctgggattacaggtgcacacaccaccacacccggctaatttttttttttttgtatttttagtagagatttggccagactggtcttcgactcctgacctcgtgatccgctcgcctcatttctttttaccatctaaattgcattatctctgtgataggctcctcgggtattttacctgtcttaagcttccatattctgtttgtacagtgctttgatagtgtacagacaactttcatacacatcacctcacttaacctttaatgcatcccctgtaagggagacattaagtccattttcaagttcatgatactctacgtaatgagctaggactcaaactcagattttctgattccaggaacagattttctttttaatgaccttaagcctattcctttttttccttcttcccatcctccttcctactctgctttcctccttccctgtaactccttccttcctttcttccgtcattcattcagaaatgcctactgagattatattactgagaggaaaccaattcggctggagtttagggagtgtgtagggagatgcagaggatggagtgggaggggggaaggcagccaaccctgcacaacgttgctggctctggtgtggagtgkgaactttgcctgctctgtaaactcagtgttcatcaagggaagagtggttgatcaggtgagagagaatgctggcccctactcttatggtggctgtggaattggagagaagtggatggatgccagaaatatgtaggcaggttgaataaacaagaggaagtaaattatttcctcatatattgagggtgagtatataaggaaatgtcaaggatgactcccagatttgtgttaagagcacctgttggggtgattgtagtatttattgataagaaacactcggaggagggtagagttgtttggcttgaatggagaatcatgagctcggtttgggacatattgaattttatctgtctgttaaataaccttctggagatgccaaataagcaatttgatacttgaatccagaactcagaaaactgggctggggatattctcttggaagtcgctagcatataaatggtgacagagccacgggattagacaaaatcaacaaaaaagagaataacaatgccgtagggttcaagacccaagctttgggttccccagttaatagaattaatagaggtgaggatgagaagtcgaggggaaacaggagaaaagagaaagaaaaacaatagagttggaggaaaatccagggaaggttgt

SEQ ID NO: 57333 - DNA, 555 bp, Homo sapiens
gcagttcatacaagaaagctgtgccttcttgaaatttacaggtagttaaatgcatttaatctgcaatattggctcctacyagtgcttcggtgatcatatttaataaatacagttattttagtcacagacttctcattgatataaatttacaatgaactataagtcagagtatctaggtcctagtctcattgctgcagtttaagtgcctatgagatgtcataataacgactcagagcctagctttcacatgtaaagcctgaatgcataagcccagcctgctttccttacagggttattataaggattaatacaaagatccaataaagtggtaatgcactgagcatatttatcctagatactatattaatttcacatgcattgctttatttaatattaattagagtcctatggtactataatactctttatctacatgtcagagtccacaggtatctataagaaacttctctttcaaatttgtctgttttaaaataaatgcatgtatttatttacacagataattatcaccagtagtctggtagcaatcacttccca

SEQ ID NO: 57334 - DNA, 533 bp, Homo sapiens
tactggaatctaatatttcaaatttccttgggggataaatatttaaatatataaaactgaacagtattctataataggggctagtggaagcctgtgaaacatttgacctttaccattaatacaaaatgttcttcagtaggctgacactgggatgtaagaatggtcccactaaattacaattatcagcagctyagagtaagtgagtattgcacagcctacaatacttatcagtcatcagagtacttgtgactatcaagtagaaatatggaatttaactgtctctctcctcccaatatttaatttcttaaaaactctgcagttatctgtggcttttttatttggatgacagtaacttaaaagccataacttatcacatcaaatcatcatgtgcctgataatcatggctttgaaaatgagtacaatttctattttattcacataatagatttatgtaggagactaaacatggaagctctaatcttctggttgagaaattcaaatttccttaatccaggattatgtcaagttcccat

SEQ ID NO: 57335 - DNA, 657 bp, Homo sapiens
gcagaaaattcagcccagctgagttgataaaggtgtccagggattgtaacagatacaattttgaataccctggtgttgtagatgtgtctacttcaactcgacttcagccacccaacactagcccctcttgaattctcttcatcacagaattgcaacatcatcagtgtgttagtccaatttcatgcagctacaaagaaatgcccgagactgggtaatttatagaggaaagargtttaattgactcacagtcccacagggctggggaggcctcatgaaacttacaattatggtggaaggggaagaggcatggagtgccagcaagagcagggaaaactgccttataaaaccatcagatctcatgagaactcattcactatgagaacagcatgggggaaactgcccccatgatccagtcgcctcccacctggtccccctccccaccacgtggggaatgtggggattgcaattcgagataaggtttgggtgggggacccagagccaaattatatcaatctttaaggcttcctgaaattcacctctctggtcataatcccatctcctcctctcaaatctattcttccacttcattcaaacttgagttcttgtattcctgttttctagcattctagagaacatgggtcacttgcctaccgggga

SEQ ID NO: 57336 - DNA, 1175 bp, Homo sapiens
ttaaagtaggtgctgtggggtgaagggaatataattagggtttaggggtataaaggaaaaataaaaagtaaaataagggaagaactttgtttggattaatgatgaagtacttaaaaactgagcttttaattcagatttcttcacctgcagtagaagaaccttagagcaaaatcacccctcaccccacaaccctcttctaccacaatgtgtaagggtcttcacagtccagccctgcatgacctaaaacaaagctagttctccatctcgggtgccatcttcctcaccattacctcacaacaggtcttgaactcttcctctttgacattttttggctagagtcaacttcttttcatcttagcttcttgctacatccacctacaatatgtccctagcagacagggctgagtcccagtgtgatgtggacaacttcacacaaagatgtgttagggccaggtgcgatggctcatgcctgtgatcccagcacattgggaggccaaggcaggggsattgcttcagtccaggagttcaagaccagcctgggaaacatggtgaaactccatctctacaaaaaccacaaaaattatccaggtgtggtggcatgcgcctgtagtcccagaaggctgaagtgggaggattacttgagcccgggaggcagaagttgtagtgagccaaggtcatctcactgcattccagtctgggtgacacagcgagaccctgtctggaaaaaaaaaaaaaaaaaggatgtgttagatcagggatttgtcttccctgggtttggtgacaccattgatttgacatagaaccttaggaagtcccttcattgtgcttgtctcccctgtagcacattccacacagcatggtcatctataatacaggtatctctgttctccattagactgtaagttcacggaggttcagaaccttagttaccgatgtccactgcccagaactaatcacataagaagcctgtctctaataatgtttgagaaatgaatggattcctcagtcccctaaaccagatggtggaacaatttggcctctaactaacttacacatctaattcaaagctttaattggttgtagtttcaaagtgcttgtgtaatggtcctagaatatgccacaaaataaatatgcaataacaaggagagtgttgccctagttctgatgtcctgatg

SEQ ID NO: 57337 - DNA, 635 bp, Homo sapiens
cttccaaagcaagagataagcaaataaaaacttggctcttgtttttgtttaaaaaaagcaggctgggtgcaatggttcatgcctataaccctagcactttgggaggtccaggtaggcagatcacttgagcctaggagttggaaaccagcctgatcaacatgatgaaaccccatttttacaaaaaaaatacaaaaaaatttagtcgggcatggtggtgtgtgcctgtagtcctagctactcgggaggctgaggtgggaggatagattgagcacgggaggcgaaggatgcagtcagccgagattgtgccactccattccaggctgggtgacagaatgaaaccatgtctttaaaataataataataataaagcatattcacaagcctgccatggacctacttaatcagaatgcccatcatgggatctacaggactagcaactctctgggggttctattgcacgcttaactttgagaacctccacgctattaaagggcctctaagtgcttcatggcagcctggagccaagctggctacataagaacygcctggggttttgtttctaattattaactaaactctatactttatttggatttcactagtttttctactaatattcttttctcattccagga

SEQ ID NO: 57338 - DNA, 1305 bp, Homo sapiens
attatgtatgtttctgagatactcatttattatttgttaaaacttttaagaggaagagaaaaatataacagattttcaagggggaggaaaaagatgaattcttatatgggtcagaatatacgcaaactgaaagtaaaaattaatccagattcccattatcttcagttacattataattcttcatagttatattttctagagaaaataaaggaaaagtagttgaacaaaatgctcaagatgtataccttttccattattgcaagatgccaatgttcaagggcaagggtgttgttatgagtggcaggagatgtgaattgcattcccttttccattgccaacttgccaagtggtcttgggtcagcaaatttatctaactaagcctcagtttcttcaactgttaaatgataggttagactagagaaaaactatagttcatttcagtcctaaaataattatggttatggtgtcatagctaagtagagacattggggcagcctttaattattggtggtgttactactgctcaagccatatggaacttctttaaccttggctatatccataatagaacaatagcttgccacttaaaagaaaaactctccaaaatatttcatatgcttgctattcaagtttatttccaaagtggaccaaaggccattttccataattttattgctaacaaactgtacattttctttaaagaatagtaataaaggtgatgcagaatgagaaagagatccccaaagggaagattcttcccaaatattaccataagaattggatcataaaatggttagaagtggaaattatacatatatagtttgagcttcttctgaaaattgaagtctgacagtgtttttattttaatttggtgaaaaataatagtataaacttaatgagacattcagtcctcctctttgattaaaataatgccagatgttagaacgacaagcacaaatccttccattcatgtttcactttcttgttttctaagaagagaatgcaaacaatatggatttttttcccccggtccttctcttctgctgtacacgtaagaatctggtgctatctagctattcccycagcttaagcaataataataatgaacatttgttgagtgcttataatgtaagttctagcctaagtaccacacaagtgttatttagtttattccttataacaatctagaaggtagatatcattataaccttccatttgtagatgaggaaaccaaaggtcagagagggcccagtgttgcacggagaggaagcagtgtggcaggccacctggcttcggagcatgcat

SEQ ID NO: 57339 - DNA, 584 bp, Homo sapiens
gggcactacgtgtaagtggctttcccggactgctgggccgtgaccgtgaggctgggacagccacgggggaggtgctggtcaggtgrccacgtcctgggctcagtctctgagggtcaggccgcagtcctgagtgtccccatctgccccacccggagccccctgtccatgcagcctctcccttccagtggaaggagcagagagcagcacggctgtcagtgttccccttccctgggagacatctcgcccagctttgctggactctcagaggagcctgcaggaagctgtgagcaagacagggtctgtctgggagcagagagcaaagcgcccctgcacagtggccggaagcccgtggactcctccgaaaagccacgggcctgcccgcatgccgtccccaccccgcccggccttccccgtttttggggctgagctgaccgaggtgtgaacgctgttcagtgctggaccacgcagggtgaaatcccaactcgagttttttgagacagtatcttgctttgtcacccaagctggagtgcaggggcgtgatcacagttcactgcagcctcgacctcccaggctcaagcaatcct

SEQ ID NO: 57340 - DNA, 678 bp, Homo sapiens
tcccgctcacatgcgcccacgctccccctcgaggcaggttgagccccggcctggaccgccccacgctgccttccgtccacgcagagcgggctcggccctcagggctttccttcgagtcgtgttggaaagaagcagaagcagcctcacccgtggggcggaggcgtctgagggtcaggaggcagggaggagagagggcctctgtggagccggctgcctggtgtccaagtccctgctctgtgacctcaggcaacttgctccgtctctctgggctcggtcgctgtcccagctggcttgagcgytgagcatgtcagtttcctggcacagtcctcggctggtctgagggggcatttggcggaaactgacttctcccctgtcctaaagtgcaggcctgaggtgttgctgacataggggctcagcccctgacacctcagcctctgccgcccggagcccaggcggtgtctgggtctccagaaagggagccctcggccacacaccctccaaacgcagatttgagcaacttgacccctatcggggtggccttccccacggcaagggcagagcaggcctagagcccagccagtgcccccagcctccagaaactgcccctcggcagcaggtccctggggacctgctgacagagtgagacacgggggccgcctggtgggtctattcctgtgg

SEQ ID NO: 57341 - DNA, 678 bp, Homo sapiens
tcccgctcacatgcgcccacgctccccctcgaggcaggttgagccccggcctggaccgccccacgctgccttccgtccacgcagagcgggctcggccctcagggctttccttcgagtcgtgttggaaagaagcagaagcagcctcacccgtggggcggaggcgtctgagggtcaggaggcagggaggagagagggcctctgtggagccggctgcctggtgtccaagtccctgctctgtgacctcaggcaacttgctccgtctctctgggctcggtcgctgtcccagctggcttgagcgttgagcatgtcagtttcctggcacagtcctcggctggtctgagggggcatttggcggaaactgacttctcccctgtcctaaagtgcaggcctgaggtgttgctgacataggggctcagcccctgacacctcagcctctgccgcccggagcccaggcggtgtctgggtctccagaaagggagccctcggccacayaccctccaaacgcagatttgagcaacttgacccctatcggggtggccttccccacggcaagggcagagcaggcctagagcccagccagtgcccccagcctccagaaactgcccctcggcagcaggtccctggggacctgctgacagagtgagacacgggggccgcctggtgggtctattcctgtgg

SEQ ID NO: 57342 - DNA, 678 bp, Homo sapiens
tcccgctcacatgcgcccacgctccccctcgaggcaggttgagccccggcctggaccgccccacgctgccttccgtccacgcagagcgggctcggccctcagggctttccttcgagtcgtgttggaaagaagcagaagcagcctcacccgtggggcggaggcgtctgagggtcaggaggcagggaggagagagggcctctgtggagccggctgcctggtgtccaagtccctgctctgtgacctcaggcaacttgctccgtctctctgggctcggtcgctgtcccagctggcttgagcgttgagcatgtcagtttcctggcacagtcctcggctggtctgagggggcatttggcggaaactgacttctcccctgtcctaaagtgcaggcctgaggtgttgctgacataggggctcagcccctgacacctcagcctctgccgcccggagcccaggcggtgtctgggtctccagaaagggagccctcggccacacaccctccaaacgcagatttgagcaacttgacccctatcggggtggccttccccacggcaarggcagagcaggcctagagcccagccagtgcccccagcctccagaaactgcccctcggcagcaggtccctggggacctgctgacagagtgagacacgggggccgcctggtgggtctattcctgtgg

SEQ ID NO: 57343 - DNA, 584 bp, Homo sapiens
cttggaattttttgactgcttattttgaaataattttaattgtgtcttctcactaattcattcaatcatttatttatttcaatgtgaactcatgaatatttattttatactttcagttrtaattcaatcctacattattaattttcttgctcaaattgttccaggtttggccattagaggttatttttggttggcttacctccatcgttttcattctttttatttattatttatttcttttccttttttgagtatttctttcctttctgacatcacaatatgttccaggctcaccttgttttccccagctcaaggcctatattcaataacttctttgtgtggatataacagtttagccactcacaattggaggacaatttgattgtttccagttattggtgattatgaataaagatttttgcataaacagattatctcaattcacttgaataaatacctcgatatgggaatgctagatttgtatggcaagcgtatgtttaactttagaagaaattgtcttaagtttttaatttgtatgaagtctaatttattatttttttaaattttttattatactttaattt

SEQ ID NO: 57344 - DNA, 584 bp, Homo sapiens
cttggaattttttgactgcttattttgaaataattttaattgtgtcttctcactaattcattcaatcatttatttatttcaatgtgaactcatgaatatttattttatactttcagttgtaattcaatcctacattattaattttcttgctcaaattgttccaggtttggccattagaggttatttttggttggcttacctccatcgttttcattctttttatttattatttatttcttttccttttttgagtatttctttcctttctgacatcacaatatgttccaggctcaccttgttttccccagctcaaggcctatattcaataacttctttgtgtggatayaacagtttagccactcacaattggaggacaatttgattgtttccagttattggtgattatgaataaagatttttgcataaacagattatctcaattcacttgaataaatacctcgatatgggaatgctagatttgtatggcaagcgtatgtttaactttagaagaaattgtcttaagtttttaatttgtatgaagtctaatttattatttttttaaattttttattatactttaattt

SEQ ID NO: 57345 - DNA, 718 bp, Homo sapiens
aatttctggcatataatgccttcaagctaacatcagaatctgagctctggatagctctcaagactagataagccttagcagaccttgaattcaggtgagctccagtaccatgccagctgtaatatcccccagcttatggtctgctccagcatcatgtgtgctgtagcaggtcccagacttctggcagtaccacgtcagtcacatctgctctggacttctgcctgccttttgctacacctatcacaagaattttccagataaagccagtctggaaatattgaaataagtgcctgctgcttcaaataagcagtcatcaatgcacaaccacgtggtcaagaacaattaggaaaacatgacataaccaaatgaacaaaataaggtgtcagagactctaatcctaaataaattgagacgtaaaaagtgccagacaaagaattcaaaataactgttttaaggaagctcagggaattttaaagaaatacagataagcgattcaaataaatgaaccaataagtgagcagaacaaaaatatttaatatagrgattaaaatatatttaaaaattaaggagaaataatgaaaaaatacacaaacaaaattttaaaaaattcaatagagatcatgaatagcagaactgattaagcagaagaatctaaatttgaagacagattatttaaaaatgtacattcagggaaaaaaggagaaaatgaatgaagaaa

SEQ ID NO: 57346 - DNA, 795 bp, Homo sapiens
agatacaactaaaaatcacagaaaaatggataccataaaagcaaaacaaaacaaaacaaaccaggaattcattttcacctgggataaaaaatgattgcaacttaatgttgagttgcatattcatgatatgctaaaataagacaatgctgttatataatatgaagttctaggagarcgccggaacaaatttgagaacacatcattttttaaataaaatgtttaaaaattgcattatatttgaatgaatgtattatatattacctctaatatctacttatctgattaactgagtatcttcaatgtatttacatttttacattgatcactaattcccaggagctgtggtcagatgtgtaaccagctacttcttgagcaatagaatagcaaagtgattaaatagctttcttagatgtacatttctattgtcctctgatacatagcttttttaattttaaaatgttagacagaaggctgcaagtaggaaatactttgcttggagaatgacattcacaagtaagatgctgcagtcttttgtgtaaacttcagtgggattcagtaggtacttggtctgaagtggccaggaataagatataaatatccttgtttttgtttctcaaacaacaaactacactggcagagacacttctcatgagtccagagatcaatgagtattaggggatactgctggaaaatgaacaggttaccagttctttgggacatgacttcaaatccttacccagtctcaaactttataattcataaaaaatgcctttccctaagaacaggcttgtctcg

SEQ ID NO: 57347 - DNA, 795 bp, Homo sapiens
agatacaactaaaaatcacagaaaaatggataccataaaagcaaaacaaaacaaaacaaaccaggaattcattttcacctgggataaaaaatgattgcaacttaatgttgagttgcatattcatgatatgctaaaataagacaatgctgttatataatatgaagttctaggagaaygccggaacaaatttgagaacacatcattttttaaataaaatgtttaaaaattgcattatatttgaatgaatgtattatatattacctctaatatctacttatctgattaactgagtatcttcaatgtatttacatttttacattgatcactaattcccaggagctgtggtcagatgtgtaaccagctacttcttgagcaatagaatagcaaagtgattaaatagctttcttagatgtacatttctattgtcctctgatacatagcttttttaattttaaaatgttagacagaaggctgcaagtaggaaatactttgcttggagaatgacattcacaagtaagatgctgcagtcttttgtgtaaacttcagtgggattcagtaggtacttggtctgaagtggccaggaataagatataaatatccttgtttttgtttctcaaacaacaaactacactggcagagacacttctcatgagtccagagatcaatgagtattaggggatactgctggaaaatgaacaggttaccagttctttgggacatgacttcaaatccttacccagtctcaaactttataattcataaaaaatgcctttccctaagaacaggcttgtctcg

SEQ ID NO: 57348 - DNA, 795 bp, Homo sapiens
agatacaactaaaaatcacagaaaaatggataccataaaagcaaaacaaaacaaaacaaaccaggaattcattttcacctgggataaaaaatgattgcaacttaatgttgagttgcatattcatgatatgctaaaataagacaatgctgttatataatatgaagttctaggagaacgccggaacaaatttgagaacacatcattttttaaataaaatgtttaaaaattgcattatatttgaatgaatgtattatatattacctctaatatctacttatctgattaactgagtatcttcaatgtatttacatttttacattgatcactaattcccaggagctgtggtcagatgtgtaaccagctacttcttgagcaatagaatagcaaagtgattaaatagctttcttagatgtacatttctattgtcctctgatacatagcwtttttaattttaaaatgttagacagaaggctgcaagtaggaaatactttgcttggagaatgacattcacaagtaagatgctgcagtcttttgtgtaaacttcagtgggattcagtaggtacttggtctgaagtggccaggaataagatataaatatccttgtttttgtttctcaaacaacaaactacactggcagagacacttctcatgagtccagagatcaatgagtattaggggatactgctggaaaatgaacaggttaccagttctttgggacatgacttcaaatccttacccagtctcaaactttataattcataaaaaatgcctttccctaagaacaggcttgtctcg

SEQ ID NO: 57349 - DNA, 795 bp, Homo sapiens
agatacaactaaaaatcacagaaaaatggataccataaaagcaaaacaaaacaaaacaaaccaggaattcattttcacctgggataaaaaatgattgcaacttaatgttgagttgcatattcatgatatgctaaaataagacaatgctgttatataatatgaagttctaggagaacgccggaacaaatttgagaacacatcattttttaaataaaatgtttaaaaattgcattatatttgaatgaatgtattatatattacctctaatatctacttatctgattaactgagtatcttcaatgtatttacatttttacattgatcactaattcccaggagctgtggtcagatgtgtaaccagctacttcttgagcaatagaatagcaaagtgattaaatagctttcttagatgtacatttctattgtcctctgatacatagcttttttaattttaaaatgttagacagaaggctgcaagtaggaaatactttgcttggagaatgacattcacaagtaagatgctgcagtcttttgtgtaaacttcagtgggattcagtaggtacttggtctgaagtggccaggaataagatataaatatccttgtttttgtttctcaaacaacaaacyacactggcagagacacttctcatgagtccagagatcaatgagtattaggggatactgctggaaaatgaacaggttaccagttctttgggacatgacttcaaatccttacccagtctcaaactttataattcataaaaaatgcctttccctaagaacaggcttgtctcg

SEQ ID NO: 57350 - DNA, 610 bp, Homo sapiens
ttattaccatactaaaactctattaaatcaatgtatgtataggataaagatttgagataaataagagttaaaaagccttcaagccgttaggaaccaagtgaaaatttttaaaaagtgtcacatactcaatagatgtccacaaatctctctctatctgtatgccactggcagtataattaggtcattatagataccaattttaaagtcaaacgaaactaattttgaattttgaccctattacttattgctggaagaccctgagtaaagttcttaatttacctagctaaccctgcttactttaatttaatrggttcacaatagcttaatttaatttctagggttagtgtgaggattcatgaggtgatgtccggaaagtgattaggacagtgcctgcatatttaaaatgcagaataaatgatattagtaatgttgtcatattattattatgtctttttgaaatagccttatatatctctttttatgtgaatcatgaaggttggaagacaaaacaatttacttttaatgttgaatttctacatagtatgtttttagtatagaaaagtatttatgatgtaggatttttcttcttggtcactttgcaatccaggga

SEQ ID NO: 57351 - DNA, 568 bp, Homo sapiens
aggcaattgtgaaacactttgcactgtggacagctatgcacatttctctatatgtggaagtgtttattcatttttygagttcagttttaagtagcaaatagcctactgcagtgatacaaaccattgtccttaagagaaatgtctggtataagtagtatgcttactggtaatttttttctaatttcctgttataaaataagatgtagtgccttattcttgaatactataaagaaaatttgaggtcagcaattttcagatattttgatctcaggaaacttttacaagtttaaatatcattgagagtcccagaaagcttttgtttagacgaattatatttatcactgattaaaaaataaatctgagaaaattttaaaacacaagaatgcacaagcacacactgtaatgggtattaggataataatgtcatcaatctccaggtattcgctggaaaaccaaattgagcaatcataagagaataagaggaaaactgtcaaatcatgcattaatattattatataaatagttttgaaattcaacttcccttggtgaagtcatgggggctcctggg

SEQ ID NO: 57352 - DNA, 568 bp, Homo sapiens
aggcaattgtgaaacactttgcactgtggacagctatgcacatttctctatatgtggaagtgtttattcatttttcgagttcagttttaagtagcaaatagcctactgcagtgatacaaaccattgtccttaagagaaatgtctggtataagtagtatgcttactggtaatttttttctaatttcctgttataaaataagatgtagtgccttattcttgaatactataaagaaaatttgaggtcagcaattttcagatattttgatctcaggaaacttttacaagtttaaatatcattgagagtcccagaaagcttttgtttagaygaattatatttatcactgattaaaaaataaatctgagaaaattttaaaacacaagaatgcacaagcacacactgtaatgggtattaggataataatgtcatcaatctccaggtattcgctggaaaaccaaattgagcaatcataagagaataagaggaaaactgtcaaatcatgcattaatattattatataaatagttttgaaattcaacttcccttggtgaagtcatgggggctcctggg

SEQ ID NO: 57353 - DNA, 568 bp, Homo sapiens
aggcaattgtgaaacactttgcactgtggacagctatgcacatttctctatatgtggaagtgtttattcatttttcgagttcagttttaagtagcaaatagcctactgcagtgatacaaaccattgtccttaagagaaatgtctggtataagtagtatgcttactggtaatttttttctaatttcctgttataaaataagatgtagtgccttattcttgaatactataaagaaaatttgaggtcagcaattttcagatattttgatctcaggaaacttttacaagtttaaatatcattgagagtcccagaaagcttttgtttagacgaattatatttatcactgattaaaaaataaatctgagaaaattttaaaacacaagaatgcacaagcacacactgtaatgggtattaggataataatgtcatcaatctccaggtattcgctggaaaaccaaattgagcaatcataagagaatargaggaaaactgtcaaatcatgcattaatattattatataaatagttttgaaattcaacttcccttggtgaagtcatgggggctcctggg

SEQ ID NO: 57354 - DNA, 616 bp, Homo sapiens
aataataatttgtactaggaaaagtgaatcacttcatattaaaacactatatataatttatataacagaaaagatacacaagccctaaaatactgaacaatgtaaagcaattaatgagaaaacatatccacatatttatctcttaaacggattataaagccagatggaatatgggcctaaattacaggtcccatacaaaatcaaactgaaattcactttggatcttcaagtgcttataggccagtttaaaaaagttgtacaaccattgtatttaatatagcttctacttttcatataaaaatttaattgatttttagaataacactaggtcttctgtacagaaaaagagtgtgaagataagcccaattcctgagcacttctgaaatacaaatcttcattattttgttaatatttaaaatttatttcagaaagtatacttgcttttttttccaagtcagaaagttatcattattaaaatctattttaaataytattaatttgctcaataattaatgactggtccatttttttcagtaagaacttctaagcaacttaataatttgtaaagctttgagataagaaaatattaaagggctataaatgagtaatgtaatat

SEQ ID NO: 57355 - DNA, 2131 bp, Homo sapiens
agatgttacatttttttacgaagtatgcccttgaagagaaatttccagataattctttttttctagaacctgcagtccgatgatcattttttacttcacagtgttgagaagcattagaaacactactagaaacattagcgagtctcccttttaaaaatacatttatgctacaaacctggtgtaacttttagcagtcaaattttgtgaatcttttgtatctccatcccaatatttttgtcatcttattcttataaaaataacaccctctagttgccccagatatattgcttctgattggaaatcctttagcggctacagtacagtagtattgaaagtaaaatgtaatattatccaagtcttaatttgagaaaagttaggaaaagattcaatatacaactcttcaagtcctatagcattaaacttaaggggaaactcttgaagtctgaaagtgtagttttgaagcaaacacaggaaagacatggaaaaaaatatgtgtttcattaaggaataacatcaattgttaagaagtaggttcaacttcagtgaaacttttacaagttcctaatttctaatataaggtcatataccagaaacatctgatgttccatcaaacttcaacttgaaaaaaagccagaagcctgtgtaaatatttctctatttacaactagggatcctgaagttctccgggctaatcaatttcctttatattttcaaggaaataaatcactaaaataatcaatccacaaatgtcaaagccaattctattaaatgctcagaattttcaaaaagtatagagtgagattgtgtgtgtgcatgtgcacgtgtgagtgtggtgtgtgtgcatattcacgagtatgttggggacaggtgaggatcttttccccaaaaatataatactgtcttcaggaaaattaaaatggagtcaataaaatggcttaataaaactgagataattagtaaacactaaaaacatgcaaagaagtgctaaatagcattattttttttttaaaaaaaagtttataccagagaaaggaaaaaagaatgcatgaatactgtactagcctggaaagaacaaatgaaaatagtattcagagaaacaggagttgtatagctgcaggaaaacgataaaagaaaaagcactctcctatgagtcaaaagastgtaatggaagccttttcaactccacacagatccttttaggaatacatttcatgtgtactcctgagtcaagcactatatctccataataggcaatgaataatttatttatattataaattgctatattaatgttaattactaaggcatagcacacattgaaaaattcatccaacttttaatgaatacttgagaataagattctataataatccacaaaaatcccgttcccataattaacatgttggcaaaaataatgcaatccggaacaaaactctgcatgttctattttcattctttgtttaatttgaatatggcaacagttattgcttctcagccttttggctaagatcaagtgaatatggtgatggcttctatcagtgtagataaaattaaaactaaatgacagctcattggaagagttaaatgagatttttatgtagaaaacaattttcccttacttactgggaaaatcagacttgagtacacagcaaaatacatacaattagtaatgcactgaattttcaacttaatttatatttcatgcgttaaggctctgaacacaataccccaaaatatggcactttggcatgctaaatgctttgaactaaaagatattaggccgacaaagccttctagtatcatggaaacaaagcctttctgaactcctcctgttctcctgtctcccacctctctgtcttccctgaaacaagtcatagatagatactcttccctaagtgaatcacagaaattagaactcttctctcccacagcagggcataaaatctagaaaggtcactctctctctctcccgtctcccttgaagatcctctttccaaaggggtgctgcaccataccttgagggaaggaatgctacaaagagaggccgaaaagaatctgaacagacaggtcttgctggggttcgccactcagtggattacactagatcgtacccttttgtccaatcacattt

SEQ ID NO: 57356 - DNA, 2131 bp, Homo sapiens
agatgttacatttttttacgaagtatgcccttgaagagaaatttccagataattctttttttctagaacctgcagtccgatgatcattttttacttcacagtgttgagaagcattagaaacactactagaaacattagcgagtctcccttttaaaaatacatttatgctacaaacctggtgtaacttttagcagtcaaattttgtgaatcttttgtatctccatcccaatatttttgtcatcttattcttataaaaataacaccctctagttgccccagatatattgcttctgattggaaatcctttagcggctacagtacagtagtattgaaagtaaaatgtaatattatccaagtcttaatttgagaaaagttaggaaaagattcaatatacaactcttcaagtcctatagcattaaacttaaggggaaactcttgaagtctgaaagtgtagttttgaagcaaacacaggaaagacatggaaaaaaatatgtgtttcattaaggaataacatcaattgttaagaagtaggttcaacttcagtgaaacttttacaagttcctaatttctaatataaggtcatataccagaaacatctgatgttccatcaaacttcaacttgaaaaaaagccagaagcctgtgtaaatatttctctatttacaactagggatcctgaagttctccgggctaatcaatttcctttatattttcaaggaaataaatcactaaaataatcaatccacaaatgtcaaagccaattctattaaatgctcagaattttcaaaaagtatagagtgagattgtgtgtgtgcatgtgcacgtgtgagtgtggtgtgtgtgcatattcacgagtatgttggggacaggtgaggatcttttccccaaaaatataatactgtcttcaggaaaattaaaatggagtcaataaaatggcttaataaaactgagataattagtaaacactaaaaacatgcaaagaagtgctaaatagcattattttttttttaaaaaaaagtttataccagagaaaggaaaaaagaatgcatgaatactgtactagcctggaaagaacaaatgaaaatagtattcagagaaacaggagttgtatagctgcaggaaaacgataaaagaaaaagcactctcctatgagtcaaaagagwgtaatggaagccttttcaactccacacagatccttttaggaatacatttcatgtgtactcctgagtcaagcactatatctccataataggcaatgaataatttatttatattataaattgctatattaatgttaattactaaggcatagcacacattgaaaaattcatccaacttttaatgaatacttgagaataagattctataataatccacaaaaatcccgttcccataattaacatgttggcaaaaataatgcaatccggaacaaaactctgcatgttctattttcattctttgtttaatttgaatatggcaacagttattgcttctcagccttttggctaagatcaagtgaatatggtgatggcttctatcagtgtagataaaattaaaactaaatgacagctcattggaagagttaaatgagatttttatgtagaaaacaattttcccttacttactgggaaaatcagacttgagtacacagcaaaatacatacaattagtaatgcactgaattttcaacttaatttatatttcatgcgttaaggctctgaacacaataccccaaaatatggcactttggcatgctaaatgctttgaactaaaagatattaggccgacaaagccttctagtatcatggaaacaaagcctttctgaactcctcctgttctcctgtctcccacctctctgtcttccctgaaacaagtcatagatagatactcttccctaagtgaatcacagaaattagaactcttctctcccacagcagggcataaaatctagaaaggtcactctctctctctcccgtctcccttgaagatcctctttccaaaggggtgctgcaccataccttgagggaaggaatgctacaaagagaggccgaaaagaatctgaacagacaggtcttgctggggttcgccactcagtggattacactagatcgtacccttttgtccaatcacattt

SEQ ID NO: 57357 - DNA, 581 bp, Homo sapiens
cattttgctttggaggaagcaatagagcaatagatgtgtacctgtacctgaggtgaacagcctgtataatcaaagaacaggaccaacagaatgaggcactaggcccacatgaagctaaggtagtcatacaattctaggacttgaaacaagcagcagatgtcacttgtatgcacacagccttcctttctccatgagaagataaacaccaaacaatcagcaactggtatgtacttttcagtcacatatttgtctacatctgttctgagcctatttcaatagtctctcaaattkcaatttgccttcactttggaaggaatgcaatatacctttacctggtttcttaggtaccctcctttgttggtgtcagaaagattaaaccatgcaagccctggatcatgaagggaaacttcactttcacctctaactacctaaccatcataaacccaagacagtctccattctctgctctcccaaccattttcagacctgcttgggaatctgttctccccaggaatcttcaatccatgattaataaaaatgttcatactctcttggtatgtgtgtatggtaccatcagtcat

SEQ ID NO: 57358 - DNA, 984 bp, Homo sapiens
gttgtatattaagggcattgttttctcagatacatattgaagacatgctgtaattcaagattaatagaaggtaacacagatagcagaggccaaagagatgggaactttaaatggacctgcaagaaactcctcctcctcaaatgacagcaataagtaaggaagatgagtaattattgctctattaccataacctgccatgttgtggaaatgagtttagttctaaagtaatactagtaggctgtgggattccactcaatttgtagaagtcctgtaaaatctagatttacattcctaatgggtcccaggaacacacgagaaattcaacagtaagccaaaactgctcttggagaggccagagaattcccagccagcctgaatacacactgactatgtgatggtgagatctttgcctagaaatcttcccacacctgctctgaccttctcaagagtgactttccagagctaagactggcatagactggctttgaaggtttgtgagaaatagggagcagtgtttcatatagtcatacctcatctttgccatctaaaacagctgctgaactattgagccaaggtttagagaaatggatgggatgagctacctagagtttagtacttgaataaatgttacaaaatctatatggtgaataccgctaagtcttcagatatttgaggtatcttttctaaactttacaatagccctgaatttggttttaagttagaacaagaaagccacataggaacaatatttcttttaawttactccatgctatgagattacatggggagcagatgaaggcagaataatagagttcaaaatattgtatttcaagaacaagaaatagtgtttagcaggacttctgaacattttgaacatgtctaaaagcaaaaaacaagagcctaacctaaacattaaacattaggagaaggttatttattcagatctctgtttcatgttacacaaataaataataaacaagggtg

SEQ ID NO: 57359 - DNA, 984 bp, Homo sapiens
gttgtatattaagggcattgttttctcagatacatattgaagacatgctgtaattcaagattaatagaaggtaacacagatagcagaggccaaagagatgggaactttaaatggacctgcaagaaactcctcctcctcaaatgacagcaataagtaaggaagatgagtaattattgctctattaccataacctgccatgttgtggaaatgagtttagttctaaagtaatactagtaggctgtgggattccactcaatttgtagaagtcctgtaaaatctagatttacattcctaatgggtcccaggaacacacgagaaattcaacagtaagccaaaactgctcttggagaggccagagaattcccagccagcctgaatacacactgactatgtgatggtgagatctttgcctagaaatcttcccacacctgctctgaccttctcaagagtgactttccagagctaagactggcatagactggctttgaaggtttgtgagaaatagggagcagtgtttcatatagtcatacctcatctttgccatctaaaacagctgctgaactattgagccaaggtttagagaaatggatgggatgagctacctagagtttagtacttgaataaatgttacaaaatctatatggtgaataccgctaagtcttcagatatttgaggtatcttttctaaactttacaatagccctgaatttggttttaagttagaacaagaaagccacataggaacaatatttcttttaaattactccatgctatgagattacayggggagcagatgaaggcagaataatagagttcaaaatattgtatttcaagaacaagaaatagtgtttagcaggacttctgaacattttgaacatgtctaaaagcaaaaaacaagagcctaacctaaacattaaacattaggagaaggttatttattcagatctctgtttcatgttacacaaataaataataaacaagggtg

SEQ ID NO: 57360 - DNA, 2348 bp, Homo sapiens
ccatggtgatctttctaaagcattgctcagatcttgtcactcaccttgtagaaacccagtgctgcctcccctgcaccttaggtcaattccagataccttagcttagggttcaaggccccctcatggcccagtcatctctagttgcctcattttttcctttctcccattcctgccctatgatcgcgtcaaacagaaggttttatcagtgcccaggaatcccctgttctttgagtgttgtctctgctcctgctgggccctgcctacttccctgtctacagaagccccagcccctctcccacctaattcaaaggccacctccttgggaaagcccactttgactgttcctttccccaacccaaacataagcacaactagctggtctctctttgttacaatccttttcctgtttcatatcactatcattcattatgtctttttattctataagtactgattggcacttttgcagtgctactcactctggcctaaccctagagatacagggagagaacacagacatggcccctcccctcctggagctcagtatttcactcaggcatttaatgctttgtgcaactgtctcaactctggggggcaagacattcttatttaattctcctggcacaagtgaatgaatgaatgaatgaatgaatgaatgtgagataacacaaatgaataagaggcaaaggtggatcagtggatggaggctgcaataaagcaaatttttgcttggtggaagaagctggggttttgcccagcactgcataaactgccttccatggggtcgagctctcaggaacttgaggcatccatgcggaggaaaaccatctgtcaaagagaggcccgaaaagacagaattggctggggattgaagttgcagggctgggggctctagcctcagccctatcactgactcactatgtgaattcaggtagaccttagcaagagcatatcctctctttgagcctcagcttccctgtctgtaaaatgaagacattggactataagtggtagaagaaaatgggatacttcttcttgaatgttggtgaccttcaaacaacctcttcaacagcgcaccataaataaggttctatatgtcatgttagacacagagaaaaattttaacaggtataagatgatggaagaaaagttaagtgcaagattttataacaggagtctgataaatgccagagacacttgtgtgaactagtgtagcctggggaggtttcttggaggaggtacagcatgatcgatctaaagggtaaataggacataattatttgaaaaaaggagacatgcatttcaggttgaagggagaggaagacaacatcttaaccaacaagacaatgtccccagtgcccctgtgacacatccacatgccatgccctcattgctaacctgggacattgctgaggaggggaccctgttagaaggctgagcttcttgcgccaaaggagcagatgtgggctcttctttgcaatgggtttgttgtttcctgctttcagcaggcctgcgtcctccagccccattaggatgtgggctggctccacctctgtaggctggatgtgggatgggaggcagacctggccctcatggaggaccctggctccaatcctcatggctctgcaggctgtgagctcctctgctgaggagatgggggtgttgaattccctaatggttccctagaaagggactgttgcatacaggtgagccaagaacaggcagaggacccctttccccaagtgatcagccaggcttgaggtctctcagtggaagcctggagctggggctgctgggaatggccgtcttttcttgagttgctyacctgtgagggccgtctgtctgccagactgctcctcatacttctgtctgaccactcatctctggcattcccagctctgtgaactcagggctctgttggaacactgggtgatgggacccacgcaggggccttccctgttggctgccaaactcacactgaggtcagagaaggaggctctgtgtggccatgcgagtctccccacttccctctcttaactcgctttcccactctgacttccttcctttccagaactacagtctgaggcagcaagaaggacccctaaaggtcactaagagtacatagagatggagaaactgaggctgagagaagcgaggagactctcccaagactccaggatgcatcagccaaggagcagagaccagtgccctgatgtccgacctgttttctgtccactacggcatggggtcctggcctcactatctgtccatgggctctttctctccattagaggtgaagccctggggacaggatctgcactttctacagaacccacagaagccatgca

SEQ ID NO: 57361 - DNA, 982 bp, Homo sapiens
tgtctatctcctcttccactggctgagaactgggtgatgatgaaagctacagaccaggggaaagagaagaggaggaggcaggaggtagcttactggccagaggagatggcaccccacattgtgggacttgatgctttcacaatactggtggtggtcacggcaggrtacgtcctctgttaatgagttaacctctcttaatgaaccaacacgaggggtgggttaatgaacgcaagatttctatgctggtactgtgtaggtggcaggtgggagagaggtctgggacaccaaaacattgagtggaacaggacattttgaatttttggaaacagaacttgagtggaaattccaccatgtggccttcagaaatagaaaacccagagccagaaggctagatcccagtgcagacttccagctcgaggaacaaaaaaacctccaattgactttttgtgaagctgacatttttgacatttacagcaaggcaaagacaaccaaccagagcctggggtgggtactgtagagtattagaccaggcaaagtgaaaagcggtcagtggggttaaggtcatgccctcagctgacaaggaagctgcatgagccctgccatttctcctgcaagtgccctgaaatttttcttctgctaattcttattacataggggggaaaatatgatgggttcctggagaacccatcttgggagtgagtacctgcaccccactctgtggctgttcctggtgtgaccggactctgagatgagcctgcaaacccctgccccagccacctgcaccactcacctccacggcagcagggtgggggggtggtcctggcagccacggggccagcactcgctggccctcatattcacagtcccagagccccagttcttatcaacaaatccatgatcctatggcctgtcttcattgcccataagccacccaaatatcctgaacatcccaccatagcgacatcatctctcagacttccat

SEQ ID NO: 57362 - DNA, 982 bp, Homo sapiens
tgtctatctcctcttccactggctgagaactgggtgatgatgaaagctacagaccaggggaaagagaagaggaggaggcaggaggtagcttactggccagaggagatggcaccccacattgtgggacttgatgctttcacaatactggtggtggtcacggcaggatacgtcctctgttaatgagttaacctctcttaatgaaccaacacgaggggtgggttaatgaacgcaagatttctatgctggtactgtgtaggtggcaggtgggagagaggtctgggacaccaaaacattgagtggaacaggacattttgaatttttggaaacagaacttgagtggaaattccaccatgkggccttcagaaatagaaaacccagagccagaaggctagatcccagtgcagacttccagctcgaggaacaaaaaaacctccaattgactttttgtgaagctgacatttttgacatttacagcaaggcaaagacaaccaaccagagcctggggtgggtactgtagagtattagaccaggcaaagtgaaaagcggtcagtggggttaaggtcatgccctcagctgacaaggaagctgcatgagccctgccatttctcctgcaagtgccctgaaatttttcttctgctaattcttattacataggggggaaaatatgatgggttcctggagaacccatcttgggagtgagtacctgcaccccactctgtggctgttcctggtgtgaccggactctgagatgagcctgcaaacccctgccccagccacctgcaccactcacctccacggcagcagggtgggggggtggtcctggcagccacggggccagcactcgctggccctcatattcacagtcccagagccccagttcttatcaacaaatccatgatcctatggcctgtcttcattgcccataagccacccaaatatcctgaacatcccaccatagcgacatcatctctcagacttccat

SEQ ID NO: 57363 - DNA, 737 bp, Homo sapiens
ctattttaaaatgttgcgcacctgcctttgggagtggcatattccataggcacagaaaattctgttgctgttgacctggcctggtgggctcacacctgcaatcccagcacgttgggaggccaaggcaggaggatcacttgagcccaggagtttgagaccagcctgggaaacacagggagactatacaaaattttacaaaaaataaaaagttaaaaaaaaaaactagccaggtgtggtggtgtgcacctatggtcccagctactcagaaggctgacatgggaggctcacttcagctcaggaggtggaggttacactgagccatgattgcaccactgcactccagcctgggtgacagagtgagaccctgtctcccccctccaaaaaaaatttattactgctgtgttaggtaaaggacagtgccgaaatccwcaactaccgtgcaacttcagccccttctttatctgcatggcctttaccatagatctattcccgaaggaggagtttgtcctgagtaaaaaggttttaattgatgtagtatgcaagtctataaaaagttgatgatagaataagatatggcacttgggaaagttgcttcattattgcatctttgaaggcccaaatgaaagcgtgtttagataaaaaaaaaaaatacctcccagggagttaaaaatgcactggccccaagtatatctctttcccatcgctcatgcatgttcacacaaagaggaagccactaa

SEQ ID NO: 57364 - DNA, 865 bp, Homo sapiens
taatgttctgtaaaacagacgtctacagttattatgaatattttgattttcactcaatttcattctgtatttctttattctctgaatatgagccaataacataattagcaatttatgcaataatggccataacaccaagaagataaatacattatagacagccccagaagatataggaatggatccaatttaaaatccggagcaaactggaagttgaggctgttcctggaaattaatcaatacatgttggacaaggtgcaaattttactgattgacattgtagaagaagagacagtggctattggagatctagtggagtgagtttcactattgcacaagggaaaataaaagaaacctttttactggaaacacatctttacttgtacccttactttgaaagaattaaccaattaaggctgtcaagctgctttgacaataatttttcagtgatgggaccaggttgacttaattgacttcttatttttgcatcatacagactatctgtgttttgtacaatgaaaacacaaactaacctacatcatgcatgtgcttaaacttttttatgtttttatttttatttatttatgtatttttaccatcaaatttacataagcatgcttaaatatttttagtagctctacattgcctacagaaaacacatgtctaaactccttcaactggctcttcatgaggaagtccctccttgcttttagcctcttctcacttcagccccaccacaccacaggccggctgctcccctacacacccacgagcttcatggatgctttctccatytctaaatacctatcctgatctgtgaccacatggctcaccttcaagattcaggccatgccttatttcatct

SEQ ID NO: 57365 - DNA, 770 bp, Homo sapiens
ggtatataagaaaaatgttttctgaaagagctctaaaaaactgctaataatccgagtgacaatgaccagatgagtacaatattacttttcattttacaactttctgtacttcttgaattttttgtcatgcaagggaataaatctttaaggcatgttatcaaagttatctaggtggtgggagtatgagacattggtatgttcgttacagttttaagcatgaagaaacactagcaaatgttatttttgcaaggtgcaattatgagaatacagtcctaacaaaagcaacaagggggctaaatttcaaaatttaattgtttctttaaaataacttataaattgtaaattgtaagctcttctagtctaatagaaatgacactcatgcaagaactctttcaatttgatatgtgaaataggctggctctgggatccagttgagtttgggtatagaaagttgtttcagggccgggygcggtggctcacacctggaatcccagcactttgggaggccgaggcgggtggatcacgaggtcaggagattgagaccatcctagctaacatggtgaaaccccgtctctactaaaaatacaaaaaattagtagggcatggtggcgggcgcctgtagtctcagctgctcgggaggctgaggcaagagaatggcgtgaacctgggaggcagagcttgcagtgagccgagatcacgccactgcactccagcctgggtgacagagtgagactctgtctcaaaaaaaaagaaggaaagttgtttcaaag

SEQ ID NO: 57366 - DNA, 838 bp, Homo sapiens
ttttttggttttttttttgagacagtctcgctctgtcactcaggttgaagtgcagtggcacaatctcggctcactgcaagctctgcctctcgggttcacgccattctcctgcctcagcctcccgagtagctgggactacaggcgcccgccaccatgcccagctattttttgtgtgtttttagtagagatggggtttctccgtgttagccaggatggtctgatctcctgacctcgtgatccacccaccttggcctcccaaaatgctgggattacaggcgtgagccactgcacccggccaaaagcagtttttgaagggtgtgagcacaagtctcaagatcgtggtagccagactgtcccggccctgttgggaggattccttagaagtatttcttttttgtttttttttttgagattgaagtctcactctgttgcccagagtgcagtggcgtgatctcactgcaacctctgcctcccaggttcaagtgattctcctgcctcaacttcccaagtagctaggattacaggcatgtgccaccacacccagctaatttttgcgtttttagtagagacagggttttgtcatgttggccaggctggtctcgaactcctgacctcaggtgatccacccatcttggcctcccraagtgctgggattacaggtgtgagccactatgcctggcctccttgggagcttttaaacatgtatggcagtggcatgttaagtactcactaagctctactttcttttcctcctggaaacccagctggactgaatttcccagcttctgccgcaggtctgtgaggccatgtgacctgagaagcagtgaaggtggcagaa

SEQ ID NO: 57367 - DNA, 1064 bp, Homo sapiens
tgaccaggtatgcgctcagtaattaagccagcacagagagttcattttacagaggagctgtgtggtttccagaaccatcctggccagaagactgaccttyctgcaagtaactgtcacctgtgagtagaatgttaagctatgccacatctacagggtgtttttccaataaagatgggggaatcctggagccggctaaggacaactatcctggctaattgcttccgcaaacttctattttaagaacacaggtttggaggccaatttacagagagcatcttttagtaaggagtaaggaacaaacagcaaactgaacaatctgtgtctcagagctgaaattacaatgggagctcaacctcttccagggtgatagagccagcagatgaatccttaaatcctggtaaatccccaaactacaccgaaccccaaataaaattatactctggttatgagattctcatactgtgactgtttcactctgctccccacaaaagcaccaagggatcaatatctgcctcttcatatacactgggtggggtgggtgaggttaaaagggccaaagggaagtcaaaaggcttcaaggctgctccgactctggggcactggagttctacagctggaagtctacacctccatcacagtatgcagacagggtcttgttgcccaggctggactgcagtagtataatcatagcacactgcagtgtgctcaagtaatcctttgcctcagtctcctgagtagctgggactacaggcgtgcactaccatgctcagttaattttaaaatttttagtagagacaagatcttgctatgttgcccaggctggtctcaaactcctgagctcatgcagtcctcccgccttggcctctcaaagtgctgggattacaggtgtgattcacctcgtctggcctgagagctaattaaaaaaaaaaaatttattttgagacaaggtctggttctgtcgcccaggctggagtgtagtggtgtgatctcagctgactgcagcccctgcctccaagcttcaagcgatcctctcacctcagcctcccgagtagctggaactacag

SEQ ID NO: 57368 - DNA, 667 bp, Homo sapiens
tcccaccacagctggctaattaaaaaaawttttttttataatgatgaggtctccctgtgttacccaggctggtttcaaactcctgggcttaagcaatcctgctgtcttggccctcaacctcacaaagtgttgggattacaggagtgagctgccatgcctggcctccagtggcatatttttgattgggtaataatgatcaatatgatctgttaggttccagggtagggaatgacattactgagctcccattctgtgtcaggcactgtgctttttttttttttttttttttttttttttgagatggaatctcattctgtcacccaggctggagtgcaatggggcgatctcggctcactgcaatctccacctcctgtgttcaagagattctcctgcctcagcctcctgagtagctgagattacaggtgcgtgccaccacgcctggctaatttttgtatttttagtagagacggggtttcaccatgttggtcaggctggtcttgaactcctgacatcatgatccacctgcctcggcctcccaaagtgctgggattacaggtgtgagccactgcacccagccactatattcttttctcacagagtctcgttctgccagccaggctggagtgcagtggcgtgatcgtggctcactgtagcctggaacttctag

SEQ ID NO: 57369 - DNA, 2024 bp, Homo sapiens
gctcagaactgagattcttagagtcgaggtagctgcatttacctaagctgacttgagtgttaaccaccgcctgactcctggctcatgtctagtcccaaagagaagttggacaagaagtttttgctccctgggaggaagccaaccattgagctgtggagcctgggtaggtgtagtagtagagtccttcccagcacatctagtccaaccacttgctttattgtggagactgaaggccagagaggagctgtggcttatcccaagccgtaccatgagccattggcagaatgttggttgtctgttgagggctccccgaggctgctgggaaggttttctcttttcagggttcctccggagtttccactctagatgcataacttctcttcctctctcaattccatccagtggggcgtagccctctgagaagtgaattgtagaggtctttcctctttcactctcctctttccctgtaaaggcaatggatgggtagagcaatcccagggaagagtttccaaggcggaagggaagcagaggctagaccttggacttggtccctcttgtggcttcctgggtaggtccagatgtgtatgcagcgtaccagaaaccacaaggctcatttgcatctgtggtctctgagttggtctcatgactcagtcatcaccccctggattcttacgtatctttggaaatgtggctccaaggcctttcccagccaccctgcagtcctctccctatatctcggtagctgtagttaccagctagatccttctcccgtcctggtggaggtggggctccttgggctctgaaacactgccctttctcccctggatccaaccttctgttgcctgtgttgcattgtcccagctcctctgacttttgcccatgtgtaggtaaggatgggggttgtaggagaaacttcggggtagaaaagccacaggacagttgtgagggaggaagagggtgagaggtccatacataagagatcctggctgggtgtggtgactcatgcctgtaatcccaaccttttgggaggacgaagcaggaggatcacttgagcccaggagttcaagaccagcctatgcaaaatatcaaaacccagtttctataaaacaatacaaaaattagcccagtgtggcagtgtggtgcctgtggtccccgctacttggaaggctgagcgagatcacttggaggttcaggctacagtgagctggaataatgccactgcattccagccagcctgggtgacacaccgagaccctgtctcaaaaaaaaaaaaaaaaaaaagagagagacatcctgttgactttggtgatgggttagccccactggtcctcagagagtcacttctcacccagtctattctccttcccacctataaaatgaaagggggaaacaaatgaaaattgatttagattgtggtttcccaaagcgtggcctttatagaatgttagtccctttaaatgcttcttgaatgaagtattctatgatcaaataagaacaggaaactgcctgtaaatctccctcctggagttggcaaggccctgagaagtgctgtatcgagaatcctgttgaccttgtttaacgaagcacttcctaggctcgtttgcccaggagccccttaacatcccatgaatgagcattctagagggtgaaccctgggaaatgctgacccagcctttctaacactgacatttgaagttctgtgcctttctaaatgtggagcctgtcaccactgtgtgatgatgggtgcctcctgggagttccatgaacccagaacagatgagctaggcaggagagaaccacgcgagagcctactcctgatgccccccagagagggtagcagaaggcagcaaaatctccccatgttgaaagtcacaacatgaaccacttaatgggagtgtaccttgggccaggcacgtgctgagccttttacatgttttctcacttaacccttccaatcatcctttaatgtaggtatttcttattttcacattttcctctatttacttttaattkatattccagca

SEQ ID NO: 57370 - DNA, 763 bp, Homo sapiens
tcgtcctgggccgcaccaacctactaattgccaacgcgcagccctggcactccggcgtctatgtctgccgcgccaacaagccccgcacgcgcgacttcgccactgcagccgctgagctccgtgtgctgggtgaggcgggccgaagggcggagggagcgggttagctggggctggggtgaatagagcagggggaggtggacgggtgggtgtgctgggggcactcaggcgctctcctggaggacgaactcagggaggagtccctagtaaggcggaggtgggacgagggatggggacttggtaactggaggacggagtgcggggcgttgagtctgggatggagcgagaggggtgattaaggcctggagcgggtgattagcggggagttgkgactggggttattgtggggatagtggagtgatctgagtggtactaagaaaactggggggcagggtagatctggtaggtgtgggacatatgggagggcagggaggaaggagatgggtaaatttaggggtggggttagatccgggaggagcaatatttaggggaggctgaggaggcctggggacagttttgggagagaaagagaatggtcgttgtggggctggggtaaatggggagaagaaagggtaggtctgcgctgagccggagtagtttggaaagggtgaatcagggagaggttaaagtgattggaaggggagcgagggagggcggtggggggcaggcttggggtactggggggggggcagagaccttagttgcg

SEQ ID NO: 57371 - DNA, 763 bp, Homo sapiens
tcgtcctgggccgcaccaacctactaattgccaacgcgcagccctggcactccggcgtctatgtctgccgcgccaacaagccccgcacgcgcgacttcgccactgcagccgctgagctccgtgtgctgggtgaggcgggccgaagggcggagggagcgggttagctggggctggggtgaatagagcagggggaggtggacgggtgggtgtgctgggggcactcaggcgctctcctggaggacgaactcagggaggagtccctagtaaggcggaggtgggacgagggatggggacttggtaactggaggacggagtgcggggcgttgagtctgggatggagcgagaggggtgattaaggcctggagcgggtgattagcggggagttgtgactggggttattgtggggatagtggagtgatctgagtggtactaagaaaactggggggcagggtagatctggtaggtgtgggacatatsggagggcagggaggaaggagatgggtaaatttaggggtggggttagatccgggaggagcaatatttaggggaggctgaggaggcctggggacagttttgggagagaaagagaatggtcgttgtggggctggggtaaatggggagaagaaagggtaggtctgcgctgagccggagtagtttggaaagggtgaatcagggagaggttaaagtgattggaaggggagcgagggagggcggtggggggcaggcttggggtactggggggggggcagagaccttagttgcg

SEQ ID NO: 57372 - DNA, 554 bp, Homo sapiens
caggactgctcagttccgagagggaatgtctcaagagcaagtggtctaagagagaagaagcggaagctggcagttctcttacaaagagtaagcctggaactggtcacagcatcattctccagcattctattcactaagctgccagagggcctgcccagattcagggaaagaagaaataaattgcgaattttgatggcactcttgatgcagttatcctgaagccactacatttacactttaaaaaaatccagaatcggccrcgggtggctcacgcctgtaatcccagcactttgggaggccgaggcgggcggatcacaaggtcaggagatagaggccatcctggctaacacggtgaaaccctgtctctactaaaaatacaaaaaaaaaaaaaaaaattagccgggcctggtggcaggcgcctgtagtcccagctactcaggaggctgaggcaggagaatggcgtgaacccgggaggcggagcttccaatgagctgagacactccagcctgggcgacagagcgagactccgtctcaaaaaaaaaaaaaaaaatcca

SEQ ID NO: 57373 - DNA, 824 bp, Homo sapiens
caccttattagagcctcaggacagccctgaaaaatcaacattactgtttccactttacagatggagaaaatgaggcccacagcaattacaggacttgctggaggccttaaagctgtttttggatcataaaatggaccagaatccagctctcctgctgcagccccacgttctttcccggcagcatcctacctgtggcaggtgggaccctttgcctttggccaaccagacctacaacacctgagccctgggaagctccttttctgctcactgaggctcccactgtagggaggaatgacatcaaatagccttttatggctcccataagcacgctaacaaatgtcttgctagcagcagtggctggaagcagattaatgtctctgtggccctaacacttctccagccccctttgcctgtcaggtcattactggctggtttatagtcatgaggcccttttccagttcgctaaatggtttgcatgataaagagacagcagggctaagcattccaagctcctttcctctggtgttgctggcaaggacttaacgcctcgcttcagggcagttaggagcatgggttctggagtaaaaatgacgatgccaccacttactagctgtgtggcctgaagccaaatgcttcactttgctgagcctcagttttctcatcagtaaaatgggagtaataatagtttttaagggttgttgaggatcaagtaagctagttcatgkaaaaataaaaacccctggtattaatatatagttagcagtcagcccatattaactcttattatcattattccttataagctgtgagccccaatagggcag

SEQ ID NO: 57374 - DNA, 1138 bp, Homo sapiens
tgcatgctaagtacatgtttatgttcttcactagtgtttgaattgggtttcatcttattgatttgtaggattaaaaatatattctggatattaatccttatagattgcaggtattgcaaatatcttctcccaaactacagcttgccattttactttgtttagggtgtcaaaaggcctttgctagctctgacatcctgattcacaatgaagcaaaagggaacccatgttagagaggccctctagagcaaggtctttctgcatcccctgaatatatcaggcccctaataaatgtktggtgactgtaacatactcactagagaattctatcagattaggccagcacagatctgggcttacagcaagggctctatggagacttaatgacatggttttgctatgctatgagaaaagttccaatgtccagcagagaaatcagaagcaggatattttcattgcaaaaagagcactggctttatggaaggatttcctgaaggatgcctgtaaagtatgagttgatgtaactcagaattcaactcatgtccagtgttccagacagcagactgggatctccaacaggtggccccaagcctctcgactctcaccattcctgtgagcttacagcagcacagtgatccttcatattttaaagatgggccaagaaaaagtaaatgtcttgccccagatcacattgaagacaggggacagagtgaagccagatctcacagccactgatggctcggagaaaaggtcgggacccagaacagtgggtgttttgaagcaagcagatccctgagctctcagatataggagaatgagctaagccaccttgggaaggagcccattacctagctcaagactatgtttaagtccaaatagctgcgtatgtatccatgaaataaagggaatgagatgaagggcaaaaatgatatttggcaggacctctgaagaggaagaggaacaagagcttctgtgactcaaaggtcacttgcctgggctgaaaggtccttagggcagggacaagggaaggatcttattcatctccatatgcccggaacctagcacagtgtctggcacatggaaagggcttaagaaatgtctgctgaatgagtggatgaatgaataaacagatggatgtatg

SEQ ID NO: 57375 - DNA, 1138 bp, Homo sapiens
tgcatgctaagtacatgtttatgttcttcactagtgtttgaattgggtttcatcttattgatttgtaggattaaaaatatattctggatattaatccttatagattgcaggtattgcaaatatcttctcccaaactacagcttgccattttactttgtttagggtgtcaaaaggcctttgctagctctgacatcctgattcacaatgaagcaaaagggaacccatgttagagaggccctctagagcaaggtctttctgcatcccctgaatatatcaggcccctaataaatgtttggtgactgtaacatactcactagagaattctatcagattaggccagcacagatctgggcttacagcaagggctctatggagacttaatgacatggttttgctatgctatgagaaaagttccaatgtccagcagagaaatcagaagcaggatattttcattgcaaaaagagcactggctttatggaaggatttcctgaaggatgcctgtaaagtatgagttgatgtaactcagaattcaactcatgtccagtgttccagacagcagactgggatctccaacaggtggccccaagcctctcgactctcaccattcctgtgagcttacagcagcacagtgatccttcatattttaaagatgggccaagaaaaagtaaatgtcttgccccagatcacattgaagacaggggacagagtgaagccagatctcacagccactgatggctcggagaaaaggtcgggacccagaacagtgggtgttttgaagcaagcagatccctgagctctcagatataggagaatgagctaagccaccttgggaaggagcccattacctagctcaagactatgtttaagtccaaatagctgcgtatgtatccatgaaataaagggaatgagatgaagggcaaaaatgatatttggcaggacctctgaagaggaagaggaacaagagcttctgtgactcaaaggtcacttgcctgggctgaraggtccttagggcagggacaagggaaggatcttattcatctccatatgcccggaacctagcacagtgtctggcacatggaaagggcttaagaaatgtctgctgaatgagtggatgaatgaataaacagatggatgtatg

SEQ ID NO: 57376 - DNA, 592 bp, Homo sapiens
atgttgatactttggtatggaggaaagagcagggctcaggggagagctggattcttctcctggttttgctatttgaccatgggcatgtcacttccctgcctgcctctgagcctccattttctcctttataaaatcgagggatggttaagggagcgatgccctaaagtcccctcagtggctaaggctttgcatctttgtgatgttagaatctgtttttcactrtttcctctcctttcacaccagggataataagattatagtctttttgcggcactttaatttaacgaggctgttcaagcacatcccataaaaacatgggcggtgtgccaggagaacagtaatgtccccattttacagatgaaaaaactgaggcccaggcaagctaagtccccattgcttcagttacaactactagcagcccaaggtcacacctattatgaaacagataccaggctgaaccccggttctgcctctgagtcctgtgttcttcccaccttataatgcagtttcctagggcagatgatgagaaattgagccaagttcacaaatccaatcacctgggtctcactggcatctgtgccgagcagcacct

SEQ ID NO: 57377 - DNA, 592 bp, Homo sapiens
atgttgatactttggtatggaggaaagagcagggctcaggggagagctggattcttctcctggttttgctatttgaccatgggcatgtcacttccctgcctgcctctgagcctccattttctcctttataaaatcgagggatggttaagggagcgatgccctaaagtcccctcagtggctaaggctttgcatctttgtgatgttagaatctgtttttcactatttcctctcctttcacaccagggataataagattatagtctttttgcggcactttaatttaacgaggctgttcaagcacatcccataaaaacatgggcggtgtgccaggagaacagtaatgtccccrttttacagatgaaaaaactgaggcccaggcaagctaagtccccattgcttcagttacaactactagcagcccaaggtcacacctattatgaaacagataccaggctgaaccccggttctgcctctgagtcctgtgttcttcccaccttataatgcagtttcctagggcagatgatgagaaattgagccaagttcacaaatccaatcacctgggtctcactggcatctgtgccgagcagcacct

SEQ ID NO: 57378 - DNA, 592 bp, Homo sapiens
atgttgatactttggtatggaggaaagagcagggctcaggggagagctggattcttctcctggttttgctatttgaccatgggcatgtcacttccctgcctgcctctgagcctccattttctcctttataaaatcgagggatggttaagggagcgatgccctaaagtcccctcagtggctaaggctttgcatctttgtgatgttagaatctgtttttcactatttcctctcctttcacaccagggataataagattatagtctttttgcggcactttaatttaacgaggctgttcaagcacatcccataaaaacatgggcggtgtgccaggagaacagtaatgtccccattttacagatgaaaaaactgaggcccaggcaagctaagtccccattgcttcagttacaactactagcagcccaaggtcacacctattatgaaacagataccaggctgaaccccggttctgcctctgagtcctgtgttcttcccaccttataatgcagtttcctagggcagatgatgagaaattgagccaagttcacaaatccartcacctgggtctcactggcatctgtgccgagcagcacct

SEQ ID NO: 57379 - DNA, 2573 bp, Homo sapiens
tggcaaggataactcagaaaaactgacatgccacagcaaagaggttatatcattgcctccgaatgcaaaacaaatgtcaagaattgctgagccaaaatgttaaattgtcaaaagaatggttttgctctatgtattttaaccatggagaaaggaaatgcgtcaacaatccctggttgataacattatcttaaactgttaattataagctacaagaaagataagacttttggcagttgatggctaggaagtttattaaaattttgtagtaggcactaaagaatattggctatagttgaattagaataatttcagtccccagtttattctaaaacacctatcatgtgacagttaataaaacatgctaaattgctccccttgcttcttacctccccacccaaagaaacaaacactgtcaacattcagtggaaattgagcttgcctggatccaaagaaaacgtaaacccctttttaaagtcagtggttatcctagaggatggtccttaggcaagcaacagccatatcatctggaaacttgttagaaggtcctagaatcactttggaactgaggccccacaccagattttctgaatcagaatatgtggggatggggctcagcaatctgtagtttaacaagcctttcaggtgattctaatgctaaagtcactgtgtaggtgatatgggagggggacagggaagtgctgggtagagaaggggcgggtccctggcaagggctccaccctggggcctgtgcccatggatctaagtgagaacaggcactctgggttttcgggctcaaatgttgcatttaccaagaccactttggcctgtcatgcccccacatcctgtgcccaagagaccttagcaggcacacatacaagttggctggacctctagaggaggagaacacactgatgacaccagcagacactgacagaccagccatggcggaaccacatggacacagagggcagttcggccggggggcaatcagaggagagtctggctgctgggctgcctgactccaggggaagacagccttcccactccatcccccttctaactccccagtcatgttgctgagagctaactccaccactcaataaaaacttgcactcatcttccaagcccacatgtgatccgatttttccagtacactagggcaagaacccgggatacagaaagccctctgtccttgtaataaggcagaaggtctaattgagctgattaacacaagctgcctgcagacagcaaagctgaaagagcacactgtaacacaggctcacttaggctttgggagttgtaaacactcacccctagatgctgccatggggtcagaaccaaaaaatgctccccacgacctctgcatctgcccgtctgcatgctcccctagggttgagcagtggaggcaccaaacaagtaagccacacccttgtcgcacatcctgtgagggggataagggaactctcccatttcataagattctaaaaccattccgtatgttgaaaactcagctgtaaaacttatccttaaatacccattagaaaggtacaaaaatgtagttcaatagtccaccttaaaatatgcccagcatagtcaatttttcctctagtattgaagaaaaaagtttctgcctctttgggcactggatgatgcatttgacttggggccatgttttatgaaaaatatatatatttaaacacaatttaatgtagtaagatgcatagactatgagactatggggaaattgacaataacaaacagactaggacattagcatttcccatcatgtttgttttagggaatatatttattgaatagcctcatgggaagaattcactacacaattcaaaatattttctttctctttctttccytttttaaactgagtgtgtgtactttaatccaaatatgtgaattgcccatgtggtaaactatttgggccatattatttcagtatgtgttgtgttagaataaaatctcttgttaagaactattaaaacaaattaaatttagcagagtttatttgagcaaggatagtttcatgaactgggcagcctcagaacaaaaagagattcagagagctccacccagcaacatgggcaggacagtatttatagacagcaaaaggaagtgatgtacagaaatagcttgattggctacagatgggcatttgcatttattggacatggtgtgatgaggcatttgctttctgtgaacatggtctgatcagttggcagcctgtgattggctgaagcttggctactgtaattgagactcagctatttgttacaagaatatagtcttattaaggttgcagtttctttacatactaagttagtttgcagtttactctgtagggattcaaagtacaaaggcagccttaggacaaatttaatttaatttaacaaaataaatccataattttttaaacacttgagatccagggaattttgtgttattctcagttcgagcaatgtgattgttctatgtgattatggatgacactaagcctgttttctcatttttcttcttctacacatggattttaagaaattggagattattgcagggtg

SEQ ID NO: 57380 - DNA, 1201 bp, Homo sapiens
tgcatatttgggactcaaaattcacttttcatggttggaaatgagatttcttttgacatctataattacgggataggattcttatgaaaagttaaaacatgaataacttctcagggaaaaacagagtaatttggtttttgtcttctaccgtcgctgttcagaggtaagtaacagtagaagtcattttagttatttgctcttcattagtcttagatataccaaccccaatgcacatagtaacataaactgatatgtttaacagcactgttatgctttaataatcaaaagcatttttaaaaattttcatctaactttctgagctaattgtataaagcttattttatttatattggtgaccttaatctattattttcttgaaggaacgctacattaatatcttctgttctgtggtagaataatgtatttgtactatttacaagaaaatccaataccagtttgcttctcagtttgctcttactaattggcaaaattagaattatgtggctcaaaggagctatctccctagcctttgttataataaagtgagaaatttgccaactaacttcagccatttggctctatacttacttctgtcagcgaagaaaataaatgttcccagtatataacccctccctctgcaatggttaataagaagtttgaagctgaaatgctgcctgagattttacaaggctaaaactctcaggawacttcagaaagtaagataaataggagcatataaattttgtttacataactagtgaaataaggacccttggagataaatgcacacacacggctttcttttgctttctcccttcctcccttccctcctttcaattttttttttttttttttttttggaaatttctcaagaaacaatcaaaggattacacataaaaagttgttgcttagtaatggtttttaggattcttttttttcccctgaatttctatggaatcctcttacttgttctaagatacaagtaatgattagtcgagtagctactggctttagaaaactttgaatactaaatggtctgttttggaattttaaaaatctgtagtgatttctccatcatttgaagcgttaaagaatccatctggggatttgcattagagtgcagagatggggagcaaagaatttaaagacgcacaaaaaccagaaatgaatttttgtattccaagaaaataatgctattaaa

SEQ ID NO: 57381 - DNA, 1201 bp, Homo sapiens
tgcatatttgggactcaaaattcacttttcatggttggaaatgagatttcttttgacatctataattacgggataggattcttatgaaaagttaaaacatgaataacttctcagggaaaaacagagtaatttggtttttgtcttctaccgtcgctgttcagaggtaagtaacagtagaagtcattttagttatttgctcttcattagtcttagatataccaaccccaatgcacatagtaacataaactgatatgtttaacagcactgttatgctttaataatcaaaagcatttttaaaaattttcatctaactttctgagctaattgtataaagcttattttatttatattggtgaccttaatctattattttcttgaaggaacgctacattaatatcttctgttctgtggtagaataatgtatttgtactatttacaagaaaatccaataccagtttgcttctcagtttgctcttactaattggcaaaattagaattatgtggctcaaaggagctatctccctagcctttgttataataaagtgagaaatttgccaactaacttcagccatttggctctatacttacttctgtcagcgaagaaaataaatgttcccagtatataacccctccctctgcaatggttaataagaagtttgaagctgaaatgctgcctgagattttacaaggctaaaactctcaggatacttcagaaagtaagataaataggagcatataaattttgtttacataactagtgaaataaggacccttggagataaatgcacacacacggctttcttttgctttctcccttcctcccttccctcctttcaattttttttttttttttttttttggaaatttctcaagaaacaatcaaaggattacacataaaaagttgttgcttagtaatggtttttaggattcttttttttcccctgaatttctatggaatcctcttacttgttctaagatacaagtaatgattagtcgagtagctactggctttagaaaactttgaatactaaatggtctgttttggaattttaaaaatctgtagtgatttctccatcatttgaagcgttaaagaatccatctggggatttgcattagagtgcagagatggggagcaaagaatttaaagacgcacaaaaaccaraaatgaatttttgtattccaagaaaataatgctattaaa

SEQ ID NO: 57382 - DNA, 611 bp, Homo sapiens
tggagcattccaaacccatccccaagaaggggagactggagaaaagtcctgagatcttgtctcaaatccagacagcactgcagagtgacctgcattgggtccagatggcaaagagacccaaatggcaccacagatgacctatactaggtccagataactagaaagtgcagatggctaagatggaggatttcccagtacactctggttaatttatccaacccttgaattstgttgacctccaagatgccacttccctttcactaactgagtgttacagcagctgatgccacaaagggaagggaaggaaaaatccttcagacaagggtggtctccctagctgctgggaattccttaaggtcccagctgcagggtcagctagccatgagcagctggcgtttgcaagtggctcctgcgttggcctggtagcctgagtgggtgagccttggcctgctcccacagccaattgctccacttgttggaaaccaggcgtacaggctgagcccctcaaaacacacagttcctcacacagggcaccacatttgtaactgactcaagtccggctcttcacaacacagaggccaaaaacatgagaagtgaggtgtggtggaagg

SEQ ID NO: 57383 - DNA, 790 bp, Homo sapiens
aggggatactactagatcttagaatctggggctagaagaagaggctttacggcaggatgtagagacacagtagctggcagaaatgtcacagggagcaaaggagtgagggaaggaacattctgttttcttctttcctctgaccctctaatctcttgccagggcttccactggctgaacctaacaggaagccagctggcaagtaagtctgagaaagagcaaaagtttctttgagattcagagcagactagggggacaggagcggaagggacatgagagcaaatggcaaatgactgacagagtagatgagaaatcagaggagacacggatctgaatattgaaacaataaaactcatttagaaattttaagtgacacaggtggctaaatattccatcttaatccaagagatgacaatggaagtagggtgtttgccttaaagaggcataattgcaaaggaagcagctcagaaatttccacagagaacttcatgcaagcattattttgtgtgctccagtaaagatagtaataacagctacattagttgagtgtctagtgtacaatatatgttttacagggcactttggatgaactagtctaaatcatacttcaggatagcattgtaaccacacttaacagctgccaaccaaaactaaagtgcagaaaacttgagtgaactgcccaaggtaagacaaccaataaaaaggaaaaatagtatctraagtccaatcttacaccaaatcctccgttcatggcattaaaccaccatgtctcagtgaactataattgtcacag

SEQ ID NO: 57384 - DNA, 433 bp, Homo sapiens
taaaagaagtagatgatatggtgaaattaagctgcattcattggggcaactatctgtgaaggatcaggtggtgagccagaggaggaagaggagacttcatcccaccatgcaggcttracacctgtgcaagagagagtgaggaaggagcacagtacaggaagagtctcagtctagagactctataatagctcaaagaaagtgttgactaggctgatggacgtcatcaagccagaggcactttggttaaaagaatgctgtgtctcacagagtaggcctacattagtattttcatcttgcttagtcattggctgagagtggcccatagaaggtggagccttggcatgaatgtggggaaaaaattcaaaagggaagcttctgggggctatcaattatattccccatagcaagagctctgagcagcatgttttcaagg

SEQ ID NO: 57385 - DNA, 693 bp, Homo sapiens
atcccactctctcaggtgtggtggaattaaaattaaatgacaatcagtaatctaaaatgatcatattctcagtgttgactttatcattcagccgacgcctataacccagggatggatgaggcattgtggaggaagagtttatttcttctttctgaaggctccatcagctggagtttttgccctatgacatggagaggagactttgcttcaagctaagttaggactgagcacagtggctcacccatgttatcctagaacactggggaggctaaggcaggaggatcacttgagcccaggagttcaagaccagcctgggaagcagtgagatgtattctgttcaatttttttttttwaattagatggtcattttggggctttcctgtagtcttggctactctggagactgaggcagcaggatcacttgaacccaggagctcaaggcggcagtgaactatgatcaactcactgcactacaacctgggtgagagagcaagtccctatctctaaaaaaagagaaagtgacctgagttgggacaggacatttggactttttcattaaaattgtatttcaaatgttgtaaaacttcataatcagcattttacccttttagaaagtagaatctgctcaattacagaaaatataaaaaatgtagtgaagcagaaagatggaaaacacctgtgtccccactggga

SEQ ID NO: 57386 - DNA, 576 bp, Homo sapiens
ctagggagcaagtgcatgtgggagtaccagcaggggccggtggcagagacaggattgagcagtracaagagactggtgcgagtgcagatgagtgatctgggctgagagtggtgagatgaggccagaatggccagaggggccccgtgttgaggggctaataggaaatggagagaggaagggaagaggctggagtgtctctgggatgtggtggtgaggatgggctctaattcccattcgaaaggttcactctgcctgttgtgtgggtgatggacagctgcatgagatgcagcaggcagcccagctggaaggcccgtcggatttactatcctagagagaatggctctggggaggaggcagtagacgagtgtgaagtgattggttttggggttaatacatttttcagatggtctcagcagttatttaatagagaaccattcatttatttccacagttgattccagatggcttactacaacaaaccaaataataaatatacatgcattatttaaaaaccaacaaggcctggcgcagtggctcatgcctgtaatcccagcactttgggaggccgaggcgggc

SEQ ID NO: 57387 - DNA, 484 bp, Homo sapiens
caagttatggaagagtaaatgaataagataacattaaggttttgttgttttagtgagaggctggaaggccaccaggggcagttagctgtcagtaaggcagcagaagggctggggtcgctacataaggaaaatcagtactagggytgtaaactcaaatgactacagggccagcaaataataaaaaggagggctgcagggctgggtgggaactgtggcggctgctcagctcttcttacagtgctggcactgtgttgccagattgtctgctttgtcagaggacaaaattctgactttttatgtaaaatataattttaaaatgctgatattctgttcaaataacttaaaaacccaaaacaggcaaaagaggatgccagtttgcaatccctgaagtagagagagctcgtgctggggaaaagtctgccaaaatgctttaaggtggaatgtgtaaaagttctgtttcccagagtcgggctgggccagggga

SEQ ID NO: 57388 - DNA, 572 bp, Homo sapiens
atggtagaatgcttcattttcctctgggaatgaattagtattaattgaatactaattcaattaattagtattttcaatacttactaktattgaatactagtaattagtattgatagtaattagtattgaatggaaaagcaagtattaacaggatactaccagtaataacagaataattgccatgaggtaaaactgcatttctatgtatcaagttttttattatctacagtgatgatcttgtaaatgtgaaaaataaaaatattcactttctcatttgcatattccacaaaagcaaccacttcaaccctttcagttattttttctaataccctctctcctatttctcaatattattattacattattttatattttttgtttttacacattatttattgcctcctcttatactatttgggaatgcagatctctcagacaagatttatccttggttaaatcagtcttcagtatttacattgccataactttgctatctgctgagccaagcaatgtaccatagttaacttttacaaattattatcgcatttattttacaacttactatttttaaa

SEQ ID NO: 57389 - DNA, 710 bp, Homo sapiens
cctcattccactccattctccctactacagtgcagcgtcagccagttcagatccctcccatgtcttccagcacacttgaagcagaatctgccctcccttccagggtgcacaaaggcctactgtgtgtcacrtccattcgtgccaatattgcacatccattcacctttaaatgttgttgggctgagggtacgactgggaaaggagaaaataaagatctaattttgattaggcgattcatgttcacacaatcatttgaactgaaaatgcccatctgaatgcccacacagacgtcatctatatgaattggtataatcagcacatgagaataaaagtccttgcctgcactttcctcttttcctttataacagcagtgctcgcacattcaattccggcacggtcacctctgactcgctcgtcactgccgcttgccatcacaggtgtttcctggtcagtcactgtccactggctgcatcccatggtgcaagctcattctggaaccttgtctttgagctgcttcctctcgttctatcttctgcagataccactcctctgtggtctggggattttctctgccaagaacatcatgcagtttgggggtgcagttcccatttgtctcttgacaaagggaaacacaagtggattgaaagcaaaaacataagggctctttccccgaagccattcctgaatcctgaaactgaaagaggggatcc

SEQ ID NO: 57390 - DNA, 710 bp, Homo sapiens
cctcattccactccattctccctactacagtgcagcgtcagccagttcagatccctcccatgtcttccagcacacttgaagcagaatctgccctcccttccagggtgcacaaaggcctactgtgtgtcacgtccattcgtgccaatattgcacatccattcacctttaaatgttgttgggctgagggtacgactgggaaaggagaaaataaagatctaattktgattaggcgattcatgttcacacaatcatttgaactgaaaatgcccatctgaatgcccacacagacgtcatctatatgaattggtataatcagcacatgagaataaaagtccttgcctgcactttcctcttttcctttataacagcagtgctcgcacattcaattccggcacggtcacctctgactcgctcgtcactgccgcttgccatcacaggtgtttcctggtcagtcactgtccactggctgcatcccatggtgcaagctcattctggaaccttgtctttgagctgcttcctctcgttctatcttctgcagataccactcctctgtggtctggggattttctctgccaagaacatcatgcagtttgggggtgcagttcccatttgtctcttgacaaagggaaacacaagtggattgaaagcaaaaacataagggctctttccccgaagccattcctgaatcctgaaactgaaagaggggatcc

SEQ ID NO: 57391 - DNA, 710 bp, Homo sapiens
cctcattccactccattctccctactacagtgcagcgtcagccagttcagatccctcccatgtcttccagcacacttgaagcagaatctgccctcccttccagggtgcacaaaggcctactgtgtgtcacgtccattcgtgccaatattgcacatccattcacctttaaatgttgttgggctgagggtacgactgggaaaggagaaaataaagatctaattttgattaggcrattcatgttcacacaatcatttgaactgaaaatgcccatctgaatgcccacacagacgtcatctatatgaattggtataatcagcacatgagaataaaagtccttgcctgcactttcctcttttcctttataacagcagtgctcgcacattcaattccggcacggtcacctctgactcgctcgtcactgccgcttgccatcacaggtgtttcctggtcagtcactgtccactggctgcatcccatggtgcaagctcattctggaaccttgtctttgagctgcttcctctcgttctatcttctgcagataccactcctctgtggtctggggattttctctgccaagaacatcatgcagtttgggggtgcagttcccatttgtctcttgacaaagggaaacacaagtggattgaaagcaaaaacataagggctctttccccgaagccattcctgaatcctgaaactgaaagaggggatcc

SEQ ID NO: 57392 - DNA, 763 bp, Homo sapiens
aggagaaaagtgtgttcacctgtgtgggactcagcaaacatttgacctctcggggcctcactttccttctacctgaatcatctcacaggtgactgaawtagattaatgcagcaaatatctatactgatcacctaccttctatcagtgcccctatgccccaaggcatgggtccttcatacaattcttttaaaataaattattacaaattgatatcaaattattatttggagacagggtcttgctctgttgcccatgctggagtgcagtggcatgatcataccttattgcagccttgacctcctgggctcaagcgatccttccacctcagcctcccaggtagctgggactacaggcacatggcaccacgcctggctaattttttggattttttttttagtagagatgaggtcttgctatgttgctcatgctggtctcaagatcctgggttcaagcaatctgctctcacaaagtgctgagattacaggtttgagccaccatgcccagccaattagataaaattattataaaataaattaattttataataaatgacaaccattcaaaataaaccctgaagatcctttacccaattcactaagttacattgtatatgacagattatagtatcaaacggcaagtctcagggccatacactaagccttatcgggaactgaaagtgatccatctccaagattttgaacacagaagttcccctgcttggccacagcgcccctcttcccttgtccttttccccttcctggag

SEQ ID NO: 57393 - DNA, 763 bp, Homo sapiens
aggagaaaagtgtgttcacctgtgtgggactcagcaaacatttgacctctcggggcctcactttccttctacctgaatcatctcacaggtgactgaaatagattaatgcagcaaatatctatactgatcacctaccttctatcagtgcccctrtgccccaaggcatgggtccttcatacaattcttttaaaataaattattacaaattgatatcaaattattatttggagacagggtcttgctctgttgcccatgctggagtgcagtggcatgatcataccttattgcagccttgacctcctgggctcaagcgatccttccacctcagcctcccaggtagctgggactacaggcacatggcaccacgcctggctaattttttggattttttttttagtagagatgaggtcttgctatgttgctcatgctggtctcaagatcctgggttcaagcaatctgctctcacaaagtgctgagattacaggtttgagccaccatgcccagccaattagataaaattattataaaataaattaattttataataaatgacaaccattcaaaataaaccctgaagatcctttacccaattcactaagttacattgtatatgacagattatagtatcaaacggcaagtctcagggccatacactaagccttatcgggaactgaaagtgatccatctccaagattttgaacacagaagttcccctgcttggccacagcgcccctcttcccttgtccttttccccttcctggag

SEQ ID NO: 57394 - DNA, 846 bp, Homo sapiens
aaaatatgtcactatgtttatgaaagcatagaccgcctgagctgtaacaggtacagagttctggaaatatgaattcttcctttcacacactattaagatgtcctgcaggagtcgaatcgttttaatgtttctgttctggatgaaataagccacatttacgcagctacaatctctagctaacacagatgagtaataagttttaggccgaaatgattgtgatgtgatgctttcaagtgaggaagtgccgtccagagtcactggctctcagaattggagggaaattcatgcagtggggaagctcacagaggatctcgctaaagactgagttaaatggcctggaactcaacttacaagcaggttaaaaaataacaaccttccttccttgtctagctcctttaagtgaagtattttctatcttggaggcctcttttgaaatgcaatactcctgagagtggtcacaccttaagttatcagctaacactttccgagggattagcagacagccggcagagaaaaagaaatgggatttaggcaaaatgcctgagggctggaggggagacactgcctggagaaaggttaactagtctgttgatttgctgatagacaaatttcacgtactccagagcatttggtctacagtggagactcccaaattctggattctataacaccaccaaaaagmctacaatttcccagattatcttgcaagcaacttaagtctgcatggaatacaaacaaaataaacccactattggcctttgtataattgaaaattattaactttacttagaacatattcaaattatttctgaggattgtttatatacatgagatcagactttttaa

SEQ ID NO: 57395 - DNA, 1445 bp, Homo sapiens
tgaggcagaagaatcgcttgaacctgagagatggaggttgcagtgagctgagatcatgccactgcattccagcctgggcaacagagtgagactccatctcaaaaaaaaaaatattttgtagagatggggtttcttttgttgcccaggctggtcttgaactcctggcctcaagcgatcctgcccaccatggcctcttaaagtgctcggattacagacgtgagccactgtgcctaataatgcttttcaaatgtcaacatgcacacaaatctctctggcgatctcgttaaaatgcagagtctgattcaggaggttgggtggagattgagagcctcatttctaaccagctcctgggtgatgctgatgttgggctggggcacgcatttcggacagtgaggggtgggtgatgtgaagcagacagtagacaggaaatgcatgttgagaagaggagctaaatcttgaaagtcagtggccctcaccttattcgttcttcctcaagctctgccttacccagggggcacagtaatacgccttacaagtcgtgaggtggaacaggaggatggactcacagacatggcaggaagggagctgggaaccagaactgtgctgggctctgaggctggagtgctgagggcctccgccctgactaggggtgtctggtggaggatccagcacagacccactggctggaaggatccctgtaaaatccctgaaagagaggaggagcctcaccccaaatgaatgcctcttctctaggcctctctgcagccacccatgcatgccagaggtccatgcaagatttgccttctggagcttggggagaagtaaccagaagtcatgtaaacatcatggtcttgattctttcccttcctgctgatcctgtctcactccagtgtggccctcaatgactttccttctccttttctgcaaatgtacctgacggcttgccagacagaatttccatgcttggttagaaaggacgatgcagctgagatgtgagatatttattgcctctcgactggagtttgtgtgacaccgcacctttcatccgcacgtttgtctcccatctcataaaggtcagagttctcatctgtgcaccgctctcttgcttgacaccccttccccaggtgccctcatccccccatgacttcarctccctcatctacatcctcaactttgacttccaccctcacatccactgctgcctgcgcggcaactcccagggctgtgccatggatgccccatgcctagcttctcaaacagaaggtctcaccctgccatggcctgctcctcctgctgaatctaagccccactcagccattgcagccaaacatactctgcctcttccgaacaagacctgggctggcatctcacaagatcgcatggcctgagtccatctgcatgccgatggcactcaaatccactctgcatctccacatgcctagcct

SEQ ID NO: 57396 - DNA, 551 bp, Homo sapiens
tgatgtcctatggcaagcctagaaaacccctctaaatgtatatgattttcatgtatttattaagtagtccaaggtttgaaagtgtgttattttaacagaggtgttctacttaattggccaggaaggcaaataactatggtgggcatttcagtcatgcagcactataagtcagcaaggaggaaaggaagaaagtttgcctccktttccaggtataattaacaataccataactcaacagcctgagactcctagttggttgtttttctcaatcttaaactaaacttggcagctaactcactcaggacaagaaaagtacaattattaaaagataaaagcatccatatgcaaattattcagctacttgatctcttgaagcatttactagatatttgtccaaatacatttttaaatatttcacattgccctaaaatttttctcagaagcattcatgtatttgtaaaatgtttggaatcaagtatgctaatatatatttaattcaagaatgaatgttttaaaggatgaatgtctactgaaattgcttttataaataa

SEQ ID NO: 57397 - DNA, 529 bp, Homo sapiens
ataataaaaacaataatagtaaaaaaaaaaaaaaaaaaaaaaaagagagagagagagagaccaggcacggtggctcatgctggtggctcatgcctggaatcccagcattttaggaggctgaggaggggggaycatgtgatcaagagttcgagacccgcctgctggccaacatggtgaaagcctgtctctactaaaaacacaaaaattgactgggcgtgggggtagagtgagcacctgtaatcccagctacttgggaagctgaagcggaagaatcgcttgaacccggggtgcggaggttgcagtgagccgagatgaccgcattgcactccagcctaggtaacagagtgagactctgtctcaaaaaaaaaaaaaaaaaaaaagagaaagagagagagaaagaagagacagaatgttccaaagaatacatatagactctggttaggagcctgtatggctacacctgagtgtggtgagtgagaacccttcagccaacttaaggtcttgagacagagtcgtttccagaaatggg

SEQ ID NO: 57398 - DNA, 529 bp, Homo sapiens
ataataaaaacaataatagtaaaaaaaaaaaaaaaaaaaaaaaagagagagagagagagaccaggcacggtggctcatgctggtggctcatgcctggaatcccagcattttaggaggctgaggaggggggatcatgtgatcaagagttcgagacccgcctgctggccaacatggtgaaagcctgtctctactaaaaacacaaaaattgactgggcgtgggggtagagtgagcacctgtaatcccagctacttgggaagctgaagcrgaagaatcgcttgaacccggggtgcggaggttgcagtgagccgagatgaccgcattgcactccagcctaggtaacagagtgagactctgtctcaaaaaaaaaaaaaaaaaaaaagagaaagagagagagaaagaagagacagaatgttccaaagaatacatatagactctggttaggagcctgtatggctacacctgagtgtggtgagtgagaacccttcagccaacttaaggtcttgagacagagtcgtttccagaaatggg

SEQ ID NO: 57399 - DNA, 1425 bp, Homo sapiens
tttttttttttttttttgtcagattttggcttgttttggtagctgaagcagctcagaaacgaagagtttttggagatttaaggagctcctcaaataagaacctttgaaattggaactcaagtgaatcacctggactgagcttccaaagaagatgtagcaaagctgttggacaaacattatccatgaaaacaggcatgggaggtgacactgaacctatttcttcagatcaataggaaagatctctggatgaagcctcaggaagagataagaaataagctaaacccatatagaaagcatatgaaagaaaaatttcaacttgtatgggaaaaggaaacctgtcttcatgtccctgagcatttctacaaagaaaccatgaaaaatgagtcaaagtattgaatgatgcatatactgctgaggctagactattcactgtggtcctggagggttctgatgaaattggaaaaacagcccttytaagaaaagtgatgggccaggcgcagtggctcacgcctgtaatcccagcactttgggaggccaaggcgggcggatcacctgaggtcaggagttcaagaccagcctggccaacagggtgaaaccccgtctccactaaaaatacaaaaattagctgggcgtgctggtgcatgcctatatttccaactacttgggaggctgaggcaggagaatcactcgaacctgggaggtggaggttgcactgagctgagatcgcaccactgcactgcagcctgggcgacaaaacaagactcagtctcaaaaaaaaaaaaaaaaaaaaaaaaaaagaaaaaaaaagtgatgttggactgggcagagggaaacttatggaaggatagatttacatttgtttttttccttaatgtctatgaaacgaacggtatcacagagaccagcttactggagctcctctctagggactggcctgagtctccagagaacatcaaagacatttttttccccagccagagcaaattctgttcatcatggatggctttgagcaactgaagtttgacttggaacttaaggctgacttgtgtgatgactggaggcagcagcagccaacacaaattatcctgagcagtttgttgcaaaaaaagatgattccagaatcctctctgcttattgcattaggaaaagtgggtatgcaaaaaaactattttatgttgtagcatccaaaactcataaagctcccaggattcactgaacttgaaaggaagctgtatttctcctacttcttcagcgagaagaataaagccttgaaggccttccattttgtgagagatactggacagcggtttatcttgtgccataatccctttatatgctggttggtctgtacttgtatgaaatggcagctagaaaggggagaagaccttgaaataaactcccaaaacaccttcattcatttgttaa

SEQ ID NO: 57400 - DNA, 1425 bp, Homo sapiens
tttttttttttttttttgtcagattttggcttgttttggtagctgaagcagctcagaaacgaagagtttttggagatttaaggagctcctcaaataagaacctttgaaattggaactcaagtgaatcacctggactgagcttccaaagaagatgtagcaaagctgttggacaaacattatccatgaaaacaggcatgggaggtgacactgaacctatttcttcagatcaataggaaagatctctggatgaagcctcaggaagagataagaaataagctaaacccatatagaaagcatatgaaagaaaaatttcaacttgtatgggaaaaggaaacctgtcttcatgtccctgagcatttctacaaagaaaccatgaaaaatgagtcaaagtattgaatgatgcatatactgctgaggctagactattcactgtggtcctggagggttctgatgaaattggaaaaacagcccttttaagaaaagtgatgggccaggcgcagtggctcacgcctgtaatcccagcactttgggaggccaaggcrggcggatcacctgaggtcaggagttcaagaccagcctggccaacagggtgaaaccccgtctccactaaaaatacaaaaattagctgggcgtgctggtgcatgcctatatttccaactacttgggaggctgaggcaggagaatcactcgaacctgggaggtggaggttgcactgagctgagatcgcaccactgcactgcagcctgggcgacaaaacaagactcagtctcaaaaaaaaaaaaaaaaaaaaaaaaaaagaaaaaaaaagtgatgttggactgggcagagggaaacttatggaaggatagatttacatttgtttttttccttaatgtctatgaaacgaacggtatcacagagaccagcttactggagctcctctctagggactggcctgagtctccagagaacatcaaagacatttttttccccagccagagcaaattctgttcatcatggatggctttgagcaactgaagtttgacttggaacttaaggctgacttgtgtgatgactggaggcagcagcagccaacacaaattatcctgagcagtttgttgcaaaaaaagatgattccagaatcctctctgcttattgcattaggaaaagtgggtatgcaaaaaaactattttatgttgtagcatccaaaactcataaagctcccaggattcactgaacttgaaaggaagctgtatttctcctacttcttcagcgagaagaataaagccttgaaggccttccattttgtgagagatactggacagcggtttatcttgtgccataatccctttatatgctggttggtctgtacttgtatgaaatggcagctagaaaggggagaagaccttgaaataaactcccaaaacaccttcattcatttgttaa

SEQ ID NO: 57401 - DNA, 582 bp, Homo sapiens
tgtcttttgccttttgtgtgggaaaacacagacccaaactgattcccagaatcctccacttgaattaatatactccagttacacaccgtaactttcttgataaagtatactttattgacaaccttccattttckgtctcacttctcattccctactgttgtttcattgatcacttcccaaatattgtcttcgaatctttgttttaaggtcttctgagtataccaacaaacacagattagaaataaagctttaatcaatgtcatataccatggaaaagttgaactctattcactatgaaagtataaaagaatttaaaatgtgagtgtctttgggaggaggtgaatttgggggttgaaagttgaatagagtaaaaatataaaccctggagagaaaaagaacacctaggaattcactgcaattgaataaaagtatggtggtgaggatctgaaccagagtaaagtagtaaaagtaaagaagtgcaaaattagaaaagaaataaaaacagctaataggaaataaccaataagacttagtggtaggttaatagggttaagggtttggcaacagtggtctttcatacac

SEQ ID NO: 57402 - DNA, 891 bp, Homo sapiens
  misc_feature (1)...(891): n = A,T,C or G
cacasannnnnnnnnnnnnnnnnnnnnnnnnnnnnnnnnnnnnnnnnnnnnnnnnnnnnnnnnnnnnnnnnnnnnnnnnnnnnnnnnnnnnnnnnnnnnnnnnnnntcagaaagtattgtgtttgtgtacttatggagtcgttgtgaaatttgcctcactgatgcaggtttggatgagacagtgcctgacccctaggaaacagtggaaaatttgtcagtaaactcttattttttgagataaacatggattcatcttcctgaaagatgccctgggatgttaaatgttctcaggttctggaatggtgggtgttgacaccagtaacaatatccattaggatgtgtaaggattatgatgtatattatttcattagcaaagcatttgaaatttccagggtcatatcaattgtgaagaacagaaatttataggatagaatacttaattgggccttacattgactgctaaagaaacaatatattttttattgtgaatataacagttttcatgcaggaatatttgaaaaatacccaaaacaaacaaataaacaaacaaaaatggccaggcatggtggctcacgcctgtaatcccagcactttgggaggccgaggtcagtggatcacctgagatcaggagttcgagaccagcctgaccaacatggtgaaaccacatctctactaaaaatacaaagttaactgagtgtggtggcatatgcttgtaattccagctacttgggaggctgagaaaggagaattgcttgaccccaggaggcagaggttgcagtgagccacgatcatgccattgcactccagcttgggcaacaagagcaaaactctgtctcaaaaaaaaaagcccagcttatcattttgataagtgatcatccacatacaaatgca

SEQ ID NO: 57403 - DNA, 1243 bp, Homo sapiens
ataggcagactcttattgtcaaggaacagatccttatacttaaacattgcttagaatcttcgtaggcacttcataaatgtttgcagaatcccatataactcacgaatgaatgagtgacctgcaactgctgatggatttgaaatagagtccagatttttaatgcatctataaatgtaactttcctaacttgattctgtgagaagtctagaggcacctaatttaagagaagaaaatgatatgtttataatcattaaacatcttgctctgggtatttatttaaattaataaaaattcataaacctagctaacctgcgacagttttaagggaatatgtgcaatacaaagtgtaggtagaatagagtagtatgattacgtttacttttagagtatgtattttatttggcatcatgtatttattggtgtgcctaacattctcagtgaactgggtatacacatcatacattcaaaggggcagaatgttctctcttaaaaaaaaatcattttaaagtcttttgattaccaaatgcccactttttaatgtaaaactactcaagatgttttgaagggactgggaataaatatcaactaaattaatcattacaatcagggaaaatcagttagaaagggccttagagatcctctaagctctctcacttttctctcactgctttttataagcagtgtatttttattactttgttagccgttggcagagaatgaacattgagtatctttggacaatttcttcttaatggctggtgcctattttgtcctataaaatcatgtggaaatgttggtacttttggcaatatcttactccttgagggcacttaatggtcttcattctccccaaagcttctctcactcccaggtaataagctgaactctaacagagatacagttactctttcaatccagtagagaccacttgatttaccactctactgcacaaaatggtaccctggtggcttgaaagagacaatggggagaatgtggctcattaaatagtaattgatgctgctgctactactaatgttagtattgctgctaaaataactgtgttgcttctattctgcttcttctatgtgattgagaattagcatagttcattcccatggaaggtcaattgacaggctagcccagaagcattgrgtagccaaactgattggtgagacaatcaagatttcaagatctcatatgatccacattgccagaaccacattctacctccttaatccacaaa

SEQ ID NO: 57404 - DNA, 2898 bp, Homo sapiens
aactcatttaatacaacatgatgaaatagtctcattttactgagggattaaaaataataaactgatggctgagtatgttggctcacacctgtaatctcagcactttgggaggccgaggtgggcagatcacaaggtcaggagttcgagaccagcctgaccaacatgatgaaaccccatctctactaaacatacaaaaattagctgggtatcgtggcaggtatctgtaatcccaaatgctcaggaggctgaggcatgagaaccacttgaacccaggagggtggagttgcagtgagccgagcttgtgccactgcactccagcctacatgacagagtgagaccctgtctcaaaataataataataatgaactgagactcagaaaagatgtttgttcagggttacaaagctcagacaggacagggcagcattggaaaccaaaattggtctgactcctaggctcatgctgtaaatcacggtgcaaggcttctactatctatgtttttcctaaaagaatgtataaatgaaaagatggttaacatattaagcaaaatatgttaaacgtcaaatgaactgtataaacgataaatgctggagagttgaggtggcaaagaactcatgcccgaggtgatctgggaaggcctcttgaacaaggtggaattatagctggtttttgaagaatccgaaagtgcttagattgaaaggtgagacatgtacaggaatggtttctaagatgtcatattttatctctgtcctcatcttgactggcactaatgaacatcaaagatttcaacctaaatacattgagtgcccagtatgtgaagggccttatttatgttgttttaaagctttttaacatactttaaagaagggactggttaatctccactgtctagatccattagacccggagccggatggccccaggggcctttgggaatggcgtggtgggacagtctccacttttgcacatacccaagaaaagaatggtcctttgggaattttgcagacctacaatctggagataatgtacttctgatcataattcaagtgcccccagatatagggttgccagatttagcaaataaaaatataaaatgctcagttaaatttgaatttcagataaacaatgaattatctttcagtacaagtatgtttcaaatattccatgggacatacttataacttttaaaaacttatttgttatttatctgaaattcaaatttgactgggcttttacattttatttggcaacctacccagtcaggaattggagggaaaattttgagatttgaattttttggcatacataaatactcttctatgtgaagacctcaaataaactaaaaaacaaaaagaaaaagtgtcagtattatacattcccataaaatatgctccattttaaaatgagaccaatggggcaggaagttacctcacaaaagtaattttgtggaaataatataaaaatctctgagtttttatactttatttattcaagaaattctggccttaaaatagtagtcagttgacccaagtaagtcacttgctctgcatcaagataaaaatgcatttcatgctgtgtacgctgaggataaaaaaagacatgctgaaaactggatttccaagtagtgcccctattaaagatgacaattaagtggggttcaccgaggatgcatggtgccttaggattgaattataagaatgatgattgtttttggagttggagtcaaatatcagcctttaaaccaagtcaaagccagggttacagctgcgttacagctgccttctgtcactgacactgctgtggaaaaattcaaaaggcacaccaaacgttttttctagtgcatttttcaaagcaacttggaattagtacaagtacctcgacgcagaaagcaaatgtatttacctatgtaatatcaagcttgcctggaatcatttagtaggaaaaagtattctgcagagaaatgtactttgagagaatgcaaagcatgaaaggtaaattggagtcttgaaggggggattttaaatcacatttagacataaatcctttcaggtcatgattcccatagattaccagcatctgctaagcctagatagttcataatcactaaaattgtcgtaatcttcctatggaaggtttaccaaagaagtactgaattacactgggttaatacttttaaggatgaatggtcaagacgatgatgctaaattaatgcagtggctacatagtaaaatctaatactaataacatatctgaacgaagctgtggtttcaaaaggcgttcactccatcagggtaatgtattctcaggtatatgatcaactagaaagttgccaaccattattcaccttcacctactcctacaagcttctctgtcctgtcttattcttttctactgtcaaaaagagagaaggacttaaaggttgggtctgtaaaataggaaaccatagagcaaaaacacagataacacagtcaaggaagatgctcgaataaattatcggtggacagtgttctctggattgaagcatggaatctaaatatggtgtctcatagagtctactgacataccacgctataagtggaaacagtgcagggcagcatctagtgctgtgtgaactgtatcaacagcaccgtggagtgacagtcaccatgtcctattatatttttggttatttagatggacagtgcatttgcgcttgtgcagttacttttagtaaatgcacaggagtggcattctcactttccttcactgcatttgcaaggatcaagggaaatatttccagtgacatggagctagtawaaattgatcaattgtgaaatagctaagcaaatacttgttatactttaataggaacagcagtgtaacatgtaatgagcactgagcaaagtatgttggatgcgct

SEQ ID NO: 57405 - DNA, 534 bp, Homo sapiens
tgaatggtagccttattgaacatccctcctaaagagattactcttctgttattctgtatcttagccccttctttgttttatttatagcatttgttacaacctgcattttctgtgtttatttatgtattggttcccattctggtctatcactccctttagagtagaaactccattttattgcctttttcatttgtgtatctgcagtacccaccagagtgcttgggtatactggttgcttcttgaatgggcaagcaagtaccctgacttattctattccagaagatagggtatraaggaacagcaggaataggtgcttctgttttccctaacaaatccatccctctagaatattaagtggaaggatattacaagagtatgcaacaagtgacccacttacccagattgaaactcaaggaactgaaccagagatcccctcattctgtttttcagaaaagtcacaggcttacatattgctgaatgatggcaaggctatgtccacatgatagaaaaactgtatatcccagttgactggtg

SEQ ID NO: 57406 - DNA, 239 bp, Homo sapiens
tttatgagccacatcccaaacttggtctgtyatggagaatgtcaatttttcataggtccagagggtgctattaattagctaaaattgctctgactcaggcaaaactgactctttttatagccttcttgagaaaaggttgtttatgagaatttcaaagtattgaagagtcatttttcaggattgtctttgtgtcaccattgttccacttaaatgtgaaagatttatgtttctatattcct

SEQ ID NO: 57407 - DNA, 756 bp, Homo sapiens
ggaacaactgatgtagagttctctgtccaaattttaactagagaagctctgctttttccagccatatagagtggacttccaaaatccaaggagatgacaaaggtgagcagccaaggaaacctgccctaggtgcaggcaatagggggtgcattgtctgaagatgatttagaaataataattaatacagttaaaaactgatctgctttttattatcaccatgtaccagcaattctaaacaatgtcagtgaaaaaatactccttcaccaraaaacttttgttagactccattgaaaataactgttgtagctcctctggtgttttattttttttattttttgttattatttttccattttcgttttctctttttttaattatactttaagttttagggtacatgtgcacaacgtgcaggtttgttacatatgtatacatgtgccatgttggtgtgctgcacccattaactcgtcatttaacattaggtatatttcctaatgctatccctcccccctccccccaccccaaaacaggccctggtgtgtgatgttccccttcctgtgtccatgtgttctcattgttcaattcccacctatgagtgagaacatgcggtgtttggttttttgtccttgcgatagtttgctgagaatgatggtttccagcttcatccatgtccctacaaaggacatgaactcatcattttttatggctgcatagtattccatggtgtatatgtgccacattttcttaatccaatct

SEQ ID NO: 57408 - DNA, 1535 bp, Homo sapiens
aaacaatttctcctctgatgaggccacacatgtgtctcgcctctgacgtttcactgatgcaaggacaccgtgataaatcaacttcccatgtaattacagaacctaaatgtataacatccatcaaataactgtttctgttttctctccgttcttttggcccttccttctcaggaattagaacagacaggctggatttatacctgcttcatagtgcttccaggttttctttaggtcctcggcttcatcctgcacctgggttgggttttcccatgtgcctccctctctctttcttcctccagtctcaccccaccaactttatttgagaaggcactctcaaataatagcccttagaaggaaaactttaattgtaatcaaacctttacttgaatgtttcattagaatgaaatttaaaggaaagggctattttgaaaaaaaaaatggaatccttaaaaagaaataaattatgaacttaattgactcaaactaattcactgccttatgcaaactgggcaagcttcctgtcactctacaagtcttcctctgtggactccttgcccctcagctctgattctctgagcacagaaagaatgacataatttaggttgaactaaaggtcatttggagagcttccagctgtccagttaactaaactgcaagaataaaggatctggggctccctcttaaatttaattttctgtattgtcactaacttgtagttatgaatgtgtgaatttcttgctgagtttccttggyctcatctccagtagagtgaacccctcatacttctcatttgtgctttgttctcacccagcatgctctttgtttggaggtggtgatggatgcatgtggcataaaaaaaccctacgaaatcactcaaacagaaggaacaggagaggattagaggaaaccagctggctagaatgaaattggcagagttcagccaatgaaagtcaacttgccaagatttagtcttctgttaggtcatctgtttcctcctaactaaacaactcttggatatttatagacataaatgaatttttattctccacaatcgccaataacttgtcatttctggtatttgaatgtcagtcatggggaagaacaaggacttgtatatagaacactcaaatgtagtcgcctacaagtggaaaacaaggaacagatatattatttttctatactgaatgccaaaccaaaacagaattcgtggagactttatatagttggcagacattatacatattgctggacagctgcatgttatttataaaactttccaaagtttaagtatttttgaatatgtacatttccagccctctgacttcaggcttccaaattacctgaatagtctataatcacttttggtgacaaggtattttttcacctgacttcaacccaggcctgactctcagaacatgaagctcaaagtttaatttatacctctcctgctgaggcaattagcttcctttatttgtttgcttatttcctatttagcacatatctctaaagcttatttttgtattattttcatagca

SEQ ID NO: 57409 - DNA, 847 bp, Homo sapiens
catgcctgccaagggagactgcgtggagtggcaaggggtgtgtgagtgagcatggggtctggccactgtgcagtcagatctgctggctgctgcagtggggcaggtggctccaagtgccaacacgggcgccagctctccacaaggctgtggctggaycacgggcacctcaaccagcttccatagctggcacactgggaacacagtggcacccagaatcttggagatatcacgaaccaaagggccccaaagaaggacctggctcggggagctcccaggtctgggcgccccaaagggccacagctcttctttccttctctttgcccacaatgtggtgagcaaggggcatgtctcagccctgtttgtgttacagctctttcagcctcttccctaggatttgtcataattaattcccatatcatcttatttttttacatgtgtttcaacttcagaagatgtatggatctaaacacaacatgatgtgttagctagctgccatatgagcttctccctgtttcaccactatgtagcctaaagttattccgtcatccatgactatcatgtctaaagagtctgaagatctttatttggtagctatggcttcagctagttcatttgctaagttacctagagtggttgacagatttctaattatacgttcatgagaggttactccccaccattgcaagagacttctgccaaacataggccaaaattcatctccttggtttgcaggtacagtttgtctaatcctggaaaataatttcaatgaactacttcagcgttcagaaacattggagttataaatagaaagaggaagagccacataacctaatagacaattacctct

SEQ ID NO: 57410 - DNA, 847 bp, Homo sapiens
catgcctgccaagggagactgcgtggagtggcaaggggtgtgtgagtgagcatggggtctggccactgtgcagtcagatctgctggctgctgcagtggggcaggtggctccaagtgccaacacgggcgccagctctccacaaggctgtggctggaccacgggcacctcaaccagcttccatagctggcacactgggaacacagtggcacccagaatcttggagatatcasgaaccaaagggccccaaagaaggacctggctcggggagctcccaggtctgggcgccccaaagggccacagctcttctttccttctctttgcccacaatgtggtgagcaaggggcatgtctcagccctgtttgtgttacagctctttcagcctcttccctaggatttgtcataattaattcccatatcatcttatttttttacatgtgtttcaacttcagaagatgtatggatctaaacacaacatgatgtgttagctagctgccatatgagcttctccctgtttcaccactatgtagcctaaagttattccgtcatccatgactatcatgtctaaagagtctgaagatctttatttggtagctatggcttcagctagttcatttgctaagttacctagagtggttgacagatttctaattatacgttcatgagaggttactccccaccattgcaagagacttctgccaaacataggccaaaattcatctccttggtttgcaggtacagtttgtctaatcctggaaaataatttcaatgaactacttcagcgttcagaaacattggagttataaatagaaagaggaagagccacataacctaatagacaattacctct

SEQ ID NO: 57411 - DNA, 847 bp, Homo sapiens
catgcctgccaagggagactgcgtggagtggcaaggggtgtgtgagtgagcatggggtctggccactgtgcagtcagatctgctggctgctgcagtggggcaggtggctccaagtgccaacacgggcgccagctctccacaaggctgtggctggaccacgggcacctcaaccagcttccatagctggcacactgggaacacagtggcacccagaatcttggagatatcacgaaccaaagggccccaaagaaggacctggctcggggagctcccaggtctgggckccccaaagggccacagctcttctttccttctctttgcccacaatgtggtgagcaaggggcatgtctcagccctgtttgtgttacagctctttcagcctcttccctaggatttgtcataattaattcccatatcatcttatttttttacatgtgtttcaacttcagaagatgtatggatctaaacacaacatgatgtgttagctagctgccatatgagcttctccctgtttcaccactatgtagcctaaagttattccgtcatccatgactatcatgtctaaagagtctgaagatctttatttggtagctatggcttcagctagttcatttgctaagttacctagagtggttgacagatttctaattatacgttcatgagaggttactccccaccattgcaagagacttctgccaaacataggccaaaattcatctccttggtttgcaggtacagtttgtctaatcctggaaaataatttcaatgaactacttcagcgttcagaaacattggagttataaatagaaagaggaagagccacataacctaatagacaattacctct

SEQ ID NO: 57412 - DNA, 1297 bp, Homo sapiens
atcatggctcactgcagcctcaacctcccaggatcaggtgatcctccaccttagtctcccaagtagccaggactatgagcacgtgctaccacacacagctagcttttttatttttagtagagatggggttttgccattttgcccaggctagagttgaactcctgggctcaactgatccacccaccttggcttcccaaagggctggaattacagacatgagctgctgcacacagccacatgtcatttttaaatagcagtcattcatttaattagcatgacaaccaaaagacatcaaaagcaacatagaaggttacatggatgtgaaaactgaaaaccctcagttttcccaagtaattaaaaaaaaataaaggyaacacatggattatcttgataaaacctaaaatcttcattacaggccagtcatttaaagggtaaaactcctgtggcataactgtgtcttcttatgggaagctaatttaaatcacttggaagtcaattccgatgacaaagagactttaatttaattagacatagaaagagtgtgtccagggtcatgagtgagcataatattacaaaggaatgtaaacaggaaaaccagagcatagagcagtggggatccatagctcacaatgatagcatggaagtttcctggttacatgaagtaattaagacatatttaaaagccaagagtacaaaatcagacctgatgaaaaagctgaaggagttatcatcccagccaagcaggaaacccaagccttttattccttctcaagaaggaacaggagacagtgatgtgatctgtgagtcatgtgtaacatgaaagtacaggagaagttgaacttctgatatacaaatctgaaaagtttttatagtaatagatttcaggattaaaagtcaatatttattacctcttcttatgagcaaataaatacattaagaaaaccttgttgttttaaccaaaatttttagtattttatcactctttttaatattacagctaatttaaataaactttataaacaatctatctgatctcaatcagttttgacctcgatgtaagttttacataaacttttaataaccttgtataattttttcatctttcccaactttttatacacatttagttttatctatcttttttattccttcaatttaaaataatccttaaaaatctctaagcgaatttactttctctgaaacaaaaaccggtatacgttttgcatacagaattgtttcccttgtatctagtagtcttaatcacatatatctaccaagatattaacacttagtaacc

SEQ ID NO: 57413 - DNA, 1297 bp, Homo sapiens
atcatggctcactgcagcctcaacctcccaggatcaggtgatcctccaccttagtctcccaagtagccaggactatgagcacgtgctaccacacacagctagcttttttatttttagtagagatggggttttgccattttgcccaggctagagttgaactcctgggctcaactgatccacccaccttggcttcccaaagggctggaattacagacatgagctgctgcacacagccacatgtcatttttaaatagcagtcattcatttaattagcatgacaaccaaaagacatcaaaagcaacatagaaggttacatggatgtgaaaactgaaaaccctcagttttcccaagtaattaaaaaaaaataaaggtaacacatggattatcttgataaaacctaaaatcttcattacaggccagtcatttaaagggtaaaactcctgtggcataactgtgtcttcttatgggaagctaatttaaatcacttggaagtcaattccgatgacaaagagactttaatttaattagacatagaaagagtgtgtccagggtcatgagtgagcataatattacaaaggaatgtaaacaggaaaaccagagcatagagcagtggggatccatagctcacaatgatagcatggaagtttcctggttacatgaagtaattaagacatatttaaaagccaagagtacaaaatyagacctgatgaaaaagctgaaggagttatcatcccagccaagcaggaaacccaagccttttattccttctcaagaaggaacaggagacagtgatgtgatctgtgagtcatgtgtaacatgaaagtacaggagaagttgaacttctgatatacaaatctgaaaagtttttatagtaatagatttcaggattaaaagtcaatatttattacctcttcttatgagcaaataaatacattaagaaaaccttgttgttttaaccaaaatttttagtattttatcactctttttaatattacagctaatttaaataaactttataaacaatctatctgatctcaatcagttttgacctcgatgtaagttttacataaacttttaataaccttgtataattttttcatctttcccaactttttatacacatttagttttatctatcttttttattccttcaatttaaaataatccttaaaaatctctaagcgaatttactttctctgaaacaaaaaccggtatacgttttgcatacagaattgtttcccttgtatctagtagtcttaatcacatatatctaccaagatattaacacttagtaacc

SEQ ID NO: 57414 - DNA, 1297 bp, Homo sapiens
atcatggctcactgcagcctcaacctcccaggatcaggtgatcctccaccttagtctcccaagtagccaggactatgagcacgtgctaccacacacagctagcttttttatttttagtagagatggggttttgccattttgcccaggctagagttgaactcctgggctcaactgatccacccaccttggcttcccaaagggctggaattacagacatgagctgctgcacacagccacatgtcatttttaaatagcagtcattcatttaattagcatgacaaccaaaagacatcaaaagcaacatagaaggttacatggatgtgaaaactgaaaaccctcagttttcccaagtaattaaaaaaaaataaaggtaacacatggattatcttgataaaacctaaaatcttcattacaggccagtcatttaaagggtaaaactcctgtggcataactgtgtcttcttatgggaagctaatttaaatcacttggaagtcaattccgatgacaaagagactttaatttaattagacatagaaagagtgtgtccagggtcatgagtgagcataatattacaaaggaatgtaaacaggaaaaccagagcatagagcagtggggatccatagctcacaatgatagcatggaagtttcctggttacatgaagtaattaagacatatttaaaagccaagagtacaaaatcagacctgatgaaaaagctgaaggagttatcatcccagccaagcaggaaacccaagccttttattccttctcaagaaggaacaggagacagtgatgtgatctgtgagtcatgtgtaasatgaaagtacaggagaagttgaacttctgatatacaaatctgaaaagtttttatagtaatagatttcaggattaaaagtcaatatttattacctcttcttatgagcaaataaatacattaagaaaaccttgttgttttaaccaaaatttttagtattttatcactctttttaatattacagctaatttaaataaactttataaacaatctatctgatctcaatcagttttgacctcgatgtaagttttacataaacttttaataaccttgtataattttttcatctttcccaactttttatacacatttagttttatctatcttttttattccttcaatttaaaataatccttaaaaatctctaagcgaatttactttctctgaaacaaaaaccggtatacgttttgcatacagaattgtttcccttgtatctagtagtcttaatcacatatatctaccaagatattaacacttagtaacc

SEQ ID NO: 57415 - DNA, 1297 bp, Homo sapiens
atcatggctcactgcagcctcaacctcccaggatcaggtgatcctccaccttagtctcccaagtagccaggactatgagcacgtgctaccacacacagctagcttttttatttttagtagagatggggttttgccattttgcccaggctagagttgaactcctgggctcaactgatccacccaccttggcttcccaaagggctggaattacagacatgagctgctgcacacagccacatgtcatttttaaatagcagtcattcatttaattagcatgacaaccaaaagacatcaaaagcaacatagaaggttacatggatgtgaaaactgaaaaccctcagttttcccaagtaattaaaaaaaaataaaggtaacacatggattatcttgataaaacctaaaatcttcattacaggccagtcatttaaagggtaaaactcctgtggcataactgtgtcttcttatgggaagctaatttaaatcacttggaagtcaattccgatgacaaagagactttaatttaattagacatagaaagagtgtgtccagggtcatgagtgagcataatattacaaaggaatgtaaacaggaaaaccagagcatagagcagtggggatccatagctcacaatgatagcatggaagtttcctggttacatgaagtaattaagacatatttaaaagccaagagtacaaaatcagacctgatgaaaaagctgaaggagttatcatcccagccaagcaggaaacccaagccttttattccttctcaagaaggaacaggagacagtgatgtgatctgtgagtcatgtgtaacatgaaagtacaggagaagttgaacttctgatatacaaatctgaaaagtttttatagtaatagatttcaggattaaaagtcaatatttattacctcttcttatgagcaaataaatacattaagaaaaccttgttgttttaaccaaaatttttagtattttatcactctttttaatattacagctaatttaaataaactttataaacaatctatctgatctcaatcagttttgacctcgatgtaagwtttacataaacttttaataaccttgtataattttttcatctttcccaactttttatacacatttagttttatctatcttttttattccttcaatttaaaataatccttaaaaatctctaagcgaatttactttctctgaaacaaaaaccggtatacgttttgcatacagaattgtttcccttgtatctagtagtcttaatcacatatatctaccaagatattaacacttagtaacc

SEQ ID NO: 57416 - DNA, 2014 bp, Homo sapiens
tggaagtcctgcatagggataatgtggagaacatgcaaaagaaatacacatcaccagctcctcaactcagagctccaagggaatggccaaggaagctgtattgtcctaagaaatttgaggctgtcttgacttacaataaatcctgctcaatcatatacatgtatacacacacacacacacacacacacacacagacggtgttgtcagtgaagcctctaacaatgcatcttgactggacagatttgacaattaaaatggctggaagaaaatagtcttcataagtggcacttactattcacattacgcattaaaaggacatctcctaaattaaatcttgtctacgataaaaaggcagaaaatcatgacccaaggctcatttataactgcagaaatgttcaagatagaccaatgcttgctatgtttaggaactgacaagaaagtacaggtctttataatctaccattttgcctcatttgataccaagtgaccttcataatgcaggctatagagaattgcaagatttgtcagagatttcaggtctttggaaagctatgctctttcacaagaacagccatggaaacaggaagaaagtcaattcccacttaaggtaatcagaatttacaaatattcctttcttcattgaaatctcaataggcacttcaatattatatttaattaattcttttgttacagtcatgcatcacataacaacattttggtcaaggatagtgcacttgtatgacagtggtgcaataaaatcataacactatttttactgtacctcttgtatgtttagacatgtatagatacacttactgtatatatataagtatagatatacttaactgttgtgttacaattgcctacagtattcagtacagtaacatgctgcacaggtttgtagcctaggaggaataggttataccacctaacctaggtatgtaatcagctatagcatctaggtttgtgtaagtaaactctgtgatgttcatacaataataaaattgtccagcaatgcatttctcagacacacccctctcattaagtgacacacgactgtattagttaacactatgggaacttcatgggaaatggacactctagctccaccataaatagaaactgtttatgtcaaaaaacacataaaagcatagttgcaagattacaattccttccagatatttcatttagtatctccacagatcactaacttcctgaataacattcttgtgtctccactgcctcacatttgatttcaggtcattccatcaattgtcaaagacgcatccaacattaactttccaactactggtttggattgtgtcaacattgtcatcctgggccacaacaacacaaaaggctaactcggtgaggtaacatagacactgatcagtgagattttgctgatgggtggtaccattttttactaagatcaagggtattcataccttcaggcatctagacaacattgaaaagggcaggttcatagataaaaaaggaaagaggaagggtttttgcactatacatcagctaccgtgtctcctgtttaacctgagtctgaagagattcaaagtgcaggtgccatgaatgcctctttaatagcttcatgtcgattgattttctgggctacacttcccagcattcaaattgctaagtgcatataaactactagtgaatatttattacctggatttgtgcttttgagtgaccttatctatagttatgtgcttcagtggtcyaacttggggtgcactccaaactttgataaattaaagaccctgcttattccttgagtaatgctacactgacaactgatttagtgaatgccactgtgaaaataataaacctcttggtgaatatatttagacatgtcttgtaacctgtacacatcttaaccagggatgttacttggtctttctatgttcaggagtgtgtggagatagaaaagcatacaggattgtaattgtttcctgtgagactaacagaaaattcaagctagtgaagtatgcttatg

SEQ ID NO: 57417 - DNA, 1649 bp, Homo sapiens
ccttgtggtgatggaaccattctgtatcttgactgtatcaatgccaatatcctggttgtgatactgtatggtgttgcaagacactgtcattgggggaaaccgggaaaatggtacatggtttctctttgcagtatttcttacaacaactgcatgaaaatctgtatctaaggtaacaagcataatttaaaaaaaaaacctcttttctcttatagcatgggatttcagtgtcaaaaatgtggagcacttctcccgtgtgtgtttgtgtgtgtgtgcgtgtgtgtgtctgtgtgtgtacataccactcctatgccaagagtctgcatatccgtgtttttacctgtctctaaagtagaatatctgctggtgtccacatgtgataataattgccttttatattgtgtgccatagatattacggatgtcctatgacgttgttataaaaattctgctgatgactcactctgctttctctaagtcactttgtcattgatattgtgcctggttttataagcttcttggcaatgaagtgatttgtacttgttttgccaagaggtctaataacgttgaatgaaacccccatagcttttatatcttccctgccttcgtcacaatattcatcaacttcatacagcaaagaattacttcgtgcttgctttcaaaatattcaattggtttatcacagggttaactgtactttgattaataattatgtaaaagcggccgtgggccgaggagagctctaggtggccagccaaagacctggggcgtcgtgggcttcggcgagcatgcagggatgagcgggtccctcggccgagcggcgggctcgggtgcgggcggtggtgtttcaggggagcggctggacgcactggtgaaggacaaagtggttgtcttccctcaaggggacggcggagcaaccccagtgcggcttcagcaacgccatggtgcagatcctgtgggtgcacggcgtccgcgactatgcggcctacgaagtgctggacgaccccgagctgcgacaaggcattaaagactattccaactggcccaccatcccgcaagtgtacctcaacggcgagtttgtgcggggctgtgacattcttttgcagatgcaccagaatgggggtctggtggaagaactgaaaaagctggggatccactccgcccttttagatgaaaagaaagaccaagactcaaagtgagggcgcccgggtcctccytgaacagagggagccgttcgtgtcagagactcactgccagaaaaaccttaccgattttggttttcactactgagacaactgcgttgcactgatcatttccgttcgtgagcagtcgggtgattttaggttgtctggtgtttgggctaataagattttattgtgagcttaattacaaccactgcactgtaataattcaatgctgtattatgatattgctgtaaacaaaatttgttcttatattgccatttattttttgcctgattcaggagttaaactaggagctttggaatcattattcatgacccctctgcaaatatgtcagtctgcaaagacaatatcttcccccaaattatgtatagcttcttccgttatggaaaacgatggacaaagaagaaactgtgataactgggtttttttttttttttaaataaactgc

SEQ ID NO: 57418 - DNA, 1649 bp, Homo sapiens
ccttgtggtgatggaaccattctgtatcttgactgtatcaatgccaatatcctggttgtgatactgtatggtgttgcaagacactgtcattgggggaaaccgggaaaatggtacatggtttctctttgcagtatttcttacaacaactgcatgaaaatctgtatctaaggtaacaagcataatttaaaaaaaaaacctcttttctcttatagcatgggatttcagtgtcaaaaatgtggagcacttctcccgtgtgtgtttgtgtgtgtgtgcgtgtgtgtgtctgtgtgtgtacataccactcctatgccaagagtctgcatatccgtgtttttacctgtctctaaagtagaatatctgctggtgtccacatgtgataataattgccttttatattgtgtgccatagatattacggatgtcctatgacgttgttataaaaattctgctgatgactcactctgctttctctaagtcactttgtcattgatattgtgcctggttttataagcttcttggcaatgaagtgatttgtacttgttttgccaagaggtctaataacgttgaatgaaacccccatagcttttatatcttccctgccttcgtcacaatattcatcaacttcatacagcaaagaattacttcgtgcttgctttcaaaatattcaattggtttatcacagggttaactgtactttgattaataattatgtaaaagcggccgtgggccgaggagagctctaggtggccagccaaagacctggggcgtcgtgggcttcggcgagcatgcagggatgagcgggtccctcggccgagcggcgggctcgggtgcgggcggtggtgtttcaggggagcggctggacgcactggtgaaggacaaagtggttgtcttccctcaaggggacggcggagcaaccccagtgcggcttcagcaacgccatggtgcagatcctgtgggtgcacggcgtccgcgactatgcggcctacgaagtgctggacgaccccgagctgcgacaaggcattaaagactattccaactggcccaccatcccgcaagtgtacctcaacggcgagtttgtgcggggctgtgacattcttttgcagatgcaccagaatgggggtctggtggaagaactgaaaaagctggggatccactccgcccttttagatgaaaagaaagaccaagactcaaagtgagggcgcccgggtcctccctgaacagagggagccgttcgtgtcagagactcactgccagaaaaaccttaccgattttggttttcactactgagacaactgcgttgcrctgatcatttccgttcgtgagcagtcgggtgattttaggttgtctggtgtttgggctaataagattttattgtgagcttaattacaaccactgcactgtaataattcaatgctgtattatgatattgctgtaaacaaaatttgttcttatattgccatttattttttgcctgattcaggagttaaactaggagctttggaatcattattcatgacccctctgcaaatatgtcagtctgcaaagacaatatcttcccccaaattatgtatagcttcttccgttatggaaaacgatggacaaagaagaaactgtgataactgggtttttttttttttttaaataaactgc

SEQ ID NO: 57419 - DNA, 1649 bp, Homo sapiens
ccttgtggtgatggaaccattctgtatcttgactgtatcaatgccaatatcctggttgtgatactgtatggtgttgcaagacactgtcattgggggaaaccgggaaaatggtacatggtttctctttgcagtatttcttacaacaactgcatgaaaatctgtatctaaggtaacaagcataatttaaaaaaaaaacctcttttctcttatagcatgggatttcagtgtcaaaaatgtggagcacttctcccgtgtgtgtttgtgtgtgtgtgcgtgtgtgtgtctgtgtgtgtacataccactcctatgccaagagtctgcatatccgtgtttttacctgtctctaaagtagaatatctgctggtgtccacatgtgataataattgccttttatattgtgtgccatagatattacggatgtcctatgacgttgttataaaaattctgctgatgactcactctgctttctctaagtcactttgtcattgatattgtgcctggttttataagcttcttggcaatgaagtgatttgtacttgttttgccaagaggtctaataacgttgaatgaaacccccatagcttttatatcttccctgccttcgtcacaatattcatcaacttcatacagcaaagaattacttcgtgcttgctttcaaaatattcaattggtttatcacagggttaactgtactttgattaataattatgtaaaagcggccgtgggccgaggagagctctaggtggccagccaaagacctggggcgtcgtgggcttcggcgagcatgcagggatgagcgggtccctcggccgagcggcgggctcgggtgcgggcggtggtgtttcaggggagcggctggacgcactggtgaaggacaaagtggttgtcttccctcaaggggacggcggagcaaccccagtgcggcttcagcaacgccatggtgcagatcctgtgggtgcacggcgtccgcgactatgcggcctacgaagtgctggacgaccccgagctgcgacaaggcattaaagactattccaactggcccaccatcccgcaagtgtacctcaacggcgagtttgtgcggggctgtgacattcttttgcagatgcaccagaatgggggtctggtggaagaactgaaaaagctggggatccactccgcccttttagatgaaaagaaagaccaagactcaaagtgagggcgcccgggtcctccctgaacagagggagccgttcgtgtcagagactcactgccagaaaaaccttaccgattttggttttcactactgagacaactgcgttgcactgatcatttccgttcgtgagcagtcgggtgattttaggttgtctggtgtttgggctaataagattttattgtgagcttaattacaaccactkcactgtaataattcaatgctgtattatgatattgctgtaaacaaaatttgttcttatattgccatttattttttgcctgattcaggagttaaactaggagctttggaatcattattcatgacccctctgcaaatatgtcagtctgcaaagacaatatcttcccccaaattatgtatagcttcttccgttatggaaaacgatggacaaagaagaaactgtgataactgggtttttttttttttttaaataaactgc

SEQ ID NO: 57420 - DNA, 1649 bp, Homo sapiens
ccttgtggtgatggaaccattctgtatcttgactgtatcaatgccaatatcctggttgtgatactgtatggtgttgcaagacactgtcattgggggaaaccgggaaaatggtacatggtttctctttgcagtatttcttacaacaactgcatgaaaatctgtatctaaggtaacaagcataatttaaaaaaaaaacctcttttctcttatagcatgggatttcagtgtcaaaaatgtggagcacttctcccgtgtgtgtttgtgtgtgtgtgcgtgtgtgtgtctgtgtgtgtacataccactcctatgccaagagtctgcatatccgtgtttttacctgtctctaaagtagaatatctgctggtgtccacatgtgataataattgccttttatattgtgtgccatagatattacggatgtcctatgacgttgttataaaaattctgctgatgactcactctgctttctctaagtcactttgtcattgatattgtgcctggttttataagcttcttggcaatgaagtgatttgtacttgttttgccaagaggtctaataacgttgaatgaaacccccatagcttttatatcttccctgccttcgtcacaatattcatcaacttcatacagcaaagaattacttcgtgcttgctttcaaaatattcaattggtttatcacagggttaactgtactttgattaataattatgtaaaagcggccgtgggccgaggagagctctaggtggccagccaaagacctggggcgtcgtgggcttcggcgagcatgcagggatgagcgggtccctcggccgagcggcgggctcgggtgcgggcggtggtgtttcaggggagcggctggacgcactggtgaaggacaaagtggttgtcttccctcaaggggacggcggagcaaccccagtgcggcttcagcaacgccatggtgcagatcctgtgggtgcacggcgtccgcgactatgcggcctacgaagtgctggacgaccccgagctgcgacaaggcattaaagactattccaactggcccaccatcccgcaagtgtacctcaacggcgagtttgtgcggggctgtgacattcttttgcagatgcaccagaatgggggtctggtggaagaactgaaaaagctggggatccactccgcccttttagatgaaaagaaagaccaagactcaaagtgagggcgcccgggtcctccctgaacagagggagccgttcgtgtcagagactcactgccagaaaaaccttaccgattttggttttcactactgagacaactgcgttgcactgatcatttccgttcgtgagcagtcgggtgattttaggttgtctggtgtttgggctaataagattttattgtgagcttaattacaaccactgcactgtaataattcaatgctgtattrtgatattgctgtaaacaaaatttgttcttatattgccatttattttttgcctgattcaggagttaaactaggagctttggaatcattattcatgacccctctgcaaatatgtcagtctgcaaagacaatatcttcccccaaattatgtatagcttcttccgttatggaaaacgatggacaaagaagaaactgtgataactgggtttttttttttttttaaataaactgc

SEQ ID NO: 57421 - DNA, 1112 bp, Homo sapiens
ctgccttctgctgagctaggaggtccctgactacagaccgcctttttcactgacaagcaataccctgacttccgagactgctctagagatgatcacaccaactggaatggctgaaaaacaacttttgtaattgagccctctcctgatttgtcatatatttttttgtttccaaagcctcagcctctcttttgttctctggaacacttcccaagttaacttggaagtatttcccaggcgatagcatttaaatttggctcaaatgaattattcattgtataagccctgcctcagtttttttccaggctacagtgtgatgctggactggcacacgtaaggtgctgccgtcaagacggtgcctcatgatgaggtttctcttcaaataatctgatcaatcttttattctttaattcatagtacccctcccccaaccttttttcctttttgcctttgttagatgcccaggcacgccacagtaccaggcgttatcagtaccagctcacattcctttccttatttggaaagaggactaactttctagttcattacagacaccccttccccttcctctccactttcttttatgtgcccatcttatctaaaaaaaattcaaatgtttagccaactgggattagtttagattgtatgaccggaccctggccagtggggaaagggtacaggggcaggacttgcatcaggaataaaggctctcgtgccctttgttcaggtgtgctgccatggcaactggccaaggaggcacccctctgcacggaggtaaaattgctttgctaagaatcctttgttcgagtgttcaatttctttaggattttgagcgttattcctaacaatagggtgtgaaccatgtactcaggagagcaaaaaaatctgacatattttgctttatgaaatcactctaattttgccattcaactccatcctgctgcactggtttwaaaaaaaaaaaaaaaaaaaaaaacctaacctcagacatttgtgtgtttcaagtcatttttatggccaagtccccatagttggatcaacctaaaaggcaaaacacacataagaagaccgtttatttgggccaagcttgaggactgctatactggagtatagat

SEQ ID NO: 57422 - DNA, 614 bp, Homo sapiens
ctgtgggcatcagtcctcggaggactcggggtgtgactagagtactcagctagaactgagagttatactagtggtcatgcctttgctgggcctgcattgagcctgtgttgagcctctgctgagtctgtgctgagtctttgctgagccctgtgctgagcctgtgccgagtctgtgctgagtatatgctgagcctggyctgagtccttgtcctgagcttgcattgagcgtgtgctgatcctgtgctggttgtgtcctgagcctgggctgagcctctgctgagtctgtgctaagccctgtgctgggcctgtgctgagcgtaggctgagttgtgctgagccctgaggctgagttgtgctgagccctgaggctgaggctgtgctgagccctgaggctgagttgtgctgagccctgaggctgaggctgtgctgagcataggctgagttgtgctgagcgtaggctgagttgtgctgagccctgaggctgagttgtgctgagccctgaggctgagttgtgctgagcgtaggctgagttgtgctgagccctgaggctgagttgtgctgagcgtaggctgagttgtgctgagccctgaggctgaggctgagctgagtctgtgct

SEQ ID NO: 57423 - DNA, 787 bp, Homo sapiens
tcagtccatcccactctgcagtacttcctggacttaaatcactcttgtaactgttggctccaccactcccaaaagtattttcttatgggaaaaattaaaatacttcttttactggagataatgctggatgtcacaaagatttaggaaccactatagttagcgttagggcctctgggttgaaagggtatttccctggggaaatggcayctaatcacttgagctcaggagttcgagaccagcctgggcaacagggcaagaccctgtttctgcaaaaaaaatttttttaattatctggctgtggtggtgtgtgcctgtagtcctagctactagggaggctgaggtgggaggattgcttgagcccaggaagtcaaggctgcagtgagccatgattgtgccactgcactccagcctgggtaacacggtaagaccctgttttaagaaaaagaaaagaaagaaaaaaaaaagagaaactgtagttgagacagaaatactggtgctcatttcttcagatatatgttctggtaagtggttaggaaacaaggatctcattctatacttgcctctgtggccaaagggaagagaatgtcctatttaattcaaagtaccagaaagttataccataaaagtaaatcacatttttaaggggaagcgagtgcacagaccccacctctaagtcttcctaactagtcttctagagaaaagaaaaaatagaggctgtggaaatcagggaaggaagttgttgtgataacgagacaaaagcaataacaaagatatagagtggcgaaga

SEQ ID NO: 57424 - DNA, 787 bp, Homo sapiens
tcagtccatcccactctgcagtacttcctggacttaaatcactcttgtaactgttggctccaccactcccaaaagtattttcttatgggaaaaattaaaatacttcttttactggagataatgctggatgtcacaaagatttaggaaccactatagttagcgttagggcctctgggttgaaagggtatttccctggggaaatggcacctaatcacttgagctcaggagttcgagaccagcctgggcaacagggcaagaccctgtttctgcaaaaaaaawttttttaattatctggctgtggtggtgtgtgcctgtagtcctagctactagggaggctgaggtgggaggattgcttgagcccaggaagtcaaggctgcagtgagccatgattgtgccactgcactccagcctgggtaacacggtaagaccctgttttaagaaaaagaaaagaaagaaaaaaaaaagagaaactgtagttgagacagaaatactggtgctcatttcttcagatatatgttctggtaagtggttaggaaacaaggatctcattctatacttgcctctgtggccaaagggaagagaatgtcctatttaattcaaagtaccagaaagttataccataaaagtaaatcacatttttaaggggaagcgagtgcacagaccccacctctaagtcttcctaactagtcttctagagaaaagaaaaaatagaggctgtggaaatcagggaaggaagttgttgtgataacgagacaaaagcaataacaaagatatagagtggcgaaga

SEQ ID NO: 57425 - DNA, 787 bp, Homo sapiens
tcagtccatcccactctgcagtacttcctggacttaaatcactcttgtaactgttggctccaccactcccaaaagtattttcttatgggaaaaattaaaatacttcttttactggagataatgctggatgtcacaaagatttaggaaccactatagttagcgttagggcctctgggttgaaagggtatttccctggggaaatggcacctaatcacttgagctcaggagttcgagaccagcctgggcaacagggcaagaccctgtttctgcaaaaaaaatttttttaattatctggctgtggtggtgtgtgcctgtagtcctagctactagggaggctgaggtgggaggattgcttgagcccaggaagtcaaggctgcagtgagccatgattgtgccactgcactccagcctgggtaacacggtaagaccctgttttaagaaaaagaaaagaaagaaaaaaaaaagagaaactgtagttgagacagaaatactggtgctcatttcttcagatatatgttctggtaagtggttaggaaacaaggatctcattctatacttgcctctgtggccaaagggaagagaatgtcctatttaattcaaagtaccagaaagttataccataaaagtaaatcacattttyaaggggaagcgagtgcacagaccccacctctaagtcttcctaactagtcttctagagaaaagaaaaaatagaggctgtggaaatcagggaaggaagttgttgtgataacgagacaaaagcaataacaaagatatagagtggcgaaga

SEQ ID NO: 57426 - DNA, 726 bp, Homo sapiens
  misc_feature (1)...(726): n = A,T,C or G
tatttggtttttgtttaaattcaaagccattaaagcattcctaccacaaggaagaagaaaatgtgttttgtctctctgccagcagtaacataattttggtcttcaaaataagtgtcttgggacctgaattccctgtgggtaaagaaaattcccagcccatgtgttgtggcagaaattcattgtttcctgagttatttcctttcatgcttagtgtgggggaaatgaccaaatgtatagattgagattctttttcaaaaacattacttgattctgwtgattgttattatgattttaggtgctgcaggaggcttctcacatgctttgggatatcttcagggaaatacgctcttaatagaaactgagaatttaggtaagtcctttcgcaaagatactttgttcttatcaattggccaatcccctgcattggtgtagttttgtaaagtgttaaaactgctgtctgttatgctgtctcgtttcatcttcactgtggttttgcgaggcaggtgtgaagagtgcccggtcctaatattcccattcctgtctgatttttcctcctggtagcttggtgaggtgatggtaggggcccagaggaggagctgagtagctgggtttttgtttttgttttnnnnnnnnnnnnnnnnnnnnnnnnnnnnnnnnnnnnnnnnnnnnnnnnnnnnnnnnnnnnnnnnnnnnnnnnnnnnnnnnnnnnnnnnnnnnnnnnnnnng

SEQ ID NO: 57427 - DNA, 2139 bp, Homo sapiens
  misc_feature (1)...(2139): n = A,T,C or G
ctgcctttacagttgcctggagttctctctctttttttttttttggtagagatgaggtcttgctatgttgcccaggctggtcttgaactcctggcctcaagtgattgtcctaccttggcctctgagagtgctttagtggattataggtgtgagccactgtgcctgacctgcctggktcttgctaaatttgaagattcctgggcactactgcagacccagagcagagtccaggagggaccagggcacactgatgtgattctaagggccgtgtgcaccacagccccactgctagccccatgtgtctgcagactgccccatgtgtctagggcgtggtgtgaggggctagttgtggcagtctcgccaggtcagggttgggtgggcaagtaagggctgctgaggagaatctggattcttaagaggggttggctgggctgggcacagtggctcacacttgtaatcccagcactttgggaggccgaggcgggtgaatcacaaggtcaggagatctagaccatcctggctaacatgggtgaaaccccgtctctactaaaaatacaaaaaattagctaggcatggtggtgcgtgcctgtagtcccagttactcaggaggcggaggcaggaggatcgcttaaacccagaggcggaggttgcagtgagccgagattgtgccattgcgatccagcctgggcgacagagtgagactccgtctcaaaaaaagaaaagaggaattggctccacaaccctgattacctggccagggatagaccagaactgtggtgagggagcctttgctgctgtcctcaactagcttttgggccttgcagaggtccatgggcttcacgaatgctttctgcctttgactctgttttctcttttgatggtacatatcaagccgctagagtgccccaagtcttgttttgtgtcaaacaccctccaaggcagacgacctgcagttttagatcgtatatttatgtgacctgatgcctgctttggggtctccagagtcaaaaggggtgtgtgtgtgtgtacgtgttgatattcttgggcaaagggtgattgtaactgcagagaccatgcatcctccagccccgaggctttcctgtcgcctgtggagacaagcttcattgcctgtggggttctggtcctggatcatttcttagagctgagcatggggtgatgccaaggcccttgggacgcaccaagggttgaaagaacagtggggttgtgagggtgcttctgcagggagccctgaggcctagacagacaggagccaggcgggcttgcgaaaagtccgtcctagctgcaaacctgctcctccctccgccctggctttccttgcatttcatttgtatcctgctgatttgatttccttttgcattgtgtaaggttcttagtagatacctattccgtgaagttagagatgaattagacacaagagagagaaagacctggctaaactggaaatgagaaggacgtcgacagtttaaaaacacattatggtaaaaataaacataacacgaaatttactactttnnnnnnnnnnnnnnnnnnnnnnnnnnnnnnnnnnnnnnnnnnnnnnnnnnnnnnnnnnnnnnnnnnnnnnnnnnnnnnnnnnnnnnnnnnnnnnnnnnnnacagtcctcctgctcccttctgcctgtccttgttgcccagagtggcggggccagtgtactgctttacctaatcctctgtgtagaatggactggcagctgggggctctcgaagtttgcttccagctgttcttgggatttagtgttttccctggaatgaagatgaagcagggttgccagataaaatgcaggctgcccaggtgaattaaatctcagataaacagtctatcatttatagtataagtatcttccaaagactgcatgggaaatacttatactgcagaattatctgtggtttacctgaaattcaagtttaactagatttgctgcatttttgctgctaaatttgggtgatccagtggtgaacacacaataaagcagctcattggtaaaagggcatgcggttggctagaaagattttgggagatgggcagatttgatggtgcagagagagaggccatttggcattgtcaacctatttttttttttttttggtagaatattaactt

SEQ ID NO: 57428 - DNA, 735 bp, Homo sapiens
tggggcaggctgagagcgtggtggtcggctgtgttttataggtgggaaaagacttctctgtctctgccacgtcttgsacacgttcttccacagatctctgtctttaccccagaaaatcgctgcttctctagcagagtcagctctgcctcgttcccagccttgtccttgtcgtgggtgtgccttatggccaggagctcattctaaagaattctgctgtgcgtggacaggggaacatccttctctgctcgatgttcccttggtgaatttgatgggagaagctggacctcttacccaaccctgctggtaaatgggaaaaggtgttttatcaatgaccattattgtatttcctcatagcctgaagtgtgtgtgtgtaagtcaagtacatttgatttttttaatgcctcatatatttttgtagttattttggaaggaaatttagaaagataatcaacttttctctccattcctgagagaaatggaattttctctcaggaatggacagaaaatagaagtgctcaaagtaaattcagaatggtggtctgaataaatcttttagtatcctggtatttgtgagttacctcctatggtagtgaccggatggatggcaggtgccctgggcgatgggacccgtgcacagtgttggtgtccttcccactcctcctcactagacagaactagaggaagccttgaccatggaaccaggagtctttccacagacctgttaccaaagaattc

SEQ ID NO: 57429 - DNA, 822 bp, Homo sapiens
tacccaagactgagtaatatataaaggaagagttttaatggactcacagtttcacgtggctggggaggcctcacaatcatggcagaaggcaaaggaagagcaaaggcacatcttacatggtagcaggctagagagcgtgtgcaggggaactgccctttataaaaccatcagatcttgtgagacgtatttactatcacgagaacagcctgggaaagacccacccccatgattcaattacctcccactgggtcactccatggcacgtggcaattacaggagcaacaattcaagatgagatttgggtggggacacagctaaaccacatcacaggacaatattagactaattatctccacttgcattttctactccaatattccaaaagtctcttcctcytgcttaggagttgtggtgacagtataaagattccaggaagcagctgctgtccaaggcaacactgtgtggatctctgcagtgttttgagaggatggagtcctaactaatgagctgtttaacttctgtgcttcagaagtgcttctttgggtactcaaaattttaagcactcttaaagtcctcattttctactcaacttttgagcatgagcccctctgggaaatcaacgcagacatgagccagcaccaatgcacctgtgcattttatctgtgagatgattactctgcaggagggaccatgaatctcccaactatgcattttctaagtgaagagctttgggtccagcaatcaccatggaactcagcgtgtttttcctcactgcgatctgtgagtgtttgcatcataccctggcctttagaagaggatgga

SEQ ID NO: 57430 - DNA, 912 bp, Homo sapiens
tgcatctttgagaggaaccaacacacagaaaacttgatttttcccatcagcttatggttgatgccacttttaagaatataaatgtgttattaatctttcaacaatcaggaagaagttattgactcaaactatctcaatcaggttagaggttcgtgtctatgagcaccattccattgactgaaactaccgactctcacatgaagtccagcagatggcagatgactcgtgtgtgtgtgtgtgtgtgtgtgtgtgtgtgtgtgtgtgtgtggcagtgttactaaattggagccattgagtgatatttactgagacctcatggtaccatatggaattgaagaatatataggccttggaatttaaattcctctaagaaagatggacacaggcttcagatttagagccttttttttttttctcattctctctcctcttgtgaatgctgattattttgctaatccagggaaatgctggtgtctgaaagggctagtgtgaaacaaatagaaaaaaatcttatccttgtcagatatgagaaagattaactggaaaaaacagacacttcatccagtcttgtgttggtaaggtttaacaacctctcccagcggagaatgaagaggtcctgatttgtagcattttccaaattctatgctgtaaatattctcactgtggccaatggcaaactaccctcatctgatcactgaaggcagatttgggagaagatggataccgtcagctctctggaactggtgggggctggcttgracgctcctctgattttattcctgcatgcttcatatataacaaattggtaacaccagtttttgttatgttggtgaaagtggtcctccttccacatattgagagcataatagatttgaatattgttttactgccaacaaaatccattcatatgca

SEQ ID NO: 57431 - DNA, 921 bp, Homo sapiens
tgcatatcttagcaagaagtcaaggccaactacaactgcaattcaccactagttcctcaatccaaagctatgcacagtgggatggtaaaatagttactagaactgatagttttatgcrttgtaacaagaaataccaactctttctaactttgtatttataccaaaagccttcctgacttgagaaacaatgtagtggaagcataatggagcaattctcaaaatcaaaggcaaacccaaagagctggacttgcaaagggcagaacccaaggcagctctgaatatctaggtggcaggaacaaattactgctgacactggggcaatcaaatccaacagctgcttggtatttgcatcatccctctcaagaatcaaagtcctaaaagggggaacctaactgatgtagtgtgggtcatttgccctcctccctttgctatagaaagacaggaaaactggaccaacagtttcatcaagtctcctcaaatggaggagacagaaatccccttaaggggatcagggtttttttaacagaagaaagagtaagaactgcagcatggtaaaaacacctgccagaaccatcataccttttttttttgtgtacatcaaaatcatttctattttgagccccatccaaccagacaagagaaagctttacctgtggtttcttggggttttttcaccataggcattttgctacactttcaaactttaaacattgccaaagtacagtaaagaagcactttggattttgttttactgtccccatagatatttgaagaagcccataatctttgtccacatgccccctttttgttgttatttatcacttccaacttgagctttgcacatggaaatctttaatgaggcgcctataactctagtttcccagactacttcacagccaatcctctatagaatagtgatgc

SEQ ID NO: 57432 - DNA, 921 bp, Homo sapiens
tgcatatcttagcaagaagtcaaggccaactacaactgcaattcaccactagttcctcaatccaaagctatgcacagtgggatggtaaaatagttactagaactgatagttttatgcattgtaacaagaaataccaactctttctaactttgtatttataccaaaagccttcctgacttgagaaacaatgtagtggaagcataatggagcaattctcaaaatcaaaggcaaacccaaagagctggacttgcaaagggcagaacccaaggcagctctgaatatctaggtggcaggaacaaattactgctgacactggggcaatcaaatccaacagctgcttggtatttgcatcatccctctcaagaatcaaagtcctaaaagggggaacctaactgatgtagtgtgggtcatttgccctcctccctttgctatagaaagacaggaaaactkgaccaacagtttcatcaagtctcctcaaatggaggagacagaaatccccttaaggggatcagggtttttttaacagaagaaagagtaagaactgcagcatggtaaaaacacctgccagaaccatcataccttttttttttgtgtacatcaaaatcatttctattttgagccccatccaaccagacaagagaaagctttacctgtggtttcttggggttttttcaccataggcattttgctacactttcaaactttaaacattgccaaagtacagtaaagaagcactttggattttgttttactgtccccatagatatttgaagaagcccataatctttgtccacatgccccctttttgttgttatttatcacttccaacttgagctttgcacatggaaatctttaatgaggcgcctataactctagtttcccagactacttcacagccaatcctctatagaatagtgatgc

SEQ ID NO: 57433 - DNA, 921 bp, Homo sapiens
tgcatatcttagcaagaagtcaaggccaactacaactgcaattcaccactagttcctcaatccaaagctatgcacagtgggatggtaaaatagttactagaactgatagttttatgcattgtaacaagaaataccaactctttctaactttgtatttataccaaaagccttcctgacttgagaaacaatgtagtggaagcataatggagcaattctcaaaatcaaaggcaaacccaaagagctggacttgcaaagggcagaacccaaggcagctctgaatatctaggtggcaggaacaaattactgctgacactggggcaatcaaatccaacagctgcttggtatttgcatcatccctctcaagaatcaaagtcctaaaagggggaacctaactgatgtagtgtgggtcatttgccctcctccctttgctatagaaagacaggaaaactggaccaacagtttcatcaagtctcctcaaayggaggagacagaaatccccttaaggggatcagggtttttttaacagaagaaagagtaagaactgcagcatggtaaaaacacctgccagaaccatcataccttttttttttgtgtacatcaaaatcatttctattttgagccccatccaaccagacaagagaaagctttacctgtggtttcttggggttttttcaccataggcattttgctacactttcaaactttaaacattgccaaagtacagtaaagaagcactttggattttgttttactgtccccatagatatttgaagaagcccataatctttgtccacatgccccctttttgttgttatttatcacttccaacttgagctttgcacatggaaatctttaatgaggcgcctataactctagtttcccagactacttcacagccaatcctctatagaatagtgatgc

SEQ ID NO: 57434 - DNA, 869 bp, Homo sapiens
gaacactagaatatgtgttcctaccacctagaatgctggctcttcatttgactaacacctaatcattcttcaggtctaagctcaatgtgactttctctaggaaagcatatgtgactcctaaatctaaattaggatcccattacatttttctctcttaggaccctgtttctttccttcagagaaatatatgtatagaaatatatgtaaatgtagaagaatataatgcattattatatattaagatctcgtatttgttaaaagttcctctctgacrttcaaccacatgctctagctgggcaagcaccatatctcaagagtgtagcacctggtcgttgattggtagacagtcaatcagtatttcctgaattaataaatctgtaaatatgtcctcactgtctcctcctggaatttgtgagattctttgacttcatttctaatcaactttctattggctttattccttatcaatttaggttgtgtttcatacttcgttcattgccaagggaatttaatatttaaaatagttcaatagtaatttgttttgtaaagaaaagttcatttgattgtataaatattctgtattcttttgaaggcaaaacttattttctcacaaatactctctggttttggggctttgcactgctaggacagtgtcctttcacaactgcttaaacccattcatatttctatgcaggcactttcaccttctgtcactcccacaacacaatttaatgagatttggggagatttgtttcctgatttgtttcctttttgcttctggatggccacagacagaaatctggttaagggcaacctctagataagcaatagatatcagcccagagccctctagctgctactcaatcctt

SEQ ID NO: 57435 - DNA, 869 bp, Homo sapiens
gaacactagaatatgtgttcctaccacctagaatgctggctcttcatttgactaacacctaatcattcttcaggtctaagctcaatgtgactttctctaggaaagcatatgtgactcctaaatctaaattaggatcccattacatttttctctcttaggaccctgtttctttccttcagagaaatatatgtatagaaatatatgtaaatgtagaagaatataatgcattattatatattaagatctcgtatttgttaaaagttcctctctgacattcaaccacatgctctagctgggcaagcaccatatctcaagagtgtagcacctggtcgttgattggtagacagtcaatcagtatttcctgaattaataaatctgtaaatatgtcctcactgtctcctcctggaatttgtgagattctytgacttcatttctaatcaactttctattggctttattccttatcaatttaggttgtgtttcatacttcgttcattgccaagggaatttaatatttaaaatagttcaatagtaatttgttttgtaaagaaaagttcatttgattgtataaatattctgtattcttttgaaggcaaaacttattttctcacaaatactctctggttttggggctttgcactgctaggacagtgtcctttcacaactgcttaaacccattcatatttctatgcaggcactttcaccttctgtcactcccacaacacaatttaatgagatttggggagatttgtttcctgatttgtttcctttttgcttctggatggccacagacagaaatctggttaagggcaacctctagataagcaatagatatcagcccagagccctctagctgctactcaatcctt

SEQ ID NO: 57436 - DNA, 869 bp, Homo sapiens
gaacactagaatatgtgttcctaccacctagaatgctggctcttcatttgactaacacctaatcattcttcaggtctaagctcaatgtgactttctctaggaaagcatatgtgactcctaaatctaaattaggatcccattacatttttctctcttaggaccctgtttctttccttcagagaaatatatgtatagaaatatatgtaaatgtagaagaatataatgcattattatatattaagatctcgtatttgttaaaagttcctctctgacattcaaccacatgctctagctgggcaagcaccatatctcaagagtgtagcacctggtcgttgattggtagacagtcaatcagtatttcctgaattaataaatctgtaaatatgtcctcactgtctcctcctggaatttgtgagattctttgacttcatttctaatcaactttctattggctttattccttatcaatttaggttgtgtttcatacttcgttcattgccaagggaatttaatatttaaaatagttcaatagtaatttgttttgtaaagaaaagttcatttgattgtataaatattctgtattcttttgaaggcaaaacttattttctcacaaatactctctggttttggggctttgcactgctaggacagtgtcctttcacaactgcttaaacccattcatatttctatrcaggcactttcaccttctgtcactcccacaacacaatttaatgagatttggggagatttgtttcctgatttgtttcctttttgcttctggatggccacagacagaaatctggttaagggcaacctctagataagcaatagatatcagcccagagccctctagctgctactcaatcctt

SEQ ID NO: 57437 - DNA, 938 bp, Homo sapiens
tgcatgtaggtcttggccctatgtggggcaagttgggacacytgccattggcacatccagcctcaacacgcaccactttattacactttgtggacatgcttacatgggggaatccaggcatgtgcagaaaatacatatcacatctgaagggggctggaaaggtcttttttccattagggatgccgaataaactgtgtgttgtatacctgcattttgactgcaacccattacacaaggtcaagtgtgaaattttccacttgtagctttgtgccagcacccaaaatgtttcagatttaaagcagttcagactttggattttcagattagagacatggaacttgtgtctagtatcatccttattttcagctcaaggtttacttacttgaggtttctttccccttctgaacttgagcttcccctctgacaacacccattttcacccttatctgtgtcttgtaaaagttcattttgaaagaatgtttttaaagattaatttgaccacagcattttccatacagtaagtggtgttgaaagtgaagtttcagatttcctcacttctgtcatcttctagggccctgagagatgcccaagcaactatttcacatgcaaacagattgttataaaactaaaaaaactaaaatattctaagcaatatccagtatgacagctttgctcttccaatgtgtccttcatcacattcccttcctgctaaatggtgctgaagtggcttcatgggaaattgagatgcctatggacacttagtttaagattagtggagtttaggtttccatgtactcttagtataggcgcattactgtatgtgcctatgtgtgtctgtgtgtgtgatttgcgtgaacctctgtgtgtatctaagttatattgctcaccacactgatgtaagaagagttttcattctgttgactcacatggatgataat

SEQ ID NO: 57438 - DNA, 938 bp, Homo sapiens
tgcatgtaggtcttggccctatgtggggcaagttgggacacctgccattggcacatccagcctcaacacgcaccactttattacactttgtggacatgcttacatgggggaatccaggcatgtgcagaaaatacatatcacatctgaagggggctggraaggtcttttttccattagggatgccgaataaactgtgtgttgtatacctgcattttgactgcaacccattacacaaggtcaagtgtgaaattttccacttgtagctttgtgccagcacccaaaatgtttcagatttaaagcagttcagactttggattttcagattagagacatggaacttgtgtctagtatcatccttattttcagctcaaggtttacttacttgaggtttctttccccttctgaacttgagcttcccctctgacaacacccattttcacccttatctgtgtcttgtaaaagttcattttgaaagaatgtttttaaagattaatttgaccacagcattttccatacagtaagtggtgttgaaagtgaagtttcagatttcctcacttctgtcatcttctagggccctgagagatgcccaagcaactatttcacatgcaaacagattgttataaaactaaaaaaactaaaatattctaagcaatatccagtatgacagctttgctcttccaatgtgtccttcatcacattcccttcctgctaaatggtgctgaagtggcttcatgggaaattgagatgcctatggacacttagtttaagattagtggagtttaggtttccatgtactcttagtataggcgcattactgtatgtgcctatgtgtgtctgtgtgtgtgatttgcgtgaacctctgtgtgtatctaagttatattgctcaccacactgatgtaagaagagttttcattctgttgactcacatggatgataat

SEQ ID NO: 57439 - DNA, 938 bp, Homo sapiens
tgcatgtaggtcttggccctatgtggggcaagttgggacacctgccattggcacatccagcctcaacacgcaccactttattacactttgtggacatgcttacatgggggaatccaggcatgtgcagaaaatacatatcacatctgaagggggctggaaaggtcttttttccattagggatgccgaataaactgtgtgttgtatacctgcattttgactgcaacccattacacaaggtcaagtgtgaaattttccacttgtarctttgtgccagcacccaaaatgtttcagatttaaagcagttcagactttggattttcagattagagacatggaacttgtgtctagtatcatccttattttcagctcaaggtttacttacttgaggtttctttccccttctgaacttgagcttcccctctgacaacacccattttcacccttatctgtgtcttgtaaaagttcattttgaaagaatgtttttaaagattaatttgaccacagcattttccatacagtaagtggtgttgaaagtgaagtttcagatttcctcacttctgtcatcttctagggccctgagagatgcccaagcaactatttcacatgcaaacagattgttataaaactaaaaaaactaaaatattctaagcaatatccagtatgacagctttgctcttccaatgtgtccttcatcacattcccttcctgctaaatggtgctgaagtggcttcatgggaaattgagatgcctatggacacttagtttaagattagtggagtttaggtttccatgtactcttagtataggcgcattactgtatgtgcctatgtgtgtctgtgtgtgtgatttgcgtgaacctctgtgtgtatctaagttatattgctcaccacactgatgtaagaagagttttcattctgttgactcacatggatgataat

SEQ ID NO: 57440 - DNA, 938 bp, Homo sapiens
tgcatgtaggtcttggccctatgtggggcaagttgggacacctgccattggcacatccagcctcaacacgcaccactttattacactttgtggacatgcttacatgggggaatccaggcatgtgcagaaaatacatatcacatctgaagggggctggaaaggtcttttttccattagggatgccgaataaactgtgtgttgtatacctgcattttgactgcaacccattacacaaggtcaagtgtgaaattttccacttgtagctttgtgccagcacccaaaatgtttcagatttaaagcagttcagactttggattttcagattagagacatggaacttgtgtctagtatcatccttattttcagctcaaggtttacttacttgaggtttctttccccttctgaacttgagcttcccctctgacaacacccattttcacccttatctgtgtcttgtaaaagttcattttgaaagaatgtttttaaagattaatttgaccacagcattttccatacagtaagtggtgttgaaagtgaagtttcagatttcctcacttctgtcatcttctagggccctgagagatgcccaagcaactatttcacatgcaaacagattgttataaaactaaaaaaactaaaatattctaagcaatatccagtatgacagctttgctcttccaatgtgtccttcatcacaytcccttcctgctaaatggtgctgaagtggcttcatgggaaattgagatgcctatggacacttagtttaagattagtggagtttaggtttccatgtactcttagtataggcgcattactgtatgtgcctatgtgtgtctgtgtgtgtgatttgcgtgaacctctgtgtgtatctaagttatattgctcaccacactgatgtaagaagagttttcattctgttgactcacatggatgataat

SEQ ID NO: 57441 - DNA, 3413 bp, Homo sapiens
gaattcagttctccaaagtgttgttatgtttagcacttttaaccaataatttataaaaataattttttgttttgttaattttttcttgtttctaaacttgtagcaaaaatgtttcatgcctttcttcatcctatgaaaactgaaatccaacaattatactaaacattacactaaatatataaacagacagaatgggtctgcatagcattctctctttagtgtgttaccaaatatagtataaggaaatgtctctttacttaggacatcacagaaaaaaaggtttttcctcctgtcttaaaatccagtacttccttttaataatcagttgagttttttcttcttaagttacacagcacctttcagtagaaaaacatgtttttcttctttcagtttcatcttcaacgagtttccttggacatcaattatgtgtggctcattattaagtaccaaaaatacagacgtgaattaaacaatgtcgttgtatgcagggagttgataatctagaataaaacaartattctgcttttaaatgtacataaagattatctatacatcaaatgaccactaaccctaatgtttcaaaaatgcccttactacccaaaattatctacagatttaatgcaatccttatcaaaattctgatgtcttttttcacagaaatagaaaaaacaatactaaaatttatctggaacctcaaaagacctcaaatagtcaatgtactcttaaaaaataacataactgggaacattacgcttcctgatttcaaattatgttatacaactatagagatccaaatgtggagtacaatctatgacttatgaaagtttgaacaatcatattctgatgatgaattgcccaccttgcatcttacctcatgcattaggacatcacacttcctgatttcaaattacattgtaaagctgtagagatccatatgtgggctaaaatccaggacttaacgaaggtttgaacaatcacattcctatgatgaattgtccaccttgctccttacctcatgcattaacacacctaatcactgttacatcatagcattgaagaaagtggaactatgctctgttattgatgcttgatagaatgtatgctgttgggaggagagtgaccactgtgttttgcataagattttcatcttttttaatagcagaaaaaaattctactgttttaatagtagtaaaatagtagaaaaaatagtagaaaaattttaatagtagaaaaaagttgagagaaagtgacacttacccagaaatataaattcttttttttttcttttttttttttttttgagatggagtcttgctctattgcccaggctggagcgcagtggcataatctctgctcactgcaacctctgcctcccaggttcaagcgaatctcctgcctcagcctcccgagtagctggaattacaggcgtccaccaccacacctggctaatttttgtatttttagtagagacggggttttgctgtgttggccaggctgctccccaactcctgacctcaggtgatttgcccaccttgggctcccaaagtgctgggattacaggcgtaagccaccatgcctggccttaaattctttttcaaaatatctgcctctgaaacggaattacaggcaagatatgccaattagatattataactgtaatatcatagcctaaagtgatggaccagaccacatttccaaaagcagaatcagactctcctttttctcatttccttacgactagagaaaacatatttagctctcggtatttttgccctgccagagaggagtgaggggattggtcttgattctctttagggttaatgtacaccatagtaccatagatattcaagagaaaaggatagaagttctggagacatttgataggtttgaaaattctgtctcctgagttgtctggataggtgaatctaaagggtttggcaagtacaactgcaattcaggcagtagttattctcaggatccctactttgagaagcaaaattgaatggtggtggaatagacaaagcccaaacacttggatgttaggaagtcctttgtcttttagccatgaggccaggcttttgagtaaggctttggccctgggatggaactagaattctagttggaagaatccgtggaaggatgcatggtaatgtagtaagagcacagattcgatgtcaagaatgtctaggttttagtcctacctgttaaacatggctctgacaagttacttggactctctcttcttcagcttcctcttgtaaaatgaacatattttgaggtggcaagaatagttttgagaaggttaatatgtaaaacagtgccagaccatgataagctctatttatgtttattctattaatattaattatatcaacttaaattatcattaataattaacaagaacacaatggtattatgttgagctctattctgttagctaccttgaacattattattattattatttttggagatggtgtctcactctgtcacccaggctggagtgcagtggctggatctcagctcactgcaacctctgcctcctggggtcaagcaattctcctgcctcagcctcccatgaagttagtactacaagtgaccgccaccacagcaggctaatgtttttgtattttagtagagactaggtttcaccatgttgtccaggctggtctcaaactcctgagctcaggcaatcctcctgcctcggcctcccaaagtgctaggattacacgcgtgagccacctcacccagcctgaacagtatttttaaaattccaccttgcttatttattaaatgagtttaataacagttaccttttgaggtggtggtaagaatttgaagttttatgaagcacctagcatggatttcaaactcaatgaactaatgtcatttctaaaataatttctatatcaaggcagaggttaagaatatggacaattcagctggtgtccctggataataatgtgggtgctcagtttccacctggttccaggtcttagggaaagaaaaagatttcattttaaatgacaatcgattgagattaaggagagcctgaaatattgaaattgcccttgatttagttaacgttggctcaagaattttgtttagatgccatcactacatacagcttggaaaaaaaaacaaaaaagcaaaaaaacaaaaaaacacccaaagccaaggctgggaaacatttcgagctcagaatttcactgctaatgtaagagacacaaatatcttgcttttctaggtttgagtatgaaggtaataccatttactatgttagttcctaaaaaactagagaacaacttaaattatttttaagacaatcatgagtgtactttaacatacctttgacatgttaaaatattaccaagatgtggtaaggtccatcaactttgatgcccttaatatgc

SEQ ID NO: 57442 - DNA, 3413 bp, Homo sapiens
gaattcagttctccaaagtgttgttatgtttagcacttttaaccaataatttataaaaataattttttgttttgttaattttttcttgtttctaaacttgtagcaaaaatgtttcatgcctttcttcatcctatgaaaactgaaatccaacaattatactaaacattacactaaatatataaacagacagaatgggtctgcatagcattctctctttagtgtgttaccaaatatagtataaggaaatgtctctttacttaggacatcacagaaaaaaaggtttttcctcctgtcttaaaatccagtacttccttttaataatcagttgagttttttcttcttaagttacacagcacctttcagtagaaaaacatgtttttcttctttcagtttcatcttcaacgagtttccttggacatcaattatgtgtggctcattattaagtaccaaaaatacagacgtgaattaaacaatgtcgttgtatgcagggagttgataatctagaataaaacaagtattctgcttttaaatgtacataaagattatctatacatcaaatgaccactaaccctaatgtttcaaaaatgcccttactacycaaaattatctacagatttaatgcaatccttatcaaaattctgatgtcttttttcacagaaatagaaaaaacaatactaaaatttatctggaacctcaaaagacctcaaatagtcaatgtactcttaaaaaataacataactgggaacattacgcttcctgatttcaaattatgttatacaactatagagatccaaatgtggagtacaatctatgacttatgaaagtttgaacaatcatattctgatgatgaattgcccaccttgcatcttacctcatgcattaggacatcacacttcctgatttcaaattacattgtaaagctgtagagatccatatgtgggctaaaatccaggacttaacgaaggtttgaacaatcacattcctatgatgaattgtccaccttgctccttacctcatgcattaacacacctaatcactgttacatcatagcattgaagaaagtggaactatgctctgttattgatgcttgatagaatgtatgctgttgggaggagagtgaccactgtgttttgcataagattttcatcttttttaatagcagaaaaaaattctactgttttaatagtagtaaaatagtagaaaaaatagtagaaaaattttaatagtagaaaaaagttgagagaaagtgacacttacccagaaatataaattcttttttttttcttttttttttttttttgagatggagtcttgctctattgcccaggctggagcgcagtggcataatctctgctcactgcaacctctgcctcccaggttcaagcgaatctcctgcctcagcctcccgagtagctggaattacaggcgtccaccaccacacctggctaatttttgtatttttagtagagacggggttttgctgtgttggccaggctgctccccaactcctgacctcaggtgatttgcccaccttgggctcccaaagtgctgggattacaggcgtaagccaccatgcctggccttaaattctttttcaaaatatctgcctctgaaacggaattacaggcaagatatgccaattagatattataactgtaatatcatagcctaaagtgatggaccagaccacatttccaaaagcagaatcagactctcctttttctcatttccttacgactagagaaaacatatttagctctcggtatttttgccctgccagagaggagtgaggggattggtcttgattctctttagggttaatgtacaccatagtaccatagatattcaagagaaaaggatagaagttctggagacatttgataggtttgaaaattctgtctcctgagttgtctggataggtgaatctaaagggtttggcaagtacaactgcaattcaggcagtagttattctcaggatccctactttgagaagcaaaattgaatggtggtggaatagacaaagcccaaacacttggatgttaggaagtcctttgtcttttagccatgaggccaggcttttgagtaaggctttggccctgggatggaactagaattctagttggaagaatccgtggaaggatgcatggtaatgtagtaagagcacagattcgatgtcaagaatgtctaggttttagtcctacctgttaaacatggctctgacaagttacttggactctctcttcttcagcttcctcttgtaaaatgaacatattttgaggtggcaagaatagttttgagaaggttaatatgtaaaacagtgccagaccatgataagctctatttatgtttattctattaatattaattatatcaacttaaattatcattaataattaacaagaacacaatggtattatgttgagctctattctgttagctaccttgaacattattattattattatttttggagatggtgtctcactctgtcacccaggctggagtgcagtggctggatctcagctcactgcaacctctgcctcctggggtcaagcaattctcctgcctcagcctcccatgaagttagtactacaagtgaccgccaccacagcaggctaatgtttttgtattttagtagagactaggtttcaccatgttgtccaggctggtctcaaactcctgagctcaggcaatcctcctgcctcggcctcccaaagtgctaggattacacgcgtgagccacctcacccagcctgaacagtatttttaaaattccaccttgcttatttattaaatgagtttaataacagttaccttttgaggtggtggtaagaatttgaagttttatgaagcacctagcatggatttcaaactcaatgaactaatgtcatttctaaaataatttctatatcaaggcagaggttaagaatatggacaattcagctggtgtccctggataataatgtgggtgctcagtttccacctggttccaggtcttagggaaagaaaaagatttcattttaaatgacaatcgattgagattaaggagagcctgaaatattgaaattgcccttgatttagttaacgttggctcaagaattttgtttagatgccatcactacatacagcttggaaaaaaaaacaaaaaagcaaaaaaacaaaaaaacacccaaagccaaggctgggaaacatttcgagctcagaatttcactgctaatgtaagagacacaaatatcttgcttttctaggtttgagtatgaaggtaataccatttactatgttagttcctaaaaaactagagaacaacttaaattatttttaagacaatcatgagtgtactttaacatacctttgacatgttaaaatattaccaagatgtggtaaggtccatcaactttgatgcccttaatatgc

SEQ ID NO: 57443 - DNA, 3413 bp, Homo sapiens
gaattcagttctccaaagtgttgttatgtttagcacttttaaccaataatttataaaaataattttttgttttgttaattttttcttgtttctaaacttgtagcaaaaatgtttcatgcctttcttcatcctatgaaaactgaaatccaacaattatactaaacattacactaaatatataaacagacagaatgggtctgcatagcattctctctttagtgtgttaccaaatatagtataaggaaatgtctctttacttaggacatcacagaaaaaaaggtttttcctcctgtcttaaaatccagtacttccttttaataatcagttgagttttttcttcttaagttacacagcacctttcagtagaaaaacatgtttttcttctttcagtttcatcttcaacgagtttccttggacatcaattatgtgtggctcattattaagtaccaaaaatacagacgtgaattaaacaatgtcgttgtatgcagggagttgataatctagaataaaacaagtattctgcttttaaatgtacataaagattatctatacatcaaatgaccactaaccctaatgtttcaaaaatgcccttactacccaaaattatctacagatttaatgcaatccttatcaaaattctgatgtcttttttcacagaaatagaaaaaacaatactaaaatttatctggaacctcaaaagacctcaaatagtcaatgtactcttaaaaaataacataactgggaacattacgcttcctgatttcaaattatgttatacaactatagagatccaaatgtggagtacaatctatgacttatgaaagtttgaacaatcatattctgatgatgaattgcccaccttgcatcttacctcatgcattaggacatcacacttcctgatttcaaattacattgtaaagctgtagagatccatatgtgggctaaaatccaggacttaacgaaggtttgaacaatcacattcctatgatgaattgtccaccttgctccttacctcatgcattaacacacctaatcactgttacatcatagcattgaagaaagtggaactatgctctgttattgatgcttgatagaatgtatgctgttgggaggagagtgaccactgtgttttgcataagattttcatcttttttaatagcagaaaaaaattctactgttttaatagtagtaaaatagtagaaaaaatagtagaaaaattttaatagtagaaaaaagttgagagaaagtgacacttacccagaaatataaattcttttttttttcttttttttttttttttgagatggagtcttgctctattgcccaggctggagcgcagtggcataatctctgctcactgcaacctctgcctcccaggttcaagcgamtctcctgcctcagcctcccgagtagctggaattacaggcgtccaccaccacacctggctaatttttgtatttttagtagagacggggttttgctgtgttggccaggctgctccccaactcctgacctcaggtgatttgcccaccttgggctcccaaagtgctgggattacaggcgtaagccaccatgcctggccttaaattctttttcaaaatatctgcctctgaaacggaattacaggcaagatatgccaattagatattataactgtaatatcatagcctaaagtgatggaccagaccacatttccaaaagcagaatcagactctcctttttctcatttccttacgactagagaaaacatatttagctctcggtatttttgccctgccagagaggagtgaggggattggtcttgattctctttagggttaatgtacaccatagtaccatagatattcaagagaaaaggatagaagttctggagacatttgataggtttgaaaattctgtctcctgagttgtctggataggtgaatctaaagggtttggcaagtacaactgcaattcaggcagtagttattctcaggatccctactttgagaagcaaaattgaatggtggtggaatagacaaagcccaaacacttggatgttaggaagtcctttgtcttttagccatgaggccaggcttttgagtaaggctttggccctgggatggaactagaattctagttggaagaatccgtggaaggatgcatggtaatgtagtaagagcacagattcgatgtcaagaatgtctaggttttagtcctacctgttaaacatggctctgacaagttacttggactctctcttcttcagcttcctcttgtaaaatgaacatattttgaggtggcaagaatagttttgagaaggttaatatgtaaaacagtgccagaccatgataagctctatttatgtttattctattaatattaattatatcaacttaaattatcattaataattaacaagaacacaatggtattatgttgagctctattctgttagctaccttgaacattattattattattatttttggagatggtgtctcactctgtcacccaggctggagtgcagtggctggatctcagctcactgcaacctctgcctcctggggtcaagcaattctcctgcctcagcctcccatgaagttagtactacaagtgaccgccaccacagcaggctaatgtttttgtattttagtagagactaggtttcaccatgttgtccaggctggtctcaaactcctgagctcaggcaatcctcctgcctcggcctcccaaagtgctaggattacacgcgtgagccacctcacccagcctgaacagtatttttaaaattccaccttgcttatttattaaatgagtttaataacagttaccttttgaggtggtggtaagaatttgaagttttatgaagcacctagcatggatttcaaactcaatgaactaatgtcatttctaaaataatttctatatcaaggcagaggttaagaatatggacaattcagctggtgtccctggataataatgtgggtgctcagtttccacctggttccaggtcttagggaaagaaaaagatttcattttaaatgacaatcgattgagattaaggagagcctgaaatattgaaattgcccttgatttagttaacgttggctcaagaattttgtttagatgccatcactacatacagcttggaaaaaaaaacaaaaaagcaaaaaaacaaaaaaacacccaaagccaaggctgggaaacatttcgagctcagaatttcactgctaatgtaagagacacaaatatcttgcttttctaggtttgagtatgaaggtaataccatttactatgttagttcctaaaaaactagagaacaacttaaattatttttaagacaatcatgagtgtactttaacatacctttgacatgttaaaatattaccaagatgtggtaaggtccatcaactttgatgcccttaatatgc

SEQ ID NO: 57444 - DNA, 574 bp, Homo sapiens
ggccctatttccacctccaattcacctggaccaaactgacctcattttctccatcatatctcagttccttcaacccccaactcagttgtgcaggccagaaccaaagttaataataaatgtcagagcaagggtctcctgtcaggttcaccttsccttcccacttccctgccttcgtcaaagctcttccctccaccctgagcaccatttttgctctgtcttttctgcctttccaaatcccatccttcttcaaatgtccttccctccaggaagcctttcctgattttctcccagccaagggcttcatctgtacccatctcaggtcaataggctctatctgatggcacagacccatgtcacttccctcacacgagattctacatgggccagggaagtctgacttggctattgtctcatgcagcaaactgatccatgtctgacccatgggagatgctcaggagtcaggtctgattcaaagtggggctccacaaaaaaggagataaagtggacttcacccaaattataacttctgtgcatcaaaggacatcattaagaaaatgaaaggacaacctataga

SEQ ID NO: 57445 - DNA, 520 bp, Homo sapiens
cacctgtaatcccagccacttaggaggctgaagcaggagaattgcttgaactggggaggcggaggttgcagtgagccgagatcgtgccattgcactccagcctgggcgacagagcgagactctgtctccaaaaaaactaaataaaaataaaataaaaggtgaagagtcacaaagtttatttgtgtgaggcacttggagcagggtccaacacatccccacaagaggtcatgactctgaccatggataggcctgttctttgcccttggcctcycagcccccatatgcaccagaccttcagaccaatgaggcacctgccagtttgggtgtttcatctggtgtattggtttcttcctattgttgtgttctaattaccacaaacttagaggcttataatagcacaaatgtactctacggaagttctgtaagtcagaagtccatgtggacttggttggttccctggagggtctgggggagaatctgcttccaagctcattcagagggctggcagaatgcagttcca

SEQ ID NO: 57446 - DNA, 847 bp, Homo sapiens
atgaagtctgtttggattctcagcacttgaattcttgcccttttagtaggatttttaaaattattttaacattcatagctgttgacagatctgtatcacccctctgctgcaaaaggaagtggggttaggcatttatctctaattgtcatagatgtaccattgtgtatatgcaagaaggtttaatttgtgtggtcataactaaaatatgagagctcttattaaggtgagatcaaaatacctgtttatatatctgttatttaaagaaaaattttccacagtgttttgttattttccagcgtttcttagaacatttgggaattacactaaaatatagctgggtggattgaagtaaagggcaaatgagtttgagatgaagtttgagatgtgcttttttatatacaaaaagcacatcttccaccttaaacagttgtatgagacctaaatgaaatacagtgtgcaaagtaccttacaatgcatggaacaaagtaggccttcaacgaggattattsccctttcctttaacaatatgatagcataattgcagagagagaaaattggggcaatgagctttgaatagctaacggttttatcagttgtaaatgtgaatcatttggaagcaggagtgttgtcttattaatgacaggtcttattttatagcttagatttaaattaagtcactggtgcaaggcacttcatcagattattttcccaaagtgcaaaagtgcatgtgatccaagaaagagagctgtatttgggtatgaactgcaatgatacatatttatgtcatatctaataacataattgtatgttggattttttcaattagtttataaatattcagaagtaa

SEQ ID NO: 57447 - DNA, 725 bp, Homo sapiens
aaactgctactccatagacgagagtaggacgttcctgaaagcaagaggaggaatgtgtccaccctagggacaatgctcatatatatagggagatgtgctctgcttcaagggtttgtgataaagggttaattttcttaattactgtattttgccagaatcgatattattatctttaaagcaaaattaggaatgctgttgttctccagatatcgggatatctggacactcccaagtctgggtctgtttagtaaacattattaatttattcccctaaccataccataagcatctagaggctgggaatgcctaactttctgagaaagcagcccagcaagtccaagcctcattttcctaggccttactcaaaatgggtcgctttggtttgaatgcctctgacacctctggttctcccatattcttgaaacataaccctgsgactgagaccaagggtattcacaggggcctagcccctgttgggtcctgcactctcattgtcatctactcaacagtatgggactgaggaacattctgctctactttttagatgttttcagcatagctctttaatttcctgttctacacagctttagaatttggcaaatgtgttgaaacactggctgtgtgtcggaggactgtaaagtccccacttttgtctttccagctttagagaactgtaaaagtctcacttgttggccattcccagcctttctcccagaatagatctt

SEQ ID NO: 57448 - DNA, 725 bp, Homo sapiens
aaactgctactccatagacgagagtaggacgttcctgaaagcaagaggaggaatgtgtccaccctagggacaatgctcatatatatagggagatgtgctctgcttcaagggtttgtgataaagggttaattttcttaattactgtattttgccagaatcgatattattatctttaaagcaaaattaggaatgctgttgttctccagatatcgggatatctggacactcccaagtctgggtctgtttagtaaacattattaatttattcccctaaccataccataagcatctagaggctgggaatgcctaactttctgagaaagcagcccagcaagtccaagcctcattttcctaggccttactcaaaatgggtcgctttggtttgaatgcctctgacacctctggttctcccatattcttgaaacataaccctgcgactgagaccaagggtattcacaggggcctagcccctgttgggtcctgcactctcattgtcatctactcaacagtatgggactgaggaacattctgctctactttttagatgttttcagcatagctctttaatttcctgttctacacagctttagaatttggcaaatgtgttgaaacactggctgtgtgtcggaggactgtaaagtccccacttttgtctttccagctttagagaactgtaraagtctcacttgttggccattcccagcctttctcccagaatagatctt

SEQ ID NO: 57449 - DNA, 1200 bp, Homo sapiens
  misc_feature (1)...(1200): n = A,T,C or G
tgggcnnnnnnnnnnnnnnnnnnnnnnnnnnnnnnnnnnnnnnnnnnnnnnnnnnnnnnnnnnnnnnnnnnnnnnnnnnnnnnnnnnnnnnnnnnnnnnnnnnnncagtccatctttgtatgacatgatcacctgtgcagctgtgtggcagaagtccagaggaaagagtgggagaaagtgagaaggctgttaccatcctataggcaaggaacaaaacagacagtggaaacagatagaagatggcaggtcagagatacattgggaagataaaatcagcatggactcaccgatggaatgggtgtagaaagtgaggatatgggaggaggcagggatagctcttcccttcttgcctgcagcaactggaagaacagtggtgctgttgactgagatggggaagaccagttggcaaaagatgtgtttcaaaagagagctgcgttttggacattttgaatttgatatgccaagtagaggcatcaagcaggcaatttgatggttgagtctggagctcacaggaaaggttgtggatcccgggagcagaagatgtcccaaccaacagaactctgcaaggatttcgtctttgggcatctgcattacctccatgtccacattaccttttctacaatttcccaaatatgttaaaatgtgctgtttaatagctgtcttgtcttcagtaaagagattagaagtagaaagagataataatgagacaagagctacaacaaagagtccaaatgctcacagcactatttatattaggaaaacatgaggagcaacccaactatccattagtacagactagactaaatagtctctactcataggctaaatagcctctactcataggctaaatattgcacattccttaaatgaaatctagttcagccaccttggaattgctactatatatctacatttattttattttctattatgaaaagatatccacaatatattatgcagggggaaaaatcatattataaaaacaacatatgctgtataaatcatgccttttttcrttagagagaaattgataaccatattgatatggtccccaaatatgcttcccttaggtatatttttccctgagcaaaatgtatacaccaaaatttgaatcattgttgctttgggtggggaacttctgggtgagttttactttcttgttcacactttaatgcgttaccagataatttttacaatgag

SEQ ID NO: 57450 - DNA, 978 bp, Homo sapiens
  misc_feature (1)...(978): n = A,T,C or G
gnnnnnnnnnnnnnnnnnnnnnnnnnnnnnnnnnnnnnnnnnnnnnnnnnnnnnnnnnnnnnnnnnnnnnnnnnnnnnnnnnnnnnnnnnnnnnnnnnnnncttcaatcagaaactgattttttctcctcaaataccatgtcacatatttactcaaaatatgtctttcattgcctacagaataaagtccaaaccccttaagttggcctgatgagcccctaactgcctccaattctatcttccatttaaaggttcattttgtctactgttagtcacatatcacaagctttcttatcattatgattttccttttttctagttctgtcagctagaaagctccctccttcttcccaccaagcacacccattaagggaaaaaatagaggctgaaatccagcccacaaatatctcatcaatcggtgtgctgtgacttggccctatgactggccagaagggacttcttttcctaattctcacgaagatgccaaaagcactagtggcagttctggtgaagagatacataagatttcaactgtatttgcaatcttttcttttttattattattatttttgtcttaacaacattgagatgcaaagagtgaggtacaatgttgcaacagaggaagcatagagtggtattagaagaacttacaggaaggaagggctgtttaccaggtcatggagagtcaaagaaggcctcttgraggcaatgacatctcatatagtgtctgaagtaaggtggctagtggctagtgatgcaggacattggtggaggaagaaagagacagcatagtaagcacaaggaatacaaagggacatagggagggaggaagtatgaaggtggagggttggaatggggaatgatgagagttgatcctggatagataagcaggagtcagatagggaaggatataaaaaggccaggtaagggctttgagctttcacctgggggcaaagagacttagaagtgtttacacagg

SEQ ID NO: 57451 - DNA, 616 bp, Homo sapiens
aaataagagctgaagaaactaactattcttctctataacctctgaatttcaagttctttggaataccaagtttatgtactagtgcatttcaaatgagcatatgcagcatccaacttaataaaaataggtcattttgactggttaaaatatttagtctatgtttactgctaataaacatttatcaaattatgatcctataaaagttaatgtttggtactgacaacgcaaacaggtatagcatttaaagaaaaaagattaattaggctgaatgcagtactttattgactgtcattggtaacatgtttccataatcttccaatcatgtcaagtatctagttgtctcatcaacatgtctagatgtccaatttaatgcttacctgggctgtctcatctccaactttcatgcttgttcctgacatgcctcctttgctayataatgtcccagtgttggcagagagccccaacaccatttctataaatgccatctgtttgcatcagagatgttatttctaaatgatgagtcataaatattaagctctggccactgacggtgcaagatagaaaatgggaatccctgtaggttcagagataaaaatcaaatcctagtttctacaat

SEQ ID NO: 57452 - DNA, 681 bp, Homo sapiens
ctcatatccctccatctcttgcttctcatctcagctacctgcagtcctaagtgtattccctatcacaatcactttgtgacttgctcaggttctggtcaacagaaactgcctgaagtttagtgtgtgtaactgtatcttagcttttcctttcccaacgaattaggaaaggtttcccctagtaatggcagttaattatttcttttatgaaatcatgattagaaataattgagtagtgtatggtcagtgtataactatagattgacaaattgattacagtgtttgtccttataactaaagttgcctctaatgttgggtagaaagaaatacccgaaatctgcttttctttctttctttcttgagtaggaagtgggtagrgtgatgtgtaaggaagtgaaggtgaaaatatttggatataattgaaactaaaaaggaaatcccatgaccactgagtactatagtatttttggctttattctctagaaaacaaggaatctccaagtgcttttatagggggcagacattatctgacttgagacttaagaagataaattggaccacagtgagcaggaaagattacacaggagagataacagagcaatcaggagtccactgccacaatttccagggtaagggatgatgagaacctgatcagaagctacttcagtaacccagaatacacag

SEQ ID NO: 57453 - DNA, 597 bp, Homo sapiens
tgctgagagcagtgaccattactatacatttgtctccttcagtcaaaggaacatgggctggatgtagaccctgagactaggcatcaataaggagataggaagtctgttggtcccacacagtgtggtagtataaatcacacaagaggaccaatcaatgtggcaagagaagagagagagagccaatccccttttgaaattgaatgcaggcttaratagttccctctacctcctttaccttacaccaggtccaagtcctgttaatttggagcctgtactcagtggtgaccaaatgacagtagatgcgattggttatcatacaagtaaaaagaaaacatggtttaggacataattactcaaagattagacccacatactgttttttctctcataaagacaacacacagaactgagaggactacacattcaaaaagaaaaataatgaaaagctcacaagcctcccttccctacaaggagctgcaaagggaagccaagtagtaaggagttttaaacagagttgaaaaatccagagccagagtgccagagtttctccaccagaccacttaagccaggggaggggtgccacccatttgctgcctg

SEQ ID NO: 57454 - DNA, 1003 bp, Homo sapiens
gcgtgctgcactgtgagctaacactgattcacccactcatcaaatgcactggactctaagcactgggaggaaagaaatgtcttttttttccttcatacatttaatataatttttcttttcttattatttttatttttatatattcatggggtacaagcgcaatcctgctacactgatgtattgcattatggtgaaatccgggacttcagtgcatccatcagtggagcaatgcacgttgtacccatcaagcaactgcttctggtccacagtcttcagtcatgtctttcacgctttgaatcctcaacccgaatgcacccaacacctaacactgtgtatgacccatagttttttccataaactttggtcgcattatatgtttgctctagattagtggttctcaaatgttagcgtgcattagaatctcctgcagggcttgctaaaacacagattggtggatcccactcccagcrtttgtaattctttacatatgggtcagggcttgagagtatgcatttataatatgttcacaggttataatgcaaaattatataatgcaaaattgtaacctgtgaacatatcagaaatgcaaactctgcaggtgtggtgaccacattttgagagtagatagatagataggtagatagataaatagacagatgacagatagataaaacacccagtaactgcaaattaatattaattatttgtagtaaaggaactcacctcacttgctgctggcacagacaggataaaacagttgtttaacaaaagccacaatgtgtttcgttacaaacagaccaggcaaatgtgagtttaacccttaatcttttaaatctataagaatattaaaactgctgttgcatttttgtaatcacagtttttatttgttcttaattagtaagaacaccagctgacttgccacacccactgggatggttataattaaaaagagacataataacaagcactggcaaggatgtggagaaaacagaaacttcatgca

SEQ ID NO: 57455 - DNA, 825 bp, Homo sapiens
gagggaattactgcgggctacttgcctacaggagatggaggctcctcctttttgcctgataacttgagcattgcaggaatttgctctgcctttccaacccaaggacccctgmatgtcaccatgtcaccctcacctcagggtgactctctattgcttcagctctggtctaaaagaattgctgggggttaagtagtgtttgacccagatcatcttatttgtcctaagaccataaggaccctcagagccttcttgcccctggtgttccccaccgtcaaacttgaggagcccctgggaccattcccaccttgggtagctcttttcctatgcgtagccatgggtaacagaagcaacccagaggttacctctgagtcccgcagtccaatcctgtaatcactgtactttcaggcatgtcatattattttctcataaaaagggtacctcttccagcatggttattgatctaataatgttacacataagttttctgtcacacattaagatatgtctgtgaaagaggaatgttataccttgaatatatcattagatgattctgaactgcatattttggatacactttttttctttgtgagcaacttgttaagtcacagaaagaaggcaaccagaattaattagattgctacgacttagcaaaatgtcaactatgttcagtgagatagataagaggtaattcagggtctctcctgatttgtttggttgagtacatgatactgcaacaacagaaagaaaattcagtgcacataatttgcctgagtgaatatcatttcataaagaaatactggaattatatctgcttttctaaaagca

SEQ ID NO: 57456 - DNA, 843 bp, Homo sapiens
aaggtcaggagatcgagaccatcctggctaatacggtgaaaccccgtctctactaaaaatacaaaaaattagctgggcatggtggcacgtgcccatagtcccagcttcccaggaggctgaagcaggagaatcgcttgaacctgggaggaggaggttgcagtgagcccagatggtgccagtacactccaggctgggtgacagagaaagactccgtcttaaaaaaaaaaaagaaagaaagaaaggcactaaattttataaaataaaagaacataagaacatatctggtacctaagtttattgttttttccctatcattttgaattctgtaaacamtttctttctagaaagaattgtacactactgagtcagaggggaaaatacagtgggcaccccacaagtgttacaggggctggatctccctcttcctcagcttatttggaaatctggttaagattcactatatttccatgtgcttggctcaatatagagggttctagggtcttaatgttacaagtattgattatttcacatttattctcaccatctaaaggcagagattcattgctacataggtatattttatattattgttctcctagaagatcatggttgaaaatgatataaaatgttttattcagggttattttatatctgttcaaaaatggtggacttccttaaaaatcacctgtgctgaactgggtaacagctggattcatattaaaacttgcaggtttgaagaagagaagcatttggaaaatgcagagaataaacacagtatgggttggtgacttagctgaaggctcaacaacggttgagagagaagtagagataaacccatagagg

SEQ ID NO: 57457 - DNA, 843 bp, Homo sapiens
aaggtcaggagatcgagaccatcctggctaatacggtgaaaccccgtctctactaaaaatacaaaaaattagctgggcatggtggcacgtgcccatagtcccagcttcccaggaggctgaagcaggagaatcgcttgaacctgggaggaggaggttgcagtgagcccagatggtgccagtacactccaggctgggtgacagagaaagactccgtcttaaaaaaaaaaaagaaagaaagaaaggcactaaattttataaaataaaagaacataagaacatatctggtacctaagtttattgttttttccctatcattttgaattctgtaaacacwttctttctagaaagaattgtacactactgagtcagaggggaaaatacagtgggcaccccacaagtgttacaggggctggatctccctcttcctcagcttatttggaaatctggttaagattcactatatttccatgtgcttggctcaatatagagggttctagggtcttaatgttacaagtattgattatttcacatttattctcaccatctaaaggcagagattcattgctacataggtatattttatattattgttctcctagaagatcatggttgaaaatgatataaaatgttttattcagggttattttatatctgttcaaaaatggtggacttccttaaaaatcacctgtgctgaactgggtaacagctggattcatattaaaacttgcaggtttgaagaagagaagcatttggaaaatgcagagaataaacacagtatgggttggtgacttagctgaaggctcaacaacggttgagagagaagtagagataaacccatagagg

SEQ ID NO: 57458 - DNA, 843 bp, Homo sapiens
aaggtcaggagatcgagaccatcctggctaatacggtgaaaccccgtctctactaaaaatacaaaaaattagctgggcatggtggcacgtgcccatagtcccagcttcccaggaggctgaagcaggagaatcgcttgaacctgggaggaggaggttgcagtgagcccagatggtgccagtacactccaggctgggtgacagagaaagactccgtcttaaaaaaaaaaaagaaagaaagaaaggcactaaattttataaaataaaagaacataagaacatatctggtacctaagtttattgttttttccctatcattttgaattctgtaaacactytctttctagaaagaattgtacactactgagtcagaggggaaaatacagtgggcaccccacaagtgttacaggggctggatctccctcttcctcagcttatttggaaatctggttaagattcactatatttccatgtgcttggctcaatatagagggttctagggtcttaatgttacaagtattgattatttcacatttattctcaccatctaaaggcagagattcattgctacataggtatattttatattattgttctcctagaagatcatggttgaaaatgatataaaatgttttattcagggttattttatatctgttcaaaaatggtggacttccttaaaaatcacctgtgctgaactgggtaacagctggattcatattaaaacttgcaggtttgaagaagagaagcatttggaaaatgcagagaataaacacagtatgggttggtgacttagctgaaggctcaacaacggttgagagagaagtagagataaacccatagagg

SEQ ID NO: 57459 - DNA, 516 bp, Homo sapiens
ggacagattttgtccgtatctgcagaggagatgggaaaagccaaaaggaggggcgacaactgatcctwtggggaggagctttacattcaaatgaggacacctcctggcatctccagatggagctccgaattcattacagtattacttaaaggattttattaaaagaccaaaccacactgcacttgtggctgaatgcctttatcagagatgaatcttacatgtgttaggacaggctgacagtggctcccaaagatatgtctatgccccaatcccgggaccctgtgaaggttacttcagaaggtaaggttctccagatgtgatcaaagaccctgagacgaggaaattatcttgaattatctggctgggtcttaaataccatcagaactgcccttgtaagagagataaaggtgatgatgaacagagccccacacaaaagagaagagggtgtgaaaatggagtgaggcacccacaaggtgaggcacacgggcaaccacaggaagccggaagaaacgaaga

SEQ ID NO: 57460 - DNA, 516 bp, Homo sapiens
ggacagattttgtccgtatctgcagaggagatgggaaaagccaaaaggaggggcgacaactgatcctatggggaggagctttacattcaaatgaggacacctcctggcatctccagatggagctccgaattcattacagtattacttaaaggattttattaaaagaccaaaccacactgcacttgtggctgaatgcctttatcagagatgaatcttacatgtgttaggacaggctgacagtggctcccaaagatatgtctatgccccaatcccgggaccctgtgaaggttacttcagaaggtaaggttctccagatgtgatcaaagaccctgagacgaggaaattatcttgaattatctggctgggtcttaaataccatcagaactgcccttgtaagagagataaaggtgatgatgaacagagccccayacaaaagagaagagggtgtgaaaatggagtgaggcacccacaaggtgaggcacacgggcaaccacaggaagccggaagaaacgaaga

SEQ ID NO: 57461 - DNA, 516 bp, Homo sapiens
ggacagattttgtccgtatctgcagaggagatgggaaaagccaaaaggaggggcgacaactgatcctatggggaggagctttacattcaaatgaggacacctcctggcatctccagatggagctccgaattcattacagtattacttaaaggattttattaaaagaccaaaccacactgcacttgtggctgaatgcctttatcagagatgaatcttacatgtgttaggacaggctgacagtggctcccaaagatatgtctatgccccaatcccgggaccctgtgaaggttacttcagaaggtaaggttctccagatgtgatcaaagaccctgagacgaggaaattatcttgaattatctggctgggtcttaaataccatcagaactgcccttgtaagagagataaaggtgatgatgaacagagccccacacaaaagagaagagggtgtgaaaatggagtgaggcacccacaaggtgaggcacaygggcaaccacaggaagccggaagaaacgaaga

SEQ ID NO: 57462 - DNA, 520 bp, Homo sapiens
cacgctcctaagctggtaaacggtatgcctgaagctaaggcatagacagagctgcccaagaatgaggccagttgtagatgaaaataaaactgcaagaaggaaagaggcagactgctgatgaaagaatctgattgcctaaattcagcctggcttcaatcaagacactttggttccctttattattcaagcctatttgatcttagattttggtcacctgaaactgaaaaatgctcaataagtacactgtcctgagcccccacccttatcttccctttacagccaataaattgacaaggattatgtactttttgtgtgtatatggcagcttttccattatcatgatcatcatctcactgtaggtcctcatgttaatgacctaactaatccttacagccaatgtttccttattgactgtccccagccacacacacaccttacatatcaccagagcagaaacrgttttaaactattgctgagtgcaagtcacacaaacagccatatcaaccagctccaatggatc

SEQ ID NO: 57463 - DNA, 686 bp, Homo sapiens
agaggtgttcataatattctctgatagttatttgtatttctgtggggtcagtggtaatattgcccttgttgtttctgattgtttatttgaatcttctttcttttcttttttgttagtctagctagtggtctattttaattttttcagaaaatcatctcctggatttgttgatattttgaatgtttcttcatgtctctatctccttcagtctgcctgtgtgcagttctagtttcagtctgttttagagmtcaagcttgaatacataagaagaaagaagaagactgagaagaaggagaaggaggggtggaagaggaggaataagagaggagaaataagaaggagagagagagggagggaggaagaagggaaagaggaaggatgatgagagggagggaaggaaagaggaagggaaggaaggaggaaatcaagttaggcaaatcaccgctaggtcatccttcaggtcctgagctccataccaagttcaggggtacatgtgtagctattgaaatgggaaaggttcccttgtcccttttgcagggcatgtgatggaggtgtggcttgcttcttcagtgcttcagtgccccgctggtcaaacctctaggggagcatacagacaggctgcagggcttcaaccccatggcaatgtctaggggtgaatgtttactactcttatccaacgttcagag

SEQ ID NO: 57464 - DNA, 686 bp, Homo sapiens
agaggtgttcataatattctctgatagttatttgtatttctgtggggtcagtggtaatattgcccttgttgtttctgattgtttatttgaatcttctttcttttcttttttgttagtctagctagtggtctattttaattttttcagaaaatcatctcctggatttgttgatattttgaatgtttcttcatgtctctatctccttcagtctgcctgtgtgcagttctagtttcagtctgttttagagctcaagcttgaatacataagaagaaagaagaagactgagaagaaggagaaggaggggtggaagaggaggaataagagaggagaaataagaaggagagagagagggagggaggaagaagggaaagaggaaggatgatgagagggarggaaggaaagaggaagggaaggaaggaggaaatcaagttaggcaaatcaccgctaggtcatccttcaggtcctgagctccataccaagttcaggggtacatgtgtagctattgaaatgggaaaggttcccttgtcccttttgcagggcatgtgatggaggtgtggcttgcttcttcagtgcttcagtgccccgctggtcaaacctctaggggagcatacagacaggctgcagggcttcaaccccatggcaatgtctaggggtgaatgtttactactcttatccaacgttcagag

SEQ ID NO: 57465 - DNA, 686 bp, Homo sapiens
agaggtgttcataatattctctgatagttatttgtatttctgtggggtcagtggtaatattgcccttgttgtttctgattgtttatttgaatcttctttcttttcttttttgttagtctagctagtggtctattttaattttttcagaaaatcatctcctggatttgttgatattttgaatgtttcttcatgtctctatctccttcagtctgcctgtgtgcagttctagtttcagtctgttttagagctcaagcttgaatacataagaagaaagaagaagactgagaagaaggagaaggaggggtggaagaggaggaataagagaggagaaataagaaggagagagagagggagggaggaagaagggaaagaggaaggatgatgagagggagggaaggaaagaggaagggaagraaggaggaaatcaagttaggcaaatcaccgctaggtcatccttcaggtcctgagctccataccaagttcaggggtacatgtgtagctattgaaatgggaaaggttcccttgtcccttttgcagggcatgtgatggaggtgtggcttgcttcttcagtgcttcagtgccccgctggtcaaacctctaggggagcatacagacaggctgcagggcttcaaccccatggcaatgtctaggggtgaatgtttactactcttatccaacgttcagag

SEQ ID NO: 57466 - DNA, 686 bp, Homo sapiens
agaggtgttcataatattctctgatagttatttgtatttctgtggggtcagtggtaatattgcccttgttgtttctgattgtttatttgaatcttctttcttttcttttttgttagtctagctagtggtctattttaattttttcagaaaatcatctcctggatttgttgatattttgaatgtttcttcatgtctctatctccttcagtctgcctgtgtgcagttctagtttcagtctgttttagagctcaagcttgaatacataagaagaaagaagaagactgagaagaaggagaaggaggggtggaagaggaggaataagagaggagaaataagaaggagagagagagggagggaggaagaagggaaagaggaaggatgatgagagggagggaaggaaagaggaagggaaggaaggaggaaatcaagttaggcaaatcaccgctaggtcatccttcaggtcctgagctccataccaagttcaggggtacatgtgtagctattgaaatgggaaaggttcccttgtcccttttgcagggcatgtgatggaggtgtggcttgcttcttcagtgcttcagtgccccgctggtcaaamctctaggggagcatacagacaggctgcagggcttcaaccccatggcaatgtctaggggtgaatgtttactactcttatccaacgttcagag

SEQ ID NO: 57467 - DNA, 686 bp, Homo sapiens
agaggtgttcataatattctctgatagttatttgtatttctgtggggtcagtggtaatattgcccttgttgtttctgattgtttatttgaatcttctttcttttcttttttgttagtctagctagtggtctattttaattttttcagaaaatcatctcctggatttgttgatattttgaatgtttcttcatgtctctatctccttcagtctgcctgtgtgcagttctagtttcagtctgttttagagctcaagcttgaatacataagaagaaagaagaagactgagaagaaggagaaggaggggtggaagaggaggaataagagaggagaaataagaaggagagagagagggagggaggaagaagggaaagaggaaggatgatgagagggagggaaggaaagaggaagggaaggaaggaggaaatcaagttaggcaaatcaccgctaggtcatccttcaggtcctgagctccataccaagttcaggggtacatgtgtagctattgaaatgggaaaggttcccttgtcccttttgcagggcatgtgatggaggtgtggcttgcttcttcagtgcttcagtgccccgctggtcaaacctctaggggagcatacagacaggctgyagggcttcaaccccatggcaatgtctaggggtgaatgtttactactcttatccaacgttcagag

SEQ ID NO: 57468 - DNA, 686 bp, Homo sapiens
agaggtgttcataatattctctgatagttatttgtatttctgtggggtcagtggtaatattgcccttgttgtttctgattgtttatttgaatcttctttcttttcttttttgttagtctagctagtggtctattttaattttttcagaaaatcatctcctggatttgttgatattttgaatgtttcttcatgtctctatctccttcagtctgcctgtgtgcagttctagtttcagtctgttttagagctcaagcttgaatacataagaagaaagaagaagactgagaagaaggagaaggaggggtggaagaggaggaataagagaggagaaataagaaggagagagagagggagggaggaagaagggaaagaggaaggatgatgagagggagggaaggaaagaggaagggaaggaaggaggaaatcaagttaggcaaatcaccgctaggtcatccttcaggtcctgagctccataccaagttcaggggtacatgtgtagctattgaaatgggaaaggttcccttgtcccttttgcagggcatgtgatggaggtgtggcttgcttcttcagtgcttcagtgccccgctggtcaaacctctaggggagcatacagacaggctgcrgggcttcaaccccatggcaatgtctaggggtgaatgtttactactcttatccaacgttcagag

SEQ ID NO: 57469 - DNA, 573 bp, Homo sapiens
gaattgaaaacaaatctgtagaataaaaataataataataagatgtaaggaactgccgtacaccaatcaaaatccataatgttagccttcaagacagcatggggcaaatctcctgataaatgaaatagcccaaaggaaaaaaaatagaagtccagtaaatgactcagaattgagtcratagacatttatggcagatggagcactgtacatcagtggggagacataaatacataggactggggcacttgctcttccaaattcttcatgactccctcttcattgagccctgagggaaatggagagagagaaaagtaagtcggggacaggtgagaccattcactcccagatgcacctctatttccacatcttcaacttagcctcattaagtgattttgtaaacaagctgagaataccagatggctatggttcactttgtttgtgtatctccccaatgccaatgtgactgcttcaatagactatgtcacagatatgttgcttgtaatatttgacatgatgtgagtttttattcaagttaagcaacagccatgagagacaagcacagagagcctatcc

SEQ ID NO: 57470 - DNA, 573 bp, Homo sapiens
gaattgaaaacaaatctgtagaataaaaataataataataagatgtaaggaactgccgtacaccaatcaaaatccataatgttagccttcaagacagcatggggcaaatctcctgataaatgaaatagcccaaaggaaaaaaaatagaagtccagtaaatgactcagaattgagtcaatagacatttatggcagatggagcactgtacatcagtggggagacataaatacataggactggggcacttgctcttccaaattcttcatgactccctcttcattgagccctgagggaaatggagagagagaaaagtaagtcggggacaggtgagaccattcactcccagatgcacctctatttccacatcttcaacttagcctcattaagtgattttgtaaacaagctgagaataccagatggctatggttcactttgtttgtgtatctccccaatgccaatgtgactgcttcaatagactatgtcacagatatgttgcttgtaatatttgacatgatgtgartttttattcaagttaagcaacagccatgagagacaagcacagagagcctatcc

SEQ ID NO: 57471 - DNA, 728 bp, Homo sapiens
tgaacattattgttttacatgtttttcagtttaaacaaatgggatyacactgaatatatttttctgaaattgctttttggttcaatattaaatttgtaagattcattcttatgatattcttatctgtactttctgtgcattgatttagagtattccttcacaggataatactataatgagcattccattttattagattggggttattatccatttttttctgttacaaaaagtagatgtccttttcttgtatgagtctcctggacataagagttagattttctctaaggtataaacccaacattcaaatcattgtgtcaaaagatttgtacactaagttaaaatgaactgttttccgatttatgctcccattagaagttaaaggttctgatagatctatattctcaacaatacctaatagtatcacagttttttttttttttttttttttgagacagagtctcgctctgtcacccaggctggagtacagtggcgtgatctcagctcactgcaagctccgccttctggtttcacaccattctcctgcctcagcctcctaagtagctgggaccacaggtgcctaccaccacgcctggctaaattttgtatttttgttagagacggggtttcatcgtgttagccaggttggtctcgatctcctgactttgtgatctgcctgccttagcctccaataatgctgggattacaggcatgagccaccgtgcctg

SEQ ID NO: 57472 - DNA, 830 bp, Homo sapiens
gaaagagtctgtctgggtatttcttcttttgatttgcattttgctttcaattcttctttcacactatcctaagcattaatcaactcgtcgtttatgtcagttagtacaaaacttcactatcctgttcattatcaccatttcattttgttctgcataggccagactatttatttaaaaatgtttaaagaaacctaaggccttaaaggattctttctcagggactctactgtttgtatttagagaaatgctcatttgttccactgttttactttcttcttgggtcacgctctttgatgactgccatcttacagaggatgacaaaagagggcccaggctgagacaatgatacctgcttgcccctttggattttattttcttagtgttctcaaaatattaataaaatgtcaaaaacaaattaatatcaccagaatgtgtgcctcacttaaaatttttctctctaacaagtttttgtttcctagttcctttggtaccctaatgtttaggtaaatagtctctgaggaaaggatgtgaaagtcatagcaaaatatatgctggacttgaatgaaaaatatctgtttcataaaagttaagcaggcaaccaaaatttaccttttttaacctaaattatctaaacatgtatttacatttctgctycattaaaatatatttgagattgaatgctcctgagacagattttggaatgccctccctttctaaaatatattttttattttttgtggactaaacagttatttaaaaatgaacttaatgattgctaattagttatctaaatacttatttaaaaataaacttaatgattgctaattact

SEQ ID NO: 57473 - DNA, 1369 bp, Homo sapiens
ctacaccatgtataccctttatccttgtgtaggcacttgatcccatacaccgccctggattrcaactgatcagctttaagtgtgccatctttcctactgacctagctctaaatccctgtagggtaggaattgtcttaaaattgccgagcttggatgcgtagcacagcactatgaacatcgtaagttatctgtgaaataatgtagcatagacctacgctaaagaagacaaaggaacatggatctctctgttcagaactctatgtgttccacttattttaatgcatcctttttccaacctttccaaggataataggtcccatgtattgaactcttaccatgtgccaggcacacagctaacattgaacatgtatgaactcacttaatcctcacaatgatcctataaaatatgttctaatcccatttccactttacagatgagaaagctaaggcacagaaagattaaagcaacttgtttgaagtcacattgcccatgattggaggcgctaagtttcaaacccctgcagagtagctctggagcctgtgcccctaaattctaagctgttacaatggccattgtatagtcacgaacatggaaacatacagaaaaagtgatgtgggatggttccaaaaagctaattaagggtgggagacaagactttggtttcctgcttctctgatacggaccagggtttggagggccactctgagtaagtaagaaatctagccggaactttctttctctgcagacctcacatcctaacccagcaaacctaccagaagcgggcaaactgattttgggacccactacttcaaagcaagaaggtaaaagctatttcagggtaactagacttcaggagccctcaatattgaacaatgtcaaatgtttgtccttccttccatccatggcgggttttctcaaattaaagaacatttaaaaattgtaaggatatattttcttttcttccttctctctctttttaaaagtaaagaatgcagcattatggttgagtatctaaatgtcatcctttatattctcatcgtccacactgccctttgatcgcccatcacagaagcagtcacaacaaacagggtttactctcctttaaagaggcaatccaaacctcttatccactctgcagcaagaagcaactaattgtctggttagcccccaatctcccttggcaatggggaaatactaaaatctttgaatgagaaagtccttcatcaaattttttaacttttaattttaaaacattttttcaaggaacctgcaaatgccaaactccaaaagtgtttctctggtccacgttcatgggccatttctgcaggaccaattccttcttttgctctaagactcagctccagagct

SEQ ID NO: 57474 - DNA, 1967 bp, Homo sapiens
cctttaaggtccagttgactaaaatgccttcctacttatagcagtgtataccatacatgatcttaccgtatttttttactctcaaaagcaagctttgggactttgaactggtgccaagcaggcctccctaaagaccaacagactatctcactactaagcaagaagagatccatttttagcatctccctcaccaatatttttcagccttcttaaagcaactccatcacacgcaatcttctctcctctccttgttagataagcttctaatttgccgtgagaattattggtaccctcgaatactgaccatctttccaccttatcctagttagaactttatgtcatgaaagaaagatggaaagttttggtgacccatttcagactttcccatttcagttctgtgaataaacatgagaaaatwtggtaataacctattccaaagttctgattttgatggagtatgcatttaatttgatgacagactgaatttggtttaggttttctgtcttctttgttcaacaggaattccgatgctgaagatcgtgtttgcaggccatgagcatctctctttaatatctgtacccttgctcatctaccacccagctcagatccttctgggaagtgtgttggtgccaacaatcaagtcttggatggtatcaaggcagaaggtgagtccccagaaagatcttatttggatccaagttagattaaaatgctgttcctgaatctgaactgttcatacactttcgattttgcttgcatatctttgttttcaagtacatattttcttacttaaatacaataataatggtgcactgatccattccaatttgaacaggagggttgaggttaaagattttaaattgttataaaagacaattatacttaacatgcagtttttacaagctcttttgaattcattcatattgaagggcatattatatggggtaaaggttcagtaaatatactccaaatagatacctgctccactctggtgcataccatctttgcctcagtctttcatctatgtcttacttcacatgcctttccaaataagatagaacctggcattatccaggttgcctactttatttttaattttccagatatataataacctatttgtacagcaaaactgcatttgggcattaaaaaataaactttaagtagctaagaagtccatgcaatgttaatttcaccacacttagaatcttgtacacattagatatttgtggatttcatttcctaaattatcaacaaaataagtaaaccaggtgattcacaagaagtttagatggtgcatatcacgtggtagcattgatagaactgactccttcccagtgatttggacataccaggacttatttttgtctattcacaaagtagtgactgttatcaggagatgtgtgggaagaagaggtatccaatgacaagtgccctgtgtcatgttcttaatatcctgaaaataggatggccacagtaccacctattgagcactgtgtgtgctaagcacatcctatcctctacctggttcaaaggatggatcttgggccagcctgcctgggctcagagctcaggctgctggccttctcatcctgtaacctggggcatactttacttctctgtagctcagtttctgctgactaatgataatatctacaccctagggttgtagaggattacgtgatgagtgtttgataatgctagctgccataattattatcatcattgttcatcattatctacaatgatgttcactgcaggctttgctctctccattttatgggttaggaaatgggctcagggagttgagcagctggcctgagaccatagggtagttcagccagtgctggagttaggacctgaacactgggctatttgacccccaaaatctttacccaacacggtgatgacactccagatagaaatgtaacatcacttttagaaggtttgccctaggcacccaggat

SEQ ID NO: 57475 - DNA, 718 bp, Homo sapiens
ctgcatggctgtacagatgcacctgctgaatgactaggggtatctcttcatgactcctcttaaaacagtggctagtgtagtaacacatcaccttgaattgcttgccattcttgatgcctaaatccattctccctcactctcactgccctggaattgcacacgcaaattgagctctggtacttagtccgtgctttgacttctgtttcctagagagcttttaactaaatcatggtaagagcttttagtgttcggtgtctgttttcatcagaataatgtctcctggggtactttatcatctagtaagcattctagtgtcaaaaaagtaacaaaaattgactaaactcatttgcttagtcatttatatttcacttaacttatatagaaaaattccctgaatatttaaagctcaattttaatagatgtatttccattaaattttaaaatttttattctttttttgtattgatgtctaaacaactataaagtgaatttagacaaataaatttgcagaayctagagattttattgattactaagaaacattgccagtacagttgaccattgaatgacatgagtttgaactataagggtccactttacatgcagatcttctacctctgccatccctaagacagacaagcaagaccagccccttctcttcttcctcctccttagcctattcaacatgaagatgatgaagatgaagacttttatgaaa

SEQ ID NO: 57476 - DNA, 702 bp, Homo sapiens
aggcttatgctaacactctacactccagtcctttggccttcctttttgatatttgaagggagctatgtggkatttacaaagcactcttctatacgcctggctcttgcacatgaattaccgactttcagaattattgtctctgatgtgagctccattttgtggcactaactcttttctgtatgtttgtatttgaggtataattatccaaatttttccagtgcatgcctcagaaatcaacagggggagggtttcttgcccacgaaggtatacaggaaaaaagcagactgcaacatctcaaaatatgatctgatgacatctacttaatatggaaaccttgtttctcatgagagttttgcagaaaaactctgtataattttcaaaacatgaatccagaataaaataataaaatgaatatgtgacctctgtaatgtaggaaatgtttcttcaaaaggaaaatattggagcaaataaacagtgcattataatggacagaatagttgatgagtagttgggacgtctggatttcagttctgcttttgacatttaccaaaatgtgacgctggaaaattattaagcttattaggcctaagatacctgccataagtgaggaaagggcagtactaacatttctgattatattattgggtttgatgatggatcaaagtgggtaatagaaaataatatttagaaaattacaaacac

SEQ ID NO: 57477 - DNA, 702 bp, Homo sapiens
aggcttatgctaacactctacactccagtcctttggccttcctttttgatatttgaagggagctatgtggtatttacaaagcactcttctatacgcctggctcttgcacatgaattacygactttcagaattattgtctctgatgtgagctccattttgtggcactaactcttttctgtatgtttgtatttgaggtataattatccaaatttttccagtgcatgcctcagaaatcaacagggggagggtttcttgcccacgaaggtatacaggaaaaaagcagactgcaacatctcaaaatatgatctgatgacatctacttaatatggaaaccttgtttctcatgagagttttgcagaaaaactctgtataattttcaaaacatgaatccagaataaaataataaaatgaatatgtgacctctgtaatgtaggaaatgtttcttcaaaaggaaaatattggagcaaataaacagtgcattataatggacagaatagttgatgagtagttgggacgtctggatttcagttctgcttttgacatttaccaaaatgtgacgctggaaaattattaagcttattaggcctaagatacctgccataagtgaggaaagggcagtactaacatttctgattatattattgggtttgatgatggatcaaagtgggtaatagaaaataatatttagaaaattacaaacac

SEQ ID NO: 57478 - DNA, 1532 bp, Homo sapiens
ggtgctgtattcagtttgtatttaaaaatacaaattttcaggaaggaacagaaaatacattgctctatgcacacacacaaaaaaagagagttgaaacttctgtattagaacatataattttataattttggatagagtgaattctccaaccagtgtgtcctagtatacaacaccaacactagttttcacctacagttctatagcacaatttttccatagtgaatgtttactgaagtaacaactgagagtctagcactataacatcctgtcaacctgtatgatgcaatgaaaattaccttgtggctgaaayattatttagtatccatttagtataatgcaccatgatgaaggtgagactgctgtttataacattgtgcaaacatccggcacaatgtcagccacatagtaggtctcaataaattttggatgaagaagtaaatgagaagtaaagggaaagatgtttagtctacttaatgcataagcaatcttttgcttttacagtatttgctcctactagtttttatgatataattgtgacagtaacatattgaaagttacagaccatggcaaaccattttcactctaacacatttttcagctcaggcctctaggaagcttgactttgaataaagtatgcaaaaagcaagatgagcttgcctttttcttgagttggttggtaacctcttctgtttttgtctgaattatatgcctgctattatagcaaccatgatattgccagttcttgtctttggatcctctacattttggaatttatgaaaaatttgtagagctcatcaacatctaagaattcttgtacttgggaaaacaaatctacagaaacagaacagtttaaggcaggcaaacatcactgactgtgtaattctcagaggataaccacagtgtttccctttaaaaggcattcttgatgtcttttcccatgcctgattccctggctattaaactgttcctattcaattttgcagaacatggcaggggtctaatgactagttttgtcctatattgaagaagtataatgaaacaacaaaccacataactacattgaaagtttgcagtggtgaactaggggagaatcatgctgtatatttttctcatcaaaatcttgcaaactaattaagaccttaaaataattaatgtatctcaattttctattttttttttcacaaactcagttgaaaaaaaagtatgacaataccacagacaaggcagcatagaagctaatacttagaataggtttctcactcatcagaagttttgtgctccaaacagaaaacagagagccgttaaaagtttagttcagtctttagtaaaaccaaccagctgtaaaaaataagatcttcacatgaatattggaaagataacaatcagaaaaacagaatggggagagaataaatactgaaggcataatcccaaagttcttactcaagccaagctgacatcagttggaaatttatgtaaataataacacctaaattaatgatatgcatatatcatgaatgtatagatttctactg

SEQ ID NO: 57479 - DNA, 1532 bp, Homo sapiens
ggtgctgtattcagtttgtatttaaaaatacaaattttcaggaaggaacagaaaatacattgctctatgcacacacacaaaaaaagagagttgaaacttctgtattagaacatataattttataattttggatagagtgaattctccaaccagtgtgtcctagtatacaacaccaacactagttttcacctacagttctatagcacaatttttccatagtgaatgtttactgaagtaacaactgagagtctagcactataacatcctgtcaacctgtatgatgcaatgaaaattaccttgtggctgaaatattatttagtatccatttagtataatgcaccatgatgawggtgagactgctgtttataacattgtgcaaacatccggcacaatgtcagccacatagtaggtctcaataaattttggatgaagaagtaaatgagaagtaaagggaaagatgtttagtctacttaatgcataagcaatcttttgcttttacagtatttgctcctactagtttttatgatataattgtgacagtaacatattgaaagttacagaccatggcaaaccattttcactctaacacatttttcagctcaggcctctaggaagcttgactttgaataaagtatgcaaaaagcaagatgagcttgcctttttcttgagttggttggtaacctcttctgtttttgtctgaattatatgcctgctattatagcaaccatgatattgccagttcttgtctttggatcctctacattttggaatttatgaaaaatttgtagagctcatcaacatctaagaattcttgtacttgggaaaacaaatctacagaaacagaacagtttaaggcaggcaaacatcactgactgtgtaattctcagaggataaccacagtgtttccctttaaaaggcattcttgatgtcttttcccatgcctgattccctggctattaaactgttcctattcaattttgcagaacatggcaggggtctaatgactagttttgtcctatattgaagaagtataatgaaacaacaaaccacataactacattgaaagtttgcagtggtgaactaggggagaatcatgctgtatatttttctcatcaaaatcttgcaaactaattaagaccttaaaataattaatgtatctcaattttctattttttttttcacaaactcagttgaaaaaaaagtatgacaataccacagacaaggcagcatagaagctaatacttagaataggtttctcactcatcagaagttttgtgctccaaacagaaaacagagagccgttaaaagtttagttcagtctttagtaaaaccaaccagctgtaaaaaataagatcttcacatgaatattggaaagataacaatcagaaaaacagaatggggagagaataaatactgaaggcataatcccaaagttcttactcaagccaagctgacatcagttggaaatttatgtaaataataacacctaaattaatgatatgcatatatcatgaatgtatagatttctactg

SEQ ID NO: 57480 - DNA, 1145 bp, Homo sapiens
tacacgtgtgcatgagtgtgtgcggaataggaaattgtccaggtcatttgatggagataggattcaagtggctatcaatgacctgaagacatggtcctattctcatttagtacaatgggcatttcttaactcttaagggaatcatgcttcagctttcacaaacatggactacactctctgaacaaagtgccaatgccctaaaatgttaagagaatgctgatgctgcttccgtgatgttcctaaacacacagaacccaagaatggattctttctgtcctctctgacaacagcatttctaaagygccaacagtactgcatgcctcccccattcatcttcataaagtttaagacttactctgacatccactcaaacctctaacagtagcccatttcacagggtcctaatttctctttttaaagtatggtatctttatttcttttttaaacaaattgtaatcgacatatcttttggtggtgatttagccagatcacttcatttaatatttatttcaatgtatttatttttattttttacttgtgacttacataaaagtcacaagaataaaacaaaatattactggataccattcaacaagattgcccgaagtttagcttttagcacatcctcaactggaatattcacacatctccctcctccaacttcttccttcctccatctctctctgctgtgtacataagcagtggaacttcacactggaaataatgctgtcgcctaatttccggacctttttagattttgtcagttatcttaatcatgccctcagtagcacatcccaaatccctttcaatctgaaaaagtcccacagtcactctgtatatttcatgactgacatttttgaagttattttgtacaatgtctctaatttgcattggtccgaagtttcttcatgattacattagatatttcctcatgattgtgtgattagattcagggtctgcacctttggcaggcatagcacagaactgatgctgagctcttagggcatcgtaacaggaggagcccgctgtgcattagccctattaccgctgatctttgattacagtttgaatatcccttatccaaaacgcttgggaccagaagcgttttctatttcagatttttgcaaatttttgaatatttgcat

SEQ ID NO: 57481 - DNA, 1145 bp, Homo sapiens
tacacgtgtgcatgagtgtgtgcggaataggaaattgtccaggtcatttgatggagataggattcaagtggctatcaatgacctgaagacatggtcctattctcatttagtacaatgggcatttcttaactcttaagggaatcatgcttcagctttcacaaacatggactacactctctgaacaaagtgccaatgccctaaaatgttaagagaatgctgatgctgcttccgtgatgttcctaaacacacagaacccaagaatggattctttctgtcctctctgacaacagcatttctaaagcgccaacagtactgcatgcctcccccattcatcttcataaagtttaagacttactctgacatccactcaaacctctaacagtagcccatttcacagggtcctaatttctctttttaaagtatggtatctttatttcttttttaaacaaattktaatcgacatatcttttggtggtgatttagccagatcacttcatttaatatttatttcaatgtatttatttttattttttacttgtgacttacataaaagtcacaagaataaaacaaaatattactggataccattcaacaagattgcccgaagtttagcttttagcacatcctcaactggaatattcacacatctccctcctccaacttcttccttcctccatctctctctgctgtgtacataagcagtggaacttcacactggaaataatgctgtcgcctaatttccggacctttttagattttgtcagttatcttaatcatgccctcagtagcacatcccaaatccctttcaatctgaaaaagtcccacagtcactctgtatatttcatgactgacatttttgaagttattttgtacaatgtctctaatttgcattggtccgaagtttcttcatgattacattagatatttcctcatgattgtgtgattagattcagggtctgcacctttggcaggcatagcacagaactgatgctgagctcttagggcatcgtaacaggaggagcccgctgtgcattagccctattaccgctgatctttgattacagtttgaatatcccttatccaaaacgcttgggaccagaagcgttttctatttcagatttttgcaaatttttgaatatttgcat

SEQ ID NO: 57482 - DNA, 731 bp, Homo sapiens
tgcatcaataacctggggagaaatggctatcaagtcctaaactctaccttagtgtgtaggttcaagatataagcaaagagataatgcagcctaatggaaagaaaagatccctaagagtttgacttaataagtttcttcctccttcctccctgctctccccttccccatcccctctcccttctctctgctccattctccctcttcctttcttcctcttcctcctcctccttcatctttcctcctccttccccttctttttcttcctccacttccgttcctcttccttcttgcaaaaaacactggagtaactgcttgtcttcacccatcttctcattccctsccctccccacaccttttcatcaccacctgtcattgtgaggaatccagagatctgcatgttaataattctcttgtgctaccctttgctgactttctcctacacctatgatttcaataattgaagaggtttccaaggttcttacaagccaagaaccttatctctcttggcctcatgtgaactgtcatcaaatatcctgctgttaattagcaaaggttattttatcccgttatctctgcttctctcttagcataaagcaagagaaaatgctataagcccacttaaacagtctcattgctcctctaagggttgacatcaagggaagttcttagtgtactactttcctgacaccttattctcacacccaaatgactttattgactttaaaaccaat

SEQ ID NO: 57483 - DNA, 731 bp, Homo sapiens
tgcatcaataacctggggagaaatggctatcaagtcctaaactctaccttagtgtgtaggttcaagatataagcaaagagataatgcagcctaatggaaagaaaagatccctaagagtttgacttaataagtttcttcctccttcctccctgctctccccttccccatcccctctcccttctctctgctccattctccctcttcctttcttcctcttcctcctcctccttcatctttcctcctccttccccttctttttcttcctccacttccgttcctcttccttcttgcaaaaaacactggagtaactgcttgtcttcacccatcttctcattccctcccctccccacaccttttcatcaccacctgtcattgtgaggaatccagagatctgcatgttaataattctcttgtgctaccctttgctgactttctyctacacctatgatttcaataattgaagaggtttccaaggttcttacaagccaagaaccttatctctcttggcctcatgtgaactgtcatcaaatatcctgctgttaattagcaaaggttattttatcccgttatctctgcttctctcttagcataaagcaagagaaaatgctataagcccacttaaacagtctcattgctcctctaagggttgacatcaagggaagttcttagtgtactactttcctgacaccttattctcacacccaaatgactttattgactttaaaaccaat

SEQ ID NO: 57484 - DNA, 609 bp, Homo sapiens
atggctgcatagtattccacggtgtatatgtgccacattatctttatccagtttattattgatrggcatggaaattgttttttagttattgctaataatcaataaaaatgtattgactgactgactgactactgtctgctgggctcagtgaaaaaatgagataagaatccttaccttcgtgatgattccacacacaggatatacaaataacaaataagtaacaatatcatatgatgtaacaaggggaggtcaaggatgttccacgattaactactagagaagtggcataaagacaatgcttacctgcttaccttatgaatccacaaaacaaagaggcctggcatggcacagactgttcaacacagatgcaacttgagcaggagctttcaggtgatttgaaggctggagaaaagtaggaagccattcctgttgggaaaacttcatgagtgaagataagatttcagaaacaatctaaggtgggtggatcatttgagcccaagggtttgagaccagcctaggcaacatggaaacaccatgtatcaaaaaaaaaaaaaatacacacaaacacacacacacacacacaaattgtgtatatatatatatatatat

SEQ ID NO: 57485 - DNA, 609 bp, Homo sapiens
atggctgcatagtattccacggtgtatatgtgccacattatctttatccagtttattattgataggcatggaaattgttttttagttattgctaataatcaataaaaatgtattgactgactgactgactactgtctgctgggctcagtgaaaaaatgagataagaatccttaccttcgtgatgattccacacacaggatatacaaataacaaataagtaacaatatcatatgatgtaacaaggggaggtcaaggatgttccaygattaactactagagaagtggcataaagacaatgcttacctgcttaccttatgaatccacaaaacaaagaggcctggcatggcacagactgttcaacacagatgcaacttgagcaggagctttcaggtgatttgaaggctggagaaaagtaggaagccattcctgttgggaaaacttcatgagtgaagataagatttcagaaacaatctaaggtgggtggatcatttgagcccaagggtttgagaccagcctaggcaacatggaaacaccatgtatcaaaaaaaaaaaaaatacacacaaacacacacacacacacacaaattgtgtatatatatatatatatat

SEQ ID NO: 57486 - DNA, 609 bp, Homo sapiens
atggctgcatagtattccacggtgtatatgtgccacattatctttatccagtttattattgataggcatggaaattgttttttagttattgctaataatcaataaaaatgtattgactgactgactgactactgtctgctgggctcagtgaaaaaatgagataagaatccttaccttcgtgatgattccacacacaggatatacaaataacaaataagtaacaatatcatatgatgtaacaaggggaggtcaaggatgttccacgattaactactagagaagtggcataaagacaatgcttacctgcttrccttatgaatccacaaaacaaagaggcctggcatggcacagactgttcaacacagatgcaacttgagcaggagctttcaggtgatttgaaggctggagaaaagtaggaagccattcctgttgggaaaacttcatgagtgaagataagatttcagaaacaatctaaggtgggtggatcatttgagcccaagggtttgagaccagcctaggcaacatggaaacaccatgtatcaaaaaaaaaaaaaatacacacaaacacacacacacacacacaaattgtgtatatatatatatatatat

SEQ ID NO: 57487 - DNA, 1226 bp, Homo sapiens
taagaattggccaatcgtgttggagggatgaaggtctatttcctcaattctgacctacggggatcacgaaagctatagcagggcacatcgcaaattaccccaaaacttagtggcgtaaaacaagtattgattgagcttatggactctgggggtcaggacaaggcacagtatggtgctggcttccaagggctatgtgtccccaaagagagggatgccggcaaaactggattgcctttcaggacccagcctcagaagtcatagaatgtcgcttccaacattttccattggttgagatggttacaaacgacacgtggatgggacatatgttggtgtggccaaatttagaatacacaacctgccacagagcctggagctactatcatccttgctcaagtggatgaagatatctagaaagtgacatcaccacacggaggaaagcagagccgagagaaggggagatatcatttgagtccctggatccagttgcgcctgaagctagactcacctgcaggggcttttttccagttaagtgagctattgatagtatttttgctcagccgggcacggtgggtcacacctgtaatcccagcactttgggaggccgaggygggtggatcacctgaggtcaggagttcaagaccagcctggttaatgtggtgaaaccctgtctctactacaaatacaaaaaattagccaggcgtggtggtgggcacctgtaatcccggctgcttgggaggctgaggcaggagaattgcttgaacctgggaggcagaggttgcagtgagctgagattgcgccattgcactccagcctgggcaacaagagtgaaactccatctcaaaaaaatatatatatacatatatttatatatatcatataatatataatatatattatttttcctgtaagtgattcaggtcgaatttctgtcattggcagccaaaagagtcctgagctcactaaggggctcaactgagccaggacaggatactctgggacttctagcagcacagagcactagctggtgcttggaaatgatgtttcctctgctcttggctagctggaatccccaggccagcatccccaagatgaaatgtgcccctccctttagaaggcaagaattgatgacagtgagttttttgtttggtttggtttgaagtagcccaaatgtccccttcctgccacgagggcaatgcagcttctatcttacagcatctgggaggagc

SEQ ID NO: 57488 - DNA, 710 bp, Homo sapiens
cggcagtgcaggggttggtttttatcatcattatttataaaacatacatttgggctctgcagctgactttcatgcacattataaaatgagaaaagagaaaatgtaaaaggatgagataaattgaagctgaagtcataatagctttctcccacacttccagaggattgtcctgcatgccctttggggtttggggtccccctattccagcctggggttctctgacattggcatgcatccccgtcacttgtgttactcttaaaatggagcttcctgagcctcgtcccagattaactggatcagccctggtgaaggagcccaatggctacattaaaaatatatagaggccaggcacggtgggtcacacctgtgatcccagcactttgggaggccaaggcgggtggatcacttgaggtcagaagtttcagaccagcctggccaacatggtgaaaccctgtctctactaaaaatgcaaaaaaaaaaaaaaaaaattggatgtggtggcacacacctgtaatcccagctacttgggaggctgagacaggagaattgcttgaacccagacgcagaggctgcagtgagctgagaaaatgccactgcattccagcctgggyaacagagtgagatcccatctctacaaaaaatttaaaaataagccaggggaaatggtatgcgcctgtggtcccagctactcaggaggctgaggcaggagg

SEQ ID NO: 57489 - DNA, 729 bp, Homo sapiens
atcataccggaaagctgagatcgcctctgctccactatacagcaaggaaatgaacagcttcgcgcacacacagcaaggatgactctcacagcacaagtctgtgtgcaagaggccagaccctgggaggctctgtttatgatgactcagaggccacaaccttggaaactagcctggggcatttggagctgggctggccacccttgggagaggagggagggcctggaaggaggtctagaatgttctatgccttaatcgggtgctgattatacatgggaattgtgaaaattcatcaagctggacgttcgcaatttgtgcacttttccgtatgtatgggcaaataaaatgtttactaatattttgctaaaattttccccctttctattctcaaggaatcgtcactattaatattttggggtgtttgcttatacacatttttccatgcatatacacattttttttcacagaaaaataaaatcatcttctacctcccgtgtggtcacasgaggcaataaatgctgaagccacgctgtgggggtcccacgctgaactctccagccaagccactcacctcctgagttgttgttgtgtgggcgacagtagaacctctgtaggtgtgagctctttaacttgcttttttcactgaatctaatgcaaacatctttccaaaccaagaactaacaattgtgccttacatacaagggaaccgtaaacacagggcaatgtccaact

SEQ ID NO: 57490 - DNA, 729 bp, Homo sapiens
atcataccggaaagctgagatcgcctctgctccactatacagcaaggaaatgaacagcttcgcgcacacacagcaaggatgactctcacagcacaagtctgtgtgcaagaggccagaccctgggaggctctgtttatgatgactcagaggccacaaccttggaaactagcctggggcatttggagctgggctggccacccttgggagaggagggagggcctggaaggaggtctagaatgttctatgccttaatcgggtgctgattatacatgggaattgtgaaaattcatcaagctggacgttcgcaatttgtgcacttttccgtatgtatgggcaaataaaatgtttactaatattttgctaaaattttccccctttctattctcaaggaatcgtcactattaatattttggggtgtttgcttatacacatttttccatgcatatacacattttttttcacagaaaaataaaatcatcttctacctcccgtgtggtcacaggaggcaataaatgctgaagccacgctgtgggggtcccacgctgaactctccagccaagccactcacctcctgagttgttgttgtgtgggcgacagtagaacctctgtaggtgtgagctctttaacttgcttttttcactgaatctaatgcaaacatcttyccaaaccaagaactaacaattgtgccttacatacaagggaaccgtaaacacagggcaatgtccaact

SEQ ID NO: 57491 - DNA, 984 bp, Homo sapiens
ttgtagaatttggcttcttatgggaggagtctccaacatgttgcatgtctctggtagtgtagacttttgtttaagtctttttcttcttttagccttcaatttgccagattcctgattgtaatytccattgacctttaccttcttgggatatatatttttttcttttttttcctgacttattttttttctactgttcctgtgagctcttcattttctctcaaatcttaggtagtagaaaggaagaaagggactgctgatgctctttctttgcttcctgtagtacagaggacctactcatgttcacagcactggtagttggtgaatactacagattgggatgcaaacagcacgtaggatattggaacaattttgtcagtgtccatatatgctgagccttaagttgatagcctttttcattatgtactctttgggcaaataaaacttgtagagtagacctttgagtctcagccccagagcagtggaagaaccttgagcaaatcacttgattttcttgcagttttttcagttacaagatgggaatgataatatctatctaactgaattttgagggtcagatgtgataacatagaaatgttttcgtaaagtaatgcgtaataaaaatattacatagcagataaaagcatttgaagctttcttttaaaattttttaaatttaatttttttaatttattattttttttcttaagagatgggggtgggggggcatcttgctttactgcccaggatggtcttgaactcctggcctcaagtgatcctcctgccttggcctcccagtgtcctgggattacaggtgtgagacactgcggctgcccagaaccttttaatttttgcgttagagatcatgaataaaactagagtgaagaaattgaaagcttattctactaacaaatgttatgtgagatgaaattattcacatcataattgttccctgtaacaaaataatttttttgtgacaaatatgca

SEQ ID NO: 57492 - DNA, 568 bp, Homo sapiens
ggagatcctgaaaaaagagctaggagtgctacagaagggtggaacaaagagagaaactgctgggagggcaamcaaaattgaaaagaataggaaaaaaggaacaagaatatctacaccaaagtagggtaggtgaacaaagccagaaaatcccagagagcaactctatttttttttttttttttttagactgagtttcactcttgtcgcccaggctggagtacaatggcacaatctcggttcactgcaacctccgcctcccaggttcaagccattctcctgcctcagcctgccgagtagctgggattacaggctcctgccaccacacccagctaatttttgtatttttagtagagatgagctttcaccacattggccaggctggtctcgaacacctgacctcagatgatccagccgcctcggcctcccaaagtgctgggattacagacgtgagccaccgagcctggacaagtctctatatttttaacaccacataaaggaaggagttctgtaatattatgaaaaactttcctgaaacccaccctattccaaaagttcaggaaaagtaatt

SEQ ID NO: 57493 - DNA, 1452 bp, Homo sapiens
aaaacaaagaacaaaaaacaacgcctttcttgtggccccttgacatggccccagctcttcctggagaccctgccggagctcctgcacatgtcccgcccagcagaggatggacccagccctggggccctggtgcggaggagcagctccctgggatacatctccaaggccgaggagtacttcctgctcaagtcccgcagtgacctcatgttcgagaagcagtcagagcggcatgggctggccaggcgcctcaccactgcacgtgggtccccgctggtcttggttttcagcccatctgtgggaggtgggtggaggcaggcctcacacccactctggcccctcgtctgtaggccggcccccagcaagctctgagcaggcccagcaggaactcttcaatgagctgaagccagctgtggatggggcaaacttcattgttaaccacatgagggaccagaacaattacaatgaggtaagggaccacaggattgccatgtacaggtgttcaagtagggcactgattaagtgtattctatcttaagagggcagggttccccttagaggcacacaccaacttagatgagggagttaatgtgacacagattccaggcccccccgccagggagagagaactcctgcctggcaccctatagcagcactggggccaggcacacacacataggcacacagctccaccctgtccaggccacactctgagcatcccttaggatcccttctttctcccagctgccaatcattttctgtccctactcagttccaagcctgatactccagacagaaccagacattttaaaggtagccatatatggttattcaacattatacaacttctaaaaactatctcttgagaaagggcaccttttcccagttcacatatgggctggcagcagccctgacttgctgagatgggggagaagaagagaggggtctatccaccttcctcagcccctaggagagacccctgggcctcagttcctctctagccccagagccctgtgctacagcagagagggaggctatggtctgttcccgcctcctcaacagagtgatcagccctgcctgtggccagaggggcctgggaccttgctggggacaagccagcattatcctgcaagcccgaggcagcctctgyaggcacactgagccgccctctgcctccatggctgggccccagcttgggggtggggctttgtggcctgaggcccttctcaccccactctctctgcccctacccacaggagaaagacagctggaaccgagtggcccgcacagtggaccgcctctgcctgtttgtggtgacgcctgtcatggtggtgggcacagcctggatcttcctgcagggcgtttacaaccagccaccaccccagccttttcctggggacccctactcctacaacgtgcaggacaagcgcttcatctagggtgggcctgttgggg

SEQ ID NO: 57494 - DNA, 527 bp, Homo sapiens
gaaaggtgcttttccttaacaattttttttaaagacaccaccccaaagatacagacatcgcagaactcagctttattgactgaaagtagctgtgtttgagtggcccaccttcggccgggacagccaagggcagggtgctgccccgggccgtttctctctgcttcttggggccttctctccattcctttcggcatgctcaacagctccccttccctttcccgccacacccctcctctcccacctatatctcagttcttggccccttctcgcagcagggtgggcagaaggagccaaaggtccttatgagtgggggtgacaagctcttctgtccccgcccgcccagggtcccacttcctctacattcctcccaaccccgcggctctcgggccagcctggacttaccttgcagggygctggggggcaggcgtgtgtacagtgggtgcccgtgggcaaaccatgagcttgggaggggtagcagcagcagcacagccagcagcatggtgaccaggagctggggtgagagaccc

SEQ ID NO: 57495 - DNA, 2273 bp, Homo sapiens
tatgtaagtgtcacacagcctcagcctgaatgcattttttagaaccaaatcacttaccgatgaaagattgtttaactggcaaatatagcatttgctgaatgaaatacctcttagacctgtttagttastaagcataagtgatagaatcaaccacatgtaaatacctcttagacctgtttagttactaagcgtaagtgatagaatcaaccacatgtaccacacataccactctacatcatggtgctgttgctaagtccaggccaatccaaaatcatacaggacttagcttctcatagctagggtttaaggccctcttcttagctagaaaaattatgtttctccttgccgctccttcacaatcccgtgagaaaactagatttatatttttccatcaagtatatgcttatttgtattcatcacagtagtcctgtttttctcattagtgtcaccccccctccccttaaaaaaaaagaaaaaaaaaagagacagggtctacgcagcagtatgatcatagctcatcacagcctctaactcctggtgtcaagggatcctcccatctcagcctcccaagtagctgggactacaggttcactagtgtcttgataggaaagattatttccttattcacagaggatacgtagtaagtactggccagtgaagaggcacactttaggaggaaagagaaaacacggaacattccaatgagaaatagctggtatctgctaaactgctgagcaggctctaaatcaacatacagcaagataccacaactgtggagctgacaatgggtatcgagtagacaaagattcaggtcatacttctagatatggggagcacctaaggagaaatcagccttacactgcgtgaaatggctgtccctttagttcctctctagcacaagcacacgtgatgcatcttacatggtaaaaagaagtcagaactaacgccatctatagggcttcaaggcagtgctttatactcagcaactgctaagcttagctgcatgtagtgactcggaatagtaaatggtcatatgaatacaatcggcaataatgtaaacctttatccaccctaacatagttgaataaaaccacatatacccactagaaccaagtacacccactagtggctcattgtgaataaggaactgaaaggggcttggtgaggacaaagtatgtcaaccatctccagttccccagtcaataatcgctttaacagttttggtctccccaatcttacaactacactgcacaatcttttttttgtttgtttttttgagatggagtttcgctctttttgtccaggctggagtgcaatggtgcagcctgcctcagctcactgcaacctctgccttctgggttcaagtgattctcctgcctcagcctcccgagtagctgggactacaggcacacaccaccacgcctggctaatttttgtatttttagtagatggggtttcaccattcaccatgttagccaggctggtctcgaactcctgacctcaggtgatccacctgccttggccttccaaagtgttgtgattacaggcgtgagccaccgcgcccagccccactgcacaatcttatatgcaaaccataagagagatgaagttaaacagctcgagactatcattcattcattcattcatcatttgagatggggtcttgctctgttacccaggctggagtgcagcagtgtgatcatggctcactgcagcctcgacttcccaggctcaagcaatcctcctgcctcagcctcctgagtagctgggaccacaagtgggcaccaccatgcccagctatttttttactttttttgtagagatgaagtctaacactgttgccaggctggtcttgaagtcctggattcaagtgatcctccctccttggcctccctgagtgctgggactacaggcattagctactgtgcctggcctgagaaatattattaaactttaaaagatttgacagttctaattgaaaccaaaaaaaaaaataagcattcacagactcagaatatgaggtgccgaaaggacctcagaaatcatgtcagcaacttgttttatagttgagaaaggtttcaggactgagttgctctaaccaagagggtcaagcatcagaataggtgagctctgattaccaagtctagtgctctttccatttcaagatgatgccttcctagtcactctgacttcaagaacttttaaatgttgttaatgattaggctaagaatcactgggaaacactgctttcaatttgataaaaggattcataa

SEQ ID NO: 57496 - DNA, 2273 bp, Homo sapiens
tatgtaagtgtcacacagcctcagcctgaatgcattttttagaaccaaatcacttaccgatgaaagattgtttaactggcaaatatagcatttgctgaatgaaatacctcttagacctgtttagttagtaagcataagtgatagaatcaaccacatgtaaatacctcttagacctgtttagttactaagcrtaagtgatagaatcaaccacatgtaccacacataccactctacatcatggtgctgttgctaagtccaggccaatccaaaatcatacaggacttagcttctcatagctagggtttaaggccctcttcttagctagaaaaattatgtttctccttgccgctccttcacaatcccgtgagaaaactagatttatatttttccatcaagtatatgcttatttgtattcatcacagtagtcctgtttttctcattagtgtcaccccccctccccttaaaaaaaaagaaaaaaaaaagagacagggtctacgcagcagtatgatcatagctcatcacagcctctaactcctggtgtcaagggatcctcccatctcagcctcccaagtagctgggactacaggttcactagtgtcttgataggaaagattatttccttattcacagaggatacgtagtaagtactggccagtgaagaggcacactttaggaggaaagagaaaacacggaacattccaatgagaaatagctggtatctgctaaactgctgagcaggctctaaatcaacatacagcaagataccacaactgtggagctgacaatgggtatcgagtagacaaagattcaggtcatacttctagatatggggagcacctaaggagaaatcagccttacactgcgtgaaatggctgtccctttagttcctctctagcacaagcacacgtgatgcatcttacatggtaaaaagaagtcagaactaacgccatctatagggcttcaaggcagtgctttatactcagcaactgctaagcttagctgcatgtagtgactcggaatagtaaatggtcatatgaatacaatcggcaataatgtaaacctttatccaccctaacatagttgaataaaaccacatatacccactagaaccaagtacacccactagtggctcattgtgaataaggaactgaaaggggcttggtgaggacaaagtatgtcaaccatctccagttccccagtcaataatcgctttaacagttttggtctccccaatcttacaactacactgcacaatcttttttttgtttgtttttttgagatggagtttcgctctttttgtccaggctggagtgcaatggtgcagcctgcctcagctcactgcaacctctgccttctgggttcaagtgattctcctgcctcagcctcccgagtagctgggactacaggcacacaccaccacgcctggctaatttttgtatttttagtagatggggtttcaccattcaccatgttagccaggctggtctcgaactcctgacctcaggtgatccacctgccttggccttccaaagtgttgtgattacaggcgtgagccaccgcgcccagccccactgcacaatcttatatgcaaaccataagagagatgaagttaaacagctcgagactatcattcattcattcattcatcatttgagatggggtcttgctctgttacccaggctggagtgcagcagtgtgatcatggctcactgcagcctcgacttcccaggctcaagcaatcctcctgcctcagcctcctgagtagctgggaccacaagtgggcaccaccatgcccagctatttttttactttttttgtagagatgaagtctaacactgttgccaggctggtcttgaagtcctggattcaagtgatcctccctccttggcctccctgagtgctgggactacaggcattagctactgtgcctggcctgagaaatattattaaactttaaaagatttgacagttctaattgaaaccaaaaaaaaaaataagcattcacagactcagaatatgaggtgccgaaaggacctcagaaatcatgtcagcaacttgttttatagttgagaaaggtttcaggactgagttgctctaaccaagagggtcaagcatcagaataggtgagctctgattaccaagtctagtgctctttccatttcaagatgatgccttcctagtcactctgacttcaagaacttttaaatgttgttaatgattaggctaagaatcactgggaaacactgctttcaatttgataaaaggattcataa

SEQ ID NO: 57497 - DNA, 2273 bp, Homo sapiens
tatgtaagtgtcacacagcctcagcctgaatgcattttttagaaccaaatcacttaccgatgaaagattgtttaactggcaaatatagcatttgctgaatgaaatacctcttagacctgtttagttagtaagcataagtgatagaatcaaccacatgtaaatacctcttagacctgtttagttactaagcgtaagtgatagaatcaaccacatgtaccacacataccactctacatcatggtgctgttgctaagtccaggccaatccaaaatcatacaggacttagcttctcatagctagrgtttaaggccctcttcttagctagaaaaattatgtttctccttgccgctccttcacaatcccgtgagaaaactagatttatatttttccatcaagtatatgcttatttgtattcatcacagtagtcctgtttttctcattagtgtcaccccccctccccttaaaaaaaaagaaaaaaaaaagagacagggtctacgcagcagtatgatcatagctcatcacagcctctaactcctggtgtcaagggatcctcccatctcagcctcccaagtagctgggactacaggttcactagtgtcttgataggaaagattatttccttattcacagaggatacgtagtaagtactggccagtgaagaggcacactttaggaggaaagagaaaacacggaacattccaatgagaaatagctggtatctgctaaactgctgagcaggctctaaatcaacatacagcaagataccacaactgtggagctgacaatgggtatcgagtagacaaagattcaggtcatacttctagatatggggagcacctaaggagaaatcagccttacactgcgtgaaatggctgtccctttagttcctctctagcacaagcacacgtgatgcatcttacatggtaaaaagaagtcagaactaacgccatctatagggcttcaaggcagtgctttatactcagcaactgctaagcttagctgcatgtagtgactcggaatagtaaatggtcatatgaatacaatcggcaataatgtaaacctttatccaccctaacatagttgaataaaaccacatatacccactagaaccaagtacacccactagtggctcattgtgaataaggaactgaaaggggcttggtgaggacaaagtatgtcaaccatctccagttccccagtcaataatcgctttaacagttttggtctccccaatcttacaactacactgcacaatcttttttttgtttgtttttttgagatggagtttcgctctttttgtccaggctggagtgcaatggtgcagcctgcctcagctcactgcaacctctgccttctgggttcaagtgattctcctgcctcagcctcccgagtagctgggactacaggcacacaccaccacgcctggctaatttttgtatttttagtagatggggtttcaccattcaccatgttagccaggctggtctcgaactcctgacctcaggtgatccacctgccttggccttccaaagtgttgtgattacaggcgtgagccaccgcgcccagccccactgcacaatcttatatgcaaaccataagagagatgaagttaaacagctcgagactatcattcattcattcattcatcatttgagatggggtcttgctctgttacccaggctggagtgcagcagtgtgatcatggctcactgcagcctcgacttcccaggctcaagcaatcctcctgcctcagcctcctgagtagctgggaccacaagtgggcaccaccatgcccagctatttttttactttttttgtagagatgaagtctaacactgttgccaggctggtcttgaagtcctggattcaagtgatcctccctccttggcctccctgagtgctgggactacaggcattagctactgtgcctggcctgagaaatattattaaactttaaaagatttgacagttctaattgaaaccaaaaaaaaaaataagcattcacagactcagaatatgaggtgccgaaaggacctcagaaatcatgtcagcaacttgttttatagttgagaaaggtttcaggactgagttgctctaaccaagagggtcaagcatcagaataggtgagctctgattaccaagtctagtgctctttccatttcaagatgatgccttcctagtcactctgacttcaagaacttttaaatgttgttaatgattaggctaagaatcactgggaaacactgctttcaatttgataaaaggattcataa

SEQ ID NO: 57498 - DNA, 2273 bp, Homo sapiens
tatgtaagtgtcacacagcctcagcctgaatgcattttttagaaccaaatcacttaccgatgaaagattgtttaactggcaaatatagcatttgctgaatgaaatacctcttagacctgtttagttagtaagcataagtgatagaatcaaccacatgtaaatacctcttagacctgtttagttactaagcgtaagtgatagaatcaaccacatgtaccacacataccactctacatcatggtgctgttgctaagtccaggccaatccaaaatcatacaggacttagcttctcatagctagggtttaaggccctcttcttagctagaaaaattaygtttctccttgccgctccttcacaatcccgtgagaaaactagatttatatttttccatcaagtatatgcttatttgtattcatcacagtagtcctgtttttctcattagtgtcaccccccctccccttaaaaaaaaagaaaaaaaaaagagacagggtctacgcagcagtatgatcatagctcatcacagcctctaactcctggtgtcaagggatcctcccatctcagcctcccaagtagctgggactacaggttcactagtgtcttgataggaaagattatttccttattcacagaggatacgtagtaagtactggccagtgaagaggcacactttaggaggaaagagaaaacacggaacattccaatgagaaatagctggtatctgctaaactgctgagcaggctctaaatcaacatacagcaagataccacaactgtggagctgacaatgggtatcgagtagacaaagattcaggtcatacttctagatatggggagcacctaaggagaaatcagccttacactgcgtgaaatggctgtccctttagttcctctctagcacaagcacacgtgatgcatcttacatggtaaaaagaagtcagaactaacgccatctatagggcttcaaggcagtgctttatactcagcaactgctaagcttagctgcatgtagtgactcggaatagtaaatggtcatatgaatacaatcggcaataatgtaaacctttatccaccctaacatagttgaataaaaccacatatacccactagaaccaagtacacccactagtggctcattgtgaataaggaactgaaaggggcttggtgaggacaaagtatgtcaaccatctccagttccccagtcaataatcgctttaacagttttggtctccccaatcttacaactacactgcacaatcttttttttgtttgtttttttgagatggagtttcgctctttttgtccaggctggagtgcaatggtgcagcctgcctcagctcactgcaacctctgccttctgggttcaagtgattctcctgcctcagcctcccgagtagctgggactacaggcacacaccaccacgcctggctaatttttgtatttttagtagatggggtttcaccattcaccatgttagccaggctggtctcgaactcctgacctcaggtgatccacctgccttggccttccaaagtgttgtgattacaggcgtgagccaccgcgcccagccccactgcacaatcttatatgcaaaccataagagagatgaagttaaacagctcgagactatcattcattcattcattcatcatttgagatggggtcttgctctgttacccaggctggagtgcagcagtgtgatcatggctcactgcagcctcgacttcccaggctcaagcaatcctcctgcctcagcctcctgagtagctgggaccacaagtgggcaccaccatgcccagctatttttttactttttttgtagagatgaagtctaacactgttgccaggctggtcttgaagtcctggattcaagtgatcctccctccttggcctccctgagtgctgggactacaggcattagctactgtgcctggcctgagaaatattattaaactttaaaagatttgacagttctaattgaaaccaaaaaaaaaaataagcattcacagactcagaatatgaggtgccgaaaggacctcagaaatcatgtcagcaacttgttttatagttgagaaaggtttcaggactgagttgctctaaccaagagggtcaagcatcagaataggtgagctctgattaccaagtctagtgctctttccatttcaagatgatgccttcctagtcactctgacttcaagaacttttaaatgttgttaatgattaggctaagaatcactgggaaacactgctttcaatttgataaaaggattcataa

SEQ ID NO: 57499 - DNA, 2273 bp, Homo sapiens
tatgtaagtgtcacacagcctcagcctgaatgcattttttagaaccaaatcacttaccgatgaaagattgtttaactggcaaatatagcatttgctgaatgaaatacctcttagacctgtttagttagtaagcataagtgatagaatcaaccacatgtaaatacctcttagacctgtttagttactaagcgtaagtgatagaatcaaccacatgtaccacacataccactctacatcatggtgctgttgctaagtccaggccaatccaaaatcatacaggacttagcttctcatagctagggtttaaggccctcttcttagctagaaaaattatgtttctccttgccgctccttcacaatcccgtgagaaaactagatttatatttttccatcaagtatatgcttatttgtattcatcacagtagtccygtttttctcattagtgtcaccccccctccccttaaaaaaaaagaaaaaaaaaagagacagggtctacgcagcagtatgatcatagctcatcacagcctctaactcctggtgtcaagggatcctcccatctcagcctcccaagtagctgggactacaggttcactagtgtcttgataggaaagattatttccttattcacagaggatacgtagtaagtactggccagtgaagaggcacactttaggaggaaagagaaaacacggaacattccaatgagaaatagctggtatctgctaaactgctgagcaggctctaaatcaacatacagcaagataccacaactgtggagctgacaatgggtatcgagtagacaaagattcaggtcatacttctagatatggggagcacctaaggagaaatcagccttacactgcgtgaaatggctgtccctttagttcctctctagcacaagcacacgtgatgcatcttacatggtaaaaagaagtcagaactaacgccatctatagggcttcaaggcagtgctttatactcagcaactgctaagcttagctgcatgtagtgactcggaatagtaaatggtcatatgaatacaatcggcaataatgtaaacctttatccaccctaacatagttgaataaaaccacatatacccactagaaccaagtacacccactagtggctcattgtgaataaggaactgaaaggggcttggtgaggacaaagtatgtcaaccatctccagttccccagtcaataatcgctttaacagttttggtctccccaatcttacaactacactgcacaatcttttttttgtttgtttttttgagatggagtttcgctctttttgtccaggctggagtgcaatggtgcagcctgcctcagctcactgcaacctctgccttctgggttcaagtgattctcctgcctcagcctcccgagtagctgggactacaggcacacaccaccacgcctggctaatttttgtatttttagtagatggggtttcaccattcaccatgttagccaggctggtctcgaactcctgacctcaggtgatccacctgccttggccttccaaagtgttgtgattacaggcgtgagccaccgcgcccagccccactgcacaatcttatatgcaaaccataagagagatgaagttaaacagctcgagactatcattcattcattcattcatcatttgagatggggtcttgctctgttacccaggctggagtgcagcagtgtgatcatggctcactgcagcctcgacttcccaggctcaagcaatcctcctgcctcagcctcctgagtagctgggaccacaagtgggcaccaccatgcccagctatttttttactttttttgtagagatgaagtctaacactgttgccaggctggtcttgaagtcctggattcaagtgatcctccctccttggcctccctgagtgctgggactacaggcattagctactgtgcctggcctgagaaatattattaaactttaaaagatttgacagttctaattgaaaccaaaaaaaaaaataagcattcacagactcagaatatgaggtgccgaaaggacctcagaaatcatgtcagcaacttgttttatagttgagaaaggtttcaggactgagttgctctaaccaagagggtcaagcatcagaataggtgagctctgattaccaagtctagtgctctttccatttcaagatgatgccttcctagtcactctgacttcaagaacttttaaatgttgttaatgattaggctaagaatcactgggaaacactgctttcaatttgataaaaggattcataa

SEQ ID NO: 57500 - DNA, 750 bp, Homo sapiens
tggggaactggatggcargtgggtagtactggctaccctgctgtagtcaggcactggagaagtggcaagcacttcttagggcttaaaggctggaattgttgatcacctcacaggagcccagtgctagggaaactaggagcctgcaaaagtatcctagtacaagaagcaatccctttccttttgcaatctctcttcagcactccattaagaaagcttaacattgtgtcagttgaaaaaaatgaaaatacttaaaaggaaccagccaattttcaaagaatagggaaataagggtgaatttggaactaagaggcaatgtgttggtaaccagcaaaccctattacccagagttgcaacttcacctaaatcattgtgatctttttcaagacaacagaaaggaagaaagcagaaaaataaggttaacgctttgtttaattataaatcctggaattcacatgtaacccttctgtttttgtcccattggtcaaaactagtcacatgtccacacttaaaagcaggttggaacagttagtttagttttaagcagtgcagctaaaattcttaacttaaatattaaggaagtagttagtaatccatattaatgaaaactgtcagcttctgccacatttgaatttttatttttcatctggatttggtttgtgttatacgagataaatacagttaattactcatcacataattatcagtatatttgttgatctattgtaagagccatctcttttcttcaccaat

SEQ ID NO: 57501 - DNA, 651 bp, Homo sapiens
ggcttcgaattgtggacaattcactttacattgtagatatttagaaaaagtttatttaaaatcattaggatgctcatttgaattatgtctttactcatcaggcttcactatgtttccagattggccccgtcagaggcagtacagaatgaaatgtgtstatgtctgatgtgtagtttactatatcccttctttctatatgtatgacttagaagaattgtgacaggtactacattttctcagatgctagtgcttaaattttcacaaatcagctactgactttaaagtgtttgttctattaataagtgcacatgaagtcacacacaatgtcccctttaggatgaaataaattgtataaatactgttgaaaacaatccccaaattagatatttcagacatcctgatgcaattcctggcttttcttatccaaatttctcttggtctctgcattttgatgttatttcgagtttggagaaacttcctaatatttcttttgcctggggttgagcatggtgagtgacaataaaatgaggtgaagtcataacttcatattgacatagattgtttaagaagggagaaaaacataaatgatcacttgtttatttattgtgaagctgattttgtgagctcgctaataataagttgcatgcctgg

SEQ ID NO: 57502 - DNA, 967 bp, Homo sapiens
gcatcattttgtgcctggttttactgtttcaatttttgtttgcaatatttacccaagtgtcttaaatataactgtcatttgttcattctcatagttctctttcatgttccactctattacctgtcrattgctgtaaaataaattaccttaaaacattggggcttaaggcatcaaacaattattacttatagtttctgtgaatcagcaatccaggtagaattcagctatgtaagtctggctcaggacctgcctcaatattgcaatcaaggtatgagccaggatggcagttgtctccaaagtgttaaaagaagaaagtctgattcaagctaactcatatggttcatgctggatgttggtcaggtcatcagttactttgtggtcctcttcatagggcacatcacgacacggccactggcttccctcagagccaacaagggcgtgaaagagaatagccaggaccgacgctacagtctcttcattacttaaccttaaaagtgaaatcattgaactttttgtatattttattagttagaagtgagtgattgggtacagtccatactggagagaggcaattacacagggtgtgagagtcaggaatcacattccaccacattcactgtatgaatatatgacagtttgcttatctattctaaggaagatgcacagttaggttgtttgagattttacctattacaaaaggaactcctaagaacattgttttacttgtgtttttagaaatatgtatgtatttctttcaaggttatacctaaaagtagaatggctggtttacagagaaatcatatgtttagcttctttagatacttctaaacagttacaaatgtggttgcaaaaatttaaattccaaccagcaatctataaagagttaataattttattaaactctaatgtctcaacaagttaagtccaggtgcatatatgcatatatgtgtgtgtgtgtttgtgtgca

SEQ ID NO: 57503 - DNA, 788 bp, Homo sapiens
agggccagtacccggtacagagaaggctctcgataaacaccttctggctgaattcaagcttgagtgcatgtggcaatgacatgtgggaggagatcgggctggaaaraggagctggggtgcgactgggaagggccggccttgctgctgggctaaggcgtttggactcaccctgcaggcaagatccttgggtgtgctggtgccctcagcaagaaatgagcctgactcatgtggccttaccaccgccagcgcccccacatctgttaacaagccacgtccaggctgtgcagcggggcagggagggaagccacccaccccatcccaagcacccagcaccaaagtcacaccccatccatctgcacatggctgaggggcatatactactgacgttgctcatgcctgccaatctgaaacctccaattcacagaaaaggaaactgaggcttggtgagaggaggtgacgtaagtggcagtagggaaacctcttctgcccatgaagatacaactgtaaccacacttgatcatgaaagaccaagcagcctccgacatcagggtttacaaaaggaatcatacctttctagacctgaagtcacggggaattcctgattacaactggaagatcaacagttggctgggtaacacgttcatttatgtcataaattggcatcttagcctaagactttgtgtagggagagcaagggtgaagtgtatgaaaatatttgaagtaaatcactttacagcgttttaaaggcggaaagaagtaaaagcacgtgcctcccagccttgccagga

SEQ ID NO: 57504 - DNA, 2589 bp, Homo sapiens
gttgtcatcaacttctgtcccttgccttccctgggagacctaacccagagccctatctcctcacctccaaacctttctccagctctgagtcaaaaggcccagaggctacggtgggtccagacagaggacaggctcctggctgggtcccaggcagtggacccatctcacactcttcccgtctttcactgcaaaccctgtggacgtttgattgtcagcctcactgcacatctggggtctaaagccaggaagggtgaggaacttgcagcccaagtttagaggcacgatttgaattgaggtctcttgactctcaggattatcagttttatgttccaagttagtgcatggctgcagggacccagcatccccaacagaggagaggggagggcaaaggctgaccctcattatgttgcacccacagggtgccctaagcagaggtgaggcaagaccctctgggctgcaatggagaacaaaggcccctgatcacagggggacccaggatagaagatggctatgatgccaaatgacaggctactgatcacrtccccttgttggggacttggcttctgcatgtggacaatgtagagtaggttgcctctaagggatcttttagttgtcttgtcatcagacatggggccaggtgtctgggtatggcaggagaccctgggcaaggctgagtaggctacagctggggcttgcccaagttcccgtacctgacagtcgcttcaaaatggctgtagctggcgggatccaagactaactccctaagtagtatcaatctagtgttgtaggttcccagatgacatgcaaactccccacagcaaaggtaccttcgagagatgtggctctcctagtagtagtagagaggacttcctcacaaccgggtacaggaaagcacaaccgtaatcccagaactttgggagactgagcctgggctcaagaggatgctttgaggccacccttggcaacacagcaagaccctgtgtctacaaaatatttttaaaaattagctgggtgtggtggcttgtgcttgtagacccagctactagggaggctgaggtaggaggatcacttgagcccaggaatttgagttaccgtgagccatgattctgccactgcactgcagcctgggccacagagggagaccctgtctcctaaaaaaaaaaaaaaaaaaaaaaagaacaaaaaagaacttcctcccattcagaggtatcagaggctgccttggatagggagttccccacctctgcaggtatgcaagtgcagcccaggaagcaatttgttatgattcaggcatgcatggcaagttggcttaaataataaccccaaaagttgttttcagatccttggattctatgactgaatcagggacttggtgttcagagaaaacaaacagcttctgcaaggggtggaagagcagcaaagtgctctgcaaggaagggtctggggcgggaatgtgggaactgcccctcttcatcccagttgtcaaacatcgccccaagcaggctgctttcccctcctccctccgttggaggcaatctcaccttctctctctgaggaggactcagctggagtctggaggtctggggtttgggggtgatcagatggatgaagaactaaagttagggctttcaggccccagttttctcccaaccttctctgatctctgctcctgacatctgcctctgggcctcatctgctccccagtgatggctggggcaacacagaggaaggttttcattctcaaggctcttagtgcagttagcatgtggtgcacagcttcaagggctccgggctgtgcaaactagctctctcctgcccagccaatcgacctaaggatccccacatcacctaagaggaagtcccaactgggcagggcacctggagacctgggtcatgggcaggtcctgctgctggtatgacaggctattttccatggcaagtgttttccgcttccagttgcgagcagtggcaggcaagagtcccctgggtaacactttcatagtcttcacctggactagagaggtcctttctttgccaagaattttctagaaagccagagaggaaaggcaggcatactctgcctctccactggggtctggggagcagggcggcagaacaaagcccctcacattcccatcccccagccccaagccaagggttgagcaaggatagttgatgactccatgctctgccactctccaggtgactctgcgcaaggtgttgaattctttagctcaactttccttttctatagaatgggaagaatacccatctcacaggatagagtagttgtgagaatgaaatggcatgaggtgtgtggagcagcaggcaaggtgcctgacattcaagggacaacgaatgggcactatcattatttacagggagcgagggagacaggcatgacccatgcatcctctctgcctcctcctgggctcggctccaatgtgtcctctgctgatcacagagccccccagcccatcactttactcggaaccactggatagcacactgtgcatttatgcgcttcctgttggctgtctcctgtgtccatcctaaagctccatgtgctcgccctgtgcgttgctcaat

SEQ ID NO: 57505 - DNA, 645 bp, Homo sapiens
tcgctgcccacgggagatcttcacatcctgccctcaataggctttctagaatgggtcctagagagttttctgggtggctgtaagctcttccctctcccttcttccaggtcctgggcacagaaggtaacataaggggccaccagatattatggccgagaggtgtcacaacacagccaaatgccaacctattattgaagagcagtttatccctgtccagcctctcaagtgccctggagagaaagagaacttcaggaaggccaagacacacaacacccctccccccaaccacatacacccctcttcagctatactgggatggtcaaggcaatggtctgagaattgtcttgtttcctgccaccatcctgtgaaccaagagcagtaaacttctgaagtctccatgccaacccctgcagccttccaaatgggcacccaactgggtctaggactcagattgcgaccctggtcttgcctagggacaccatgggctgtgcaggtggagctgagactcttcgaagatcacattgctatcttaatccttttggcctgaagcctctgaaggactctgtcaccctgggcaatcttttgaggtcaaggtgagatgggggtatcttgggttctgctctgattctgctagcacgyctttgg

SEQ ID NO: 57506 - DNA, 975 bp, Homo sapiens
tccttccataaattactgggaagaattgtatttcaaatccaatccaatcagtgcctgcatgttggaacacccaagaaaatcccagtggctctggatcaagatactctttctcattgtccattaagcctactctctagggtcatcttcactcaggggagggtataaaatagtcatttgggtgagggtaggccatctgtagtatgaacaggagtggctcacacagagcaagtctagactcctttcactgtcaatttaaatattttaagctctccactgtagtcttgcccagccaaattcactcacctttayaggctgaggtcaagcccacttcttccaggaagcctgacatcctgggcatgacactgtgctggggctgggtgcatctatatgaatgaacacttttggccaaacatggtggctcaggtctgcaatcccagcatttggggaggctgaggcagaaggattgccttaggccagaagttcaagaccagcctggtaagcatagggagacccttatctctaatttttttttaaaagaagaatgaacactttctcagtgtgtcaagaggacaatcaaagatgtggccaccagttaaataaataaactgttaaatggataacctcaggttgcaactgaaagtacctaaactgggaggccgaggtgggcagatcacaagatcaggagatcgagaccatcctggctaacatggtgaaaccctgtctctactaaaaattaaaaaaattagccaggcacggtggcagacgcctgtagtcccagctacttgggaggctgaggtaggagaatggcatgaacccgggaggcagagcttgcagtgagctgagatcgcaccactgcactccagcctgggcgacagagggagactccgcctcaaaaaaaaaaaaaagaaaaaagaaaatacctaaaccggcatcaaatgctgtctgcttgattggttacagctgttggatggcaga

SEQ ID NO: 57507 - DNA, 975 bp, Homo sapiens
tccttccataaattactgggaagaattgtatttcaaatccaatccaatcagtgcctgcatgttggaacacccaagaaaatcccagtggctctggatcaagatactctttctcattgtccattaagcctactctctagggtcatcttcactcaggggagggtataaaatagtcatttgggtgagggtaggccatctgtagtatgaacaggagtggctcacacagagcaagtctagactcctttcactgtcaatttaaatattttaagctctccactgtagtcttgcccagccaaattcactcacctttataggctgaggtcaagcccacttcttccaggaagcctgacatcctgggcatgacactgtgctggggctgggtgcatctatatgaatgaacacttttggccaaacatggtggctcaggtctgcaatcccagcatttggggaggctgaggcagaaggattgccttaggccagaagttcaagaccagcctggtaagcatagggagacccttatctctaatttttttttaaaagaagaatgaacactttctcagtgtgtcaagaggacartcaaagatgtggccaccagttaaataaataaactgttaaatggataacctcaggttgcaactgaaagtacctaaactgggaggccgaggtgggcagatcacaagatcaggagatcgagaccatcctggctaacatggtgaaaccctgtctctactaaaaattaaaaaaattagccaggcacggtggcagacgcctgtagtcccagctacttgggaggctgaggtaggagaatggcatgaacccgggaggcagagcttgcagtgagctgagatcgcaccactgcactccagcctgggcgacagagggagactccgcctcaaaaaaaaaaaaaagaaaaaagaaaatacctaaaccggcatcaaatgctgtctgcttgattggttacagctgttggatggcaga

SEQ ID NO: 57508 - DNA, 636 bp, Homo sapiens
ggctgctctggtacaattccatcttattttagtgactgggcaaagatggtccctaaatttgtggattttgccagagatgcctcactctcgtttttaaaatgaagcttgtcataatgaagaattatatattaaaaaaagcactgaagtgttgaaagttgtagtattagaaggtttagaaaggaagttaatgacaaagtgcagttaaatgttattttgaggaaggtctggggtatttaatatctttggataaaagcaaacattttgatacttttttagtgactagtaaaaacaattttttgggcagaaatgtcttgatttagcctggcctttttayagtagggaaaaaaactgtcaatttcccctctttccttctgatgacctccttctaacgagatgtgttgtgagtggtgtgggaagtaggtaccttcctgcatcttgagttcaggtggcacccggtgggaggggtgttgtccttggacagtgactgttccttccatggccccataccctcagtgtgctctttgtttactggataaaaggaatgcttcccagatttcctctggagcaggtgaagcccccaggggccactctgcccagccctctggcatctcagtccattcactaggtgaatgcaga

SEQ ID NO: 57509 - DNA, 2018 bp, Homo sapiens
  misc_feature (1)...(2018): n = A,T,C or G
tctcacagggaaatagagaattgttcctgtgaacttcctgcctgctgtactaaacgcagttgctgtggcagtttttaaaaagaaattaaaatgcagtaatgctttaaatgtactgctttaagaaactcgataactcttgattagttagcataacagacagcaaagcagaacttttttttttttctttttgagataggatctcctccagcccaggctggagtacagtagcacaatcacggctcactgcagccaggctcaatagatctgcccacctcagcctcctgaggaggctggaactacaagcaggcatcatcacacccagctaatttttgtattttttgtagagatggggtttcaccatgttgcccaggcaggtcttgaacttctgggttcaagtgatttgcccgcctcagcctcccaaagtgctgggattacaggagtgagccaccatgcctggcctagaatctttacataccggttttaaccatgttgtttcactttttgaagcacttaataggaggtaaatatacttttgaaagttacatacttaatagaaacacacattaatggtacccaaagaaccaactcactcgtagattgtgctccatttttgtgcggaagtttttgtgccagccaattacatttgcttctgtggtagatttctcttcattgggtcaaaggagaggcgtcattaaagaaagcgcatgtgtctttgtttcctctgggtgttctgatgtgagagagccctgcttcttcatnnnnnnnnnnnnnnnnnnnnnnnnnnnnnnnnnnnnnnnnnnnnnnnnnnnnnnnnnnnnnnnnnnnnnnnnnnnnnnnnnnnnnnnnnnnnnnnnnnnncaggtcaaaaataacagtctgggttcagtgggaaatttagctctaacaatatgaggcacagaggaggtgagttacatgtcagaggagcaggcagcaaccgtagatggaagcagagcaaaaggggatatacatcaggtgccagcatgttttcttccttctgatcttttgcctcgaaagccagcctttcagcctaagcctcaaggccctgatcaccttgggtgatgtgcacagatcacaggaacacctcaatgtaagcaaatccaaccttgcaatgccctagactatttcctgatccccgcttggtcccactgtcagcacagcacaacaaccaacaaggctgttaacctgccccaagagtcttacaaatcagcagattcagctgacagaaagccaaggaattttctstccacatcgatgtcattcaatgaagacttctgcttaaaccagaaccgtgaagttttgtatccggagacttcaagcacaagttcaacaccaacctccaacagacacctctcaatcactggccctaaaggagcagaagggcatccattcacagatcaatgtgtgtattttctaattagcttaaggaactttgcacatgtcagatttgaacgtctatgctaccttatggtttgttcaggtaatttcgtgttccctaatgagactaggataagtaatcgtgtagaagttaatacagaattgtaattcactacagatacccacagaggacaacctatgcctgtattgttaaggtttgactatccagatctacaaattcaagttgaaacttatttcagccctccttggaacagtccactaatctagaaaacactgggactattcttcccgagcagtgaaacatccacacaggttagtaactacaggctgctctaattaattacctgagacacaattggtggatgttagagtttgttatgttgttgtatttttaattccatttgcctacttgatccacattttcatgccttggctgtgacactttagaaattaaaacatcccaatagtgtataattaaaagttaaatatagcagctacaatctaatttcattgaaagtctcctccaaatcacagaagtgccactggcctggcctggctagaagtcagcatggacaactctagattcaggcactttcaactgt

SEQ ID NO: 57510 - DNA, 2018 bp, Homo sapiens
  misc_feature (1)...(2018): n = A,T,C or G
tctcacagggaaatagagaattgttcctgtgaacttcctgcctgctgtactaaacgcagttgctgtggcagtttttaaaaagaaattaaaatgcagtaatgctttaaatgtactgctttaagaaactcgataactcttgattagttagcataacagacagcaaagcagaacttttttttttttctttttgagataggatctcctccagcccaggctggagtacagtagcacaatcacggctcactgcagccaggctcaatagatctgcccacctcagcctcctgaggaggctggaactacaagcaggcatcatcacacccagctaatttttgtattttttgtagagatggggtttcaccatgttgcccaggcaggtcttgaacttctgggttcaagtgatttgcccgcctcagcctcccaaagtgctgggattacaggagtgagccaccatgcctggcctagaatctttacataccggttttaaccatgttgtttcactttttgaagcacttaataggaggtaaatatacttttgaaagttacatacttaatagaaacacacattaatggtacccaaagaaccaactcactcgtagattgtgctccatttttgtgcggaagtttttgtgccagccaattacatttgcttctgtggtagatttctcttcattgggtcaaaggagaggcgtcattaaagaaagcgcatgtgtctttgtttcctctgggtgttctgatgtgagagagccctgcttcttcatnnnnnnnnnnnnnnnnnnnnnnnnnnnnnnnnnnnnnnnnnnnnnnnnnnnnnnnnnnnnnnnnnnnnnnnnnnnnnnnnnnnnnnnnnnnnnnnnnnnncaggtcaaaaataacagtctgggttcagtgggaaatttagctctaacaatatgaggcacagaggaggtgagttacatgtcagaggagcaggcagcaaccgtagatggaagcagagcaaaaggggatatacatcaggtgccagcatgttttcttccttctgatcttttgcctcgaaagccagcctttcagcctaagcctcaaggccctgatcaccttgggtgatgtgcacagatcacaggaacacctcaatgtaagcaaatccaaccttgcaatgccctagactatttcctgatccccgcttggtcccactgtcagcacagcacaacaaccaacaaggctgttaacctgccccaagagtcttacaaatcagcagattcagctgacagaaagccaaggaattttctctccacatcgatgtcattcaatgaagacttctgcttaaaccagaaccgtgaagttttgtatccggagacttcaagcacaagttcaacaccaacctccaacagacacctctcaatcactggccctaaaggagcagaagggcatccattcacagatcaatgtgtgtattttctaattagcttaaggaactttgcacatgtcagatttgaacgtctatgctaccttatggtttgttcaggtaatttcgtgttccctaatgagactaggataagtaatcgtgtagaagttaatacagaattgtaattcactacagatacccacagaggacaacctatgcctgtattgttaaggtttgactatccagatctacaaattcaagttgaaacttatttcagccctccttggaacagtccactaatctagaaaacactgggactattcttcccgagcagtgaaacatccacacaggttagtaactacaggctgctctaattaattacctgagacacaattggtggatgttagagtttgttatgttgttgtatttttaattccatttgcctacttgayccacattttcatgccttggctgtgacactttagaaattaaaacatcccaatagtgtataattaaaagttaaatatagcagctacaatctaatttcattgaaagtctcctccaaatcacagaagtgccactggcctggcctggctagaagtcagcatggacaactctagattcaggcactttcaactgt

SEQ ID NO: 57511 - DNA, 753 bp, Homo sapiens
atcctggctaacgcggtgaaaccccgcctctactaaaaaaaatacaaaaaattagccgggcgtggtggcgggcgcctgtggtcccggctactcgggaggctgaggcaggagaatggcgtgaacccgggaggcggagcttgcagtgagccgaggtcgcgccactgcactccagcytgggcgacagagcgagactccgtctcaaaaaaaaaaaaaaaaaaaaaaaaaaagaaaatgtaagtttcaatgggatttgccttagtatttcaataaatcaaaatcctgtccctttatgaaataataaaaatagtaataataataataatatcagctaaaacttactgaatgctcactataacccaagtactatgctaagtgatttaaattaaatatctcacttttatttcacaaagccctaggaggtaactactactgccagtccaattttaagagtttaaaaaaataattgagctatggacagtttacgtaacttacaaatgataagaaaaagagctagaaatcgagtctggatttcagttgtcccacacaaaggccatatttctaagctaacagaggggatggaggagggagacttctcatttcaagttgctgttaaacatcttgctactgaaggaccctaaaacttttcattcactttacggtaatctggataaaaaaactaaactgaaagtcagaaatctcacattctggaaccaaatcgatgaagctttaaccttagttatgttttaaaatatt

SEQ ID NO: 57512 - DNA, 759 bp, Homo sapiens
  misc_feature (1)...(759): n = A,T,C or G
agctgatcctacaacatcagcttctagttgttaaaaaaaaaaaaagaaacagataaattaacttctactgtatatactgtgggcagaggatcttactgtgcctctgtttgtgtacatggacttcggtgtgtatcagtttgaaggacagccttgccccatgtaaacatataaatgcagattggtatcgcctggttgctatttgcttaagaacaaatattatacagatgagatcaggyataattttaaaagatcattatcagtggagacctcattattactgatattacaatggggccagtttttatacttctgggtagaattaataaaatttttctgatcccagagatctgagttctctctgcagttggaaacaagaagctgttgtgggcattgtgnnatgcaggggcccttgtgtttgtgtgggcaaatatcttttagcagtgtgagctgcttttttcttttcattaaaagtctctctaaaataatagaaatttcagatactcggttcaagtctcactgattttgtagaggtccaaaaatgtaggatctgtcacttttgcaggcccctgcctcacctaattcctggccaggtgacattttgggcagaagtaaatgcttctatagtcacaagctaaaatgactctaagccccaatttcacggggggtattcacatgcttcctctggaaaatactctttgacagtcagctttgcaagtaagtgattaccttgttaggaatcaaagaaaaatgtatttctct

SEQ ID NO: 57513 - DNA, 1281 bp, Homo sapiens
gtatacagtcaaccaaattaagtgactgcaaaataaaatggtctaaaaaacaaaccaagtgggagtgtcctcctctttaactgctattcaggttaagtattcctatcaggaggcgtatctgtagataatacctgcaaactaacttataaactgaaataagttatattattttaaccatgggcattttagaaaaagaaagagaaagtactcttgcttatctactgctaatggaattcagaaacagtttatacattaaatgatcccacatcaaactgtttacattaaaccttgatgaaattaktccacatgcagtgaagctactcaaatcaaaaatatatgcaaaaaatgtcaaaagtgccactagacataagcaacatgagaaaacaataaaaagaaaaacatacaaaaagaaattgaaattttaaataacataattttttccttcaggaagaaccaaattcctaatttttaaagtgtatgccctagctctcaaaagcaagcgatgttagacagcttgaagtgaaatacaattctaaaaggaacaatatttttaggctacatctaggctaaaatggatgtaacaagagattaaatgactttggtaaaaagaaattggacaacaggactatgtgtcttttttaatagtacctgctcactccctgctctgaacccatcttaattcaatggtcaagtccagcaaaagagaaacaagccctacataggctgctaaaaattctagagaggttgaagagatggctacaaaactacagttttcaagtagcccttgctgaaacctacaaagaaatgagaatgaagataatctataatattttggaaggaatgaattagggaatgtctagtttctaaagattgggtgcaaaaacaagggttacagagaagcaagagagaggagttttgcctccctacatttcttttctttccatcttctgtcctgaaaacaattctgcacctcacctcttttgcagttttcatctatattacttagtccttctattagtccgttcacattgccattttaataatctcctaatatttatcattgctgataatttttcatccaaataactcccatttggagttaaaaacaaagtaattgattcatcatgtaccctactgatttccttatgctttctttggctctcttacctctaaaaactgcctccagctgcaagactagtattgcaggatttcaaggggtacacattaagtggtcaagatttgaaaaacatatcataattaagaactatttttatgatctat

SEQ ID NO: 57514 - DNA, 526 bp, Homo sapiens
ttacataacttaattaaatataacctacacagataaaatatggatgtgaaagaaagcgcgttgtttctaaaaaaagtaaagtgagtattttgaacatttttgacaaatataagtagctagaagaaattgctgttgaattcaaggtaggcaagacagtaacaatttggccaaaaagaaagaacagtaataaaaatgtagggggattctgtacccaggttccttccaagtgacttttaattcttactccactttaaggaaactggaaatgacacacaacacatcccagctgcaaaagaaggccataggagggggtggtggctaacaccggtggtccyagctactcaggaggtcaaggtgggaggatcacttgaacccaggagctcaagcccaacctgggcaacatagcaagacctcatctttaaaaaaaaaaaaaagaagaaggaaaaagaaaaaggccacaaggaataccaaacagagtacctatataaaaaggaaagaactttcccttcaacaaaagattggcaaa

SEQ ID NO: 57515 - DNA, 1036 bp, Homo sapiens
agtaaatactgccagtttttgaaagtgattgtactagttttacattcccagcaatagttgtataagatttcccttgttttgcatttttaccaatacttaaartggcctgccttgagttgttgatacttgtgtcatttttgacatctgtcatccagactcaacctcctagggagcttgacccttcccttttttcagttttctctctagcctaggttcagtcagcaagacctatcagatttttcttttatattgcctttgtccttcctccattgccacagctcaaatattagtcatatatggagtaaatatcaggtgatttggatatcaggattatgacagtagtctgccagttggtgcatcttctagtatttctgcttttccaataaatcctgcacagccaagaaaatgcttcatgaaacaccgcaccattgctctgctcaaaagccgtcaacaacccttcattgcccattggatatcagccttcctccccctcttccttttccacctgtacctctcttccttcctcccttcttccgttctttttttttaattaaagtgtaatatatatgaagtgcactatgacagagattaaagtatagagcattaccaacacccagaagcctccagtttgcctcttcctagtcttctcttaagtcttctcttaaggtacccactattctgatttctgtcaccatacataggttttacctgattttgaactttatataaatgttaaaaagctaatttatagcttaaaaagtacaaactcttatgtctggcttcttttgctgaatgttctgactgtgagattcacctacactctgcttatagtgctcattttttttattgctgaatagcaattctattttatgagtatactacatttatttacccattctactgtgatgacatttgggttattggggttatttcactttgggacaattatgaatgctgctgctgttaacattttgggtgtttctgtcctttgatataaaaatatacacttatatattgggtatatgcctagtagaat

SEQ ID NO: 57516 - DNA, 1089 bp, Homo sapiens
atcatacattttagttgaaaatcatttgtggggcaataaaagccattttttgaaaaaggtgtatcactcaagaagtacttatggaaaaatatcaaattattgagggcattaactctgggaaagaccaggcaattaagttgtcacagtaactgctactaatttaatgccaggaatagagatgccaaaaatcctaaaattttcagaaagggctctcacagaaatgtagcactccactcaaactgcaatagcttgattctgttgagaaacactgatctaaataaatggaaaaataacccacattcactaatgaagataataaggaagacccaatatttttttttttwtaaaaggaaagtatttttagcttttatgaaagctttaagtaatttttcctcattttcctgtttgaaacttttgaaaaggaagttcttcagtgtttgtttggttaggcgcagtgtattctaggccactgctttataaatatggtgtgagaaagcagtaggataaaataatcagagttcagtgtgtctcatattttgtttcctaaaagtttagtagagctgtgaatgtactaggaagtcccctctgaaaaagcacagttagttagttagaaatctgcccattaactcagggggactcaggcgccccccgggtcttccctctcctgcaggctctccggttagtgtcctgatttgccgtaaccacgggcctctgacctgctggcacctctggttccttggcgtgtgggtcactcacagatatgaaaacctgtgtctggctgaccaggttctcctgtagccctcccttgcccaggcacagataggagtcatgactggcccaaggccacgttcagacttaaccctgcaatggccacgaagtaacctccgtgtgggagagctccaggaacagtgcaggggattaaagccagcttggagtaccctttagaagaaagtttaagaataaaagagacagggccaggcagcaggcgttccggggtacagtgagctatgatgagaccttcaagctcttgccttccaggcctgtggtggggaccagtggcatgagtcagcaaagtaccagcactcctca

SEQ ID NO: 57517 - DNA, 1089 bp, Homo sapiens
atcatacattttagttgaaaatcatttgtggggcaataaaagccattttttgaaaaaggtgtatcactcaagaagtacttatggaaaaatatcaaattattgagggcattaactctgggaaagaccaggcaattaagttgtcacagtaactgctactaatttaatgccaggaatagagatgccaaaaatcctaaaattttcagaaagggctctcacagaaatgtagcactccactcaaactgcaatagcttgattctgttgagaaacactgatctaaataaatggaaaaataacccacattcactaatgaagataataaggaagacccaatattttttttttttwaaaaggaaagtatttttagcttttatgaaagctttaagtaatttttcctcattttcctgtttgaaacttttgaaaaggaagttcttcagtgtttgtttggttaggcgcagtgtattctaggccactgctttataaatatggtgtgagaaagcagtaggataaaataatcagagttcagtgtgtctcatattttgtttcctaaaagtttagtagagctgtgaatgtactaggaagtcccctctgaaaaagcacagttagttagttagaaatctgcccattaactcagggggactcaggcgccccccgggtcttccctctcctgcaggctctccggttagtgtcctgatttgccgtaaccacgggcctctgacctgctggcacctctggttccttggcgtgtgggtcactcacagatatgaaaacctgtgtctggctgaccaggttctcctgtagccctcccttgcccaggcacagataggagtcatgactggcccaaggccacgttcagacttaaccctgcaatggccacgaagtaacctccgtgtgggagagctccaggaacagtgcaggggattaaagccagcttggagtaccctttagaagaaagtttaagaataaaagagacagggccaggcagcaggcgttccggggtacagtgagctatgatgagaccttcaagctcttgccttccaggcctgtggtggggaccagtggcatgagtcagcaaagtaccagcactcctca

SEQ ID NO: 57518 - DNA, 1089 bp, Homo sapiens
atcatacattttagttgaaaatcatttgtggggcaataaaagccattttttgaaaaaggtgtatcactcaagaagtacttatggaaaaatatcaaattattgagggcattaactctgggaaagaccaggcaattaagttgtcacagtaactgctactaatttaatgccaggaatagagatgccaaaaatcctaaaattttcagaaagggctctcacagaaatgtagcactccactcaaactgcaatagcttgattctgttgagaaacactgatctaaataaatggaaaaataacccacattcactaatgaagataataaggaagacccaatatttttttttttttaaaaggaaagtatttttagcttttatgaaagctttaagtaatttttcctcattttcctgtttgaaacttttgaaaaggaagttcttcagtgtttgtttggttaggcgcagtgtattctaggccactgctttataaatatggtgtgagaaagcagtaggataaaataatcagagttcagtgtgtctcatattttgtttcctaaaagtttagtagagctgtgaatgtactaggaagtcccctctgaaaaagcacagttagttagttagaaatctgcccatwaactcagggggactcaggcgccccccgggtcttccctctcctgcaggctctccggttagtgtcctgatttgccgtaaccacgggcctctgacctgctggcacctctggttccttggcgtgtgggtcactcacagatatgaaaacctgtgtctggctgaccaggttctcctgtagccctcccttgcccaggcacagataggagtcatgactggcccaaggccacgttcagacttaaccctgcaatggccacgaagtaacctccgtgtgggagagctccaggaacagtgcaggggattaaagccagcttggagtaccctttagaagaaagtttaagaataaaagagacagggccaggcagcaggcgttccggggtacagtgagctatgatgagaccttcaagctcttgccttccaggcctgtggtggggaccagtggcatgagtcagcaaagtaccagcactcctca

SEQ ID NO: 57519 - DNA, 1089 bp, Homo sapiens
atcatacattttagttgaaaatcatttgtggggcaataaaagccattttttgaaaaaggtgtatcactcaagaagtacttatggaaaaatatcaaattattgagggcattaactctgggaaagaccaggcaattaagttgtcacagtaactgctactaatttaatgccaggaatagagatgccaaaaatcctaaaattttcagaaagggctctcacagaaatgtagcactccactcaaactgcaatagcttgattctgttgagaaacactgatctaaataaatggaaaaataacccacattcactaatgaagataataaggaagacccaatatttttttttttttaaaaggaaagtatttttagcttttatgaaagctttaagtaatttttcctcattttcctgtttgaaacttttgaaaaggaagttcttcagtgtttgtttggttaggcgcagtgtattctaggccactgctttataaatatggtgtgagaaagcagtaggataaaataatcagagttcagtgtgtctcatattttgtttcctaaaagtttagtagagctgtgaatgtactaggaagtcccctctgaaaaagcacagttagttagttagaaatctgcccattaactcagggggactcaggcgccccccgggtcttccctctcctgcaggctctccggttagtgtcctgatttgccgtaaccaygggcctctgacctgctggcacctctggttccttggcgtgtgggtcactcacagatatgaaaacctgtgtctggctgaccaggttctcctgtagccctcccttgcccaggcacagataggagtcatgactggcccaaggccacgttcagacttaaccctgcaatggccacgaagtaacctccgtgtgggagagctccaggaacagtgcaggggattaaagccagcttggagtaccctttagaagaaagtttaagaataaaagagacagggccaggcagcaggcgttccggggtacagtgagctatgatgagaccttcaagctcttgccttccaggcctgtggtggggaccagtggcatgagtcagcaaagtaccagcactcctca

SEQ ID NO: 57520 - DNA, 687 bp, Homo sapiens
ggatcctgttttacatcactctccaacctaggaggttgatgatctttgatttcaattgttagctcccctggttttataaattgacagatatctaacaattcagctggccacaaagttctggtaaaaaaaaaaaaagagtcacctgttcttccctgagatgcttcctgttgccacagtgagaaatcctcagcttcttgtaaaattctccttttactctccttaggtgttttagctcacttggaaaggctagagacccaagtgagcagatcccgtaaacrgtctgaagagctgcagagcgtgcaggcccaggaaggtgctcttggaaccaagattcataaactaaggcgtctgcgagatgagctgagggctgtggtgcggcaccggcgagccagcgtgagtagaagggtggtatcagcagttcctttagagtataatgaacaaacgtgatttgggaattggtgaattggccattttttataatgtgttttacttgtgatcttactggattgattgcagtccttgatccctcaaatgatcaaacctgtagagtttggccaggcacggtggctcatgcctgtaatcccagcactttgaaaggcgaggcaggcctatcgcctgtggtcaggcgtttgagaccagcctggccaacatggtgaaaccccatctctaccagaaatacaaaaatta

SEQ ID NO: 57521 - DNA, 657 bp, Homo sapiens
  misc_feature (1)...(657): n = A,T,C or G
gcaacccccagccaggtgccgccgcggagtagaggccactctgctctacagggccaaggtcggagcgccaggctcctcctggccgtcccgcaggctccaaagcctctctgagatgagctgccttgaagggagtgagttccccgtaccttgaggtgtccaagtagagttgggtgtcctcagttgggcactggaagactgaaagatttcatgaggtgggaggttgaatgaaatgacattgaaggtctcttccagctggaagattctgtgtgtgcctacacaccgccctcaccccttcaccgtgggggctgttctccttccccatggagcgctcagggctctaggttcctgacttggggcacctctgtctaattccaccagcacagccactcactrtgtgctcatctcactcctccagcagccgctgtaggacttggggctgggcacccccccacccccgcctccagcctccttgcgcgccccagcaccccaccagccacccgcagctctgcaccccgaattctactcagcacttcagctatatcacagtgcctgagtccctgactgcacaggacatgcgtgctccttcccaggacccgccatcctacttgtgagcagggattgctggagttggtggtgngactcacttcacagtgaagc

SEQ ID NO: 57522 - DNA, 814 bp, Homo sapiens
ggctacctggtgtttttgtcttcaacacctgcctcccaactccattcccagcaagttctagttctcatgacctcccttagagattttaaattttcaacatgaaagcagtcacaacccattcaaactgtcacagaactagtagactcatattgctttttggaactggtgaaaggatttgatgcccatttcttttatgccatggtcctaccccagctgtccccccttggaagtaggaagcagagggaagacggagccagtgtcctccacctgtttgcagacgcgcctgtgcaggaggcaggagagactccaagcccactacctacagagtcctggcttctcaagtaaggttaagtgcagagaaggcaccagagtccctgggatctgctactttaactggggagacctgtaagtaacatcgaattactaggttctctagtaatcattttccctctgaaaagaattcaatgcccataggagatggagcttccrgtagcctgaagcagcccatctgggcctggatgttgtttcgtgtggaagatggtatttgcatcctggggaaagcatcttggtgtccaggctctggctgtgggggttaggtgcctgcaacaccccctctcccctgtcatccctcctgagccaggcaggccttcagcactccctaccactgagactatagactgagaagtaactccctgtcgctgggcctccatgatgtcggtcttctgtaccttacaggccttgcctcagtgctgcccaccttcatgtctgggagagtcttcattgattgctggggaccaaaaccaacttagactag

SEQ ID NO: 57523 - DNA, 814 bp, Homo sapiens
ggctacctggtgtttttgtcttcaacacctgcctcccaactccattcccagcaagttctagttctcatgacctcccttagagattttaaattttcaacatgaaagcagtcacaacccattcaaactgtcacagaactagtagactcatattgctttttggaactggtgaaaggatttgatgcccatttcttttatgccatggtcctaccccagctgtccccccttggaagtaggaagcagagggaagacggagccagtgtcctccacctgtttgcagacgcgcctgtgcaggaggcaggagagactccaagcccactacctacagagtcctggcttctcaagtaaggttaagtgcagagaaggcaccagagtccctgggatctgctactttaactggggagacctgtaagtaacatcgaattactaggttctctagtaatcattttccctctgaaaagaattcaatgcccataggagatggagcttccggtagcctgaagcagcccatctgggcctggatgttgtttcgtgtggaagatggtatttgcatcctggggaaagcatcttggtgtccaggctctggctgtgggggttaggtgcctgcaacaccccctctcccctgtcatccctcctgagccaggcaggccttcagcactccctaccactgagactatagactgagaagtaactccctgtcgctgggcctccatgatgtcggtcttctgtaccttacaggccttgcctcagtgctgcccaccttcatgtctgggagagtcttcattgattgctgggsaccaaaaccaacttagactag

SEQ ID NO: 57524 - DNA, 814 bp, Homo sapiens
ggctacctggtgtttttgtcttcaacacctgcctcccaactccattcccagcaagttctagttctcatgacctcccttagagattttaaattttcaacatgaaagcagtcacaacccattcaaactgtcacagaactagtagactcatattgctttttggaactggtgaaaggatttgatgcccatttcttttatgccatggtcctaccccagctgtccccccttggaagtaggaagcagagggaagacggagccagtgtcctccacctgtttgcagacgcgcctgtgcaggaggcaggagagactccaagcccactacctacagagtcctggcttctcaagtaaggttaagtgcagagaaggcaccagagtccctgggatctgctactttaactggggagacctgtaagtaacatcgaattactaggttctctagtaatcattttccctctgaaaagaattcaatgcccataggagatggagcttccggtagcctgaagcagcccatctgggcctggatgttgtttcgtgtggaagatggtatttgcatcctggggaaagcatcttggtgtccaggctctggctgtgggggttaggtgcctgcaacaccccctctcccctgtcatccctcctgagccaggcaggccttcagcactccctaccactgagactatagactgagaagtaactccctgtcgctgggcctccatgatgtcggtcttctgtaccttacaggccttgcctcagtgctgcccaccttcatgtctgggagagtcttcattgattgctggggacsaaaaccaacttagactag

SEQ ID NO: 57525 - DNA, 537 bp, Homo sapiens
tcagacaaaagaaaatgtctatgaatactgtatgtatttccagttggtcactccaatctctacctctatcccaccctaaaccctctttatcactcctattaaagcaagagggggcactaatcttaaacagacagtgtgtgctcccagtgcattctctccttcatcactcatcacgtctctgcccttattcaggccataaatgcactttctgaccctaaaaggttcacaacccccccaaaatatttaaaktgaaaacatcacaatatttaggcttctatgtcctggaaattccttttccctcattttatttaacttctctttacatgataccttcccctagaaagtagttttgcattccaacaatgaccttacaaggcccaatgggaggtgatatttttcaggctaagtagcaccatctggttaactcaaggaaggtggtcacttagtctgcctttttacacagcccactctggcagagacagaagtgaccctgggttacaggtaatctctcttgctctgctctgattgtttctgaat

SEQ ID NO: 57526 - DNA, 1019 bp, Homo sapiens
tggaatttaatttgggtaccaaaagaaggttccagatcattagatacaattctctccattttacaaacaaggcaaataagaaggagggaggtgatttgctttagctcatatgtttgtcctgccacatgctcagcagacattgctttcatgggtaagtctctgttttttgtaatcaccccaaatcctaaacaagctgtccaaaataagagttttaatgtacggacactgttgtcaatttcgccttacctcccaggtccagcatttaaaaaatatttttaaaatatcaaataataacagaaaaacacatcagtttaattttctctggtaccataattcctgtcaatcaggtacttctacttccctttgaatggactcatttattcctaaactatgactaccactatctgctacttttccttttgtctaacttatttttatcttcaaagcatccttatagtaaagtcattggtaaatataaaggagccactgccctgttggctamaatcctgctgccgtattccctagcacctaaagaattgttgtggctgttttcattatctttcatctctgctgaaagtgaaagtaggaggggagagaagagatggttccatcacaggctccacttcaaaagagccttgatcatgaaaggaggtgagagccacatgagttgactttctcttctagcacacaattatcttaacattaagtaatttactttgtaattattatgaaatcttacagcctctaaaactaggaacactcttaacatgaacagattcaattcaaatttcattccacttaaagaaaaacttgtattgagttcataccagggttcagatattgtaatgggaaccaagacttcaaagataaaaaatatctgctacattctcgcaaagacttcatggtctattctgtagcccaaacagcaaagacatttagcataatctcaaacacattggaggagaaaatatatactttttgaattttatgtacagtatacaaattgagacaagtattta

SEQ ID NO: 57527 - DNA, 2037 bp, Homo sapiens
ataagccaccgcaccaggcctgttgatgaatactttgattccacatctttgctactgtgaattgtgctatgataaacatacaaaggcacctttctttttgatataatgacttcttttgctatgcgtagatacacagtagtgggattgctggatcgaatggtaattctatttttagttcttcgagaaatctccacactgtttccatagaggttgtattaacttacattcccaccaacagtgtataaggattcccttttctccataccctcacaaacatctattatttttttaattttaaatagttatctgaggacttgccaaggatcagccctctgcctggcgataggttgctcagccctgtccagcctctgtggccgaccacacgccacagagcatcctgatgggctgctctgacttcctagttcaatcacacagttgatttatgcagtcaaaattaagttaaatgattgactgaatggttcaaccgtttgaagaaaatcatcctgaaaaagctggatatttatagctaattattctttggaagagatcgatttctttttttttacaaagtgggcatattgttagtgatgaacccatggagctgagagaggcttaattaaggtctcaacaactgtagtccactgtcaagaagctgttatcaggatagtcattttattgaaaactcaagttatggccgggcgcggtgactcacgcctgtaatcccagcactttgggaggccgaggtgggcggatcactagatcaagagatggagaccatcctggccaacatggtgaaacctcatctctactaaaaatacaaaaaaattagctgggcatggtggcttgtgcctgtaatcccagctacttgggaggctgaggcaggagaattgcttgaacctgggaggcagaggttgcagtgaaccgagattgtgccactgcacttcagcctggcaacagagtgagactctgtctcaaaaaaaacaacagcaaaaaaactcaagttatgtcagtggttccgttctctctcttgcactatgacattttgaagtacgggggactttggtgggagggtttgggtttcatacaatccaaggagatgttagttgtccctgtgtggtcgattgataacaagagaagcaatgctaattaattatagtgctcgctgtgctccaggtactgttctcaaggcttcatatgtctacatgcatttaaacctcacgacaacccatttcacagtaagaaaaccgaggtacaaagagattaagggtcttcaagaaagctgatacaagaatactcaaaaatgagtttaatgtttcatcttcaggaaggattatttgccaagtgaagcactggcaagactaggcattccctgtgggtgggggccaggtcctacttgccatgtgcttgtcctcctctttctgcctaggtgttttgggtttcaaaataaaaataagaattaggagaagcacgtaattacaccagaaaagtatttttctttctttcctttttttttttttttttgagatggagtctcattctgtcacccaggctggagtgcagtagcgcaatctcggctcactgcaacctctgcctcctgggttcaagcaattctcctgcctcagcctcccgagtagctggtacaggagcacgccactatgcctggctaattttttatttttagtagagatagrgtttcaccatcttggccaggatggtcttgaactcatgacctcaggtgatctgcccacctcagcctcctaaagtgctgtgattacaggcatgagccaccacgcccagacttttatttcttattttgtcaaaattagtgaaaggtggtcatcaaagagaatgcagtgattgcgggggggggggggggcggaatcatttttagctaggtcatgagaggcagcataaagagagacagagtttggtgggttttattagtgatgcggaaaccagcgcgggtgtctgatggatgctgttgtcatcagaatggagagaggagagacattagcaccgttctttgctgtaattcag

SEQ ID NO: 57528 - DNA, 2037 bp, Homo sapiens
ataagccaccgcaccaggcctgttgatgaatactttgattccacatctttgctactgtgaattgtgctatgataaacatacaaaggcacctttctttttgatataatgacttcttttgctatgcgtagatacacagtagtgggattgctggatcgaatggtaattctatttttagttcttcgagaaatctccacactgtttccatagaggttgtattaacttacattcccaccaacagtgtataaggattcccttttctccataccctcacaaacatctattatttttttaattttaaatagttatctgaggacttgccaaggatcagccctctgcctggcgataggttgctcagccctgtccagcctctgtggccgaccacacgccacagagcatcctgatgggctgctctgacttcctagttcaatcacacagttgatttatgcagtcaaaattaagttaaatgattgactgaatggttcaaccgtttgaagaaaatcatcctgaaaaagctggatatttatagctaattattctttggaagagatcgatttctttttttttacaaagtgggcatattgttagtgatgaacccatggagctgagagaggcttaattaaggtctcaacaactgtagtccactgtcaagaagctgttatcaggatagtcattttattgaaaactcaagttatggccgggcgcggtgactcacgcctgtaatcccagcactttgggaggccgaggtgggcggatcactagatcaagagatggagaccatcctggccaacatggtgaaacctcatctctactaaaaatacaaaaaaattagctgggcatggtggcttgtgcctgtaatcccagctacttgggaggctgaggcaggagaattgcttgaacctgggaggcagaggttgcagtgaaccgagattgtgccactgcacttcagcctggcaacagagtgagactctgtctcaaaaaaaacaacagcaaaaaaactcaagttatgtcagtggttccgttctctctcttgcactatgacattttgaagtacgggggactttggtgggagggtttgggtttcatacaatccaaggagatgttagttgtccctgtgtggtcgattgataacaagagaagcaatgctaattaattatagtgctcgctgtgctccaggtactgttctcaaggcttcatatgtctacatgcatttaaacctcacgacaacccatttcacagtaagaaaaccgaggtacaaagagattaagggtcttcaagaaagctgatacaagaatactcaaaaatgagtttaatgtttcatcttcaggaaggattatttgccaagtgaagcactggcaagactaggcattccctgtgggtgggggccaggtcctacttgccatgtgcttgtcctcctctttctgcctaggtgttttgggtttcaaaataaaaataagaattaggagaagcacgtaattacaccagaaaagtatttttctttctttcctttttttttttttttttgagatggagtctcattctgtcacccaggctggagtgcagtagcgcaatctcggctcactgcaacctctgcctcctgggttcaagcaattctcctgcctcagcctcccgagtagctggtacaggagcacgccactatgcctggctaattttttatttttagtagagatagagtttcaccatcttggccaggatggtcttgaactcatgacctcaggtgatctgcccacctcagcctcctaaagtgctgtgattacaggcatgagccaccacgcccagacttttatttcttattttgtcaaaattagtgaaaggtggtcatcaaagagaatgcagtgattgcgggggggggggggggcggaatcatttttagctaggtcatgagaggcagcataaagagagacagagtttggtgggttttattagtgatgcggaaaccagcgcgggtgtctgatggatgctsttgtcatcagaatggagagaggagagacattagcaccgttctttgctgtaattcag

SEQ ID NO: 57529 - DNA, 480 bp, Homo sapiens
ctgttttctgggtcataaaaataactatagaaaaaaaatctgaagtgtttctgttagtgctcataaaattgtggcattctatatatttttaaaaaatatgtgacattgtaaaaaaaaggcctaaaattattttagaagtagaaattaaagtcatctcttctataaaaatttgtcaaatttttaatgtaaatggaaagaatttgatttatttattatatattgtctgtatttgcataagtgtaatgcatgaaaaattactctgcccttttatctaaatgttgaggcctgtattgcatgtctttgctaattgcamttctaacacaacaatatgaaataaactcaaatttaggttatgcacataaatgcagtaagtgacatattatatactttttaatcattaaatatgttttgtagtcagacagcattatattttaaccatcgcttcctaatacgtattacataaagacccaataggatgaa

SEQ ID NO: 57530 - DNA, 1433 bp, Homo sapiens
cacagtgtgttcacagtgatcacctgtggaagagggagcagagttagggcaaaggagggcttcctatttctattctagaggcatcacattgcttaaatgtatttctttgttagtgtacagtgtgcacatatatttaaatatagctatatttgaagagtcacttaattgtaatcaatatattgtgaatagcagaagcatttagtatatatgtgtgtgtacatgtatatgtacatgtgtatgcatttatatatgtgtgtatatacattttgtgtgtgtgtgtaagacaccatgatagaactatacttgcaatgagaaatatttagggcctgatcatgtagatagagggcccatcatcaaatacctttctgatgtcttgagcccctaaatagtaagtgccacagtaatgccgatccgagcctgcacctgcagggtatcggttgtaaaatggagttgggatgattccaccttccccacagggcactactcccgacccaccataatgtaccgacagcgcgtgagggcaagattccacaggaattcctgcatactttcaccatgtgtaaacacagacactacattttcagttttgttaatgaaaattcaaaggttttatttaccttctagctgttgtttttaaatatgaaagtcaaattcattttaattcacttgcatctgtctaggtaacatttttgccttttaccaatcctcaccccaaaccaaaccaatatcgacaaaaatagttcagatcattttcacaacctatagtatcttattctccacctcaaagcctgcctggttctcatttaatttatttccgtccatcccccttacataagacaaatgttcatgacccctcttctcttcagcccctcacctcggtcacttggatttcaatcatctttgagtttacatgagttaactcttacctttgaatccttatttatccatttctaaacttaaatccttgaacaaagggtaggatttacaagatgataactcttcctccctttatttcacattcatgatctcagaggcatttttcttggagagagagatgaaggcagattttcctgaattcctgttactgccctatggggtagaggtccccagatgcaagcctccctgaaatgtagagagacacacagccatggcagtggccgaggagctggcctttgatcctgctctcactctgaaattgcctgccagacactgcatccaaaacagatggaaaatgccatgtttaaggcagccttaagtgtttttattttcaagttatttttagtcagtattgtcaggctctctgtgtcacttggcatttacatctagccctaagagaaamagcgagattgttaaagagaagaatgtttcatcagttaaaatataagcatcaaagtagaagaaacaaaagagcaggtaggtaaggtcttgggaca

SEQ ID NO: 57531 - DNA, 460 bp, Homo sapiens
tgaaacaagttgcaattcatggcaggctactaattgaaaaagaaaaattaaaaaaaaaacctaactgaaaacaaaagcagaaattgagaccatattttcaccttagaaaaatctgctttgtgaaataacacagtagtatttgcaggcagacctggggttactgacaagttttgaaagtgtccataataagcatgaaaacctgaaaacccttrcagtgttgtcacatgaatcaaacaatgagattttcagtgtccctctccagcattcaggtctgcaaaaagtgacagcatgcttgagtcagatttgacagtaggtcctaagactgcctaccctaaatttattagcatgaaaaatagaaaaagtaggaaatttgagatagggagaccaaactttgctcataatatcaaaccatttagttcttacacagttgtggcccctgagaggtttaatcctggcaggt

SEQ ID NO: 57532 - DNA, 1223 bp, Homo sapiens
actaccccactttacagaaatgctaaggaatttgtcagttacaaacacaaaagattaagggacttgtctaaagtcaagaaggctggagagctggaaatcaatcctgagtccttgctctatccactaagacacataaaactttctggatgggcagcgattgcactcagggttgcaggctagcccagtggtcgtccagaccagaggagaaacactgtcttctttcatcattctgcaatgtttctggaacttcacagacagggaagctatgagaaccaatggtgctgggaatctagatgtcaggtttcctttcaaaaagctagacttgcccttgttgctcccactgctgtggcgtatgtgtgggaaaagcagtgctgctagggagggcattgttgaggaggagaagtccagcgagcaatgctctaaatcacaaaggaatgaatcagaagcaacacacagaagtaaaaacatttctctggggcaagaggaagatcccccttttctgaacatttttacagcgtttctctacttcagggtttctcctagactctgaagactaaatgtgttttatgaattataatctacaaatggaaacccactaaattccatccacttgtccatgcctcccattatttgatgacttggctgtaaaggaaagtagcctgagatttatacttttaaaaattttctttttctaattatttattaaaaaaaaaaaaaaactgaaggctacatcacccagtcttccccagtcagcttcctatccaagggctaaccaggcctgaccctgcttagcttcagagataaggcatgttcagcatagtatggctgtaggcaaattttccattaggaaatatttgttctacctattatttcatctcttcctaaataaaaacaagcttaatggctaatatgcacatttctgttaatatcctctgcctaagtggggtgggatgtttattttacaaacctgaaagggaaatacartcactcaggtcttgcccagtgttttgtcaaaagaatagattcttcgagggatttgaaaagggaatcaaatacaacccactgaaactggaatgacctcaacttcctcactgctcattaagaagctaagacgacagaaagcaggaaggtcaggaggagccacgatggcattttggcataattttcaactgtcttaaaaaagtatgatgaaattaaagtactgcaagaaataactgatatgc

SEQ ID NO: 57533 - DNA, 811 bp, Homo sapiens
actgtacatatgtattcatatcctgttgrttctgcttctctggagaaccctgactaatacagatgatgactatgagatctggaagtaacatgacatggaaaagacctggcaagagctgcatcatagtgactgatgggctgtaagaactcagccagagggagtaggcggcagcactttccgcctctggtgctgggccaactgagagaagagccatattgtcaacagaaacaaaggatgtcaggaagaaggggtagttctgaggttcagtggacagctggagaaacagcaaagagattgactgatatggatacttttaatctaatagctcaagcacttgagtagtgatagttctttgctgaacctaaagctactgatttcatcatagctgctatttctgacaataactatttcatgggacgccgatgagagtcacactccctctgcctcgccaagcccagtcatttctttcaggtcttcctgcagttgaggtcatagcctgacattaacaaggagaaagggtgctagtgcttaaagcacctttgattttctcctcttgtccctttttctttcaattaaaagaacaaaggactgaggaagtttcaaagacccagtgtatgtggcagtgggcaggaggaggtcactgttgtatagtccatctgccatccctgctcagtgctggtactgagctgatatttttctcaggatttacgagttttgaaagatatgttttacctcctaggaaagtatttcattggtaatgcaggtaactggataccagaaccaaaatgaaaatggagcaaagtaaaaagca

SEQ ID NO: 57534 - DNA, 851 bp, Homo sapiens
tatagagctttattctacatctaaaccttgctgctcaaggttattatcaatggtaatacctggaaggcaattgactaaatgtataaatggaataaatctggaagatagtgcctaaaatttttttttttttttgagacaagagtctcgctctgtcgcccagactggagtgcagtggcatgatctcagctcactgcaagcttcgcctcctgggttcacgccattcacctgcctcagcctcctgagtagctgggactacaggcgcccgccaccacacctaagttttttttttttttctgtatttttagtagagatggggtttcaccatgttggccaggatgtccttgatctcctgacctcatgacccacctgcctcagcctcccaaagtgctgggattacaggcgtgagccaccgcaaccggcctaagactttgtattttagaaagaagacttaaagagatttcatgagttaaacagacctatgattgcaaaaakaaactgaatggaagtgtgaaaataaatgaagaccacttacgggagaataagtaaaggcaattgtgttagttaatttgtgcgttgctttaaaggacccaagactgggtaatttataaagaaaagaggtttaattggctcacattttggcaggctgtataggaagcgtggtgctggcatctgcttctggtgaggttctcagggagcttacaatccaggcagaaggtgaaggggaagcaggcacatcagtggcaagagagggagcaaggtggaggaagtgctgcactcttttaaacaatcagatctcgcatgaactgaaaactcagtcttcaccgaggggatagtgctaagccgctcatgag

SEQ ID NO: 57535 - DNA, 851 bp, Homo sapiens
tatagagctttattctacatctaaaccttgctgctcaaggttattatcaatggtaatacctggaaggcaattgactaaatgtataaatggaataaatctggaagatagtgcctaaaatttttttttttttttgagacaagagtctcgctctgtcgcccagactggagtgcagtggcatgatctcagctcactgcaagcttcgcctcctgggttcacgccattcacctgcctcagcctcctgagtagctgggactacaggcgcccgccaccacacctaagttttttttttttttctgtatttttagtagagatggggtttcaccatgttggccaggatgtccttgatctcctgacctcatgacccacctgcctcagcctcccaaagtgctgggattacaggcgtgagccaccgcaaccggcctaagactttgtattttagaaagaagacttaaagagatttcatgagttaaacagacctatgattgcaaaaagaaactgaatggaagtgtgaaaataaatgaagaccacttaygggagaataagtaaaggcaattgtgttagttaatttgtgcgttgctttaaaggacccaagactgggtaatttataaagaaaagaggtttaattggctcacattttggcaggctgtataggaagcgtggtgctggcatctgcttctggtgaggttctcagggagcttacaatccaggcagaaggtgaaggggaagcaggcacatcagtggcaagagagggagcaaggtggaggaagtgctgcactcttttaaacaatcagatctcgcatgaactgaaaactcagtcttcaccgaggggatagtgctaagccgctcatgag

SEQ ID NO: 57536 - DNA, 524 bp, Homo sapiens
tgttacctcagttataccctgcttagaagccttcatgtttctgctagtgtcaattcctctttctagaatattctagaatattctttatcccatttctcacttactgaaatccttwgtgttggtcgaagcctaactcaaatgtcacttcttctggaagggcttctttcaacagatattaatggagggccgtcttcatgccaagtagtattctaagggctggggacatgcagtgaacaaggctcacatagaatttacatgctaagagttggagatagccattgttcaataaccaaaaaaagtagatatataacatgtcaggtgttataagtacaattaggtaaaataaaggagagtcatgggctaaaaagtggtgggggaagaccagagagaagaatataattattctcccttttgtacttctatagcatataactacataccttttcatacatgaggaaatgacataaatgtcttgtgttgtaagctacatgtagataggaagttatgtagctttgcattcacca

SEQ ID NO: 57537 - DNA, 524 bp, Homo sapiens
tgttacctcagttataccctgcttagaagccttcatgtttctgctagtgtcaattcctctttctagaatattctagaatattctttatcccatttctcacttactgaaatccttagtrttggtcgaagcctaactcaaatgtcacttcttctggaagggcttctttcaacagatattaatggagggccgtcttcatgccaagtagtattctaagggctggggacatgcagtgaacaaggctcacatagaatttacatgctaagagttggagatagccattgttcaataaccaaaaaaagtagatatataacatgtcaggtgttataagtacaattaggtaaaataaaggagagtcatgggctaaaaagtggtgggggaagaccagagagaagaatataattattctcccttttgtacttctatagcatataactacataccttttcatacatgaggaaatgacataaatgtcttgtgttgtaagctacatgtagataggaagttatgtagctttgcattcacca

SEQ ID NO: 57538 - DNA, 838 bp, Homo sapiens
tttctggggaagatattttcatcaggaaactacatttggcctaaaatgctgaaccttacatagggttgagggtaagtattagcagctctgcccacagagctgcattacaatttgcagagtttctgagaggaggctgggatctgagtgccagggtagtgataagcccttcgtcttgaggacacagcatcccccagggcttgggagcatcaagataggtctgtgtaattcctcacagtgacacaactcaaacctcaaagctactggtttcctatagcctggttggggaaccaaggtttagctatcagcatccattaaacagaaaaaaactccagaaagccttcttatgctaaacaggaggaaacccaggcccaatgaggttaaacagcatggcctggccacagctcaagcagtgaaacagacaagacctctgcaccattggttcattgttggacacacggacaccccccttttcaggggtaacatggagctgtatagtttcacttcaagctatgtgtgagtagcctctattattggtatgtggttgagaaattgtttttcagtgaggaaaggattaagtccattttgggacatcctatgatagaatatatatagccagtaaaaataacatctttagaaaatatttcaaggcatgtgacaatattcatgatcgaatgttaaatggaagtagcaggaggccaaattatatatkcacaaggaaccctgatattgtggctatataccacatttcctccattgtaacagcattgatatcaagaggcatcactggcttaataatagttcagaaaaaaggaaaacattaaatctactataagaagga

SEQ ID NO: 57539 - DNA, 1040 bp, Homo sapiens
gtttaaactgtgttcaaatgacgcaaacactgaattgtaaccaatccagctgtttctgtacctcacttccgatctctgtatatcacatccctttttctgtctgtaaatttgttctgaccacaagggcttccctggagtctccctcaatctgctgtgattctgggggctgcccgattcatgaatcattcattgctcaattaaactcctttaaatttaattcaactgaagtttttcttttaactagacccaacagaaataagttcaaaatcaagtcctttgctttttaaaatacatttagttgttcaactctttgaactacaattttctcatcataacatgtacaaagtaatgcctgatttgcagtgtaagtattcaaactatactatatatggttgctgtccataaatgaagatttactgtattgaattcatggaataattccatagttttgtatgtcttatatcctccagtgttttgtgatcacttgttactttgttattcaaataaaatgactcaagtttccattccatgtaactactgtaggcccagaaccgtatcaagtatttctgatgattccctagtggtaagggcttccgtttcctttgctgctaactgtatccattttcttgaatgctagtgatacaggagctaaagagaaattatttaggcagttagtgagggtaagaaagtcctcagcaaggtttcccttttaataaaaagcagcccccaaattatttcttttctaacaaaaagaagcctgaaaaaatcaagctgcaggcatagataagcaaactaaaagcttgcaaaggtaaatgtcggcagctgtgcacrtagaaaaggctacctgggggccaggcatgttcaacatggcggctccatcttcccttttctttgtcaaccatgggcaccgtaaggaacagaaaatatggtgtcagccaggtagggaatccatctgcataataaaagattagggtgggatggccaacttcttcatgctggcctgtcgtactggtccgaccaatctctcaggccctatgtaa

SEQ ID NO: 57540 - DNA, 840 bp, Homo sapiens
ttacaatttctagtactgtttattcctttgtataaataggaatttcaatatgcctaagggacttttatcattctgcctaaaggacttttaaaaaatattttttattgttctagtctgctgattagatgtttattgcctttaggcagggagataaaaaaatactacaatattttagttaatgactgtgtcaatcaaaaagaagcaagacaatctaccatttaattgcacrgttgattttttaaatgaaatagaaaacatccacatatacagtacaaaatgtatcataaaactctcacatatgactaggtaaattccttcctcttttctctgtattaaattgtcttatttcaccctcatttggggggagtttttttgcttggtacagaattgtaggtctttcattaatctaaaaaattttgctccactgtctttttgcttatattgtgtctatgagaaatatgtgatctatacacttgttcttctgtacataatgtgccttttgttcttggctgctttgaaatttttcattttcctcttgcttgctttgggtttgatttgttcttatttttctagtttcttttttttttttaattttgagacggagtctcgctctgtctcccaggctggaatgcagtggcgcgatctcagctcactgcaatctctgcctcctgggttcaagtgattctcctgcctcagtgtcccgagtagctgggactacaggcagatgccaccaggcctggctaatttttgtattttgttagtagagacagggtttcaccatgttggtcaggctggtctcaaactcctgacctcgtgatctgtccgccttggcctcccaaa

SEQ ID NO: 57541 - DNA, 1165 bp, Homo sapiens
tgcacgcgccgctacgccctgctaatttttgtatttttagtggagacagggtttcaccatgttggccaggctggtctcaaactcctgacctcaagtgatctgcccgcctcagcctgccaaagtgctgggattacaggcktgagccaccaggcccggccatgttctccttttcctgagagaccatttcaaattcatatagaagtctgaaaagactcgttagccacagtcccaaacacaaatcttgtcagttctgatcagtatttcattccacagccaatcccagtctgactaatcacagcatcacagttaatactcacagcgtccttggagaaatgaccattgtccacagtgtccattggtaccagtggcttctcaagccttgccctagggtcttcattgaatcagttatctttttcagagagtctcttcattttggaattaggcaatattaccagatggagatccttatgttgctgttaatgtcttttctctgacttctcctaaaactgttccctccccttaatggacctttggtaagttagtaataatccttctacccaaaaagaagaaaagcacttaccttcaccattaaaccagtattttaagccctagactataaggctaacttggaaaaggagggagttttctgtcccttcttccctttcaaatacttttgcagatttttacagggataaatagtgagccacgtggcagtcagacggcaacaggtttggccccactttctcagaaagcctcggcttggttttgccgcttaatttttaacttcattttcaagttctcactgttagagtatctcaaaagatgtcatcgtgtgtttctgctttgaactgtgcatacaaccattcagtcaacaagcctttttttctgaaagcaagggggcatggtgtggaggaaagggcagggctcctgaaatcagtgatggagtcagacccatattcacttcctagtgttttccctgagcttggacaagtcactgaacctctttgaattggcttccgctttagtaaagcaaggattgtgttactgtactcatggggttattgaacaaatgaaatacatattctaattggtagtagctcctcaataaatgaggtgttcattcctcttcaggagttcagttaagtcagctagattttccatatgc

SEQ ID NO: 57542 - DNA, 654 bp, Homo sapiens
ctcactgtccccatggggaagggggaaaggtgtggggacagtgggggctttggcccgaagagaatgggggagaagatgggcagggccccgctctgggcatctcacagtgagactagggaggcagcagggcttgtgactaaagaccctgggtctggtgctgggaagggatctggggccaggtaagaggagcccagcctggagcccaaccctcagggatcataggatggagagacagcggatgccgggcaagataaggtgggagggagcttatgaggcgtgccacttctgaaacacagggtgtgtggctcgggtatagggagaggcaggtggatgcttggccagcctcagggctgttgtccagcaggtctctgagggcccacctrcccctgttctcccccatgtccttatatctacagccctcagtgtccccatggggaagggggaaaggcatggggacagtgggagttgtggccctaggggaatgggggagaagatgggcagggccccattctgggcctctcacggtgaggccagggaggcagcagggcttgtgactaaagaccctgggtctggtgctgggaagggatctggggccaggtaagaggagcccagccaggagcccatccctcagggatcataggatggagagacaga

SEQ ID NO: 57543 - DNA, 1461 bp, Homo sapiens
caaagacagaaaatggctatttcacaaatgacactagcaagactggcagtgagttgcctaacatttaactaaccatttttcggtggactgcaatgatgtaacctgtaaaggggctgtcaggaagagatggcatgtgaccattaaccattccatttgtgaagttcttctcagttccacatggcacaacagtgtttggcattccattggggatgaatattggtttgggtaggtccccattggtagttagggtgaacattccatttgtagatggtgaagaggagaaatctacaaattcaaagataagtacagcatcataagcttgtggtattttcatctttgctcttttctcaagtatcctgaggacgagagacagtgtagtctcttaacacagggcagggagaaatcatagtataaataattctagatttattggaagattttaatttccagttttacttccctaactcacacttttgaccaaatgaaaaggaaagagtaactgctggaaactattaagcagaatttttgcagaaacctgtatcagcaccatgttgtagcacacaaacagttctaccacttgttttcttttccttctgttcgcctttgaagacaccgtccaakacagtaacctctacccagatgttgcatttaaaatttaaattaggctggatgaggcagctcacatttgtaatcctagcactttagggggctgaagtagcagaacccttgagcccaggagctagtgaccagcctaggcaacatggtgaaaacccatctctacaaaagatacaccatagctgggcatggtggtacacatttgtagtcccagcttcttgggaggctgaggtgggaggattgcttcagcccataaggcagaggctgcagtgagccaagatgatgccactgcactccaggctgggtgacagagtgagaccctttctccaaataaataaataaaataaaataaaaattaaaaatgcattattctcagtcacactagccacatctcgagctcttaacagtccacgtgattggtggatactgtattggatggcaaagatcacagaagtttccaccactgcagaattctattagacagtgatactctaaattaaaactaaaattagatcatccaccaactcaccgtcaggactatctacctactacacgtcaatgaagggagcctcataaagccctttatagttggggaattagcctaattaacctaattgtaagtaatataaagaatagacaaagcatactagtggctaaaagactcagtgagtgatcacattaaattacatataatattggatttctttctagctatatctattgtttatattttctggtagtatgttcctctcatactagctgttgccatgttagtattagataaatgttcaaagagatctgaattccaagggtatattagctaacaactacctatctaactgaagt

SEQ ID NO: 57544 - DNA, 1461 bp, Homo sapiens
caaagacagaaaatggctatttcacaaatgacactagcaagactggcagtgagttgcctaacatttaactaaccatttttcggtggactgcaatgatgtaacctgtaaaggggctgtcaggaagagatggcatgtgaccattaaccattccatttgtgaagttcttctcagttccacatggcacaacagtgtttggcattccattggggatgaatattggtttgggtaggtccccattggtagttagggtgaacattccatttgtagatggtgaagaggagaaatctacaaattcaaagataagtacagcatcataagcttgtggtattttcatctttgctcttttctcaagtatcctgaggacgagagacagtgtagtctcttaacacagggcagggagaaatcatagtataaataattctagatttattggaagattttaatttccagttttacttccctaactcacacttttgaccaaatgaaaaggaaagagtaactgctggaaactattaagcagaatttttgcagaaacctgtatcagcaccatgttgtagcacacaaacagttctaccacttgttttcttttccttctgttcgcctttgaagacaccgtccaatacastaacctctacccagatgttgcatttaaaatttaaattaggctggatgaggcagctcacatttgtaatcctagcactttagggggctgaagtagcagaacccttgagcccaggagctagtgaccagcctaggcaacatggtgaaaacccatctctacaaaagatacaccatagctgggcatggtggtacacatttgtagtcccagcttcttgggaggctgaggtgggaggattgcttcagcccataaggcagaggctgcagtgagccaagatgatgccactgcactccaggctgggtgacagagtgagaccctttctccaaataaataaataaaataaaataaaaattaaaaatgcattattctcagtcacactagccacatctcgagctcttaacagtccacgtgattggtggatactgtattggatggcaaagatcacagaagtttccaccactgcagaattctattagacagtgatactctaaattaaaactaaaattagatcatccaccaactcaccgtcaggactatctacctactacacgtcaatgaagggagcctcataaagccctttatagttggggaattagcctaattaacctaattgtaagtaatataaagaatagacaaagcatactagtggctaaaagactcagtgagtgatcacattaaattacatataatattggatttctttctagctatatctattgtttatattttctggtagtatgttcctctcatactagctgttgccatgttagtattagataaatgttcaaagagatctgaattccaagggtatattagctaacaactacctatctaactgaagt

SEQ ID NO: 57545 - DNA, 1461 bp, Homo sapiens
caaagacagaaaatggctatttcacaaatgacactagcaagactggcagtgagttgcctaacatttaactaaccatttttcggtggactgcaatgatgtaacctgtaaaggggctgtcaggaagagatggcatgtgaccattaaccattccatttgtgaagttcttctcagttccacatggcacaacagtgtttggcattccattggggatgaatattggtttgggtaggtccccattggtagttagggtgaacattccatttgtagatggtgaagaggagaaatctacaaattcaaagataagtacagcatcataagcttgtggtattttcatctttgctcttttctcaagtatcctgaggacgagagacagtgtagtctcttaacacagggcagggagaaatcatagtataaataattctagatttattggaagattttaatttccagttttacttccctaactcacacttttgaccaaatgaaaaggaaagagtaactgctggaaactattaagcagaatttttgcagaaacctgtatcagcaccatgttgtagcacacaaacagttctaccacttgttttcttttccttctgttcgcctttgaagacaccgtccaatacagyaacctctacccagatgttgcatttaaaatttaaattaggctggatgaggcagctcacatttgtaatcctagcactttagggggctgaagtagcagaacccttgagcccaggagctagtgaccagcctaggcaacatggtgaaaacccatctctacaaaagatacaccatagctgggcatggtggtacacatttgtagtcccagcttcttgggaggctgaggtgggaggattgcttcagcccataaggcagaggctgcagtgagccaagatgatgccactgcactccaggctgggtgacagagtgagaccctttctccaaataaataaataaaataaaataaaaattaaaaatgcattattctcagtcacactagccacatctcgagctcttaacagtccacgtgattggtggatactgtattggatggcaaagatcacagaagtttccaccactgcagaattctattagacagtgatactctaaattaaaactaaaattagatcatccaccaactcaccgtcaggactatctacctactacacgtcaatgaagggagcctcataaagccctttatagttggggaattagcctaattaacctaattgtaagtaatataaagaatagacaaagcatactagtggctaaaagactcagtgagtgatcacattaaattacatataatattggatttctttctagctatatctattgtttatattttctggtagtatgttcctctcatactagctgttgccatgttagtattagataaatgttcaaagagatctgaattccaagggtatattagctaacaactacctatctaactgaagt

SEQ ID NO: 57546 - DNA, 1461 bp, Homo sapiens
caaagacagaaaatggctatttcacaaatgacactagcaagactggcagtgagttgcctaacatttaactaaccatttttcggtggactgcaatgatgtaacctgtaaaggggctgtcaggaagagatggcatgtgaccattaaccattccatttgtgaagttcttctcagttccacatggcacaacagtgtttggcattccattggggatgaatattggtttgggtaggtccccattggtagttagggtgaacattccatttgtagatggtgaagaggagaaatctacaaattcaaagataagtacagcatcataagcttgtggtattttcatctttgctcttttctcaagtatcctgaggacgagagacagtgtagtctcttaacacagggcagggagaaatcatagtataaataattctagatttattggaagattttaatttccagttttacttccctaactcacacttttgaccaaatgaaaaggaaagagtaactgctggaaactattaagcagaatttttgcagaaacctgtatcagcaccatgttgtagcacacaaacagttctaccacttgttttcttttccttctgttcgcctttgaagacaccgtccaatacagtracctctacccagatgttgcatttaaaatttaaattaggctggatgaggcagctcacatttgtaatcctagcactttagggggctgaagtagcagaacccttgagcccaggagctagtgaccagcctaggcaacatggtgaaaacccatctctacaaaagatacaccatagctgggcatggtggtacacatttgtagtcccagcttcttgggaggctgaggtgggaggattgcttcagcccataaggcagaggctgcagtgagccaagatgatgccactgcactccaggctgggtgacagagtgagaccctttctccaaataaataaataaaataaaataaaaattaaaaatgcattattctcagtcacactagccacatctcgagctcttaacagtccacgtgattggtggatactgtattggatggcaaagatcacagaagtttccaccactgcagaattctattagacagtgatactctaaattaaaactaaaattagatcatccaccaactcaccgtcaggactatctacctactacacgtcaatgaagggagcctcataaagccctttatagttggggaattagcctaattaacctaattgtaagtaatataaagaatagacaaagcatactagtggctaaaagactcagtgagtgatcacattaaattacatataatattggatttctttctagctatatctattgtttatattttctggtagtatgttcctctcatactagctgttgccatgttagtattagataaatgttcaaagagatctgaattccaagggtatattagctaacaactacctatctaactgaagt

SEQ ID NO: 57547 - DNA, 1461 bp, Homo sapiens
caaagacagaaaatggctatttcacaaatgacactagcaagactggcagtgagttgcctaacatttaactaaccatttttcggtggactgcaatgatgtaacctgtaaaggggctgtcaggaagagatggcatgtgaccattaaccattccatttgtgaagttcttctcagttccacatggcacaacagtgtttggcattccattggggatgaatattggtttgggtaggtccccattggtagttagggtgaacattccatttgtagatggtgaagaggagaaatctacaaattcaaagataagtacagcatcataagcttgtggtattttcatctttgctcttttctcaagtatcctgaggacgagagacagtgtagtctcttaacacagggcagggagaaatcatagtataaataattctagatttattggaagattttaatttccagttttacttccctaactcacacttttgaccaaatgaaaaggaaagagtaactgctggaaactattaagcagaatttttgcagaaacctgtatcagcaccatgttgtagcacacaaacagttctaccacttgttttcttttccttctgttcgcctttgaagacaccgtccaatacagtawcctctacccagatgttgcatttaaaatttaaattaggctggatgaggcagctcacatttgtaatcctagcactttagggggctgaagtagcagaacccttgagcccaggagctagtgaccagcctaggcaacatggtgaaaacccatctctacaaaagatacaccatagctgggcatggtggtacacatttgtagtcccagcttcttgggaggctgaggtgggaggattgcttcagcccataaggcagaggctgcagtgagccaagatgatgccactgcactccaggctgggtgacagagtgagaccctttctccaaataaataaataaaataaaataaaaattaaaaatgcattattctcagtcacactagccacatctcgagctcttaacagtccacgtgattggtggatactgtattggatggcaaagatcacagaagtttccaccactgcagaattctattagacagtgatactctaaattaaaactaaaattagatcatccaccaactcaccgtcaggactatctacctactacacgtcaatgaagggagcctcataaagccctttatagttggggaattagcctaattaacctaattgtaagtaatataaagaatagacaaagcatactagtggctaaaagactcagtgagtgatcacattaaattacatataatattggatttctttctagctatatctattgtttatattttctggtagtatgttcctctcatactagctgttgccatgttagtattagataaatgttcaaagagatctgaattccaagggtatattagctaacaactacctatctaactgaagt

SEQ ID NO: 57548 - DNA, 599 bp, Homo sapiens
tgaatgagatgcatgaccaggacaagaaattggtggagaagagctacaaggatgccaagggctgtttcttcagcatggtgggtggccatatgtaagcaggtgtgcacacatgtgggcacatgtgctgcatgctggtgcagctggaacgctggcagatccacaggctgtcccagttggaaggactttggaaaccagttggaccagcccctcatgatttcgatgtaaaatgtgaggctcagagaggactcaagctcacacagcccttcactgtggcctgcaaaatagatccaggtctctacaagtctggtcttgggtttccaccacagctgtttacaggatgtgtgtatttgagtacatacgcatacccttggcaagcacaggctgagtgtctccagtgtcctagggacagcaayaggtgcaaaagaataacacccagtgcctgtctttgaggtgccgcagttcggtaggggtaagaaatgcaaacaaccgcagagcaggctgaattcctccaaggtccaacgtgggtgcagagggtctttgtgtgcaggtgcctttggggccccatagaggccagggaggggctaggatatggttctcag

SEQ ID NO: 57549 - DNA, 636 bp, Homo sapiens
cacacacacacacacacacacacacacacacactgtgtttcatgccctcactagggtggcctgggagggaatgcgtgggttttttttgttttttgtttttttgagatggaatttcactcttgttgcctaggctggagtgcaatggcgcaatctcggctctctgcaacttccgcctcctgggttcaagcaattctcctgcctcagcctcccgagtagctgggactacaggcatgtgccaccatgcctgggtaattctgtatttttagtagggatggggtttctccatgttggtcaggctggtctcgaactcccgatctcaggtgatccgcccgcctcagccttctaaagtgctgggattacaggcgtgagtcaccgcgyccagccgggaatgcatgcttttaggagaaacgaagacaactcaggaccctcattctcctggtgtttgcgcaagtgccttctccgtagaccatgcttcagtctctttcttagttctccttcttactgaaagagagaagcagagccccagcatgtacccagctgcttagggcccaagccaagtgcgcaagtttcctggggagcctagtgagtggaaggcactgcagatcctccccaaaagaggcgtcggttttttatgga

SEQ ID NO: 57550 - DNA, 636 bp, Homo sapiens
cacacacacacacacacacacacacacacacactgtgtttcatgccctcactagggtggcctgggagggaatgcgtgggttttttttgttttttgtttttttgagatggaatttcactcttgttgcctaggctggagtgcaatggcgcaatctcggctctctgcaacttccgcctcctgggttcaagcaattctcctgcctcagcctcccgagtagctgggactacaggcatgtgccaccatgcctgggtaattctgtatttttagtagggatggggtttctccatgttggtcaggctggtctcgaactcccgatctcaggtgatccgcccgcctcagccttctaaagtgctgggattacaggcgtgagtcaccgcgcccagccgggaatgcatgcttttaggagaaacgaagacaactcaggaccctcattctcctggtgtttgcgcaagtgccttctccgtagaccatgcttcagtctctttcttagttctccttcttactgaaagagagaagcagagccccagcatgtacccagctgcttagggcccaagccaagtgcgcaagtttcctggggagcctagtgagtggaaggcactgcagatcctycccaaaagaggcgtcggttttttatgga

SEQ ID NO: 57551 - DNA, 1043 bp, Homo sapiens
tctttttttgaaattgatgtgtgctatgttttgtgcacagcacactctatttttaaggataggtttgttaatacctatcagaactcttactgacaaagtaccatcaaagatgctgctgtctcatgttcttagaaggctggcaaagaggtgaaagtgaatagaaattgctstcttgtggccagcatgtattaggcttatgtatattaataagaagttaattagaatggaaggaatgggcaaggagggcactctgctattatcgttgcagacagacctttggtaacagtttctcattatgtggaatggcagaactggggattagagaaattgtttgtaaatgtggatcccaaagccttctcacaaaagcaagtcagcctcgtttgtgagtttccaggacccttctttggaattttcatcctttccatcacgctgttactgagctcaccttgaagcaacaggagttgctgagatccgtctctgcctaatccagtaattgggactctggccacagccagctttccctgcactgccgctgcccagataattgctgtgacatttcatttctctcttctctgaaagaaacactcaggcagaaaactcattcttctagaaagtgcctcaggccctctgttacaggatgagctcggatcacagttcagtggctggctctttccctacgtggtcaaagctgctttccacagtttgattactcagaggaaaaataaacctgaacagacacatagagttgtttctctcttctttcccacttgttaggaggtggttaaaagcagataaaacttctccttaaagacctttactttgagtgctgcaagacattccatttatcctgccagccaaatggagaaaattcccaaacgggctgtcattaaatcaatcagtgtgtatcatgaacgaactttattaaaaagagggcctggccttttgcctagcacacagttggtgcttagtaaacatttgttaaatgaatacaggcgtcagagaactggaaccttgttctcacattaaacaatgttgttccaaga

SEQ ID NO: 57552 - DNA, 841 bp, Homo sapiens
cacctgcctcggtctcctaaagtgctggaattacaggcgtgagccacagcacccrgccaagttttaagatttatcatacagcagagtctctatagtcaataataatgtatacttcaaagtgactgagtaaatttcaaatatctcacagtagaaatcataggtaaatgaagtggtggatatgttaattggcttgatttaatcactctacattgtatacatatgtcaaaatatcacagcgtacccccaaaatatgcacaaatattatttgtcaactaaaataaaattaactttttttagattttaagaaaataaactgaaatattagaccttgttttgtgtacagatggaccataatgagtgagttcacacagagcagatgtgggtgagctgacagattctgcattatcaggtcatacaaagttttgaccttctatataatgtaaacaaatattcaacctttgtcccactttagacattggtttattgaaaacagagactgaggagaaaagccttggggcctagtcctgtcttctaattctttcccctggaagacttcacataggacacttaatgttttaaacagttttttttggcaactgcataatgatgataaaattaaccacaagggtagctatgagatttaaatcaagcatgcagaggtggtttcaacattttaagcgccaaacgatttaggttattaatcatgcatatttaatatgcatttatattttacgtagacacattccaaatgagggttaatcagataacttgtttctatttttttcatgttgagatgtcacattgaagtagtcgtgtacagcagagcatgcttgctcctgca

SEQ ID NO: 57553 - DNA, 841 bp, Homo sapiens
cacctgcctcggtctcctaaagtgctggaattacaggcgtgagccacagcacccagccaagttttaagatttatcatacagcagagtctctatagtcaataataatgtatacttcaaagtgactgagtaaatttcaaatatctcacagtagaaatcataggtaaatgaagtggtggatatgttaattggcttgatttaatcactctacattgtatacatatgtcaaaatatcacagcgtacccccaaaatatgcacaaatattatttgtcaactaaaataaaattaactttttttagattttaagaaaataaactgaaatattagaccttgttttgtgtacagatggaccatartgagtgagttcacacagagcagatgtgggtgagctgacagattctgcattatcaggtcatacaaagttttgaccttctatataatgtaaacaaatattcaacctttgtcccactttagacattggtttattgaaaacagagactgaggagaaaagccttggggcctagtcctgtcttctaattctttcccctggaagacttcacataggacacttaatgttttaaacagttttttttggcaactgcataatgatgataaaattaaccacaagggtagctatgagatttaaatcaagcatgcagaggtggtttcaacattttaagcgccaaacgatttaggttattaatcatgcatatttaatatgcatttatattttacgtagacacattccaaatgagggttaatcagataacttgtttctatttttttcatgttgagatgtcacattgaagtagtcgtgtacagcagagcatgcttgctcctgca

SEQ ID NO: 57554 - DNA, 1393 bp, Homo sapiens
gaaatcagaacttcaaccctaatcaaaattgattggatgaattattgagtgttacaaaagtgatgcaatgaagggccctcatatttttgacattcatttttattagatccttcttatctggagattaggtatgtgagaagctcggagaaataatcttagaagagccaagcagaatttttatatctaaatccatgttacttacatagaatatattgttctttaaatataaaaatctataaatctgtacaagaccaatcgatacaagtaaaaaaaaatgtctgatcctgcttgaagtaaattatcaaagccatctacgttgagagatgaaatgtattacgtctctcctgctaacttgaggagtaaaggaatttaytaaaaagttactaggatgtttttattccttttctttttttttcttgcagtgaagcctgtagatccttaagattctttaccagttgtgtggtcttaatttcacaaattgaggaatctgatccatagatggttccacttgaacgtggtgggagggtaacattctccttccatgaaatgtaaagactgcattgtgggacatggaggggctccatgagatccatttagttgcattcatcctcctgtccccaaagtatatcagtaaatgtactgtttcttgacagtttggctgtgttatcccagaggactggatgtgggaatctccaaatggccagataatactctcagcttccaattcagtgaaactattcttaagcatgttaatgaaaatatacttctttcctggatcctaaaaggtctaaatgaaaacaactcctattcctgaggatggaaaacaagtattctgcaaaagccactaccaatccgtaccttggttcccagacatatctctagaagagacagaaacaagccctttaatataatttcattcctcaacttccttggaattagtcccttaatgtgtcttgttctaaatccctgatcatcttgccacacatttgttaaggcttataaaagagtgtacatctttacctcaggccatttgtagacttgtcatatactttggtaatttcccaacatatgcgtttcacttccagtaaagaagttagaagactccattcccagattaccttgaatccagggggcaggtaaatgacaggctcgaccaatgagatgctctgttctgagactgggaatcagaagggagtgaaatggggaggccatggaagagtttattttcagggaactgtgagtataatggcaacttctagttcatttaggataagataggcagaaccttttcacatccactccaatgtgtttattccacacacgaggagccacagtgggaattctgatcattgctagacttgtcaattatacctacacatttggaaaatgaata

SEQ ID NO: 57555 - DNA, 1552 bp, Homo sapiens
tgcaataacagatagtgaagtctcatagataaaagctgtctttgcagatagaaagactttgtgcttaagagttcactctctcgaggtcttgttgtaaatccctgctactttccttggtcagagcattgaatccacctcttagttctttgagattcacctctagtattttggtctgctatcaagtatgccattaacctacatgggatatgtcatataaaagaaaaactgctatacttgtttttattcatatgaattttgatttaaaaaagaaactttatctcactattagtatcacttgccataagtagaaacaaaggccagattaaaaaatgaaataaaatgtaaaatatatgttaatatataagtatcattaacttttttatagacaatgttgcctgcttaagtcgtatccccaagcctgcttgttgtttgctatataaaggggtattagcatgtatcagaaaggtgttaaacacatacagtactataataaaattgatatattatcttcagtctaatcagaaaagttaaaaggggagtgaaatggataaaaatctcactacaaatttaaagctgattaatattgattgcttgcatacctagagtgccctgctggtatgtttctcttgttttggtgggcaacatgctatacaaaatgcatgtttacgttttggtatataccagtcaaggatacatactctaaatattctttcttaaccatacctgcctccaaggagcacaaagcctggcagggaggataacttgcaaccttgaggcttacccagaatgtgaaggaccatcataacagaaatgatgatgatctgaattccccagggatgtctggaggtatcacctaggacagtgcttgcttaagatttacatggcagaatatcaattaaagtttcttgttttcttatgactcagagcacctgcaactacttcttttttycagcttattttattttaagttcaggggtacatgtgcaagatgtgcaggtttgttacataggtaaatgtgtggcatgggggttggttgtacagattatttcatcacccaggtattaagcctagtatccatgacttcttattcccaagcctctccttcttcccacccttcaccctccaataggccccagtgtgtgttggtcccatctatgtgttcatgtgctctcattatctagctcccacttataagtgagaatatgcggtatttggtttactgttcttacatttgtttgccaaggataatggcctccagttccatccatgtttctacaaaggacaagatctcattcttttttgtggcacctgcagacatttctcaaaatttttggaactgttgagaagtaggcacaaagtgtctcctgctcgaaagtcaagccatgtgagtagaacagagatgtgtcaacacaactgcgggggctcttcttcatagctaaaagagggatatctgcaaaatggaaaacatttcaacatcatctctttattcctagatctaagcaattcagtactcataaacaattggcaagatattcaaacgagcaagcaggca

SEQ ID NO: 57556 - DNA, 1340 bp, Homo sapiens
aatgatacttcattagatcatcaccatccttagcattgttaccaatcattgagcagttgctgagccaggctgtgtgttaggaggtttctgtatctgactcaatggtgcctccaggcattgtgtaccgtcatcagttttgcatatgaggcaatggactgacagggtgaagaccattaccccggcaggaaagcctgagtttcattgcacatcatgccttgcaagggcttgtatatcatggggttctcgcactccccatatgaggggataccattgtgtcctatttcctgctcttgggtcgtggagaggtctataaggaacagagagctctgcctttctttactcagtcaataagttttttgagcaccagccatgtgccagatactgtgctaggctcaccttctgaaatccgtctcggaagacacaaggaacctctgaattggagatggtctaagtccattaataagcattttttgaacaatatttactttgttagttttgacgagaaattagaagaattagataggacccttgttttcaaaaagttgtcagcatgggaggaagaaaacagagagtcttgaccgtagaggggacaacaaagaatgagcttcaaggtatgattaggagtgttgctggttactgctgcctgcagctaatgtctcccctgagcattggatccctgtgtccattatgttctatgcatacctcatgctcaaaggggctacagtgggagagaggactccttttatgtcccatagtctgtgtaaatggttcctccacccaccaaatacatcaccttygactcatctctttcccttgttccatccttacaatggatgggtcttaattacctcttggatctgtccccatctccatctgtccttctcctcctctgctccatttccccctccttgtctctgctttctctccatccacaggtctgttctcctgccctggtatcatattctgtttgagccactataacaaaacaccacagactgggtggcttatacacaacagaaatgtataggtcacggttctggaggctgggaagtgcaaatcaaggtgtcagcagcttcagtgtctgctaagggcccacttcctagatggccgtcttttcaatgtgacatcctatgacaaaggatcatacgagctctctgggatctcttttataagggccctaatcccattcatgaaggcttatgcctgtgacctgaccacctcccaaggggcctcacctcttttaggggacacaattatttagaccacagcacctgggaggttagcaatatcttcctatggtgcctctctgcttccatctatgctctgcttctgctctagag

SEQ ID NO: 57557 - DNA, 1340 bp, Homo sapiens
aatgatacttcattagatcatcaccatccttagcattgttaccaatcattgagcagttgctgagccaggctgtgtgttaggaggtttctgtatctgactcaatggtgcctccaggcattgtgtaccgtcatcagttttgcatatgaggcaatggactgacagggtgaagaccattaccccggcaggaaagcctgagtttcattgcacatcatgccttgcaagggcttgtatatcatggggttctcgcactccccatatgaggggataccattgtgtcctatttcctgctcttgggtcgtggagaggtctataaggaacagagagctctgcctttctttactcagtcaataagttttttgagcaccagccatgtgccagatactgtgctaggctcaccttctgaaatccgtctcggaagacacaaggaacctctgaattggagatggtctaagtccattaataagcattttttgaacaatatttactttgttagttttgacgagaaattagaagaattagataggacccttgttttcaaaaagttgtcagcatgggaggaagaaaacagagagtcttgaccgtagaggggacaacaaagaatgagcttcaaggtatgattaggagtgttgctggttactgctgcctgcagctaatgtctcccctgagcattggatccctgtgtccattatgttctatgcatacctcatgctcaaaggggctacagtgggagagaggactccttttatgtcccatagtctgtgtaaatggttcctccacccaccaaatacatcacctttgactcatctctttcccttgttccatccttacaatggatgggtcttaattacctcttggatctgtccccatctccatctgtccttctcctcctctgctccatttccccctccttgtctctgctttctctccatccacaggtctgytctcctgccctggtatcatattctgtttgagccactataacaaaacaccacagactgggtggcttatacacaacagaaatgtataggtcacggttctggaggctgggaagtgcaaatcaaggtgtcagcagcttcagtgtctgctaagggcccacttcctagatggccgtcttttcaatgtgacatcctatgacaaaggatcatacgagctctctgggatctcttttataagggccctaatcccattcatgaaggcttatgcctgtgacctgaccacctcccaaggggcctcacctcttttaggggacacaattatttagaccacagcacctgggaggttagcaatatcttcctatggtgcctctctgcttccatctatgctctgcttctgctctagag

SEQ ID NO: 57558 - DNA, 1280 bp, Homo sapiens
gtctttatataaatcctgcaaggggggaggcaggaacagatgacattggagaagaggtggggtgaggaaggaccatcccggtgaccccggccacgtggctggaccgtgccsggattgatcagcattagcagcaccagagctgcagctgcccgcacgtttctagccacaagggaggggaacccaccccagcttcttttcatcatcagcctaactaatttcttcccccacctgcttttgtgtttttgcttggcggttgtcagagggcacctgaaaatgagcttggtgagaaggaacgttttccccatgaatcagctctgaaatcattcctctgaagtgcgtcacagcgttaccctgaattgttgggacgcgactccagcagcgtcctgagtgacaccgttcccccgtctgtctcctgtgctctcccagcctcacaggggtttaagacgatcagacagttagacaagccagtctagatccagccctctctttgacagcaatttcttagaggaaatttcatctcaatttcgggaagtcttctctcctctctgattgatggttttcccaacctcaggctccacaatgccacacgtttaaggggatccctcatcacagtgccctccctgtgagcccacctcctctgggagggcaggaaggaggtttgctggccaccagtcctcaagtgcctgattttccctcgtttccctttccttccctagacatgctgccctgaggtgctcctaccagggtctctgcagcacacccccatcaggaccaaactcattgctcaggcaggacaaaggctctctgctgcagactgctgtcattttctcctcgtctggcctgggagataacatggggggctgcctcagatgctgaagcctaagactactactaggctggccactttccatcccagttggggcggggaagtgggctgtctgtcattctctctttttttatttttttttttttttttgagacggagtcttgctgtgtcacccaggctggagtgcagtgttgcaatcatggcttacggctcactgtagcctttgactcctggacatgagcagttcttctgcctcagcctcccaagtagctgggactacaggcacctgccactaagcccagctaattttttcagtttttgtagacatgaggtcttgctatggtgttcaggcttgtgtccagctcctgggatcaagtgatcctcctgctttggcctcccaaaatgctgggattataggcatgacctaccatgtctggttctttattattattaa

SEQ ID NO: 57559 - DNA, 643 bp, Homo sapiens
ataatagtaataaataagttctggagatctactctatagcatagatcctatagctacaaatagtatattgtgcacttaaaattttccaaccacaaagaaatggtgggcaagaattgaggtgataggtacatttaaaatacacaatgctgctacaagaattacggaattatgtcttgtgtctgtggaattatgtcttcttgggtttccaacccatggcctggagagtccatcctgggctcctggagtgtgcaagttggaaggaattggagatggtttgttgtcatggttaagtgcatggactttggaacctagctgcccaggtttaagttccagctctgccatgcacatctttgggaccttgagtgtgttgcttaaaatgcatctgaaaggcatctgaggcctctgtcttgccaggctgtgggcttagatgttgctttccacatgataactgcataatttgaggctggttgcttyagaggtcttagggcaccaagctgtaggaactatgctgtgtagtagatctcaaggacttattcatcagtttaaaattagtaatgctattgggagccactgctgtaccccatttggaacttttccctcttagcgtattaaacccttctgcctacccattgccttaccctga

SEQ ID NO: 57560 - DNA, 583 bp, Homo sapiens
gtgctacacatctggattcatacttggggaggcttgggaaagcttaatggagaaagggggttttgagtatatcagtcctcctattgtcagactttgtaggtatcaacatcctgcctgttggttgaaaagagtccagattcccaggaccctcttggatctactgaatcagcatcttcaggggcagggcccaggaatctgcattcctaacaggcactcccccaacctccccacagggtttctgcaggattctgaagcaggtggctctgcctggacccttcttcttaaggttttatgaggaaaacagtctcatctgccacccccataaaatgtgtttcctgtctcatccgttttagttcttgattaaactcaatttggcatgtcgttatatctgattacttattcatcttcttctttagtctttttctgggggacaattgattacgagctcttggaggaaccatgcccacaggcctcccatccctcccagagcacagtcccaggagagagacacctgcctggccttgcyccttgcacccgccgcccatgagtcttggtgtcacagggaagttggggaagaggaaga

SEQ ID NO: 57561 - DNA, 627 bp, Homo sapiens
tagacatggcttcctccgagaagcgctccctctttcctctcacctgcccccatgaaggtggggttacaagcccctctctggactcccactcaacaggaaagctactctgcagtgcccatggctcagccccagatcctagcagcacagccagtacacagcagtggctcactgtttgctcactgaggggaccagtgaacaacaaggaatggacactcacggtgggggggctccaggatgagagcaggtgcaactccctcctctcccactccctcctctggccactccaggtgctggggagctggaagggagactgagaggggcaggagctgccactctcgccctgtgtgtggcctccccttggacaggcctactccaccctctgctcgtcagactctttctcacttctgctccagagcccccgcggctctcctcttcttcatctctrttttcctcttcaaattccagagagaggaatccaacagccgtggcctggcactggccagcccaggagatcatcatgcaatcgtcttcagccagcagcccagggcaggtccacaccccagggtgattcactcagaaatccactcattctttcatccctgtgccaggcactgtcctgggggcagg

SEQ ID NO: 57562 - DNA, 799 bp, Homo sapiens
tccgtctcaaaacaaacaaacaaaaaagcccacgtaacagttaacttgatgtctcctgcctcgccccaccccctaccttccaccctttgtctacttgatccccaggggctcttgcgaagagcaactgtggggttgtgccagagaccccagagggaaccctggttctcagtatacttttgacggatgaagagatgggcgccttgtggtcctggagtttggcaagctcctgaggagtcttaggtggccaataaaaatgcctgaagggaggcttgaatttggaactcaagctaccctaggacatcgtcaaggcaaaaatttaaaaaccaaaccaaactggggccaggcatggtggctcacacctgtaatcccagcaatttgggaggctgaggcaggcagataacttgaggtcaggaggtcaagaccagtctggccaacatggtaaacccctgtctctactaaaaatacaaaaaaaaaaaaaaaaraaagaaagaaagaaaattagccgggtgggcatggtggcgtgtgactgtagtcacagctacgcgggaggctgaggcaggataatcactcgaacctgggaggtggaggctgcagtgagccgagatcgtgccactgcaccccagcctgggcaatagagtgagactccatctcaaacaaacaaacaaaaaacaaacaaacaaacaaacaaaaaaactaaaccaaaccagaacctgacagctcacactggcttcagaaagtgagttgatcagtacatgaaactgcaaagtcgggccacgagcctttaggcacggctggatcc

SEQ ID NO: 57563 - DNA, 760 bp, Homo sapiens
atcttggctcactgcaacctctgcttcctgggttcaagtgattcttctgcttcagcctcccaagtagctgggattacaggcatgtgctaccacgcccagctaattttgtatttttagtagagacggggtttctccatgttggtcaggctggtctcgaactcccgaccttagcacttcggcctcccaaagtactgggattacaggcgtgaaccactgcgcccagccacccattgttatctgtagttgtgacatactgttatatatgtatgtgcaggactggttttggttttgtcacttagaattatactaagcttttttacttaatattttcaatgtttttaaaaatattttcatattctctggttatgaagattttttttaatgcatgcatttcaatacacaatttgagagtctgtagtagacaaagatgccagactgtgttaatgactaccctcagggtggttataatctgatgagaaagatacacacatgactttcttgttcttgttgttgttgttgttgttgttgttcttgttgttgttttgagagaatcttgctctgtggcccaggccggagtgcagtggcacaatctcagctcactgcaacctccgcctcctgggttcaagcgattctcctgcctcaggctcccctgagctgggatcacaggcacccaccaccatgactggctaatttctgtayttttagtagagactgggtttcaccacattggccaggctggtctcaaactcctgacctcaat

SEQ ID NO: 57564 - DNA, 824 bp, Homo sapiens
tggggactgttgtggggtgggggtagggtggagggacagcattaggagatatacctaatattaaatgacaagttagtgggtgcagcacaccaacatggcacatgtatacatatgtaacaaacctgcacgttgtacacatgtaccccaaaacttaaagtataataaaaaaaaattatgagatgaaattcattatcccttaaacacaacttctttaggcatctccatgacaggtcacataacacacagtgagcttgcatgcaagcataccaacacacacagaataggaagggtagtttgtttgctttgtttgtttctgtttgttttgagacagagtctccctctgtcgcccaggctggagtgcagtggtgcaatctcggctcactacaagctctgcctcccggattcaagcgattctcatgcctcagcctcctgagtagctgggattacaagcatgcaccaccatgctcagctaattgtttgtgtttttagtagtgatgaggttttgctatgttggccaggcttgtctcraactcctggcctcaagtgatccacccacatcagcctccaaaagtgctgggattacaggcctaagccactgtgcccagcctctttatttttaacataaacagaattacgacatgaggtaggatagtttttgtctaataacataatttttctaactggccccacaccaatatcacaaattctacattattttgaccccatgttcaggatgggaaagagtacacctccttgaatgccacctaacatataagaaaaggttttgattctaactcatttggctaaaagtaaaaggaataaag

SEQ ID NO: 57565 - DNA, 654 bp, Homo sapiens
aatacttttcttggagacgtggtatgtatagtgcctgaaaaagaataatgaaataatagctcttatttatcgactatgtgccagccactaagctcagtgtcatatactttactgttattatatctaattcacagatgagttagttgaagtgttaacttccagtttacaaagagcagccactgatcatctagtgcctactacatgctggggtaagggaaattgtacatattttctcatatagtgtgcagtgccaggaggtagatgttattatcaactccagtttacaaatgagaaaattaagatttaaagaggttaaatagtctgtcaaygttacacagctagtaagaggcagaactaggatcagaatccaggaagacaaattcccagggcctttgcctttaacttttactatactgcctcagcaaggcgtaggtattattattattgctattgccataggtattacttaaataaaaatcaatgcactaaaaaccacagtgaagtatatgtctgaaatttgacaaacatatttagggaaccaaataattttaagtataatctctagagttgagagcatccaacttggtactgaattgcaaagtagatatgaagacaacttctaaaagtcaaaatataactaaacactccagccct

SEQ ID NO: 57566 - DNA, 654 bp, Homo sapiens
aatacttttcttggagacgtggtatgtatagtgcctgaaaaagaataatgaaataatagctcttatttatcgactatgtgccagccactaagctcagtgtcatatactttactgttattatatctaattcacagatgagttagttgaagtgttaacttccagtttacaaagagcagccactgatcatctagtgcctactacatgctggggtaagggaaattgtacatattttctcatatagtgtgcagtgccaggaggtagatgttattatcaactccagtttacaaatgagaaaattaagatttaaagaggttaaatagtctgtcaacgttacacagctagtaagaggcagaactaggatcagaatccaggaagacaaattcccagggcctttgcctttaacttttactatactgcctcagcaaggcgtaggtattattattattgctattgccataggtattacttaaataaaaatcaatgcactaaaaaccacagtgaagtatatgtctgaaatttgacaaacatatttagggaaccaaataattttaagtataatctctwgagttgagagcatccaacttggtactgaattgcaaagtagatatgaagacaacttctaaaagtcaaaatataactaaacactccagccct

SEQ ID NO: 57567 - DNA, 2643 bp, Homo sapiens
cccttaccactaagtgtggttaccacgtttttatcttaatccctttaagccatgtacagaacattttctaactgtagattttgctgctacttctgccttatattgtgattctttagctatgtatttggatttttagtctgaaacactgtgaattccttaaagtgtttgtcttactaattttgagtttggtacactgtaaatcagaaaataccccaaatataaaaggctctctgtatttagtaaaaatgagatagcaatatatatattattcttttgccttatgactgtggcaaccctaaatacagttttgatattatgaggttttgggggagcattatataagattattctatggatgctatctggaatgtatttcagtcttacatgcccccaggaaggctcatcattatccagtctgagatcccaacttctgtccctgtgtcaacaggattgcaaggctagttcatctgttggcaaatctcagaacacagaatatgcccacccacctcctgaagactggtcttgacaatcaaatcataaggtgaaaaccacgctaacataattaggtatgttaactattttcttagggctatttcactagatgtagccattgtttaactcatttgtctcccattttcttctctatttttctacttccctcactttgactacagtatagaaagtattgtctttatgtaaataagttttacagctcatttgagcattcaactgcagtaacagtgatgttgtattacaaacagagataaaagaaaagcttccctattgactgatagtggtatcactaacttcctgcttgatattgaaattcttcattttatattgtaattcttcattttcttttattaatataacaaagaaaaatgaagcatgactctagatctcattttggtgtcggtgtcattctctagcgtagttcagacaaaaatgcttttctagaataaatgttttctactgtccagaagaggaacttttttattgggaccatgtgaattgtttttcagcttttcagaaaaaaatttgtgggcagttatattaaattaccctcctatcacaactgcacactcagtagcatttcctttgccataacaggttgtccaatttaaataattgacatttttttcaagcttatagctaattctgaagcagcaagcataacaaagtttaaaataatgttcccctgaaaataaatattttccagcttttatgagcactgtatataacttgataaatggaataatatttacattacatattcttcaaggactctttatagagccacacacggcgtaggactggttatctcatatcctttttccttatattaggtttttttaaaaaagacttttcaaacatagttttacataatgtgtttgccataaaaaagcaatacatagaatagtacaatattaacttaagtataaagacaagcaaatagaacagggaagtaaatttataaatactacttctctggtttttgaacattggtgctattattaatccctcttaaatgttcggcaaatgcattatatgggattatttcagagttttgaaagctctattgaactacaattatcaggagtaaggaggactaatgttatcaagcttgttcttttttggcattgaattatgtgcattagttagacttctagttaactttctcaagcatcaggaaactttagatatataactccacattacagcaatctaatgcctaatacattggaaaaaacatggcttatcacaaaaatctttaaatcgtacttcccttactgtctctggcwtctggtttccaacttctatgtctctgctgttttgtctcacttggattttgaagccataaaatcgactgtatgtgctctgccatgtctagtacattgagggataaatgggctctaatcagctggattctttcagtgtgctaatgacttcctgggaataagttagcacatggggtactgcactcactctttctgatcactggagtaccatttagcaaattgctgctgcagtaggctcaatgataccccagtgttctgaggaagttaattgcagattgtaaggtacctcatatcctcctatgacctaactgaaagcaggaatgtgggcaattcagtttgccttccagcattagcttcatgatgtattaagtgttctgaacttcttagaacttctatgcaaaaggtagggtttctcagcttcacttgcccctttatccttgggaacatcctacccctccagggacagagaagatacaactgttcccctacttgtctcaacctttggggaatctgcctttccagctgatggcaaagaatccttccttcctgacagaaggaagctgtgtcaggtttgggaaagctatcactgcgtatcacagttttgaggctcaagtcggggggctgtgcaatgtcttgatttttccaggtttcttgggaatgttttcagtaaacaaactcagggaactttcaaactattaaggttggaggaaatcgatatactctgtaccttttcctaacatatttcattaattagaaaatataattaaaaactcttcaattacctgcattaaaaaatgagttagggaaggggcgaagacgatatgagaagaaggcagatcagaat

SEQ ID NO: 57568 - DNA, 653 bp, Homo sapiens
caagaaaattgtttcttttcttaagattaaaaaaaaaaagatgtaattcaagaggttagttctttggtatgaacaaaacctcttttttaaaatcatctaagccaggcatggtggtgcacacctgtaatcccagcactttgggaggccaaggtgggaggattgcttaagtcagtttttgagtttaagtttgagaccaacctgggccacacagagagaccccatctctacaaaaaataaaatattagttgggtgtggtggcwcatgcctgtggtcccaaccacttgagagacaaaagctggaggattgcttgagcctgcaggttaaggctgcagtgaaccatggttgtgccaccgtgctccaacttgggggataaagcaaaaccctgtttcaataaaataacaaataagtaaataaattcctcttgaaaatgactatctatgtagggttagtgaaagactgaaactatttcatagaaaataaataagttgcagtaatgtgacttttgaaaatggtctgctcaagctgattcttagttgaagctaggacaccacccaagcaacctttgaagctgactctctgttaaataaccgactctctattatctaactctctcacagacacttctgatatgtcacacataaactaattaatga

SEQ ID NO: 57569 - DNA, 831 bp, Homo sapiens
agggaagtggctttgtttattttactgtcagtagggctgacccaggttgccctggtgggtggtgtgtcctgtgagcctctctgcctctaggcctgtttccagggtctcgtcttcgttgtaggcctgcaggtctatttgggtcccttctcacgactgaggcaggctgaggatgtacccagttgggctgggctgccttgtgggtcctctctcccctgccctcatggccaacctcaggcgtgaacctgcctacaaagcctctctgtgcagcagcagctgtggcagttgccamgggagctcagcaccaaaaaagatgttcagatttgctgcatttgttttggaatgagtgcctggtgttgcttgtgcacaccccaagcctcctggcctttccaggtttccctgttgaacaggcagctctcctgcggttgggtggcacagggctgtggtgagggccccagcatccctcctcacctgggtgctcagttcctttcttgtcatcctttctctgtttgtaaagcagaaacagtcctgctaacatcacccccttcaaagatgtatgcagaatttgattttttttcctggaaaatatacttttttagtgtttaagaaaaaactcgtgctgggcatggtagctcatgcctgtaatcccagcactttgggaggctgaggcaggagaattgcttgagcccagaagttcgagaccagcttgggcaacatagtgagactccactgggcatggtggtgcacacacctgtaccagctgctcaggagcctgcaggcaggaggatcacttgagcccaggaggtggcagctgcagtgagccacgatcttgcc

SEQ ID NO: 57570 - DNA, 1223 bp, Homo sapiens
cctgtgggtagagaccaacaggcaggctctgtgccgtgggctggctggtgtacccaggagacctcagctcacaccctcctgggaaggactgccggccacttcataggtggagcacagaggtgctggctccaccccctgtgtgtgcgtggcactctgtagtcaccagcctggctgtctgcctccttgttccaggcatggtctcaatggcctcagaccctccctcctgagcctgattaagaagcaaagcaccctgcagtaggggacactcttcttaggaggaggcggcaattctcactaataagtgcttttcttctaccacatcatgtacattaagtggttttttttttttgttttgcttttttgtttttttgttttgtttttgtttttgtttttttggatacagagtcttgctctgttgcccaggctggagtgcagcggtgcaatctttgctcactggaccctccgtctcccgggttcaagcgattctcctgcctcagcctcctgagtagctggaactacaggtgtgcgccaccacacccagctaatttttgtatatttagtagagacaggcagggtttcaccatgttggccaggctggtctcgaactcctgacctcaagtgatctgcctgcctcgccctcctaagtgtatatttttcttttcttttttttttttttgagacggagtctcgctctgtcactaggctggagtgcagtggtgccatctcagctcactgcaacctctgcctcccgggttcaagcgattctcctttctcagcctcatgagtagctgggattacacacgtgygccaccaaacccagctaatttttgtatttttagtagagacggggtttcaccatgttgcccaggatggtctagatctcttgaccttgtgatccacccacctcggcctcccaaagtgctgggattacaggcatgagccaccgcgcctggccgtgtatatttttctaaatagacacctgaccatgcttaggtcatccatcgaaattccctagcacttgctggcttccctgaattcaactgaattgcgcgtgcccactgctgctgcataacctatggcgggcacagccatgggataaagtgggcagtgtgcacacattccccgcacagtctgtggcctggccaagcccctgggcattcgaggctcccggcaaggcttcgtgtcccgacagttttgggtaggggcacgaggtgggtgagccc

SEQ ID NO: 57571 - DNA, 591 bp, Homo sapiens
  misc_feature (1)...(591): n = A,T,C or G
tcccgcacagcctcaggacaaagtcaaaacccctcccaccctcatcctgccccacccagcaatcctcccagctcttttctgcactggattccaggagattttgttaaaaggaaggttccattaggtttagaataaaaatcttgtaaccccaaggccagaactctttctccacatcttacaacaaattctgtaatggtccttgkggggaagctctccttccccactggcccaaacccccacagtccagaagagaaacagggccccgggctgggcccagcccagtctcagctcntaagcagcaggtgaaccctttcgccatgggccagccatgacagtagggtgaagtcacccccaaaggccaccagccaaggcactgaggagccaagcttggcaaatgtctgggtggctggggattcctggcacccctgccacctcccctggagcccttgccagccagacacatgaaaacgtccagccatggcgtgttttcagagcacgccctggcttaaaaggcaggtgaaggaggccactctgctgacactcctccagtcctgccacaaagaggggaaagcctaggtgcccactcccctc

SEQ ID NO: 57572 - DNA, 931 bp, Homo sapiens
gggcacccagcagggcactgcgtccctgggagggcagccggcatcctcacccaagactgcccagtgtggggagtctcacccagagaatgcctggtctccgaaagtcctttccttggggtggggtcactcggcaggactagcatggccacctgcaggcacaatctctcctgtccctgtaagactgcccaagactactgacacagggtgcagggcaactttcaagcccacctcagagaggtggacttgtccagaactgttctgatgactggtgactgagtctttcaccttgaggttgaggtttcagttcatctacttctgctaattaaagagtctagccaggtacagcctgttggtacctgagaggggttggttacctggtaacacgtgaggctcacctgagacagggtcaccactccctagtctgarcatgcctgatgtctagcaacagggtctccatagcaacaacaggatgctcacagaagctcacaggctgtaccacttttctgcagccagtctgggtttatccaggaggatacagacgcagaagctgaggctggatgcgcctggggctgggatgccaggagcatcaccccacatgctgtgtcacagggtgactctgggaaggggggctcaggtcaggctgtgaggatcctggaaagtgacccagcacctgctttaaaacagtagttctgggctgggtgtggtggctcacacctggagtcccagcactttggcaggctgagctgtgaagatagtgtgagcccaggagtttgaggctgtggtgagccatgatcgcaccactgcactccagcctgggtgacagactgagacccagcctcaaaaaaaaaaaaaaaaagttctgaattgtcccagcctcaaaaaaaaaaaaaaagattctgaattgtctatgtgtctgtttcttttcaaaaga

SEQ ID NO: 57573 - DNA, 960 bp, Homo sapiens
tcctgmgttgtgacaaattgatggtaaagacattataaagctgcaataaaggacaagattttaaaatcgtgaccgccaacaatgttgaatttcttttttgccctatcattttgaacagcagtgcaagttaagaaactttcccaccctttgttttccaaagtatagcttactgcagagaaccacccttctccatattacttaaataagattcttagatgcctccgtggtttacctatgacaagtctaaacggggacctttaaaattctctttcttgaacttataaacgattagtggaactgcttgtctctactggacaatgggtacaaaatgcttgttaatcaaactttggttaagcttctctctttcctccaggccactgaactgaagttcccctcaggctgagtcagcatatagtcccttctgaggataggctggcctcaggcaaaactatttctaatatactatcaaattatttcactttttaaatccattttactttctcacacttgattgtttctagccttaattacccctctttatacttaaaacaacaggaaacactttttacaaaacaattaagacacagatcttatggtcagagccttctcctgaatttaatagtttctttcttcagtttgtaataatccttttgaatagagtctctccttactaagtccggagctgtgttttatttgacaccaagttggaataagatcaatagtctggactagcaaaatattcatatagagagagccatcaatattttatgtaacatttttgtattttgtgtttacttttatttgaagagcttacacagagaagatatttacaagataaatatgtgaaacaagtaaaaatgtatcttagaaataaaataatacagaaagtagtttattagaataaagtacttcaaagtaaaagcataaactcttttctttacattaaaataaaaatactga

SEQ ID NO: 57574 - DNA, 960 bp, Homo sapiens
tcctgagttgtgacaaattgatggtaaagacattataaagctgcaataaaggacaagattttaaaatcgtgaccgccaacaatgttgaatttcttttttgccctatcattttgaacagcagtgcaagttaagaaactttcccaccctttgttttccaaagtatagcttactgcagagaaccacccttctccatattacttaaataagattcttagatgcctccgtggtttacctatgacaagtctaaacggggacctttaaaattctctttcttgaacttrtaaacgattagtggaactgcttgtctctactggacaatgggtacaaaatgcttgttaatcaaactttggttaagcttctctctttcctccaggccactgaactgaagttcccctcaggctgagtcagcatatagtcccttctgaggataggctggcctcaggcaaaactatttctaatatactatcaaattatttcactttttaaatccattttactttctcacacttgattgtttctagccttaattacccctctttatacttaaaacaacaggaaacactttttacaaaacaattaagacacagatcttatggtcagagccttctcctgaatttaatagtttctttcttcagtttgtaataatccttttgaatagagtctctccttactaagtccggagctgtgttttatttgacaccaagttggaataagatcaatagtctggactagcaaaatattcatatagagagagccatcaatattttatgtaacatttttgtattttgtgtttacttttatttgaagagcttacacagagaagatatttacaagataaatatgtgaaacaagtaaaaatgtatcttagaaataaaataatacagaaagtagtttattagaataaagtacttcaaagtaaaagcataaactcttttctttacattaaaataaaaatactga

SEQ ID NO: 57575 - DNA, 667 bp, Homo sapiens
actgcaatgttgtagcaaaggtcttgctttttcagaacagtgccagccagactgagaaggatggtcttctatgacctggctacttttttccaaatggggactcttctatgaaagaatctttgggctttgccctttcagctctctgggacattctcagatctgctctgcagtcaaaggtgcttcttacccaatctgcctcgcttctgcctctcctttcacatgtgtcaaacttgagtggtggtccttaggtttttcgtgctgaatgtctgctccctttcctctatctttcgctgatgccatccccaataaatattttacacttccattttagtgtaggcatctgctttctagaagatccaaacagatacagtgtattatctacaaatagaagatagtattcatatcattactatatatacacaagcacatatacacatatgtataaatttctctctmtatatatagagagagattttatatgttttcatataaacctttgtatcattcatgaggtagattagtctatttccataatacaattaaaatattttaggctcagagatgtatacataattgcctatgcttacaagataacaaacatatgactaccgtagtccccacttatccatagcattacttgccacagttttagttaccatagtttaac

SEQ ID NO: 57576 - DNA, 667 bp, Homo sapiens
actgcaatgttgtagcaaaggtcttgctttttcagaacagtgccagccagactgagaaggatggtcttctatgacctggctacttttttccaaatggggactcttctatgaaagaatctttgggctttgccctttcagctctctgggacattctcagatctgctctgcagtcaaaggtgcttcttacccaatctgcctcgcttctgcctctcctttcacatgtgtcaaacttgagtggtggtccttaggtttttcgtgctgaatgtctgctccctttcctctatctttcgctgatgccatccccaataaatattttacacttccattttagtgtaggcatctgctttctagaagatccaaacagatacagtgtattatctacaaatagaagatagtattcatatcattactatatatacacaagcacatatacacatatgtataaatttctctctctatatakagagagagattttatatgttttcatataaacctttgtatcattcatgaggtagattagtctatttccataatacaattaaaatattttaggctcagagatgtatacataattgcctatgcttacaagataacaaacatatgactaccgtagtccccacttatccatagcattacttgccacagttttagttaccatagtttaac

SEQ ID NO: 57577 - DNA, 869 bp, Homo sapiens
gaatttgctgccttcttgcaaagcttacaaatttgcaaaggtgaaaaacttttaggattttcctttctttctttttmtttcctagagttctatcaaacctctaatttttcatttatactgtaagcctcgaattttctcacactgtagtgctgtatttgccataggagtcaactagtaacaatttctcatgagcaaatgtcttcagtacacaatgttgtttccactgcctcttgctgtgtaatttcttaggtcaataaacactgcctcctagggaaggatttcccttcacatttcccccccaatcaggagaatcactcttaacaaaatcttcacctgaagctatatttattgcttttggaagcctagttaagatgaaaacttctgccaaaaattctgtatctcatcatttatttttcataaacattttattggagtaagttgagatttacagaagggttggaaacacagtattgaaacttcccatgtactcctcacctgatttactcttgttatcattttacattactgtggtacacttgtcaaagctgagaaacccacaatggaacattactattaactaaaccccagactttgagtttcactactttttccattaagtcatcttttccttccaggatctcattcagagaaccacattgcttttcgttgtcatgtctctctattttcctctggtctgtgaaagtttatgcatctttccttgtttttcatgagtttggcagttttgaaaagttttgtcaggtattttatagaaagtctctcaatctgagattggttgattgtttttattcataatgatgctggaaatgttaactgtgattacttagttagagcagtccttaataacttat

SEQ ID NO: 57578 - DNA, 869 bp, Homo sapiens
gaatttgctgccttcttgcaaagcttacaaatttgcaaaggtgaaaaacttttaggattttcctttctttctttttctttcctagagttctatcaaacctctaatttttcatttatactgtaagcctcgaattttctcacactgtagtgctgtatttgccatrggagtcaactagtaacaatttctcatgagcaaatgtcttcagtacacaatgttgtttccactgcctcttgctgtgtaatttcttaggtcaataaacactgcctcctagggaaggatttcccttcacatttcccccccaatcaggagaatcactcttaacaaaatcttcacctgaagctatatttattgcttttggaagcctagttaagatgaaaacttctgccaaaaattctgtatctcatcatttatttttcataaacattttattggagtaagttgagatttacagaagggttggaaacacagtattgaaacttcccatgtactcctcacctgatttactcttgttatcattttacattactgtggtacacttgtcaaagctgagaaacccacaatggaacattactattaactaaaccccagactttgagtttcactactttttccattaagtcatcttttccttccaggatctcattcagagaaccacattgcttttcgttgtcatgtctctctattttcctctggtctgtgaaagtttatgcatctttccttgtttttcatgagtttggcagttttgaaaagttttgtcaggtattttatagaaagtctctcaatctgagattggttgattgtttttattcataatgatgctggaaatgttaactgtgattacttagttagagcagtccttaataacttat

SEQ ID NO: 57579 - DNA, 869 bp, Homo sapiens
gaatttgctgccttcttgcaaagcttacaaatttgcaaaggtgaaaaacttttaggattttcctttctttctttttctttcctagagttctatcaaacctctaatttttcatttatactgtaagcctcgaattttctcacactgtagtgctgtatttgccataggagtcaactagtaacaatttctcatgagcaaatgtcttcagtacacaatgttgtttccactgcctcttgctgtgtaatttcttaggtcaataaacrctgcctcctagggaaggatttcccttcacatttcccccccaatcaggagaatcactcttaacaaaatcttcacctgaagctatatttattgcttttggaagcctagttaagatgaaaacttctgccaaaaattctgtatctcatcatttatttttcataaacattttattggagtaagttgagatttacagaagggttggaaacacagtattgaaacttcccatgtactcctcacctgatttactcttgttatcattttacattactgtggtacacttgtcaaagctgagaaacccacaatggaacattactattaactaaaccccagactttgagtttcactactttttccattaagtcatcttttccttccaggatctcattcagagaaccacattgcttttcgttgtcatgtctctctattttcctctggtctgtgaaagtttatgcatctttccttgtttttcatgagtttggcagttttgaaaagttttgtcaggtattttatagaaagtctctcaatctgagattggttgattgtttttattcataatgatgctggaaatgttaactgtgattacttagttagagcagtccttaataacttat

SEQ ID NO: 57580 - DNA, 869 bp, Homo sapiens
gaatttgctgccttcttgcaaagcttacaaatttgcaaaggtgaaaaacttttaggattttcctttctttctttttctttcctagagttctatcaaacctctaatttttcatttatactgtaagcctcgaattttctcacactgtagtgctgtatttgccataggagtcaactagtaacaatttctcatgagcaaatgtcttcagtacacaatgttgtttccactgcctcttgctgtgtaatttcttaggtcaataaacactgcctcctagggaaggatttcccttcacatttcccccccaatcaggagaatcactcttaacaaaatcttcacctgaagctatatttattgcttttggaagcctagttaagatgaaaacttctgccaaaaattctgtatctcatcatttatttttcataaacatttwattggagtaagttgagatttacagaagggttggaaacacagtattgaaacttcccatgtactcctcacctgatttactcttgttatcattttacattactgtggtacacttgtcaaagctgagaaacccacaatggaacattactattaactaaaccccagactttgagtttcactactttttccattaagtcatcttttccttccaggatctcattcagagaaccacattgcttttcgttgtcatgtctctctattttcctctggtctgtgaaagtttatgcatctttccttgtttttcatgagtttggcagttttgaaaagttttgtcaggtattttatagaaagtctctcaatctgagattggttgattgtttttattcataatgatgctggaaatgttaactgtgattacttagttagagcagtccttaataacttat

SEQ ID NO: 57581 - DNA, 869 bp, Homo sapiens
gaatttgctgccttcttgcaaagcttacaaatttgcaaaggtgaaaaacttttaggattttcctttctttctttttctttcctagagttctatcaaacctctaatttttcatttatactgtaagcctcgaattttctcacactgtagtgctgtatttgccataggagtcaactagtaacaatttctcatgagcaaatgtcttcagtacacaatgttgtttccactgcctcttgctgtgtaatttcttaggtcaataaacactgcctcctagggaaggatttcccttcacatttcccccccaatcaggagaatcactcttaacaaaatcttcacctgaagctatatttattgcttttggaagcctagttaagatgaaaacttctgccaaaaattctgtatctcatcatttatttttcataaacattttattggagtaagttgagatttacagaagggttggaaacacagtattgaaacttcccatgtactcctcacctgatttactcttgttatcattttacattactgtggtacacttgtcaaagctgagaaacccacaatggaacattastattaactaaaccccagactttgagtttcactactttttccattaagtcatcttttccttccaggatctcattcagagaaccacattgcttttcgttgtcatgtctctctattttcctctggtctgtgaaagtttatgcatctttccttgtttttcatgagtttggcagttttgaaaagttttgtcaggtattttatagaaagtctctcaatctgagattggttgattgtttttattcataatgatgctggaaatgttaactgtgattacttagttagagcagtccttaataacttat

SEQ ID NO: 57582 - DNA, 546 bp, Homo sapiens
ttatttcaaagccattagacctagaataagcctggtgaggccaactctacttacactgagacaaaaaccatttagagcagctaggcaatttattccccctagaaaaactctaatgagaaaaaatgccttaagttagataaagataaaaaataatctcagaactggagscacaaattactctccaaaagcatagaaaatcaaatatttattcattcattgaacactttattttttatcatcagttttgttccaaggactgttcctaagtagtggggacacagtgataaacaatgcagacagctataatagagtttataaccagtgggacagagggataacaaataacaagacacagtagatatggagtttggtaagagctgtggaggtggctgagatagagagcaggatgatcaaggaaggcttctttgaggctttccttctttgaactgagacctgagaagaggctgggcaatgggccttttcagcagaaggactagcagatacaatggtcctggaaggagaaaggaattggtgtgctggtcatcg

SEQ ID NO: 57583 - DNA, 1876 bp, Homo sapiens
tttttttcaattcttactgcctacaccccaaatcagtattcattatctcaatcttaggtccatatagtggccttataacagatcttttactctcaaatttctttcctttcctacaatttattctgcagaatatcgcccacttagccttcactgaatactgcttttatcatgacatttctcataaacctttaatatcctaccaccatacaacagaggaacgaccactctttagactgacatgcaagatatatctatctcctctgttctttctttatttttcacttctgtctctgaaactttgttgagaataattagaataattaatagattcaataaattgaaaggatccaaatttgaaacctgagacatctgaagagtgagagaggatagaagataaaaaaagatacagtaaaaaaaagagatacagcaaaaataaagttttgaaagataattttagaaagttaagagagaaagaggaagaagattttggtgtcagctatactacaagtgagatagtgagagagagatgagataaagagatttttagatgtttactgtagattatgaatagaaacattcctctgtatttttgagtgactcaagagatataaatattaattttaattttttctctacccagtgatattttaaatgtgtccaacagtttgtggggagtgagaacaaaaaacaccagttttcactgccctcgtgaaatctttcatccaataaatacaaaactgaaaactggaggaagagagtcagttataatgagcacatgacacagggatctggtgtagattaggaggcygaagaacacttctctgtgaaataggatttatgcagaaacttgtcagatgtcagttgtggaaataaaggagataatctatgtaaagtatttagtacagtgcataacaaatgatattagaatattataattatcaatcatttgtaaacagtcatttacagttattgtatcttctctatacctagattgtgaaattgttcggggtatcgcagatattttctacttattttaaatctctgtaatgcctagctctctatattgctgtgaagtgtagttgaaagagcacaggattagagttctttagataagggctgaaatcatgacttcggagctgtgcaaatgtagggaaaatattttagtgggctccagtttgtttgttgtaaaataagaattatactacttcagcagatttctaggatgattaaaaaataattagcattttgtctggcatgaaataaatgcatggtaaaaggtactttattaataatattattttcatatttataagaaataaatatatttatataaggaagaaaattacacaattacatttaagtggacaccagtaatttgaaatttatgctaatttggctggaggtaagggtgatttgtattatttataaagaaaaatctggtctgggtatggtggctcatgcctataatcctcacactgtgagaggtggagtcaggaggactgcttgagcccaggagctcacaactagtctgagaaacataagaagaccctgtctctacaacaaataaaataaaaattagccagacatggtggtgcattcctgtgatcctagttccttgggaggctgaggtgggaggatggtttgagcccccaaggttgaggctgtagtgagccatgatcatgccactgtacttcattctggatgactgagtgagactctgtctcagaaaaaaaaagagaaaaagtctgatcagcaaaaaaaaagtaagtgatatgatatattgttgatatcttaaaaattttcttgtttagaaaagcaatttttatccaggttaccaaaaagtataaaaagaaaaaataaaaatcacccataatct

SEQ ID NO: 57584 - DNA, 1876 bp, Homo sapiens
tttttttcaattcttactgcctacaccccaaatcagtattcattatctcaatcttaggtccatatagtggccttataacagatcttttactctcaaatttctttcctttcctacaatttattctgcagaatatcgcccacttagccttcactgaatactgcttttatcatgacatttctcataaacctttaatatcctaccaccatacaacagaggaacgaccactctttagactgacatgcaagatatatctatctcctctgttctttctttatttttcacttctgtctctgaaactttgttgagaataattagaataattaatagattcaataaattgaaaggatccaaatttgaaacctgagacatctgaagagtgagagaggatagaagataaaaaaagatacagtaaaaaaaagagatacagcaaaaataaagttttgaaagataattttagaaagttaagagagaaagaggaagaagattttggtgtcagctatactacaagtgagatagtgagagagagatgagataaagagatttttagatgtttactgtagattatgaatagaaacattcctctgtatttttgagtgactcaagagatataaatattaattttaattttttctctacccagtgatattttaaatgtgtccaacagtttgtggggagtgagaacaaaaaacaccagttttcactgccctcgtgaaatctttcatccaataaatacaaaactgaaaactggaggaagagagtcagttataatgagcacatgacacagggatctggtgtagattaggaggctgaagaacacttctctgtgaaataggatttatgcagaaacttgtcagatgtcagttgtggaaataaaggagataatctatgtaaagtatttagtacagtgcataacaaatgatattagaatattataattatcaatcatttgtaaacagtcatttacagttattgtatcttctctatacctagattgtgaaattgttcggggtatcgcagatattttctacttattttaaatctctgtaatgcctagctctctatattgctgtgaagtgtagttgaaagagcacaggattagagttctttagataagggctgaaatcatgacttcggagctgtgcaaatgtagggaaaatattttagtgggctccagtttgtttgttgtaaaataagaattatactacttcagcagatttctaggatgattaaaaaataattagcattttgtctggcatgaaataaatgcatggtaaaaggtactttattaataatattattttcatatttataagaaataaatatatttatataaggaagaaaattacacaattacatttaartggacaccagtaatttgaaatttatgctaatttggctggaggtaagggtgatttgtattatttataaagaaaaatctggtctgggtatggtggctcatgcctataatcctcacactgtgagaggtggagtcaggaggactgcttgagcccaggagctcacaactagtctgagaaacataagaagaccctgtctctacaacaaataaaataaaaattagccagacatggtggtgcattcctgtgatcctagttccttgggaggctgaggtgggaggatggtttgagcccccaaggttgaggctgtagtgagccatgatcatgccactgtacttcattctggatgactgagtgagactctgtctcagaaaaaaaaagagaaaaagtctgatcagcaaaaaaaaagtaagtgatatgatatattgttgatatcttaaaaattttcttgtttagaaaagcaatttttatccaggttaccaaaaagtataaaaagaaaaaataaaaatcacccataatct

SEQ ID NO: 57585 - DNA, 1876 bp, Homo sapiens
tttttttcaattcttactgcctacaccccaaatcagtattcattatctcaatcttaggtccatatagtggccttataacagatcttttactctcaaatttctttcctttcctacaatttattctgcagaatatcgcccacttagccttcactgaatactgcttttatcatgacatttctcataaacctttaatatcctaccaccatacaacagaggaacgaccactctttagactgacatgcaagatatatctatctcctctgttctttctttatttttcacttctgtctctgaaactttgttgagaataattagaataattaatagattcaataaattgaaaggatccaaatttgaaacctgagacatctgaagagtgagagaggatagaagataaaaaaagatacagtaaaaaaaagagatacagcaaaaataaagttttgaaagataattttagaaagttaagagagaaagaggaagaagattttggtgtcagctatactacaagtgagatagtgagagagagatgagataaagagatttttagatgtttactgtagattatgaatagaaacattcctctgtatttttgagtgactcaagagatataaatattaattttaattttttctctacccagtgatattttaaatgtgtccaacagtttgtggggagtgagaacaaaaaacaccagttttcactgccctcgtgaaatctttcatccaataaatacaaaactgaaaactggaggaagagagtcagttataatgagcacatgacacagggatctggtgtagattaggaggctgaagaacacttctctgtgaaataggatttatgcagaaacttgtcagatgtcagttgtggaaataaaggagataatctatgtaaagtatttagtacagtgcataacaaatgatattagaatattataattatcaatcatttgtaaacagtcatttacagttattgtatcttctctatacctagattgtgaaattgttcggggtatcgcagatattttctacttattttaaatctctgtaatgcctagctctctatattgctgtgaagtgtagttgaaagagcacaggattagagttctttagataagggctgaaatcatgacttcggagctgtgcaaatgtagggaaaatattttagtgggctccagtttgtttgttgtaaaataagaattatactacttcagcagatttctaggatgattaaaaaataattagcattttgtctggcatgaaataaatgcatggtaaaaggtactttattaataatattattttcatatttataagaaataaatatatttatataaggaagaaaattacacaattacatttaagtggacaccagtaatttgaaatttatgctaatttggctggaggtaagggtgatttgtattatttataaagaaaaatctggtctgggtatggtggctyatgcctataatcctcacactgtgagaggtggagtcaggaggactgcttgagcccaggagctcacaactagtctgagaaacataagaagaccctgtctctacaacaaataaaataaaaattagccagacatggtggtgcattcctgtgatcctagttccttgggaggctgaggtgggaggatggtttgagcccccaaggttgaggctgtagtgagccatgatcatgccactgtacttcattctggatgactgagtgagactctgtctcagaaaaaaaaagagaaaaagtctgatcagcaaaaaaaaagtaagtgatatgatatattgttgatatcttaaaaattttcttgtttagaaaagcaatttttatccaggttaccaaaaagtataaaaagaaaaaataaaaatcacccataatct

SEQ ID NO: 57586 - DNA, 1825 bp, Homo sapiens
aaatataagtaaagtgtttccttgtgttttggcaagcccattctagtaaattactgaccatgagggagagggtcattgaaatccctaatttccagcattttggtcagaaatatagatggaaacctgggacttgtgactggtgtttgaagtgggagcagtcttgtaggactgaacccttaacctgcggggtctgtgcccactctaggtagttaatgtcaaccttaaattgaattgaattctgggacacccggttaatatctgaagagttggataatttgttgaagtaaaaaaagaaacccacacactcgctgtcagagtactgtgagtaaaaagagttaaattacttaattataaaatgttctgtaaaaggcagtaattttcagggtcaactatgacaccaaactgcttagggtcaaatttttatgagatgatctaagataagtcatacaaccttactgtgcttcaattaaaatgaggacaataatgataatgcccacaacataaggctgttttgagggttatacgcgttaatataaataatttacctccccatgcctgatccatgaaaatgctagctattattataccagacaccaagataagtgttttctatacattattttatttaatgcctacaacaaccttataagataggcagcattagcatccacatcttactgatcagaaaactgaggttcaaagaaaccaaaagactagtccaagattacatcacagtaaatggcataacttcgattttaatctaaattcactaaatccaaagtcttcattttatctagcaagcaacattagaaaaagatttatcaggttgattaatgctagttgtcacaatagaaaaaaaaaattccggggcttaagtagaagtttgttatctttgtacagtctaatgttgactaatgtagaacaggtcatcttactccaaactgaaactatacacatggactccaaaatctctgtggccaggtacaagagagacgaagaatgtgcactagcttttaacgatgccctgagtcacacagtcacatccatatataatccactgatccagactagttacatgtttctaatataattgcaaagcaggctgggaaatgcagaggaacaaatggatattgccatgagatttgcctctaccaaaataaactatgcataaaacaaatatttggattcttaggtgttctctcttaagagtttttatatttgggggaaacacattaccaaaattttgatggcaaacctagtgtaatggacattattatttaatctgttcaacaatactgtcttccttcccttgcattttttggtaaaacaaagtaagaatattagtctaacaatcgtttttgtaagaaagcttcttgtgctgtctgcagccatagggattaagccactccagtatgaggaaaataaaaaacaaagttaaagaaatgtcaagagatggaaacactgccaacagcatctaaagctgtatttccagtcattcctggagcttgggctaattagttttcacaatggctgcaccaagtgtttatggctcagctctaatctgattgggcatgcaaccatactgattggtcagtatctgtgacactcagattgttaataataataattattagtactttcacaagtactaatatratatatattactgagacaataataatataaaaatttgttaataattatataaatatattaataattattatatagagacaaggtctcactatgtttcccaggctagaaattagtggctattcataggcatgatcatagtacactatagccttgaaatcctggcctcaaa

SEQ ID NO: 57587 - DNA, 742 bp, Homo sapiens
tgagcaccatggatctctttcatttgctattctgtcctgtccttccttagaattcaaaggctaaacactgggcacctgtctgccatttaaaggggattagtgtggctgccgsactaaagacacgagtgtcaggctgtctgggaaagggctctctaacaacccccgacccttcggagtcaggagcattggtttgcctggaaccagttctaactctttcgctttccgtggtggtcccgaaatacacccaggagcactcagcggacgtcctggtctcccagatatcctggttgatactatggccccgccagaggctccccctgcatgggttactgagcatgagacagccacatcttctgactcctgcctcctgggtcctaatgcccaccagttagactttgtccctcaactcataagcaggattattcccactaggcaggatcgagattccctatttagaagccttaaattcttggggtggtgcccagaagatccctgttcatggtgccctccagggtttaggcagttgtcgccatttgatggctattttgaagggccagttccccagcatagtgtatggtcccccacatcaggacaatttaaacaggtctgtaattttcatgtggataggagaagccttagagcatttcctccattgctccccggatagactttccccttccttggggcctctcaagtacaatctgtggtgcataggcatgggtcttagagctgttgaattgtt

SEQ ID NO: 57588 - DNA, 742 bp, Homo sapiens
tgagcaccatggatctctttcatttgctattctgtcctgtccttccttagaattcaaaggctaaacactgggcacctgtctgccatttaaaggggattagtgtggctgccgcactaaagacacgagtgtcaggctgtctgggaaagggctctctaacaacccccgacccttcggagtcaggagcattggtttgcctggaaccagttctaactctttcgctttccrtggtggtcccgaaatacacccaggagcactcagcggacgtcctggtctcccagatatcctggttgatactatggccccgccagaggctccccctgcatgggttactgagcatgagacagccacatcttctgactcctgcctcctgggtcctaatgcccaccagttagactttgtccctcaactcataagcaggattattcccactaggcaggatcgagattccctatttagaagccttaaattcttggggtggtgcccagaagatccctgttcatggtgccctccagggtttaggcagttgtcgccatttgatggctattttgaagggccagttccccagcatagtgtatggtcccccacatcaggacaatttaaacaggtctgtaattttcatgtggataggagaagccttagagcatttcctccattgctccccggatagactttccccttccttggggcctctcaagtacaatctgtggtgcataggcatgggtcttagagctgttgaattgtt

SEQ ID NO: 57589 - DNA, 742 bp, Homo sapiens
tgagcaccatggatctctttcatttgctattctgtcctgtccttccttagaattcaaaggctaaacactgggcacctgtctgccatttaaaggggattagtgtggctgccgcactaaagacacgagtgtcaggctgtctgggaaagggctctctaacaacccccgacccttcggagtcaggagcattggtttgcctggaaccagttctaactctttcgctttccgtggtggtcccgaaatacacccaggagcactcagcggacgtcctggtctcccagatatcctggttgatactatggccccgccagaggctccccctgcatgggttactgagcatgagacagccacatcttctgactcctgcctcctgggtcctaatgcccaccagttagactttgtccctcaactcataagcargattattcccactaggcaggatcgagattccctatttagaagccttaaattcttggggtggtgcccagaagatccctgttcatggtgccctccagggtttaggcagttgtcgccatttgatggctattttgaagggccagttccccagcatagtgtatggtcccccacatcaggacaatttaaacaggtctgtaattttcatgtggataggagaagccttagagcatttcctccattgctccccggatagactttccccttccttggggcctctcaagtacaatctgtggtgcataggcatgggtcttagagctgttgaattgtt

SEQ ID NO: 57590 - DNA, 1413 bp, Homo sapiens
tgtcataaaggcaataccccttccatccaattctcttgggatgctcatgtttagaatccagccaccatgttgtgaggaagcccacgtcacctatgaagacctacacagaaaagactcaaggccccaggcacttgagctgaaggatgaaaaagagttagtcagcaggggaaattggggaaagggtatctggtagaaagaaggaacagcttgtgcagaggttcagaggcaagagagaatttggcatatttgggaagctgcaagaggtgcagggcaggaagaacgtatagcggagcccagrggtgatggagaggttggctgtggccaggtcacaaaaggcttccagagactgatatgaggggaatggggagccatggagggtggtagccagatgactgcagtgctttaaaacaacctctatggctccagctgggcagagaatccactggaggggctgaccctggaagcagggcaaggggtggggtggggagtgagggaatgagcaccagtgggggtctagatgagcgcagcggcagtgtggatggagcatgagagctttagaggtgggtgtgagaggtgctggcacccaatgggtctcttggccagggctcaggctcgttatattaattattaaagccaatgtgtactttggcctgggtgtagagagagagtgcataggtatttgtgtcatagcacggccacttgggatcaatcactggcaactgaacaatgaatgatttggggtcagagctgcaggccacaggggatgtggatcccagagtctgcaggaccttgggtggctcgcagttcccctcttattgcaattaagcttccatgaccgaatgcctcccgcatgcctcaaagatcgtcatgccattatctcatttaattttggtggcctgtttatgagtatgagctaggggtctattttacagatgaggaaactgagactcagagaagttggtaacccgcccaaggccactctgctgggaggtagcagaactagaattagaacggagcatctttcggaggatgtggaatccaccagcctcagggaatgtggactggtgtttggatttgagaggaacttttagaggaaggaaaacattgtccctacaggcaagatgcaggctcagagacatttctttggaacgtcaaaataaatgggcctgagtcaaagtctggatcaaccaaattccaaagattctgtttgaagcaatgatcccactgctaataagagaagagaaactgggaaagccccggcctctgctgagccctaagaggaagcgggggcccaggacacatggggaggatgtggtgagtctccagcctagacgatggtcagggaggtcagaaggggctcctggagaaattctatcccaagacctgctgtctccttgctgaccgttggagctt

SEQ ID NO: 57591 - DNA, 1413 bp, Homo sapiens
tgtcataaaggcaataccccttccatccaattctcttgggatgctcatgtttagaatccagccaccatgttgtgaggaagcccacgtcacctatgaagacctacacagaaaagactcaaggccccaggcacttgagctgaaggatgaaaaagagttagtcagcaggggaaattggggaaagggtatctggtagaaagaaggaacagcttgtgcagaggttcagaggcaagagagaatttggcatatttgggaagctgcaagaggtgcagggcaggaagaacgtatagcggagcccaggggtgatggagaggttggctgtggccaggtcacaaaagrcttccagagactgatatgaggggaatggggagccatggagggtggtagccagatgactgcagtgctttaaaacaacctctatggctccagctgggcagagaatccactggaggggctgaccctggaagcagggcaaggggtggggtggggagtgagggaatgagcaccagtgggggtctagatgagcgcagcggcagtgtggatggagcatgagagctttagaggtgggtgtgagaggtgctggcacccaatgggtctcttggccagggctcaggctcgttatattaattattaaagccaatgtgtactttggcctgggtgtagagagagagtgcataggtatttgtgtcatagcacggccacttgggatcaatcactggcaactgaacaatgaatgatttggggtcagagctgcaggccacaggggatgtggatcccagagtctgcaggaccttgggtggctcgcagttcccctcttattgcaattaagcttccatgaccgaatgcctcccgcatgcctcaaagatcgtcatgccattatctcatttaattttggtggcctgtttatgagtatgagctaggggtctattttacagatgaggaaactgagactcagagaagttggtaacccgcccaaggccactctgctgggaggtagcagaactagaattagaacggagcatctttcggaggatgtggaatccaccagcctcagggaatgtggactggtgtttggatttgagaggaacttttagaggaaggaaaacattgtccctacaggcaagatgcaggctcagagacatttctttggaacgtcaaaataaatgggcctgagtcaaagtctggatcaaccaaattccaaagattctgtttgaagcaatgatcccactgctaataagagaagagaaactgggaaagccccggcctctgctgagccctaagaggaagcgggggcccaggacacatggggaggatgtggtgagtctccagcctagacgatggtcagggaggtcagaaggggctcctggagaaattctatcccaagacctgctgtctccttgctgaccgttggagctt

SEQ ID NO: 57592 - DNA, 1413 bp, Homo sapiens
tgtcataaaggcaataccccttccatccaattctcttgggatgctcatgtttagaatccagccaccatgttgtgaggaagcccacgtcacctatgaagacctacacagaaaagactcaaggccccaggcacttgagctgaaggatgaaaaagagttagtcagcaggggaaattggggaaagggtatctggtagaaagaaggaacagcttgtgcagaggttcagaggcaagagagaatttggcatatttgggaagctgcaagaggtgcagggcaggaagaacgtatagcggagcccaggggtgatggagaggttggctgtggccaggtcacaaaaggcttccagagactgatatgaggggaatggggagccatggagggtggtagccagatgactgcagtgctttaaaacaacctctatggctccagctgggcagagaatccactggaggggctgaccctggaagcagggcaaggggtggggtggggagtgagggaatgagcaccagtgggggtctagatgagcgcagcggcagtgtggatggagcatgagagctttagaggtgggtgtgagaggtgctggcacccaatgkgtctcttggccagggctcaggctcgttatattaattattaaagccaatgtgtactttggcctgggtgtagagagagagtgcataggtatttgtgtcatagcacggccacttgggatcaatcactggcaactgaacaatgaatgatttggggtcagagctgcaggccacaggggatgtggatcccagagtctgcaggaccttgggtggctcgcagttcccctcttattgcaattaagcttccatgaccgaatgcctcccgcatgcctcaaagatcgtcatgccattatctcatttaattttggtggcctgtttatgagtatgagctaggggtctattttacagatgaggaaactgagactcagagaagttggtaacccgcccaaggccactctgctgggaggtagcagaactagaattagaacggagcatctttcggaggatgtggaatccaccagcctcagggaatgtggactggtgtttggatttgagaggaacttttagaggaaggaaaacattgtccctacaggcaagatgcaggctcagagacatttctttggaacgtcaaaataaatgggcctgagtcaaagtctggatcaaccaaattccaaagattctgtttgaagcaatgatcccactgctaataagagaagagaaactgggaaagccccggcctctgctgagccctaagaggaagcgggggcccaggacacatggggaggatgtggtgagtctccagcctagacgatggtcagggaggtcagaaggggctcctggagaaattctatcccaagacctgctgtctccttgctgaccgttggagctt

SEQ ID NO: 57593 - DNA, 1413 bp, Homo sapiens
tgtcataaaggcaataccccttccatccaattctcttgggatgctcatgtttagaatccagccaccatgttgtgaggaagcccacgtcacctatgaagacctacacagaaaagactcaaggccccaggcacttgagctgaaggatgaaaaagagttagtcagcaggggaaattggggaaagggtatctggtagaaagaaggaacagcttgtgcagaggttcagaggcaagagagaatttggcatatttgggaagctgcaagaggtgcagggcaggaagaacgtatagcggagcccaggggtgatggagaggttggctgtggccaggtcacaaaaggcttccagagactgatatgaggggaatggggagccatggagggtggtagccagatgactgcagtgctttaaaacaacctctatggctccagctgggcagagaatccactggaggggctgaccctggaagcagggcaaggggtggggtggggagtgagggaatgagcaccagtgggggtctagatgagcgcagcggcagtgtggatggagcatgagagctttagaggtgggtgtgagaggtgctggcacccaatgggtctcttggccagggctcaggctcgttatattaattattaaagccaatgtgtactttggcctgggtgtagagagagagtgcataggtatttgtgtcatagcacggccacttgggatcaatcactggcaactgaacaatgaatgatttggggtcagagctgcaggccacaggggatgtggatcccagagtctgcaggaccttgggtggctcgcagttcccctcttattgcaattaagcttccatgaccgaatgcctcccgcatgcctcaaagatcgtcatgccattatctcatttaattttggtggcctgtttatgagtatgagctaggggtctattttacagatgaggaaactgagactcagagaagttggtaaccmgcccaaggccactctgctgggaggtagcagaactagaattagaacggagcatctttcggaggatgtggaatccaccagcctcagggaatgtggactggtgtttggatttgagaggaacttttagaggaaggaaaacattgtccctacaggcaagatgcaggctcagagacatttctttggaacgtcaaaataaatgggcctgagtcaaagtctggatcaaccaaattccaaagattctgtttgaagcaatgatcccactgctaataagagaagagaaactgggaaagccccggcctctgctgagccctaagaggaagcgggggcccaggacacatggggaggatgtggtgagtctccagcctagacgatggtcagggaggtcagaaggggctcctggagaaattctatcccaagacctgctgtctccttgctgaccgttggagctt

SEQ ID NO: 57594 - DNA, 683 bp, Homo sapiens
cctgtctctactaaaaaaagaaataagaaatattaggcaggccttgtggcgtgcacctataatcccagctactgggaaggagaattgcttgaaccaggaggcagaggttgcaatgagccaagatcatgccactgcactccagcctgggcgcaacacaaggagactccatctcaaaaaaaaaaaaaaaatgcagatccctgtgacgtaccccagttctactgactcagaatttcagtatctctattctagaaatagacattatatttttaaatttttaaaaattaatgcgtatttgtacatgtttatggggtataattttttttcacaggaatatacattattacaatttttaggtgatttttttggtgtcctaaagtttaaaattattggtctgtgatcttcttcccttacaggttcctcatgcttaagaccagtgcattccagatggacatgtataaaagtatttttcaatttctgtttacattttttgatctaaaaaattaagagaaaaagtgaacattacttacaytcaatacataggttggctctgcacacttaggtcatatagtcacaggttacatgtgatggttatggcatcttgaatgagagtggaaacttctcaacgcagatgattgacgacaacggtggccttagttgcttccagagggttgccaaatgatgca

SEQ ID NO: 57595 - DNA, 1007 bp, Homo sapiens
aaaggagcacttattagtgtatgatcgattttcagtatattttaaaaactatatttcaatctagctgatttcctttgcaattctatgtattttgttttacatattttaagacaccatttgaggtggtgtcacgaggctccaaggagggcatggcacgacaaagatggaggacttcaggtcatggrggtccagggataggcttttttggcctgctaatcccctgaaatgaatgaaaacggcagaaggttagcttcctatgtatgtgattctagaaaaagtatttctgactttcattaggaactccaatatggctaagaattagaccagtcgttctcaactagaggtgattttccccctaggggacatttggcaatatctggagaaattttggttgtcacattgggaggtgctactggcattcagtgggtagaggtcagggacgctgctaaacatcctatatgtacaggacagcctcccacagtgaagaattatcccacccaaaatgttgatagtgttgaggttgagaaaccctggattagactactgcacattcacagaaatctctccgattgttaagatctgtagtaaaaaaaaatagtgcacatcttcattaaaaacatctgtgataattgtgtcacccagcacttaatgcacgaaatagggagatgggggtagcggagagcgaagagtaactgcctgcagactagaggaggctccttagaggagatgaactgagcctgggaccgtgagttagatttgctaggttgagaaggttgcagtggaagggcgtatgaggcaaagggccaagcactgcaggtgacaaattagtggtgtgactgaggcacatgctgtgcaggggagaggggctaaaatgaggctcagtgccagcatccctaatgacctagttcttggtcctttcctaaaggatcattgtagagagccaaagatactgtttgacccctgcctctctcatcagcggacaaggtgcccctgccagaaggcatgca

SEQ ID NO: 57596 - DNA, 883 bp, Homo sapiens
aagatagaaagtcaggtcaaaccaatggggcactgattgaggtatggacagctagaggcaaattctccaattctgcctgctggagttatttaagcttgtcctgctcttaaggcagagtccccacatgtgtggtcgagtctttgttttctgacacttggttttctttctttytttttttttttttttccaggaaacttaagatttcatttgcataagccacagtaattaagaaattcaatttggttttgaaatggagattgacatacagaaacacaaccccatacacacattctcacacagtctgtgggaagtgtttccagagcagtcttgtttgtggtatttgttgtgtggtcctagtggggaagaagtaaagagtctttgttcacctcagacaaatttataaactaactgaccaagagatggactttgtttacaagtctgtttataaataaaatgacgttctaatttttattaaataataggcagttaagcagcagtaaaaataagtataccagaattaaacaaagaaaggggttcatatctcactttcaaatggtcagctcttttccccctaaacctcaaaaaatcttctgtctcctctcaccatcttgttttagaattgactaccaactattgcaggaaattgaactgtttttgacctacatttgtgatgagtctgccataatgtaattctgattgtgctgtcaaagaaaaccacatattccccccaccaaaagaaaataattatgtataatgcaaacgtgattatcattgttagtgtggaagggtacaatttatttatttattattattattattattattattgtacttttaagttttagggtacatgtgcacaacgtgcaggtttgttacatatgta

SEQ ID NO: 57597 - DNA, 1421 bp, Homo sapiens
ctccaagcatggcaccaaaaatagatagcataaaggaaaaattaaaaaattaaaatgtaaaatgagtggcataaaaatgaaaactgctgtacctctaaaggaaacccattacattaatatccttaatatgcaaaaagcacttacaaagaagataagaaaaattctaacacccccatggaagagtaggcagagaccaagagagaggatttatacaattatcagtacatggccagtaagtgatgacaggtgcttcaccttacctacaatcaaagagatgccaattatcgcaacaaatgggatgtcattttccacccattttaatccatgaaactgacttgtaacactggcaaggtgggaggaatgggctcaggcctgcttgtgtactgttggtagaagtgtgcgttcgtataacctttctgaagacacgatggaattatgtataaaatggaaaatctacatactctttgacccagcaattgcacttccaagaatttattctaagaagataattagatgagggcttaaattgtatgtacaaggatgttcttcacctaaatgtccacagaagatgactggttagataactatggtatatgcaaaccacaatggcttcctcagtgatgttcattagaaagacaaatcagggctacttttattaacacagaaaaacgttggcttcattaaccagattacagaattgcacagatagcataatcccaagtgcacacggatccacacctgtgtgcatatgtgtgtgagcagatagatgtctaaatgtatattcattggaatggcagaactgaggctagacctgggcagacagccctacatgggcagagcaggacatgggcagacatgggagtcaggaggaggaggaggaggtaagtggggcgagggctcctggggcctattttcagactctttgctgaaaatgggattgtcagttctagcaactgaaaatgcaggatgctcagttatatttaaatttcaggcccagtgtggtggctcatgcttgtaatcctagcactttgggaggtcgaggcaggcagatcgctccagctctggaattcgagaccagcctgggaaacatggtgaaaccctatctttaccaaaaatacaaagaaattagccggctgtggtggcgcgtgtctgcggtcccagctacttcagggsctgaggcaggaggctgaacccaggaggtcgaggctgcagtgagctgagatcgtgccactggactgaagcctggaggaaaaagtgaggccctatctcaaaaaactaaataaataaaataaaataagtatatttggggtatacttacactaaacattattcccacttcaaaaatttgaataatttaaaattcagattaactgagtgccctgtattttatctggtgaccctagctgagaagctcaggaaca

SEQ ID NO: 57598 - DNA, 635 bp, Homo sapiens
aggctcagagagcttaaaaatctgcccaaggtcacccagtgagtcaggtacaggttcaacccgattcagttgcctgttgaataagctcaaygatagacatcccagggcatatatcaggtaggtatgctcacagctgtggctgaccctactcatgcctcccaccttccatccttgtccatccactgtgggtgttccaaaagtaagtgcaactcacatttgtccagatgcatgaattgccacatagcccagtcccaaatcaaattaatgagcttcagtgatagccacagccttggcttatgggtgtctgactcctttgttagcacagacacctgtgacccactttaccatgcagtacaaaacagccagccacacatcctgcgtagtttgcagaaaccctgcaacaggtgactgcatagagactcgctcggctacagcaatctgttagcattggtctagcctttgcaggggccttgcctacaaggctttatttccttagtgccaatgacttagacacctgacatcattatgtggctgaggtgaaataggctgttccttctgccctgtgagtcttgctgtggaatgttgagcattctcatgcctggactgcctcacctgtgccaggcaggtgggaggag

SEQ ID NO: 57599 - DNA, 608 bp, Homo sapiens
aaaatgtgggcaagagcctttattgtggttttcccaagaaggaatgggcaagatcaggtaagcagctgagcaggtttaggattgcctagtttgaataatttcagagggcaccagggtatgtggaccacccttagctgtccgatgtatggccctgggtaattagggcagggggatagtagataaacaatgagatctcaataaaagaggtagaggccaggcayagtggctcacacctgtaatcccagcactttgggaggccaaggtgggaggatcacttgagcacaggagttcaagaccagcctgagcaacatggtgaaatcccatctctataaaaatgttttcaaaaatttgtctgagtgtggtggttactcagctaaacttgtggtcccagctactcagggggcttaagtggtcccagctattcaggaggctgaagtgggaggatcacttgagcctaggagttcgaagctgcagtgacccacgatcgtaccactgtgctccagcctgggcaaaaaagtgagatcctgactcaaaaaaaaaattaaattaaaaaaaaaaataataaaagacttagttgtgctctacccaattgggatcatcagtttgca

SEQ ID NO: 57600 - DNA, 608 bp, Homo sapiens
aaaatgtgggcaagagcctttattgtggttttcccaagaaggaatgggcaagatcaggtaagcagctgagcaggtttaggattgcctagtttgaataatttcagagggcaccagggtatgtggaccacccttagctgtccgatgtatggccctgggtaattagggcagggggatagtagataaacaatgagatctcaataaaagaggtagaggccaggcacagtggctcacacctgtaatcccagcactttgggaggccaaggtgggaggatcacttgagcwcaggagttcaagaccagcctgagcaacatggtgaaatcccatctctataaaaatgttttcaaaaatttgtctgagtgtggtggttactcagctaaacttgtggtcccagctactcagggggcttaagtggtcccagctattcaggaggctgaagtgggaggatcacttgagcctaggagttcgaagctgcagtgacccacgatcgtaccactgtgctccagcctgggcaaaaaagtgagatcctgactcaaaaaaaaaattaaattaaaaaaaaaaataataaaagacttagttgtgctctacccaattgggatcatcagtttgca

SEQ ID NO: 57601 - DNA, 542 bp, Homo sapiens
tttctttcctttctttcttctttttgggggggcgggggggcrcgtgggggagacagggtcttactctgttgcccaggctggagtgtagttagtgtaaacatagcttactgtagactcaaccttctgggctcaaaaggttctcccaccttggcctcccaaagtgctgggattacaggcatgaaccaacacacctggccacctaggtgatttgttagaagatggcctatagcactagcacttaagaacagctctctcaataggaagtcatcctaagcataagccttcgggccagaaagagaagcagagtacagtctacacctgggcctttccaacaaacacaaattaaaacaaaaatagcaaaggcaccactacccaggactaaaatactgccaagtgccccatccctacaacagccccagcttcctcacccgcaccctctgcctggttgtgagcatgcccagccccacagaaccgtgcatggccctcagcgagccctagcaattagggaagaggcctactgctgaaacagtattacaaaactt

SEQ ID NO: 57602 - DNA, 542 bp, Homo sapiens
tttctttcctttctttcttctttttgggggggcgggggggcgcgtgggggagacagggtcttactctgttgcccaggctggagtgtagttagtgtaaacatagcttactgtagactcaaccttctgggctcaaaagrttctcccaccttggcctcccaaagtgctgggattacaggcatgaaccaacacacctggccacctaggtgatttgttagaagatggcctatagcactagcacttaagaacagctctctcaataggaagtcatcctaagcataagccttcgggccagaaagagaagcagagtacagtctacacctgggcctttccaacaaacacaaattaaaacaaaaatagcaaaggcaccactacccaggactaaaatactgccaagtgccccatccctacaacagccccagcttcctcacccgcaccctctgcctggttgtgagcatgcccagccccacagaaccgtgcatggccctcagcgagccctagcaattagggaagaggcctactgctgaaacagtattacaaaactt

SEQ ID NO: 57603 - DNA, 540 bp, Homo sapiens
cttaagatgtggtaactgttatgttcttcaggatttacatcctgtcttttctattttatataagtggaaggaaaataatcagaaatgcattaaatgtcactataaatagctgtggcttagcacacttaagaatcaatctttctgcataaagtaccttaaagatcaaagagagtgcctgtcttttgacctaacagattctatattttacyttgctttaccaacaggtgagtcctaccatcattaatttggctaagaggtttatatttatggttaagttaaatgtaaagttcttcatgggcctataactcagtttcttgtctaaatcctttccttctcctgcataattcttaactttgggctcttttttgatagtaaatatgttggagaatgggcaagataaaaatgtaacttggctaaaatatgtaaaattttattatagtgacaataaacaaacttacagaatattaccacaccccttccaaattaacaataatattccttaatcacctcacatatccagtcattgttttagttttccca

SEQ ID NO: 57604 - DNA, 2053 bp, Homo sapiens
ctcaccctccttcaaacaaatgaacagtcagtcaaccacggtcaaaatctgagagcaaagctaaatgttcatgacaggacacggttaaataaattatgtaactgttaaaaaattatgagatatactgttaaatgagaaagcaagaggctgaagagtatattttccttccatttatattttgaaaaggtatttacataccagcgcatataggtacatgggaaactgcatggtagattcacaaggggattagaactgagatctggagtgggcaggagacatgctttgcaaacagaccttgtgtgatgtttcaatttttcatgcaaaaacaaataacaaaaatttacttctgatagcaacagaagcattgctaagaaaacccttttctactagattcctccctcacattgctataaattttaattgtcagtcctactgaccatgaaaagactaagaaataatattaaaagatcaaaacctttagctttacaaacccctgatggcaacaatgcaatacatgttagtcacatgccaggtccaactttctcatctgattaaaaccatgaacgattcctgtctctaaatgtgataccacaaatcttaaagatagtctcagaatatccaatctggagagaagtccctcttcagttttgaccgattgattactaaccaaagactctttcttcttctgcttgcatccaaaacagtaaaacctgcaccaggactttttcataggttaaaactctaacaaactcaggaaaatcaaaccaagccatttgcgctaacagctgaattctataccaatcatcttcactaaatcaccaagcattatcattcctctttattaatgactagttctttaaaattttcaagatggagtcagaatagtttaagtggaatatgagtggacctacactgggacactttctgtgggtctcctaccaagctggggttggaggttttctctgtgctcccagatcactctgcccaagtctttttcaaacacagtcacaaaccaccttccagattctgccacactcatggtccacccatgtgattatttcttttttttaatatatatatatttattatactttaagttctaagccatgttattatttctttaacactggtctttaaattggcttacttccttttagtgaaacacttgtgagataatgatctgatcgttagttatgttttgtaatatacaactgacctttgtgcaacttgagggttgtgagtaccagtgccctgtgcagttgaaatccatgcataacttttgacttctccaaaacttaactactaatagcattctgttgactggaagccttaccaacaacataaacgactgatgaacacatattttgtttgttatatgtattatatactgtattcttgcaataaagtaagctaagctaaaaaagttattaagaaatcataaaaaagagaaaatacatttccagtactgtgttgtgtttatcagcgcatcaactgtttacaagatgaatcatctgtatgaaatggcggcaatcacagaggcagacttcaacctacggtacatatcaagtaatttcatagcttttcttgtaattgcatagcttttttctgcttcttggcagcacttccagcatcactagtgcactttgaatgggtcccacagtgttattcaaagtttacagtgttgcactaaacatgatgaaaaatacatcagaactttaagagatcactttttacygtgatgtaatttcctggagagacaactgttcacgtggaggtgattagcgttatgcagtgttttaagtggataatcagaacacttgtgctcactacaataacaagaggtagctatgaaattattacagtaggtgcagcatgcagtacaattaatttatgccattataatttaatactgcatctttacatgtgtttaatttccctaaactgtgactggcgtcatatatagtttgatgtgttcatgtgcataagttttagtaaattttaactacttttttttttttttttttttgagacagagtttcactcagcagcccag

SEQ ID NO: 57605 - DNA, 627 bp, Homo sapiens
tgagcactgtaggatgttagctgcaccctggcctctacccrttagcagtggtacctcctccttccagggataaaacccagaaatgtctctagacattggcaatgaaaccctggaggttgtacctcacctctagttgagaaccagtgtcatggagtacctgggcttggaacctgaggcttttttctgggtcacaggggagagagaacagagttcaccagtgggcaggggtgatgaagattggaaagttgggtctgagtctcctttctaagtcttacaatattcttcatcagccgagctagagaaggttggtggatgtggagtttccttcactcattttaattcactccacaataaacctttgattgctactatgtcccagggactatgatagattcaggagtgaagggtgggagtcgcataagaacgaaccagatatgatccctgcagacagttctcacactgtgtggagctgctatgaaaaggaacacgttctgggtgctaggagaaaatgggaggaggacccaaccaacccacgggagggataggccaggacgatgcttgctaacctgggaatctgaaggtacggggtaagccagttagggggtggtgtggggcaggggtggtaga

SEQ ID NO: 57606 - DNA, 673 bp, Homo sapiens
tagcattaatgaatgatattcttttaaacaagactgtgtcctaaggatgaatcacatgagtgacaattgataacgtgaattttaatattttaaaaaattgattaaggccaaaaamgccagagtaatcaggacagtgtggaattagtataaggacagacttgagagcccagccacagacttgcaggtgtagtcacccggtgtgtggcacaggggccacagcaatgacgcagggggaaaatggtcctgactcagttggaaatttgtataaaagtttgcttgcagatggattactgacttaaatgtaaaagctaaaacaataaggttttagaagatggcatggaaaaatattttcatgattgtggaatgggaaaaacataagacaccataaaggaaaatgttgctgacttgaactgctgtaaactttaattaaaattgaggactcttgctcataaaagacaccatgtaaaaaaataaaaatgtgagccacagagtgtcagaagataatttatatctatgatatatattagataatagattattgattaatataaaacaaaggatttgtatccaacatccagaatatatcaggaatttctaaaaattaaaaagaaaaaatgactaggtgcagtggttcacgcctgcaatcttagcacttaaggatgctaaggtgggc

SEQ ID NO: 57607 - DNA, 2337 bp, Homo sapiens
ttttcctttgtatcttttagcagttccatgtcatgacatgccttttccaggtctctggttgttcctccactcttgggctgttgagttccctaatcctaagctctagtcattgctagagtccaggtgggttctggaggcagcaatgccacacctggcaggcagcctggcaggctccatctctcagtgcagttatcttcacggcaccagcgggagaccttggaacctccttttctccttggctaaaaaggctggatccacattctctgcagagctaggggctaggagctgcgaggattcaacacatcttttctcctctcctggatgtcttgccaggaccacttccacaggctcttcccatgcaggggcgcaggggcctctccaaggagcagttgtcctgcaggagtagagggacctctccagggtcctccacaacaagccccagagggaaactaagtctccttttgcacctggcagggctttggcccctgcctgctccccacaggcctgtagctgtgcatctcagacgagggccctgtgcttgcattggggtcgggagaggagagcgctggagtcagagaaatcccttcctgcttccatctttcctttggcttggcgcaccaaagcacacgcccctctgagggcatttacggtcattcatattcatgacttgctggcccaaattctggctctacttagaataaatatgaagccatttttcagaataaagtttttatttcytagttgtaaggttaaaatggccattaaatgattagtgtgactgaagacatgaagtaacattcatttgaaaatcgagttctttgaatgtgtgcaatccatttcattaccatgtatcttctgtggctagttttggcttttcttttctgagctttcctggggtggcacgggatcaaaagagcatggtggagtgaaatgtctacattttatgcagggactacatgaccaaatcccaagatccattaatggaaaaatggatatgcatatacctcttgtgccctattatgaaaatgggccttatcttacctgattaaattgtcagctcttattaaaatggatccatgtagctaaagaaattcaagcttggtggaacttgcagagaagtgtagctaaattgttacctcagtgacatctgtgtttcttatcagaatctcagcctttctgaccctttggatgtggagagatgtggtaaaaacaaattgtctcactctatggctcctgagggggaaagaatccccaaattaactttgctgggggtctggcgagaggggaagagaccacgtccacatttgcatttctgtgtcttacagattatctttcctgccttgaatagcagagctgagcttctccctgaaggctgaggactttttgctaaagcaatttctctctaccttttaaaaaagtgcatatatatggtgtattttttttctttcaactgaggatcaagtctgagaaagaaaatgaggaatcaagatagccaaacaattcaggcaaaataaattacctgcaggcatttttttggtgatggttgttgctttgtgagggcttctgggtgatgcccaggtgatgctggtttcccctgggctcagttttactcagggactgagaatgagtccggcagaagaccaggacagactgctacccgagcaaggccgagaggtcagatggcttctccgaatctgtgtttctggatggagcccagccttgatgcgggaatcatcctgtcaaggtgggtggaagggaagcctcagggcaggaactgcatgcaggaaaagccacactttgggttcagtgaacacaaccatcccttccgctcaagcttgtcccacctaatttcaactccaggcttcgagctcagccacttttgacgagcttgagtacctctttgcaacctttgagtcgaaggggagggcctctggatttgcggtgaagcaatctcctgtcaagctggccttgatgggctcctccctctgcatatggctcgtcttgtcacgcagcagatgcttcccccattctaatgtttgtattgattcaaccacaccactgtgaggccttttcggcctgggaggtatataagaaccctttcatagacagaggttccctatcacctaagaactgagggccaggagctgttttcagcaccttatatgaattatcacacttcgccttcacatcaacctgggaggcaggcacaactcttagggcccttttacagttaaggaaactgaggcacagagggcttcagcagctcacctaagttcacacagctagcaatcagggcagccaggggtgaaactcaggtatattgttttatccacaaca

SEQ ID NO: 57608 - DNA, 1039 bp, Homo sapiens
cagtttcacaaacacaagacaaatgtaaatttcactggataatctcaagccccttgcgtctggtcagtgtctccgtcatgtcataatggctaaaacgcattgcacgtttatcatgagccacacacctgctaaacgctggacaggtgttatctcctttaatggaagaaatgaccttgtggagagggcactatgactactcattttacagatgaggaagttgagctccatttaagtctcttaccaggtgtcacccctccagtaagactaaagctgcgagtttgcaatatgaataatcactgtacatgattaggagaaggtaaaagtagaacagcttgagttttgacgcctggtccaggttgactcttggtgccaccacattttaatgctgtctagccttggaygagccacgtaacctcctggcctctgtttgttcctctgtaagagagaggctggcataggctttgttgggctgggaattattaaatgaggcaaataaaggttttcatgggctcagcacagtgctatcatggaacgctccctcaaaaaacagtgtgttattagatacagttttacacatagtttccatctctctcagaaaattatggtttataataaagacattttaaaagcctattctactgaattttgtggtcacttgggctctagctgaatctgagacccctggagtgtgaagcacagtcttctggcccttggcagccagggtgggttgttccagctttgctttccctgtggctggagtgtgggtctctcctggtgacagagcaggggcaccagactcaaggatgatgacaacagccaaatacaataatgcacgtgaaagcaccccgctcatgggtaccgcactgatgtgatcatgccactatctcagtgcagcaaacatttatggagaagatagcacttttgagggcctgagttgggtgctgagacagcaaagatgcagagaacacaaggaatccctgtcttggaagaactcacagtcttgaggagatgacacacataaagagatatttttccatgc

SEQ ID NO: 57609 - DNA, 1499 bp, Homo sapiens
gggatccaaagagagaacactcactgccagttaaagaatgggaggaacagaaggatggatggagggagggaaggaggggattttgaagcatagtcttactgagtgtctgctgcttatcccccccaggccccttttttccccctattttcttaagttgccaggtctccattttctccctttaaagggaagaaggagagaaaggaggacaaaaggaagaaatcaagtcctgtggcttccgttccttagccctagggcccaccctggggagcgaaagggtcttagtttgccccacccatgttctgcagctccaccctctcccctgctggggccctctggctgggacccctctccccagcagtgtcccttactcctggctttagaggctgtaactccmtgccctcatcagggcgccagttttccagtaagctgagctgttagtgggtgtgactggattgtcccgggctgcctccccacggcttctctgccttttcccagtggcctccaccatgtgccttgtaccttcatgccacaggaattctaggctccatggcagacgtggcagagtgagcgggtgggtgaggggtgggggcaattgcaaataggctctgtacccctgaatcataagccataaggtcctttcctgggttgttggcctgtaaaattggctttgcagaaccacagtgctatcaataaatacggccaagctgatctagtgcttggtagtttggggcacctggctctttcctcttgaaggttgaatataatgctcgtgctcttttacaggtggccagtggcgatttcgatgcttgcgtccaagtctgtgaatgtaaaacccctcgtcacccataggtttcctctggagaaagctctggaggcctttgaaacatttaaaaagggattggggttgaaaatcatgctcaagtgtgaccccagtgaccagaatccctgatgttaatgggctctgccctcatccccacagtcttgggatctcagggcacaatggctggacatgggtgggctctgatgcagaactttctcttttgaatgttaagaataactaatacaattcattgtgaacagaagtccttaagcagaggaattggtgtgccttaaagatacaatctgggatagtttgggggaacttgtagccagaatgccctgttcatgctgagcaaagttcagcaagtagagcagagtttggcaggcaggtgccaggaactccccttcttcctggagtgccttcattgaggaaggaaatctggcccttgggtttcctggttccactgctactgacccagaggggaatgagggctgagttatgaaaagataacttcatgaagacttaactggcccagaagctgattttcatgaaaatctgccactcagggtctgggatgaaggcttgtcagcacttccagtttagaacgcaatgtttctagagacatattggctgtttgttttgatgataaaaggagaataagaaaaggcatcactttcct

SEQ ID NO: 57610 - DNA, 1801 bp, Homo sapiens
ccacattagggttgagatcactccagttccttgggatgtccagcccaaaggccagcagggcctggctatagctgggcagccccatatctcggccacgttggatgctgctggccacatagtctgtacgggagaatttgccagggccaggccagtaatctgaagaggagagaagactagactatgggctttgtcctctccatccttttttgccctgcagccttgtatctgactattggcactacggttcttccctcctggctacccccagtgatccacatgagatctgtgcccatgctgaccttgccttgctgcaaggccaatgtcaccatgggtgatcagagccagtttttccagtaagacccttcctctaagactcaagactgttctagtcaccaagcagtaaattccctgtcctatgcctccctagtttcaagacagggctgaatgaaaacctttagagacctaattaagcaccaaagagattgtggtaccacccctccccaatactcagacatagttaatttaaaataaaagcaacacaaaagtgtaaattaagcaaaaaaaaaaaaaaagttcaaagttcattttcttcttatggctccttgaagtctgtgtttgtatctgtgttcctgcatcgtgagygccctaggtctgctattgatgaacccagagggatcctcaggcttcctggtcccttaccatccaccccttctggctctgagctcacccctcagatcttcaaccactatgttgtcctccaactccgaaatctgggaggccattcccagcagcagctcattcacctcctgggtactgttcagattggggttctggaagtaaacaatgcactcaagataggcctctacccaaaactcggtctctctcagcctggaccactttagtaccccaggacaaagggcccttggccagtcccagactctcttgaactgttgtccccggataatttcctctacccttcatctcccatgaacctggggcagcaacactcaagaactgggattgttgcttttcccagcctgtgtgaagagactgaccttgacccatcttcccctgaccctgaccccagtctgacctcccgaatccagtagttgttgcagaccctgagagcttgggagctttgaaaacccttgttcaggaccttccggaaatgacagctggcatttctgaaattgagaacaaaggatgtggtgagggaatttggagaagaatcaaagatggggttgagtgggctgagggactcagtgggggttcactaggattgagcagtggcccaggaacttccttgaacacggcagagatttggtgatgtgcgtttactgaagatagagtgcgctcctagtccaggtagggtggggagaggagggaagggaatgacccagctgctagacaaatcctacacccagccaccaaatttcagcccttaggagagctggagagatttccctactaagcctacacatcttaccccagggttctgtttcagggccccaaatttttgcttccccttctctagtgaaactgcgaaggagtgtgaaaggccccagcccccaaggcagctcattctgcacctttcttagtgtggtgcccctctctgccaacccctccctcacctcatgtagacaccagggggcaccatggtagagaagaactgctcagaggccaccacaaattccggggagatgctggggtctaggaaaggacggtatcctgcaggaaggagacggtgatgatggggagacaggcttcttgcctccacatcctcccatcacaggcacctgtc

SEQ ID NO: 57611 - DNA, 853 bp, Homo sapiens
atatcaacacattcagaagctcacacaaacatgtatgcttatttttattaagggtcactaaaacagtttagaaaaagtaaaatccatggaattcatggatgttaaacattggtattgaaagcaaattgaaatcttaggattatggtatattggagtccaatttgtctatgatgaagtatggatgtttttctttgttttgttttatttctttttaaaccaagacagatagttctctcactagagaaaagttaatcccatggtagtacagaattcagaaaaggtttagacttaactagacagtctgggttcaattttatgtttgccctatgaatttggaccaattagcttagtagtttgggccttactagccccatctataatacaggcaatacttgtgttaggccattcttgcattgctataaagaaactcctgaagttgggtaatttacggagaaaagaagttkaattggcccaaaggtctgctggctttacaggaagcatggtgctaacatttgctcagcttatggcgaggcctcaggaagcttataatcatggcagaaggcaaacaaggtgcaggtgacttgcatggcaaaagtggaagcaagggcgagcaaggagggaagtgccacacacttttaaacaaagagatcttgtgagaacccactcactatcatgaggacagcaccaaggggacggcgctaaaccgttcatgggaaatcaccccccatgatccaatcaccttccaacaggccccatctcgaacactggggattacatttcaacatgagatttggagggaacattcaaactatatcaatacccacctcagactgttggatggactaaattaggt

SEQ ID NO: 57612 - DNA, 602 bp, Homo sapiens
ataatattcaagactctttaagagcattacaaatagtgtggcttagaaagaagggccttttgattattattttttctctcatagtttctttctccagtgagttcttgactgtgtaaaacactgcatcctgaattcctaacataataagcaaatatattcctagattttgttttttatttgtttatragtagcatttctgttacacaccgagtgtggtcctttctgtattattcctttgaaagactttgaatgatccatactgacttgaaaaattcaataaaaatgagagaggattgcaggataatggttaccttccaagcagagatgaagcttttgatagtttcctttctctatttaagaatattttgtcctttatccttgttcctcaccttctgtttgcaatgatcctgtgtataatgaggtgtggaatgcacagtgtcagagaaggggccagataagagaaagagcataatcacatagtgcttgtctaacacacagtatttctctccattacccttatcttctacactgtactttgattactataccttttgcagtttaaaatgaatacgttaagtatgcagctcttatacaataataat

SEQ ID NO: 57613 - DNA, 621 bp, Homo sapiens
tttctagatttctctcttgacaatctaaagtttagcatttgatgagtcaagaaaccatgtagaatggaaagtataccatactataagtcagagaataaataccataagtcagagtcaaagtataccatactataactctgtcttatctgtgttaaaactaattgtggttttggacawgttgcccaaactgagacccagagtttttgcccctctaaagaaaaatgagtaccactcattctgtctactctgcctactctatagacagaggttgcaaaaaccaaataagctgatacatgaggaggaggtactagatctattcaaatatctgctatcactatcatgattgctattattgtcattcttgttactattactgctctctcaactaaagaaacaaacagatgatattgcaatttgactttactttctggaaaaggagaaagaatattctggaagtcctggccaccaagttatccttggcctatggcatcaatcgagatcctttttttttttttttttgagatggagtatcgctctgatgcccaggctggagagtgcagtggcgtgatcttggctcactgcaagctccacctcctgggttcatgccattctcctgcctca

SEQ ID NO: 57614 - DNA, 621 bp, Homo sapiens
tttctagatttctctcttgacaatctaaagtttagcatttgatgagtcaagaaaccatgtagaatggaaagtataccatactataagtcagagaataaataccataagtcagagtcaaagtataccatactataactctgtcttatctgtgttaaaactaattgtggttttggacaagttgcccaaactgagacccagagtttttgcccctctaaagaaaaatgagtaccactcattctgtctactctgcctactctatagacagaggttgcaaaaaccaaataagctgatacatgagsaggaggtactagatctattcaaatatctgctatcactatcatgattgctattattgtcattcttgttactattactgctctctcaactaaagaaacaaacagatgatattgcaatttgactttactttctggaaaaggagaaagaatattctggaagtcctggccaccaagttatccttggcctatggcatcaatcgagatcctttttttttttttttttgagatggagtatcgctctgatgcccaggctggagagtgcagtggcgtgatcttggctcactgcaagctccacctcctgggttcatgccattctcctgcctca

SEQ ID NO: 57615 - DNA, 753 bp, Homo sapiens
gtggtctaagattctccagaatctgctatcttcaaaattattttgccatctcatggacccaaatgccaaatcatgtcttaggcccaagagattatgtatccaaatggtaaggaaatctaaagtcttctgcctgctagttctttgaataaaagagtatatagcctttaaaaaaattacatatacaaattcccccattccccgactacctcgtatatagagaatatacctatgtgtaataatatctcagggattaatgtaatatggtattgtggccaaagcagatgtgtgaaatcacagcaaataaattaacactgcattaagaatcaaatcattcctgctgacacataatctttcacttttatatcaagtcgtgattcccattcacatcaggagcttcccaggggggctcattaaacctgcacaaagagatttctttgaagtcagtgctattcccatgaatagcattcagctacagtgcagaagagcctgcccgcctggtgtctaggcacccttcccttcactctcattgttgctgtccagccagaggcccagcaaggcaggctatagcagggcttcctgctgagtgcctttctagtctgtatgaaagagatgaggaaattgcaggggaaatgcacatyggtaggacctgcccttgacagaattgttaagctgggagaatatatttcttttcccacatgtgcccttcctgctcttcttccacatcagagtgtactgctacaagagctaaaagtt

SEQ ID NO: 57616 - DNA, 1438 bp, Homo sapiens
tgttgctctcggattataccctttctgtccaatcacatttttatacagctgtccattcttcatcaaacccaagcataaaaaagaaagttcttcctggcttttgggtcttcatttctcaaggctcctatgtcgtgtaaaactttggttaaataaatgtattatgattttctctagttaacctgtatttttttataagaatattggccatgacccttatgatgggttaggaatagtatcataatttcctgttcctacatttgaaaacacaatatttctactgcactatttctgacctccttaaaggaattctagattatttccttttcaatccattttgtaatcccttataacaacttctcacccagatctgatccataagtatttataaatagcctatactttgtatatgggtttgctggttctttcatttaatattctttaattcttcttccttggtggcttctgcccatttagcattcttttaaacttcccagtgtttaagtctcattgctcaaagtgggaaatccctaaacttgtgaggcggagcttacttcccactatagaagctcccttgtagctatgagtaagccctaacctactccaccccagacataagcctccacctcagatgagtctccacccaacccagccacgaaattagaggctggtgacccaagaaagcagggaggctgctggatccttgctggggagaatggaggcagctacctccagtttctattggcaacattctgagtcccacatcatggcatcagcaaaatgcagcatctatggtatctgtgccatttgtgcctgtggtgtcttcatggcaccagctctgtggtctgcccatctcttcctcctagacattttatgagctagccaatatcctcttaacaaaatccaattctgcttaaattgaaaagggtttgtatctattatgagtcacttagtgttctaatggtttacttaattttacacatacctttttctatgtcacagcactttacaaatattaatcatttcattcagctcagatgccaagtctctggagtagaaaatattatccccattttatacaaacggaaaccaaggtccagagaggatacttagtttgccttagataactcagttggtaagtgcagaactggtattcaaatccaggctgtccatgctcttaaccattcttttcccctgayccccagagagatctttccccattatcttctcttgcaaatcccctctccccaccacttctctctgccttcatgcttgggcattccctatcctgtaatgaaagaaagaaagagagacagagagagaaagaaaagaaagaaagagaaagaaagaaagaaagaaagaaagaaagaaagaaagaaagaaagaaagaaagaaagaaagaaagaaaggcaaatttcatgcagagtaacaaaggtaggaa

SEQ ID NO: 57617 - DNA, 806 bp, Homo sapiens
ttaataatagatctacaactattgaatgaatgtttactggagaacaggatatttatactcagatatttccatacagattacttgtttacaaaggagaaaaacatgcttttccagtagaaaaaaccagcaaacatcaccttcactaagtaatgaatgttaacataaccaatacgggaaaaacagacagcatgagctctctgatgcaatgggaagaacacactgcttacctggtataacctgaatgtaaccatgaagaaacaacgtgacagtaccaaattccctaaaacaactggcctctccacactctttaaaaatatccatgagtgaaagagaagggagagctcggaatcctttcagatagctgtaccgcggtgacatcaaagaatgtctttactcttccgtgctacaaatggaggtacttacggataaatggtcataatgctgcaacccttactctcaaaatggccaaaaaatgttaaacacacaaaacccaaaaaatggatactaggaaaacatccatcaaaaggagactggcttgaaaaaaatcgcacataaaaaaaggaattatacgaagtgttactttcaggggaaaatctgaaaacatgagtaataaatataggccatatttgtgggacacttygttttatgctgataaagcagaacgattaatgacacagtgaggcagaataactgacacacagcctcctacctgttgtcacttcgggtttccatggccacaggattgggagaggcccgatgtccggagatgggaatcaggctactcctctcggcagggtagtctggct

SEQ ID NO: 57618 - DNA, 823 bp, Homo sapiens
ttcttccaactggccactctccctgtgaatcattttagcagtgcctttgtaacaatattttcaaagcatcttccaagtcccctagttctatgaactttgccaccaaatgagtgaagaataggcaaggagagaggaaaaaattgctgacagcgatttggaaatcagcaacaatgggaaagggaaatatgtcacatgaaagtttgaaagacctagaataaaatgagctatttggaaatttgccctggtggggtgaagattcccagcatgtcaggcaagataaaggtccaccttgtgtaattacacaactgtttcctaatgtcctgtaaaggacagaaacaccaacagtcttcccacctctacaggcaaactagaaaaaggagctcccctgcttacaggcccctcaggatgtcacctgaaaagaaaaccagcttacagaccctggattctctcctatgatgtgtcctcctaaagcccaactcaatcgcttgtttgcacatctacgcttctgagaacttaggtccagctataggcactgctaccagcagaggagtgaggtagccaggcggtgcagaagaggtctctcctctcacacctgcgtgcagtgatgacatcaggacctcctgtgggcatytccattccattccattcctcagcaggctacatgacggagctctgttcagtaatcaggagactcaatgcaggaagagtgccagaaaatccaactgagagtgggatgaggatgaaaatcttcacggcctactgagcaatgagatctgcaacgccacccaaagggcttccgatcttgatgtgggtctctgtccag

SEQ ID NO: 57619 - DNA, 431 bp, Homo sapiens
aagagcaaaactccatctcaaaaataaataaacaaatagaaatactcattctaggccagctgcggtggctcacgcctgtaatcccagcactttgggaggctgacgcgggtagatcacctgaggttaggagtttgagaccatcctggccaacatggtaaaactccgtctctactaaaaatacaaaaatgagccgggtgtggtggctcacacctgtaatcccagctactcaggaggctgaggcaggataattgcttgaacctggaaggtggaggttgcagtgagccaagatcccgccattgcmctccagcctgggccttcccgggcaagattccatctcaaaaaaaaaagaaaagaaaagaaagaaaactcgttctggatgctgaaggagaattgaagtggaacagggcaagatgggatggactcagataaag

SEQ ID NO: 57620 - DNA, 911 bp, Homo sapiens
cattataaatgcacagaaatgttagctattttttactatcattgccattattattttctattgacagtaaaggaaagtgaggtaatgttgtgaatttaaaagtaacataaagcttttcaatcacttgttaaaaatagcattgcagagaaacattgaaccctccttaaatgtaaatagcaygattcatcgaacatctagtcaagatgactaatctttttttctagtaacgctcaacagtctagaaggtacagaaggcggtgggtatcaaggtttataaaaggtcaggaattggaactctggggacctggttgttctcatgagggcacataccaagatcagggtgagctaggaagtttaagtgataggaagataatagatttatttagagaggggaaattgagacagtttcaagcctcggagatggaacagaacaacagagctccaagcactgggatgcagggctggaggtgaccaagtccacgactttgtctttctaaagtgaagtggaggtgagtctgaagaaattatcactgtgattaaggttgttattgagggcaacagggcaagctagcttaggaagaaaaagtttggcctaggtataagatgtagttgtctaatattgaacagcacagattttagaacattagcatcaccacagaaaattcgattgaacagcactgtactagaggtacaggaaagtgagagggtagggtcttacagaaaatgttggagcagaagaaactatgccaaatgaggatgtgagcaaggatattctgtatttttgacaattttgaagcattatttattattttaacgtttctgaaatttggatgagtcatgcaattgatgtgctcatttaataaggttagtgtttatttttgtcctgaaaaaccattaagcaattaataatg

SEQ ID NO: 57621 - DNA, 708 bp, Homo sapiens
tggggaaggcattatatttttttaaaacctgttttagtatctgcaaatgagggagctagagtgtctattgtctttaatattcttcctagccctaacattttacgagccatttctctgaagctgtaaattgctaatgctaaacaacctatccagtgcattatgtattattattatatctgcttttttagcaggaggcttacacttgcagcatgctgttatgtaaatctttatcacaatcatcagcatttattgaggacctctgttctacggcaaatgtcaccaaacagtaccaagaatgaatgtgaaggaggccacattttgcagattccgttcataactctggcaatctcagaccacacacagactgccagtgcctggtcacaccattgtcctgccrtcacccactccccttggaaggaattgccttgatatgtggaggctggcaccctgctcagttggctgcagggagccttgtagcacttagagggatgggcatgtgggctagattcctttggataaagtgataggcacatcacactctggtgtgcaggctctgacatgccacagattagcaggcatgcctctggtaagaggcatgtgactggccttttggtccatgctatgaaacccttgaattctccctgacattctgtacagccatttccacccagttagggcctatttttttttaatgcttcaagtgcaaaa

SEQ ID NO: 57622 - DNA, 544 bp, Homo sapiens
atgctgaaaaataggaaaacactcacaatgcatgatttacgatgtgagggagcctgctggcatggcccttgtcacgagagtaattaaataaccatttgtgtaattactaatttatatcctgtctccctgctggagtgtaagttccaaaaactggagggaatacactgctgtcttcccaacaccaagckcggtgcctggcatgaaacagacacccagcaaatgtttattccaaatgagcgagtgaacagtacgtcacattaaaaacgtgtgtgtttatgtatacatcgatacataggctggaagcctctaggcaaaaatgttaatagtgcttatctctggaagtggattagggtgattttaatttttttcttttttctcctccgtattgtctgaattttctgcaattaacacagaggaccaaactagcatttccttgggtaaatgcgagtggagttggagccaccccctaccactgtgcctacaagagcatgttttcttgtgattccagcttccttgggggtttcaatatgtagtctctagaatt

SEQ ID NO: 57623 - DNA, 726 bp, Homo sapiens
tcccacagtgctcttttgcacatggacccctccactcccagttcagaatgaagtccagtttacttagcttggctccagggtgcagcctgtacttcctcatccaatctctctactctagcaaaatgggtttccccacggtccctagatgtgtgtgagatggttgaccttcttgcattatcagcttctccttattccacttagatgcaacgatctcattcraactctgtcttgtcctgctagtcctgctagccctgctaaaccacttgagcccctggagtctcttcctccctggagcttctacagcattcctatctggaccattcgccaggtggttaacactggaaacaaaaactatgttgtttgctggtttggatttcttacagctcccaggagaccacaagctacttggaggtaggaccaagtggtgtacataacgaccagacagccacaaagagtcccttgctcagacaggtgttcagcaactcttcccagagcaaaacatgcctgtcttgcccactgcggagtaactgcaaggcagcgcactgctcctctggggtctcagacccaatggcagccttacaagaataaactcaagctgttttaaaaaatatttttaaacagcaaacctctcctctctaaatgacatttaattgcttcaaagatcaagagaaggcaacttctttgtggctgggcgtgcaaacaacctgcgttcttcagggctctggg

SEQ ID NO: 57624 - DNA, 1036 bp, Homo sapiens
taatcacctcctaagaagcaatcaaaacaaagttacttagtcggtgtttccagaccaaatgagtgcagggcaattaattttatttcccaaacaaaatccagttagtgctattgatatgtaataatgctttgctatcatattgccattgtggtatgcatgcccatctcaaacatttacaaagacatttcaattgcatttgaactctctaatcctgtcctatgtataattcaagtatttcatttaaggacacctacaaaccctggggattatagattgaacatctccctttgtgagaaatgaagaactgcatgacctaaattgatttatgacattgtaggaatttgaatgttagttgaagatgctggcatgtgagagtcaattacttagtacagatatagatagcatatgtctcccaatttacctatataatagttgattattcactgtggacaaaataacttttggaaagcaatggaaattgaggtttttttgtagaaaatgagtgtccactgttaatgccagtcacataagtcaggagaaaataatgacatcttcataacaaaagcaataaagcataaacaaaaacaatccctccacaacatcccccccataagagggcgaatcttattgtcatattaagttacttattcctaaaggtcttagggtgcrtgcctcataaacaacaaagctgtaataagtgtgattaaatgaaggtataattatttagattcgtgtataacatttcctttggggatgaattttggatttggctattttcatggcttagtcaaaagaggagtttaagtagactgttgtaaaaggtggaatgcattaactctttcgggtcctctgagtgtcttttaagtagtaagacttaatctgttagaagccacttattcacttgggcttcacttacatcccttcttattcttaatgcaggccatgctatatttatttttttcagccaaaaccaatttgttattttatccttttgtttttcatttaagaacaaagtactttcttagaatagacacta

SEQ ID NO: 57625 - DNA, 745 bp, Homo sapiens
tgcattgcaatattcttttcattggaaaaaaattctaggcagtttgaactttaaacgttcatcaaattgttttttgcaattactatacataccaaggtatgtgttgtctcaatatttaacttgcctttaaggtaattctcttttctacatattttttttcactgacattgaaattccatggagatattttacagacagtgtccttggtcatggtattagttgtgctcatgatggtcaaaggaaagtatttttagaagaaaaataaccttggtggccttgtatttaattggcaatagctggaaaggactgtaatataaatattgagattatatatatggatatatagacaattaaactacatgttygtccccctaaaaaggacagaaaacataatggaaatttcaggggccagattttagcttataagctaatcacaagtaaatatttttttaaaaaaacagataataacaacatcattttgccatgtttgtgtgcgtgtgggtacaggtgcacctgtgaaaatggaatagacaccatcagatgctgtgagttcactgacatgaaacaatcactttctggatgaggctgttataaacagtgttaataagtaatttcaataacatgacaaggcaactgaccctggctaggccagtttaaaacctccagccccataaaatggagtacttagggaggtatttggtgctatgatgaaaagttcatccacacaggcaattcaccacctatt

SEQ ID NO: 57626 - DNA, 1788 bp, Homo sapiens
tgcagaggcagtccagagttcagcctactggttaaaacattcacaccagcaacaaacctagatttgactttttttttttttttttttaatcttttgagacagactctcgttctgtcaccaggctggagtgcagtggtgcaatctcggctcactgcaagctccacctcccgggttcatgccattctcctgcctcagcctcccgagcagctgggactacaggtgcccgccaccatgcctggctaatttttcttttttttaatagagacggggcttcaccatgttggccaggatggtctcaatctcctgacctcgtgatcggcccgcctcggcctcccaaagtgctgggattacaggtgtgagccactgcacccaacctagatttgattttttttaaccatagctagctagttatgtaggctttgagtgatgtgtttattttttctgaatgttgctttggtttttgttttcaccttatttctaaaaggcttgtgtactgattgactggagggtggtgagaaataaatatgacaacctcatccagttattggtgttgctataatattaaattatacaacaaatataaagtacttagcacagtccctgccacacaggaggtatttagtaaatgacaggtcttattatgaaggtcagaattttgaatatatctccctaatcagactgttagatctgacagacctactttattctgaaataaaacttaactacacaagaaggtaaagtctgatcatgtttgctgactagctgtaaagggcatcacaaatacagtatattcattttcaaacacagatgaggcactaaagctgatcaaatcatatgttttatgttaagtaaagatttgggctcatttttttaagtatataaaagcaaagatttgagaaaccaccagcagaaacatgtagaaaaatgctggagctaatcatgcctcatcaggtctacctcttggtagagatcttagccatgcttgctgatggccatgtggaaaactgtatctttcagcctcctgagagcattcagagctaaccggtatttgttttcattttttaatttattttttcctgtggacaatacagctccactatatatatatatatatatattttttttttttttttttttttttttaagatggagtctcactctgttgcccaggctggagggcaatggtgtgatctcagctcactgcaacctctgtctcagttcaagccattcttctgcctcaggatcccaagcagctgggtctataggcatgcattaccatgcctggctaatttttgtaattttagtagagacagggtttcaccaacttggccaggctggtctcgaactcccgacctcaagtcatctgcctgtctcaacctcccaaagtgctaagattacaggcrtgagccactgtgtccagcccacagtatttttttatgccaactaagacaataggagtcaaaagttcaagggaaaagaacctttgagttcaagtgaaaagaacctctggcaatgaatccactcggaggaagtggttaagttcaaccattgcaattttagccaatctagactctaaattagaataaagtgcatggcagggaagcataggcttttattgcttttggtggtagtggtagtttttttctttcagtacaaacttggaaaagcaaaaggcagtggaggcaaaatgcttgcattttttgagatatttttgtttctgtttctcatttggaggacaatcctgtaggagaacacaaaaataaagtgttctttagagctaagtcatgg

SEQ ID NO: 57627 - DNA, 1788 bp, Homo sapiens
tgcagaggcagtccagagttcagcctactggttaaaacattcacaccagcaacaaacctagatttgactttttttttttttttttttaatcttttgagacagactctcgttctgtcaccaggctggagtgcagtggtgcaatctcggctcactgcaagctccacctcccgggttcatgccattctcctgcctcagcctcccgagcagctgggactacaggtgcccgccaccatgcctggctaatttttcttttttttaatagagacggggcttcaccatgttggccaggatggtctcaatctcctgacctcgtgatcggcccgcctcggcctcccaaagtgctgggattacaggtgtgagccactgcacccaacctagatttgattttttttaaccatagctagctagttatgtaggctttgagtgatgtgtttattttttctgaatgttgctttggtttttgttttcaccttatttctaaaaggcttgtgtactgattgactggagggtggtgagaaataaatatgacaacctcatccagttattggtgttgctataatattaaattatacaacaaatataaagtacttagcacagtccctgccacacaggaggtatttagtaaatgacaggtcttattatgaaggtcagaattttgaatatatctccctaatcagactgttagatctgacagacctactttattctgaaataaaacttaactacacaagaaggtaaagtctgatcatgtttgctgactagctgtaaagggcatcacaaatacagtatattcattttcaaacacagatgaggcactaaagctgatcaaatcatatgttttatgttaagtaaagatttgggctcatttttttaagtatataaaagcaaagatttgagaaaccaccagcagaaacatgtagaaaaatgctggagctaatcatgcctcatcaggtctacctcttggtagagatcttagccatgcttgctgatggccatgtggaaaactgtatctttcagcctcctgagagcattcagagctaaccggtatttgttttcattttttaatttattttttcctgtggacaatacagctccactatatatatatatatatatattttttttttttttttttttttttttaagatggagtctcactctgttgcccaggctggagggcaatggtgtgatctcagctcactgcaacctctgtctcagttcaagccattcttctgcctcaggatcccaagcagctgggtctataggcatgcattaccatgcctggctaatttttgtaattttagtagagacagggtttcaccaacttggccaggctggtctcgaactcccgacctcaagtcatctgcctgtctcaacctcccaaagtgctaagattacaggcgtgagccactgtgtccagcccacagtatttttttatgccaactaagacaataggagtcaaaagttcaagggaaaagaacctttgagttcaagtgaaaagaacctctggcaatgaatccactcgraggaagtggttaagttcaaccattgcaattttagccaatctagactctaaattagaataaagtgcatggcagggaagcataggcttttattgcttttggtggtagtggtagtttttttctttcagtacaaacttggaaaagcaaaaggcagtggaggcaaaatgcttgcattttttgagatatttttgtttctgtttctcatttggaggacaatcctgtaggagaacacaaaaataaagtgttctttagagctaagtcatgg

SEQ ID NO: 57628 - DNA, 914 bp, Homo sapiens
gccacaggagttggagaatcagactaacgtcttagattcttttggatgcaatttggggaagagatcagagtagagcaagactagaggaagagagacccaataagagatgcacaggytcagagatgaggaggagtttcctgacgtctgtctgcacagctgttacagaaggctcaaaaaacaagatcctttgggaggccaaggctgagatcaggagtttgagaccagcctggccaacatggcgaaaccccatctctaccaaaaatacaaaaattagctgggtgtggtggtgcacgcctgtaatcccagccacacaggaggctgatgcaggagaattgcttgacccgggaggcggaggttgcagtgaactgaaattgtgccactgcattctagcctgggcaatagagggagactctgtctaaaaaataaaataaaaaaaataaaataaacacaagatccctaataagaaaatgaagcagagcttctgaagcccagagagacctgattagtgcatccccctgaagggattaggcaaagtcagaaccaaaagggagcaagacaaacaaggaggatggagaagaaaagggagaagtgggtgaaacaagacaactcaggatccaagatcatgcacactgaacagacatcagctgctccttcagggcgcgatgtacttctccaggctgcagcagacctttaaagagggcaaaacggggatgaagagggtgcccatttaggtttttaataccacctggcattgttactaaagagtaatttgaagcatttaacaaagtatactaatgcacagcattttaagtgaaaaacaaaaattgatgaaaatatgttagtctattcatctgtcatgaaacacccaggcaaatacaaaatattgaatagccagggctggtgaaaatgttgtt

SEQ ID NO: 57629 - DNA, 914 bp, Homo sapiens
gccacaggagttggagaatcagactaacgtcttagattcttttggatgcaatttggggaagagatcagagtagagcaagactagaggaagagagacccaataagagatgcacaggctcagagatgaggaggagtttcctgacgtctgtctgcacagctgttacagaaggctcaaaaaacaagatcctttgggaggccaaggctgagatcaggagtttgagaccagcctggccaacatggcgaaaccccatctctacyaaaaatacaaaaattagctgggtgtggtggtgcacgcctgtaatcccagccacacaggaggctgatgcaggagaattgcttgacccgggaggcggaggttgcagtgaactgaaattgtgccactgcattctagcctgggcaatagagggagactctgtctaaaaaataaaataaaaaaaataaaataaacacaagatccctaataagaaaatgaagcagagcttctgaagcccagagagacctgattagtgcatccccctgaagggattaggcaaagtcagaaccaaaagggagcaagacaaacaaggaggatggagaagaaaagggagaagtgggtgaaacaagacaactcaggatccaagatcatgcacactgaacagacatcagctgctccttcagggcgcgatgtacttctccaggctgcagcagacctttaaagagggcaaaacggggatgaagagggtgcccatttaggtttttaataccacctggcattgttactaaagagtaatttgaagcatttaacaaagtatactaatgcacagcattttaagtgaaaaacaaaaattgatgaaaatatgttagtctattcatctgtcatgaaacacccaggcaaatacaaaatattgaatagccagggctggtgaaaatgttgtt

SEQ ID NO: 57630 - DNA, 1249 bp, Homo sapiens
gtgccataaacctcactgctgcatgtgaaatataaagaaaatattacccacctcctcaggatgttgggaggatggaattaaatgctgcatgtagcataactaacacattgtcaggcctctctaaggagatgtcaggactgggctgggggcaggagcagaaagttctatacccagtccctgctcagcgctcagccacttaccctgaaataaactctaccttgaatacagatcttcaagaagccccagaaataagtttccccagaaaggccrctggagataggagaggagaggctgtcttttatacttcagctcctggagacctagtccagggtcctagaagagaggtttccctcctaaaggaagacagaaggggcagcctggccgtgttaagccgttcttacattgctataaaggaatatatgagactgggtaatttgtaagggggtaaagcaaagacatttcaaagaaggaaggatggtagggaggtacaagctgatcaggcccaagagacccttccaacatctccatgccatgggctctgtttgggatgaatgacatcacggatcctgttctttgcaaacagaaaagacgttttttgggattccctgtgagcggctggggtgacatgaagcacactctagggcaagccccaaagcccagcacttggggactctttgggcatctcactgtcctgagatctcacttcctgatttccctcagactcttccctccagcatccctacctatccctaggccaagcaaacactaaacaccactgtgcctccctggtacccagtagatgccccttctgcaaatctgaccctacacgaagaaagcctcaaaactatgacatacctagagacataaaggatagtcatgggcatgcacaagcctccccatgaagatgtccgttgcagtgttgtttagaagtatgaaaaatggaaacaaactaaatgctcagaaataggggactggttaaaaaaatatgtgcaatacaaccatctgatcctatgctaggtagccactaaaagtgtgacataggagaggagatatcagtcagcaagctcactccatttaaggactcttgtagagttacacaggtaaaaagaaaggaaaacaggaaagctcaatattcacaatgactggattttcttttcttctttttccttttgtattttccaagtgccctacactaatatatatttgtggatggatacatagacacacagagattggtaggcacgccgtc

SEQ ID NO: 57631 - DNA, 1249 bp, Homo sapiens
gtgccataaacctcactgctgcatgtgaaatataaagaaaatattacccacctcctcaggatgttgggaggatggaattaaatgctgcatgtagcataactaacacattgtcaggcctctctaaggagatgtcaggactgggctgggggcaggagcagaaagttctatacccagtccctgctcagcgctcagccacttaccctgaaataaactctaccttgaatacagatcttcaagaagccccagaaataagtttccccagaaaggccactggagataggagaggagaggctgtcttttatacttcagctcctggagacctagtccagggtcctagaagagaggtttccctcctaaaggaagacagaaggggcagcctggcygtgttaagccgttcttacattgctataaaggaatatatgagactgggtaatttgtaagggggtaaagcaaagacatttcaaagaaggaaggatggtagggaggtacaagctgatcaggcccaagagacccttccaacatctccatgccatgggctctgtttgggatgaatgacatcacggatcctgttctttgcaaacagaaaagacgttttttgggattccctgtgagcggctggggtgacatgaagcacactctagggcaagccccaaagcccagcacttggggactctttgggcatctcactgtcctgagatctcacttcctgatttccctcagactcttccctccagcatccctacctatccctaggccaagcaaacactaaacaccactgtgcctccctggtacccagtagatgccccttctgcaaatctgaccctacacgaagaaagcctcaaaactatgacatacctagagacataaaggatagtcatgggcatgcacaagcctccccatgaagatgtccgttgcagtgttgtttagaagtatgaaaaatggaaacaaactaaatgctcagaaataggggactggttaaaaaaatatgtgcaatacaaccatctgatcctatgctaggtagccactaaaagtgtgacataggagaggagatatcagtcagcaagctcactccatttaaggactcttgtagagttacacaggtaaaaagaaaggaaaacaggaaagctcaatattcacaatgactggattttcttttcttctttttccttttgtattttccaagtgccctacactaatatatatttgtggatggatacatagacacacagagattggtaggcacgccgtc

SEQ ID NO: 57632 - DNA, 1249 bp, Homo sapiens
gtgccataaacctcactgctgcatgtgaaatataaagaaaatattacccacctcctcaggatgttgggaggatggaattaaatgctgcatgtagcataactaacacattgtcaggcctctctaaggagatgtcaggactgggctgggggcaggagcagaaagttctatacccagtccctgctcagcgctcagccacttaccctgaaataaactctaccttgaatacagatcttcaagaagccccagaaataagtttccccagaaaggccactggagataggagaggagaggctgtcttttatacttcagctcctggagacctagtccagggtcctagaagagaggtttccctcctaaaggaagacagaaggggcagcctggccgtgttaagccgttcttacattgctataaaggaatatatgagactgggtaatttgtaagggggtaaagcaaagacatttcaaagaaggaaggatggtagggaggtacaagctgatcaggcccaagagacccttccaacatctccatgccatgggctctgtttgggatgaatgacatcacggatcctgttctttgcaaacagaaaagacgttttttgggattccctgtgagcggctggggtgacatgaagcacactctagggcaagccccaaagcccagcacttggggactctttgggcatctcactgtcctgagatctcacttcctgatttccctcagactcttccctccagcatccctacctatccctaggccaagcaaacactaaacaccactgtgcctccctggtacccagtagatgccccttctgcaaatctgaccctacacgaagaaagcctcaaaactatgacatacctagagacataaaggatagtcatgggcatgcacaagcctccccatgaagatgtccgttgcagtgttgtttagaagtatgaaaaatggaaacaaactaaatgctcagaaataggggactggttaaaaaaatatgtgcaatacaaccatctgatcctatgctaggtagccactaaaagtgtgacataggagaggagatatcagtcagcaagctcactccatttaaggactcytgtagagttacacaggtaaaaagaaaggaaaacaggaaagctcaatattcacaatgactggattttcttttcttctttttccttttgtattttccaagtgccctacactaatatatatttgtggatggatacatagacacacagagattggtaggcacgccgtc

SEQ ID NO: 57633 - DNA, 2107 bp, Homo sapiens
ctatcattattttattaatactattattatcccaaccattgaccaagtggtcctcagtttctctcatatttgtctcccatctttgggcagctgcttttgactttttttttccaatcccaaatacagggccctcaactcatccttgtaatgtttcctattgatattttgaatcatttcctcaccctgacaagacctctggatcctgaccctgttgtccagcccatcctccatcccatcagggtttaaagagcccattgattggatcagtagacaatcgtcttcatctaagttgatgataaagaatgctggtccagaccaggcacaatggcttacacctgtaatctcaacactaggaagctggggtgggagaatcagctgaggtcaggagtttgagactagcctgggcaacatagagagaccctgtctctacaaaaaatttaagagttagctgagcatggtggtgcacacctctcgtaccagctactcaggaggctgaagtgggacaacagcttgatcctgagaggtcaaggctgccataagcccaggaggttgaggctgcagtgagccatgatcacaccgctgcactccagcctgggtgacattgcaagactgtctcaataattaattcattcattaattttttaaaagaatgctagtctagatgggcctggaatagaatcttgtggcataccactggagacctcccttggggccaatgtgtcccaaactgtattccttggaaatttttgcctcccatgagatgtgagtatgtgtttgggaataaaagaggctgcaatcagatgagattgatacacaacagatgctaaaacagcgtttacatgaagaagcaaagacacgacatctaatggtaagcttccaggctagaggctttaccttccaatagtacaagcccttaaatctcttttgtccactgagatttatttttacaaaagaattccaccctgtgagtgccctgagcgtagtcagtcactccctcctttctcagacagctttacttctctccrtgccctgccatggtgagaaccccaagcacatcagtcctgagacatcctctggcgcctcttgtctggccccacaagagccagcagggtggggagcagccattggatttgagtcatacctatgggctcctatttagaccctgggcacaggctccaagaagctgtccccctcccccacagccacctcagttcccccagttggaggcaagaccctctcctcgccccatcagcctccacaggagcttctgcccatggccaagaacagaccagcttggatcacgaaggactgagcacctggaatattctgtgcttctcccctgatgtctgaaggcgagtgcagcctcgggcctggcccacagtggctgatggtggaatgagtcagtgcccaagcaaaggtgagccagcccctgcaggaaggtcaagctctcctgcccaggtgaatccccctcatcccggatccctctgtgcctccccctgcctggggaccacacctcatgcttctcctggggttcatgagtgaactcccaatagctcttaaacacgaaacccatcttcattccactgtccttctgaaaggacaccttttgggaaaatgaacccaagtgtcccaaaagcatctgcctgagcaactatgaatgatggcctttcctcttcccacgtgtgtcctccgggagccccgtcttgccaagtccagaagaggctcatctgttctcatcgctagccactagatggcgacatcaggaattgtttaattttccaaagaaagttgcttgggaaaccacacagttctaaataaagcaaaaagcaatgaatgggaggaaggaggggaagtggaaaggcagggatttagaattccccatccctttacatggctatataacttgggcacgccctttaatctcccagaacctatgcacctgcaaaatggagctaagagaggtagctacctcctaaggtaatgctggaagacctgggagcatattaacctcctggggagctttacaaaatagtgaagtcagccaggtacagtggctcacgcctgtaatcccagcactttgggaggccaaggtgggtgggatcacttg

SEQ ID NO: 57634 - DNA, 2107 bp, Homo sapiens
ctatcattattttattaatactattattatcccaaccattgaccaagtggtcctcagtttctctcatatttgtctcccatctttgggcagctgcttttgactttttttttccaatcccaaatacagggccctcaactcatccttgtaatgtttcctattgatattttgaatcatttcctcaccctgacaagacctctggatcctgaccctgttgtccagcccatcctccatcccatcagggtttaaagagcccattgattggatcagtagacaatcgtcttcatctaagttgatgataaagaatgctggtccagaccaggcacaatggcttacacctgtaatctcaacactaggaagctggggtgggagaatcagctgaggtcaggagtttgagactagcctgggcaacatagagagaccctgtctctacaaaaaatttaagagttagctgagcatggtggtgcacacctctcgtaccagctactcaggaggctgaagtgggacaacagcttgatcctgagaggtcaaggctgccataagcccaggaggttgaggctgcagtgagccatgatcacaccgctgcactccagcctgggtgacattgcaagactgtctcaataattaattcattcattaattttttaaaagaatgctagtctagatgggcctggaatagaatcttgtggcataccactggagacctcccttggggccaatgtgtcccaaactgtattccttggaaatttttgcctcccatgagatgtgagtatgtgtttgggaataaaagaggctgcaatcagatgagattgatacacaacagatgctaaaacagcgtttacatgaagaagcaaagacacgacatctaatggtaagcttccaggctagaggctttaccttccaatagtacaagcccttaaatctcttttgtccactgagatttatttttacaaaagaattccaccctgtgagtgccctgagcgtagtcagtcactccctcctttctcagacagctttacttctctccgtgccctgccatggtgagaaccccaagcacatcagtcctgagacatcctctggcgcctcttgtctggccccacaagagccagcagggtggggagcagccattggatttgagtcatacctatgggctcctatttagaccctgggcacaggctccaagaagctgtccccctcccycacagccacctcagttcccccagttggaggcaagaccctctcctcgccccatcagcctccacaggagcttctgcccatggccaagaacagaccagcttggatcacgaaggactgagcacctggaatattctgtgcttctcccctgatgtctgaaggcgagtgcagcctcgggcctggcccacagtggctgatggtggaatgagtcagtgcccaagcaaaggtgagccagcccctgcaggaaggtcaagctctcctgcccaggtgaatccccctcatcccggatccctctgtgcctccccctgcctggggaccacacctcatgcttctcctggggttcatgagtgaactcccaatagctcttaaacacgaaacccatcttcattccactgtccttctgaaaggacaccttttgggaaaatgaacccaagtgtcccaaaagcatctgcctgagcaactatgaatgatggcctttcctcttcccacgtgtgtcctccgggagccccgtcttgccaagtccagaagaggctcatctgttctcatcgctagccactagatggcgacatcaggaattgtttaattttccaaagaaagttgcttgggaaaccacacagttctaaataaagcaaaaagcaatgaatgggaggaaggaggggaagtggaaaggcagggatttagaattccccatccctttacatggctatataacttgggcacgccctttaatctcccagaacctatgcacctgcaaaatggagctaagagaggtagctacctcctaaggtaatgctggaagacctgggagcatattaacctcctggggagctttacaaaatagtgaagtcagccaggtacagtggctcacgcctgtaatcccagcactttgggaggccaaggtgggtgggatcacttg

SEQ ID NO: 57635 - DNA, 1223 bp, Homo sapiens
gccagcaccatttactaaatattataataataagtcatcgttttcccaccttcattatatactaagttttctgtatatacctgtatctacttctaattctctgtcctatccatcattctatagcaaagctattctgttttattctactagcttgtataagtccattctcctataaagaaatagttaagactgggtaatttataaagaaaagaggtttaacaggaagtatagtggcttctccttctggggaggcctcagaaaacttacagtcctggggaagcaggcacgtcttacacggccagaacaggagtgggaagggagttgttacacacttttcaacaacctggtctcatgataactcactagcttgagaacagaacctaggggatggagctaacccattcatgagaactctgtcccatggtctatccacctcccaccagggcccacctccaacactggggattacatttcaacatgagattcggtggggacacagatccaaaccatatagctttacactagatcttagatatacataaaagtccttcccatgttgcttttttatttgatataattttttgtcaactctcattttttcttttgtgaaatttaaaattttgtatccaggttttttaaacattagaattctagtgtttatatattaattttggtatagctaatgtttcaagggtattaagtcttcttattaaggacaaaatatgttcttccattttggcctcatatcctaagttttgggactactcttcattgccattcttttctaaatagcctgtaattataatttttgtttctcctttgatccaagggtttatttaagagattgacttgatttctttattttcatttataagtcatagggtgttttttttgttttgctttagcttgttctgtgatgtgatacaattgtatttgtgtccacttcttcctagaatatctaagttttgactttatgtatttaaatttttctattcagttaacaaaggtttgcaactattttaccttcattatggtttgtaactttcatccaaatgtaattagccaatttgttctgcttaaatattttgcctttaattctgtttcctgatgttacatttgttagtcctgttttcatgttattcatatacgcctaatgcaaattttmcaacctttacttttaatttttccaggtcatttggcattaagttgtctcttgaaaacaa

SEQ ID NO: 57636 - DNA, 723 bp, Homo sapiens
ccatcactgaccatctcctgtcttccacactccagctggtcctgcagatctccgcaatagacaaggacataacaccacgaaacgtgaagttcaaattcaccttgaatactgagaacaactttaccctcacggataatcacggtaggcatcaaagtaatcagttcagctgggcgtgatgacccacacctgtagtctcagctactcaggaggctgaggcaggaagatcgcttgagcccaggagtttgaggctgcagtgagctatgatcacatcactgcactccagcccgggcgacagagcgagaccccgtctccaaaaaaagaacaaatgcagtcagttggctctaacagggtcggggtgaggttatttgagtcttgaggcaccaaggtcaaagaccaggccaacaaattgagggcaggctcccactgggattttcaaatcattagatattttgtacaatttctgccacatacattgtacaattggtctatgcaatggtcagagacactccatccaaactcccaagtccacgtcgcctgcaaggagccagcgaggagtacagaacagatgtgaggrtgcaggcagtcagctcagttcaagaactagccaaggagtcccctcccatactggaggctctatgggtcagcaaaactgcacattaaacatggaactttgaggtcattcccaaagagtcaaaactggaaatgtgaaatcctaaatcccaa

SEQ ID NO: 57637 - DNA, 224 bp, Homo sapiens
tccagcctgggcaagagagtgagactccgkcaaaaaaaaaaaaaaagaatgtggaaagtaaaatgtgaaagttcccctccttgtctatgccccttattgactttgatatagattctttatagtttggtatatattcttccagacccttttctgtgtatatacttacacaaatatattttttctgacataaatggaatcatgcagaacatattgttcaacaactt

SEQ ID NO: 57638 - DNA, 606 bp, Homo sapiens
agctaagaaacttggcattttttgttatttaatcctgagaaaatgcatattttcttctttcttccttcctttctttctttctttytttttttttttttgagatggagtcacactgttgctcaggctggagtgccgtggtgccatctcggctcattgcaacctctgtctcctgggtaagggttcaatcgattctcctgcctcagtctcctgagtagctgggattacaggtgcctgccaccaagcccagctaatttttgtgttttcagtagagacggggtttcaccatgttggccagattggtcttgaactcctgacctcaagtgattcgcccaacttggcctcccaaagaaagtgcatattttctttgtcatcttatgatagtagatcatggagctcctttaacttaatggattcctagaggccagtgactcctgatattttccagacgcttatagctagaaaaagccaagtaatgaagctctgatgctttgacttgctttgacttaacaagcttagggaagaagcaatgacactgtattttctttctttttgagagaaggtaagaacagcatgaaaggagaaggcagaggaggagaatcccttctt

SEQ ID NO: 57639 - DNA, 663 bp, Homo sapiens
ctgagggccggtcgctatcatcatagacgaccagcacaggggcctggcctggcttctgctggtaccagtgcacacttttacttccaatgttgtttcccccacaggtaatcctggccgtctgtcctggggccactgacaccgagggtggctgagtcagcacataggaggtcacagagcctgcaaagataaaaataaataaataaataaataaataaataaataaataaatragagagaggttggcttgcaggtgaaagatgcttcttatgaaatcccttgccctgctgtcccagacaagctccagagagtctgtgaaccctcagggtatcccctgcaatcagccccagccccagtggcccatgactttcctgttgtatggagactttgaactgaaaactcactactctctcctggcaggtgcagtccctcaggctctcacaagcctttgagcacagtttggggggagttcagccccaccagcctcccaccctgcagcagggtcatgagcatcctgcccaccacaggaagggccctcctgagctcagaatcaaggacacgctggacccagaacccttgggctgggcaggttggtgagaccctggggggatcacctgtgcagtgagagaggaggccgaggaggagaacggtccaggccatggctga

SEQ ID NO: 57640 - DNA, 732 bp, Homo sapiens
gatcctttgcattgactgctcatggtcctttagtgccatcataaagttgtagatataataacwcaattataacagtcaatttctgaaaatcatagttttgtattgtgtggaattcatataaccaagaattaatcacttcaaaatgtacaacgcagtggcacttagcaccttcactttgttgggcagccaccagctgtgtgtgtagttctcctacattttcatcacccaaaagaaaattctgcacccagtgagcagcctctcctctttcatcaccttctccaattctgggcaaccactcatcttctttctgcctgcatggatttgtctattgtagataattcatgtagatgacatgatacagtatgggacctttagtatagtatttcagattttcagaccataggatctctgtcaccacaaccaagccttgtattgcagcatgaaaacagccacatgtcactcataaagacatgagcaagactgtgttccaatgcaggatgcaagacagatgtgtccatcaaccacagtttgcccaccatgtcctcaatcagcagccactatgaggaactgtgttcctcattagtaacatatctgagtccaggaccaggggtggaagtagtggcttacatggggaatttatgattctgttttctaactctgagtcttatagtttagaagtccaggttcccaaaggatgacacccagtgatgcagcaagagccccatggaattt

SEQ ID NO: 57641 - DNA, 732 bp, Homo sapiens
gatcctttgcattgactgctcatggtcctttagtgccatcataaagttgtagatataataactcaattataacagtcaatttctgaaaatcatagttttgtattgtgtggaattcatataaccwagaattaatcacttcaaaatgtacaacgcagtggcacttagcaccttcactttgttgggcagccaccagctgtgtgtgtagttctcctacattttcatcacccaaaagaaaattctgcacccagtgagcagcctctcctctttcatcaccttctccaattctgggcaaccactcatcttctttctgcctgcatggatttgtctattgtagataattcatgtagatgacatgatacagtatgggacctttagtatagtatttcagattttcagaccataggatctctgtcaccacaaccaagccttgtattgcagcatgaaaacagccacatgtcactcataaagacatgagcaagactgtgttccaatgcaggatgcaagacagatgtgtccatcaaccacagtttgcccaccatgtcctcaatcagcagccactatgaggaactgtgttcctcattagtaacatatctgagtccaggaccaggggtggaagtagtggcttacatggggaatttatgattctgttttctaactctgagtcttatagtttagaagtccaggttcccaaaggatgacacccagtgatgcagcaagagccccatggaattt

SEQ ID NO: 57642 - DNA, 732 bp, Homo sapiens
gatcctttgcattgactgctcatggtcctttagtgccatcataaagttgtagatataataactcaattataacagtcaatttctgaaaatcatagttttgtattgtgtggaattcatataaccaagaattaatcacttcaaaatgtacaacgcagwggcacttagcaccttcactttgttgggcagccaccagctgtgtgtgtagttctcctacattttcatcacccaaaagaaaattctgcacccagtgagcagcctctcctctttcatcaccttctccaattctgggcaaccactcatcttctttctgcctgcatggatttgtctattgtagataattcatgtagatgacatgatacagtatgggacctttagtatagtatttcagattttcagaccataggatctctgtcaccacaaccaagccttgtattgcagcatgaaaacagccacatgtcactcataaagacatgagcaagactgtgttccaatgcaggatgcaagacagatgtgtccatcaaccacagtttgcccaccatgtcctcaatcagcagccactatgaggaactgtgttcctcattagtaacatatctgagtccaggaccaggggtggaagtagtggcttacatggggaatttatgattctgttttctaactctgagtcttatagtttagaagtccaggttcccaaaggatgacacccagtgatgcagcaagagccccatggaattt

SEQ ID NO: 57643 - DNA, 732 bp, Homo sapiens
gatcctttgcattgactgctcatggtcctttagtgccatcataaagttgtagatataataactcaattataacagtcaatttctgaaaatcatagttttgtattgtgtggaattcatataaccaagaattaatcacttcaaaatgtacaacgcagtggcacttagcaccttcactttgttgggcagccaccagctgtgtgtgtagttctcctacattttcatcacccaaaagaaaattctgcacccagtgagcagcctctcctctttcatcaccttctccaattctgggcaaccactcatcttctttctgcctgcatggatttgtctattgtagataattcatgtagawgacatgatacagtatgggacctttagtatagtatttcagattttcagaccataggatctctgtcaccacaaccaagccttgtattgcagcatgaaaacagccacatgtcactcataaagacatgagcaagactgtgttccaatgcaggatgcaagacagatgtgtccatcaaccacagtttgcccaccatgtcctcaatcagcagccactatgaggaactgtgttcctcattagtaacatatctgagtccaggaccaggggtggaagtagtggcttacatggggaatttatgattctgttttctaactctgagtcttatagtttagaagtccaggttcccaaaggatgacacccagtgatgcagcaagagccccatggaattt

SEQ ID NO: 57644 - DNA, 656 bp, Homo sapiens
gaaagcaagctcttttgagcccctgtcttggaatccctgcagagaaaagacaagaagttccacgtctgaaacccactgaagcccattaaatgacatcccctcagcaggctttaatttacatgactttcattgtttttctgtcttttaattttgaatgaagaaaagagcttcctcagttcagtataagcctcctcacttcacagcaggtaacactgaggccaaaagagactaagtggctcaggagaacagagagcagtgggggcaagtccaggagctgatccaggtgtcctgagttctgaacctgggccctttctggtggagattaaccagggtggggaaggagggggcatgagggycaggcaggcagcagggctgtgtcctgtggacacactgccatcccccatcatggcctgcccatcctgagaagcccatttcagcctgcagaaagtgggggctgtaccacaggctagagctggagaatctgtggggattggggcctgctttggatgcagggcctggcctggctcctgctggttctctctgcactgttgcctgctccactgtctcctgagcaggtgggggacaggtgtcttatggctaataggtgtctcatgaccccacaccttaggttaaagagatgttggggctcattctca

SEQ ID NO: 57645 - DNA, 656 bp, Homo sapiens
gaaagcaagctcttttgagcccctgtcttggaatccctgcagagaaaagacaagaagttccacgtctgaaacccactgaagcccattaaatgacatcccctcagcaggctttaatttacatgactttcattgtttttctgtcttttaattttgaatgaagaaaagagcttcctcagttcagtataagcctcctcacttcacagcaggtaacactgaggccaaaagagactaagtggctcaggagaacagagagcagtgggggcaagtccaggagctgatccaggtgtcctgagttctgaacctgggccctttctggtggagattaaccagggtggggaaggagggggcatgagggccaggcaggcagcagggctgtgtcctgtggacacactgccatcccccatcatggcctgcccatcctgagaagcccatttcagcctgcagaaagtgggggctgtaccacaggctagagctggagaatctgtggggaytggggcctgctttggatgcagggcctggcctggctcctgctggttctctctgcactgttgcctgctccactgtctcctgagcaggtgggggacaggtgtcttatggctaataggtgtctcatgaccccacaccttaggttaaagagatgttggggctcattctca

SEQ ID NO: 57646 - DNA, 656 bp, Homo sapiens
gaaagcaagctcttttgagcccctgtcttggaatccctgcagagaaaagacaagaagttccacgtctgaaacccactgaagcccattaaatgacatcccctcagcaggctttaatttacatgactttcattgtttttctgtcttttaattttgaatgaagaaaagagcttcctcagttcagtataagcctcctcacttcacagcaggtaacactgaggccaaaagagactaagtggctcaggagaacagagagcagtgggggcaagtccaggagctgatccaggtgtcctgagttctgaacctgggccctttctggtggagattaaccagggtggggaaggagggggcatgagggccaggcaggcagcagggctgtgtcctgtggacacactgccatcccccatcatggcctgcccatcctgagaagcccatttcagcctgcagaaagtgggggctgtaccacaggctagagctggagaatctgtggggattggggcctgctttggatgcagggcctggcctggctcctgctggttctctctgcactgttgcctgctccactgtctcctgagcaggtgggggacaggtgtcttatggctaayaggtgtctcatgaccccacaccttaggttaaagagatgttggggctcattctca

SEQ ID NO: 57647 - DNA, 712 bp, Homo sapiens
ctctatgatgttaaatgaacatccgcagtgctccctgatccacaggatctttgctgcaccaggaaagggctaagcaggaatgggttttgaaagttcctattattttgaattctcccaactcaaaatttgccattctgcaaagcctgcagagagttcctgtcagagctaacacaagggccccctcactccagagccaaccaccctcttcctcccctcccatcagggccgggtgagggccagtttcccggcccctcctctgtgcttgcccacttgccatccttagccttgtcagagcccacttgggccagcctggatacagatgtccagcctgtggcagttgcctctcccygactccacctgcccctcacctctgggctggaggaaatgtacttaacatccctcagctcttcctattacccaaagtgtattagtccgttttcacactgctgaaaaagacacacccgagactgggcaatttacaaaagaaaaaggtttattggacctacagttccacatggctagggaggcctcacaatcgtgatggaaggcaaggaggagcaagtcacatcttatgtggatggcagcaggcaaaaagagcgtgtgcagggaaactcccatttgtaaaaccatcggttcttgcaagactcattcactatcacgagaacagtgcaggaaagactccccctctccttaattcaatcacctcccactg

SEQ ID NO: 57648 - DNA, 712 bp, Homo sapiens
ctctatgatgttaaatgaacatccgcagtgctccctgatccacaggatctttgctgcaccaggaaagggctaagcaggaatgggttttgaaagttcctattattttgaattctcccaactcaaaatttgccattctgcaaagcctgcagagagttcctgtcagagctaacacaagggccccctcactccagagccaaccaccctcttcctcccctcccatcagggccgggtgagggccagtttcccggcccctcctctgtgcttgcccacttgccatccttagccttgtcagagcccacttgggccagcctggatacagatgtccagcctgtggcagttgcctctccccgactccacctgcccctcacctctgggctggaggaaatgtactyaacatccctcagctcttcctattacccaaagtgtattagtccgttttcacactgctgaaaaagacacacccgagactgggcaatttacaaaagaaaaaggtttattggacctacagttccacatggctagggaggcctcacaatcgtgatggaaggcaaggaggagcaagtcacatcttatgtggatggcagcaggcaaaaagagcgtgtgcagggaaactcccatttgtaaaaccatcggttcttgcaagactcattcactatcacgagaacagtgcaggaaagactccccctctccttaattcaatcacctcccactg

SEQ ID NO: 57649 - DNA, 1013 bp, Homo sapiens
catccacctgcatttgtggatctacttatataaactctttcttctttgcatcccttccaggcattttctatgcacatatttttcacacggctgagatgatgctgcaagtgcagctgtatcttgcccttttcacctgacactctgtgataagccttctgagattgctttgtagcaggagcctccagggccctaccctcaagaggcagctctctgggcaagcatgcctggttctctggcaaaagactaccaggaggaggaaggtttcaatgccagccttccagcagatggaagggaatagcgcatggctgctgtttgtgcatgcttattttcagatcaatccagccaacatttcttaagcacctactgtgtatgtcatcgcacagagacaatttgcctggcttatttctgcagcatctttctctaggaaggtggaagtaatattgtgaatagccttgagagcattcacatgttagagtggaacagccaggaaacagctgttccaaaggactgcagagttaatccgaacacctccgcctccagtagtggcttcagagtctgaaaccatttttctcttcgcttctgtgcaatgcagccactgacagcagcaaatatgtccctgacagtagtgggaagaggctggtagtcgagwgatggtttcaagcagtttggggccaggtggggaaatggcacagaggacagggaggcagtggaaggcccccctgcagctgttgggagccccaggccaggtcagcaggcacagcatttgtcaaggcagcccatgacattgaggttgggctgcagaaccgggttcctggacctgaaaccagagatatatccccagtgctgtgggcctccacatggccagtctggacatggggcttcagcaaagctagagtgaacatctcatggctcatcagagcctacagatgtgggtagcagagcacagcagctgcacacaggctcaggtcagttagatctggaatttctcttcctggaacaggggcttggcaagg

SEQ ID NO: 57650 - DNA, 1013 bp, Homo sapiens
catccacctgcatttgtggatctacttatataaactctttcttctttgcatcccttccaggcattttctatgcacatatttttcacacggctgagatgatgctgcaagtgcagctgtatcttgcccttttcacctgacactctgtgataagccttctgagattgctttgtagcaggagcctccagggccctaccctcaagaggcagctctctgggcaagcatgcctggttctctggcaaaagactaccaggaggaggaaggtttcaatgccagccttccagcagatggaagggaatagcgcatggctgctgtttgtgcatgcttattttcagatcaatccagccaacatttcttaagcacctactgtgtatgtcatcgcacagagacaatttgcctggcttatttctgcagcatctttctctaggaaggtggaagtaatattgtgaatagccttgagagcattcacatgttagagtggaacagccaggaaacagctgttccaaaggactgcagagttaatccgaacacctccgcctccagtagtggcttcagagtctgaaaccatttttctcttcgcttctgtgcaatgcagccactgacagcagcaaatatgtccctgacagtagtgggaagaggctggtagtcgagagatggtttcaagcagtttggggccaggtggggaaatggcacagaggacagggaggcagtggaaggcccccctgcagctgttgggagccccaggccaggtcagcaggcacagcatttgtcaaggcagcccatgacattgaggttgggctgcagaaccgggttcctggacctgaaaccagagatatatccccagtgctgtgggyctccacatggccagtctggacatggggcttcagcaaagctagagtgaacatctcatggctcatcagagcctacagatgtgggtagcagagcacagcagctgcacacaggctcaggtcagttagatctggaatttctcttcctggaacaggggcttggcaagg

SEQ ID NO: 57651 - DNA, 658 bp, Homo sapiens
caatgtgttcgaggaccttcggaactcctcgcgcttgagttaagtactctgcaagtcagagccagcggtgccgagcaatgctgccgactcttcattgacatagttgcattaaagattcaggatataaatttgaacagggattaaccattcctagaacaaacagccctgrctggcactcctccctgcacacacagcccactgcattatccaagtgcaaacaggtacggagcctgccattttctctcttctcgctctatctccctcctccaggcaaacagcggtccaagaacagaacccagaggtgggggatctccagcttgagttgcagggaaggcagctggcgatggtttattttacgtgtcagtttggcctggctgaggagtgcccagcagggaaagcatgcctttccgggtgcgtctgtgagggtggtcagtgggctggaggaagcagttcggcccccaccagtgtggatgggcatcatccaatctgctgcgggcccggatggaacaaaaaggaaatggaagggcggactctctctctctgtccctgagatgggacatcgattttttccctgaccttggacatcggcacttttggttcttgggcctttggactccaggacttacaccagtgccaccattggttcttgggcctttgg

SEQ ID NO: 57652 - DNA, 658 bp, Homo sapiens
caatgtgttcgaggaccttcggaactcctcgcgcttgagttaagtactctgcaagtcagagccagcggtgccgagcaatgctgccgactcttcattgacatagttgcattaaagattcaggatataaatttgaacagggattaaccattcctagaacaaacagccctgactggcactcctccctgcacacacagcccactgcattatccaagtgcaaacaggtayggagcctgccattttctctcttctcgctctatctccctcctccaggcaaacagcggtccaagaacagaacccagaggtgggggatctccagcttgagttgcagggaaggcagctggcgatggtttattttacgtgtcagtttggcctggctgaggagtgcccagcagggaaagcatgcctttccgggtgcgtctgtgagggtggtcagtgggctggaggaagcagttcggcccccaccagtgtggatgggcatcatccaatctgctgcgggcccggatggaacaaaaaggaaatggaagggcggactctctctctctgtccctgagatgggacatcgattttttccctgaccttggacatcggcacttttggttcttgggcctttggactccaggacttacaccagtgccaccattggttcttgggcctttgg

SEQ ID NO: 57653 - DNA, 615 bp, Homo sapiens
gggatcccttcaatggcagagactcttggctgcatatatgtgtattgcaaggtgcccagacgaatccttcatctccaaatattgccagacctgatgaatggcctcttgggagatccctgcaccacacccctccttcctgttgctgggcttcccctgggggctctccccacacccagtgttctctgtatatgacarcattgacacttagatggcctttgtgacctgtggacacaagcagcggccaagcctggtggtgggcacctcgcacggcacggcactgcgtgctgtggcccctcatggagagacccctgtaattcaagtcagtgctgcctgcacacccaccccccatggcagttcctgtcctggtggctggctcgctggtcctgccctgccagtggggaacacctccctgctgctgtccaggggcagatgctgctgtcctcctggccgggagctggcagcagcccttgctggagtcactcatcttcgcctgccaactttagaggttccccatctggtggcagatgagaagcccctggcaaacattcttttatgtcagaaaaaagtcacatccagaggttccaggtgaattggtgcgtggtggggcctaagcta

SEQ ID NO: 57654 - DNA, 743 bp, Homo sapiens
attttctgagtcttgttttatgtgttttacagggcattcaaagtcctttaggatagaaaatacagcaagagtgaacaaatggatgccrggaaaggggaaaccgagggcagcatattttacatgagggctgccccatacactctagggtcattgcacctgtcgagaaactctgatcgttggttgggtttttcttctgtaggagcctcagcgtttggtgcattccatgcatatggaggcacagacagatgtcacctgtggcggagacagccgtgcctgtccagtttctttttattttttatcattatcatttgttaaatgttttctggctccttacgagtgtcctggacgctgtgctgggcacccagtgctgaataaaaagtaaggctctcatcttgggtgtttacttgctaaattctctgtagaggcaaaggctctatattcagaaattttagaatgaacaggaattaacattagcaatgaattgaatgcaagagccaatgcactctgtaagtaaatccttcccacaagtccttttaatttttattggattataaataacttcctgggccaacagccaagggaaagctgccttgagagagcccagaacgatttgcacaatgaagttgctgtggctggaactttctactgtccggcatgagccttcctcacaactgatcattgtaatttccatacatagatttcaaattgagtcacaagaattaaaagcacaggttctggagaat

SEQ ID NO: 57655 - DNA, 791 bp, Homo sapiens
accacgatcagggtggtgggtgggactctcctccccaggtgtcagccaagggacctccctccctgtgaggctgtggggcagtgggctcccgcatcttagattgtacgtgtatttgtgtacgtgaactggcatctgtcttcccagctgcgttgtgggcatcacaaggccaggtttcatgtgtgtttttgctcacacctggcacctggccctatctgagccagttcctggtagacagtaggtgctcagtagctgtttgttgcgtaattgatcacccccattggaaagctcctgaaaggtctgctcgtgggactgggtgagtccatcgccctgggacaggctgctcatggtgcatttgtttattttttaaatgtttcatttttgtgaccgttataagtgagtatggttaaaaagcaagatggactcacaagcttttcaggaaaaacaccagcgctctgccccgcagagtgggcacaggggctcagggttcttacaggggayttccacggtctttccagtaacacagcattgctgctctttcccgcctggttccagcctcgccgcacagcatttagagttctggtctacttcacgtgcacacaacagctgcctgtgccatcaccatggagcagtgtcactggtgcctctgcatcctgggcagctgcattggctgtggtgcaactgcacgtgttggtgtgaggacaggagctgatactgcagaaggaagggggtgacccggggtctctgaggtccccactgggtacctcaacctcctcctctagccctggccctgg

SEQ ID NO: 57656 - DNA, 725 bp, Homo sapiens
cccaaaggctgccttggttagagactcctttagcaaggactaagtggctcccggaagagggcaagggtttcagcctcccagcagagcccatgataccaatagacaggtcagtcctatctgctgagggccacaggagtaaggaagccagggaacgtggcaagtctactaggaagacctacaaagtcgctgagcatgcagctcttgatgtgtgtgctgtgtggaaccaaacagagaagcagctcactaagctcttgaagactttactgccaaagaaccacacactgtggctaagagagactaagattttagggaatgaaagtgacccttggcatccaccatctgtaaacaagaaggggtctgggagggagtgcatctgatgcccacagtgaatgtggccatggaggcgaatggaaaagggatgtgtttgttaggccactcttgcatggctatgaaggaggacctgagactgagtaattgataaagaaaagagatttaattggctcactgttgggcaggctgtgcacgyatgatgcctgcatgtatttggtttctgggaaggcctcagggagctaccaatcatagcagaaagcaaagtaggagcaggtgctttcatatggcaggagtgggagcaagagagggaagggggaggtgccacacactttaaacagccagatctcacgtgaactcagtcatcaccaagggaatggtgccaagccgttcatcag

SEQ ID NO: 57657 - DNA, 652 bp, Homo sapiens
caagtaccctcttctaaaataaatggataactatataaattgtataagtcatactaagtatgaagttttacatgcaaaatgactcaaaaaacttcaggtggagagaaatcataagaaccactgtctttatggtattaatggccaaacacagactcttcattgcccctgaaaaccggcatctgtttacaatgattttgaaatcccaatgttatggaggcataaatgctggagctgagagttaaactaaggtctctctttctgtctagagccctcattctcaactactctaccaatactccttctcctagttgtttgtgaatatactggttcctgaaaagatagatttggatgaaaacattagactctatggatgagggcagaggcaggcaccagtgctgacttctctttagtgctaggctcttgactatggatttctgtcccatacaactgggtctgacttgaattccctactcggccatgaattcaagaacggaaaacattacagaccctcagtacccaatgaccaagctagtggagctaagctctcctgtcctggtatgatccatgcctttcttacatggcttccagaggattccataacctctattctaggctgaaaaatgrcaagtacactggactagaaataaaatct

SEQ ID NO: 57658 - DNA, 1245 bp, Homo sapiens
ttggcatggtgtgggaagtttgggagcttcacttccagggaactttctctagcagtgagctccagacccaccataaacaggagaaaagagagaaggcgacaggggaggtgactgagaaaggacaatggtccaacctagctgcctacaaaccttttctgaggttgtaccatgtgccagaatctcagacagacaggaaatgagctacgggaagcctgtagtgcagcaggtaaggtgaggcatggtcaccactttctcagacaggctggacatagccacaggacccaaaagaggacagacgaggccatggacttgttcagagccatgagagatcacctctctctagggcatgtctgagtgtatccctgaagcagtggtcttcataatcctgcagtggatttggccatagggagctagaggaagagcaccagaggcatggtgagaggtgagtggtggggaatagtggggatatacaggaaggtggaggggccagatttcacagggctctgcatgccaggctgggttccgacgctggagccagtaggtgcccttgaatgtcctctttccatataggaaagcaagagttccatgccagagaagagcaagatcaggatcatgtttcaggagcatgaatgtgactcccatgtggaggttggaatggagtgcatgagactggagccaggaggccagggaagggtttcttgcagaaatgcagggatattggcagcctccgtctgacagcttaaagaagctgattaggagcaaaatattctccatgygtgtatgtgtgtacacacctccaagtgaatgtgcatttctccaagtgtacacttttgggtgcaaacatgtttgtatgtgtctgcttgtgaatgtgcttcagggcgtgtgatgtctagcttgctgtgaagtggcatggacgcctgccccaggaattgtgagactagttctgcacatgtgagtgtgtatgtgtgtgggagtaagtgtgtgccatccccggctctccagggagcccaaatcctgctctcaggctgcagtgacaagtcaggcagacaaatcttgccacagctcccatcaccttaattccatctgtgcatcttctgccaccaccccttataatgggctagattctccacacaggacactgtcgatgggctgcctgcatctcatgagggcctctccagccccatactgtccccacaaccatcttccacccccctagtttttgctcttggattacacaataactgc

SEQ ID NO: 57659 - DNA, 563 bp, Homo sapiens
gggaaatttgaatagatagcaaactcttttctcctttgcattggtttctgtattttggaaggagccaggcagacctgggtccatgattagtgtgaaatcttggggcaccctcatagccctcctgagcctttgtttctccccctgcaaagttggaatgatgatgttgaagctaatgtcaayaacataatgcctgtaaacaccttttttccccccatatatgacctgttcttatcaaagaagcaatattgaaaaatgagagatttgctgtagcagactggtccaagggtggtagttgggggtggggcaggaggaactaggtgttcctcctgatggggttacctccctgcttgtcctgggcaaccaagcctaagattggactttttggcttctggcttattgatcttgacagaaattgttcagagatagagcagagaactcatttttccatttagccaaactaatgccagcttattcaagaccacagagcaggtcaaggtcaacatgggatcaggcttccagagctctggctctcatggttagggctaggaagttgtgcaggctgc

SEQ ID NO: 57660 - DNA, 563 bp, Homo sapiens
gggaaatttgaatagatagcaaactcttttctcctttgcattggtttctgtattttggaaggagccaggcagacctgggtccatgattagtgtgaaatcttggggcaccctcatagccctcctgagcctttgtttctccccctgcaaagttggaatgatgatgttgaagctaatgtcaacaacataatgcctgtaaacaccttttttycccccatatatgacctgttcttatcaaagaagcaatattgaaaaatgagagatttgctgtagcagactggtccaagggtggtagttgggggtggggcaggaggaactaggtgttcctcctgatggggttacctccctgcttgtcctgggcaaccaagcctaagattggactttttggcttctggcttattgatcttgacagaaattgttcagagatagagcagagaactcatttttccatttagccaaactaatgccagcttattcaagaccacagagcaggtcaaggtcaacatgggatcaggcttccagagctctggctctcatggttagggctaggaagttgtgcaggctgc

SEQ ID NO: 57661 - DNA, 581 bp, Homo sapiens
cagtatggcttgtagctacacttagtggttgctatattttttcctattgtctcaaagatttagattgcccataagtagtcacagaccagtacaattacacggcttctagttcctgcctctacctctgtccacacctctccaagattaggagcctttgtaaatgaagatactcccgagagagaagcaaagactcacttcaaagtcttaaaagcacttaatgttgtcccagtaagctatgtgctcttattaatgggactgcttccttctgattacatttttatggacattttcctggtgacattgtgctagccttgttctgagctccccaatccaactgataaaaggccaaaatgaaagacagagagggagaaagacagagagagaggaaggaagaaagggagggtgggtggggaggagggagggaaggaaggaagactrggctttcatttcagcaagataggtttcctttccaatcatgtggaggaaaattcctccctcactgatatggtttggctgtgtcctcacccaaatctcatcttgaattgtaatccctataatccccacatatcacgggagggatc

SEQ ID NO: 57662 - DNA, 762 bp, Homo sapiens
gaatgtatgagagttccaattgctttgtatctttgtcagcacttggtgttggcagtttttaaaattttagccatctaatataggtgtgtaatagtatcttgtagtttttatttgcatttctctcatgattaatgatgttaaacatcttttcatatgtttatttaccatcatatcttttgtgaagtgtctatgcaaatttttgctcaattaggttgttttcttaactgagttttaagagtttgtatattgagattaaattgatttcctgcagtattaaagttttcttcatcttaatctggtacttttttttccttactatgttgcccatgctggtctcaaactcctggcctcaagcgatcctcctgccttggcttccctgggattacaggcatcagcttcctcgcacaacaatttcttataacgtttattccttggatgaaattcctactgtaattacattttcttttctttttttgagatggagtctcactctctcgcccagcctggagtgcagtggcgcgatctcggctcactgcaacctcygcctcctgggttcaagcaattctctgcctcagcctcctgagtagctggaattacaggtgcctgctaccacacccggctaatttttgtatttttagtagagacagggtttcaccatcttggccaggctggtcttgaactcctgacctcatgatccacccgccttggcctcccaaagtgctgagattacaggcgtgagccactgggcccagccataaatac

SEQ ID NO: 57663 - DNA, 706 bp, Homo sapiens
cccccttaccccaccacacacactgaaacaaaagtttcaagaagtcattaccacacaatgactcagatatgttctagtctagtctgtctattccattccattccagtctctttcaaaacgaaaataaaaggaaggaaatgctgcatgcgacttggtaagttaatttcaggacaccttgggactgcttcctgctgcatgaggcatcagcacacagcaggggatattttgcattcctgtgtgcaccgtgggttagacaggctgcttggccctaagtggagaatggaactccagtagaaaggctgagatgcactgcaagtaaccactgcagaaaggagaggatgcccacaggcaggctgaagtggacccgtgtggaaggaacacttcaagaccactggscaagagacttccttcatttttatcccttcctgtttttcgcctgtgctgaggattcaccaccagtgtggggagcctctgactgtaaaaggaaagctgactctggctccttcgtgttttctgttaagttggggcctaagtttttctgccagcctttgcggaggaaatgcagcttccctggcacactgcccggtcaagggacgttgaatccattgcaatcagcagttgaagatccacactacaggccatgttcttaaaataagtggctccaggacttccaagaggcagaaggggcttcagctggccatgggca

SEQ ID NO: 57664 - DNA, 649 bp, Homo sapiens
ggctgctaccttcattttgaaattctatccatgagctacattaattaacctgcattcagtgtcaggatgtatttcttaatttagatttttaaatttttagagcatgtggctaaccatgaatgttgcattttctcagtacctatttattcatatgaaactataggtctgggctcagagttcatcaatatttatagagaaggctctacctgttgagcactgtgctaggcatccccagagatgctggcccacttcatgccttaggcagccccacacgtgagcattactaacccattgctgctatgagagcattcagaaagaaagcagtttaagttgcttgactaaactggtagagttgaaattaaactctgtctcttcatgttactggactgcttggatatctactttcagaaagactacagyttgatataaacattgtagttttgctcatggaaaacttacagtaaatctgggctgtttcaacacaactgtcaaactgttcacctacagctgtattttctcttgcaatgggtgaataaggtacaatgatggttgtacagaccattactattattacctgttaatttacatttaaacagatttataatttctggccctgatttccagtccagtaacagcaaaaatccatatt

SEQ ID NO: 57665 - DNA, 1255 bp, Homo sapiens
cagagtctccctaggggcatggagagggccctgacttggggctcgaggtcaggtggcagtgaagggcctctacagcgataaagcccagctgcctctttacctttcctcatagtgaaaatacatgggaagaaaaggagtgctttgtccaactctgttctagcccatttcatggtctggttgattcttttggtagatgctgaacactggaaaaatcctgcaaggattgaaggtgagtgtggaagtagacggagaaaacttaggcatttttacgtgtctgtatttttgcttctttccaaaaatgttttaatagggtcaggctcatttgtttgtacatttaccatgtttgtttgaacagtcttctttcggtttcttgagcaatgggcatggtttaatccaagaatcttagaatttggctgggcattactgaccaggtgcaaaaccaagggctgtgcctgaagttttcttttgagasctcaggaattataagcagcaagaaagccactgggtacccattgaattaagtagttattgggaggtgggtcctggggagtggagagaggcagggaggcaggcctgataatggtggaaaagagaaaaagaaggataaaaggaggagcaaagatgtgcagatacaaagctagatcatctacagtacgacgaaggttaggggtcattgagaatgctgcctgattctgtcactcagagacgaaatcctgcacactctagcaccatgtgtgaaaataccaatgtaggaaggaaaggcccggggctgatttgttacaaggtgacagcttagatagtgggatcatggagtccattcttcagaactggctagatcttaggaacctcattgtctagttttagtccagtttttctattacctgaagttctttaaattttgagttttacaagcagaacaaggagatttaacttctgtttgcaatgagtgatccagttctctctttttaactttgaggctgtaaccatccacaataaattagtaatcagacctttcctgatatgtatcaaagaaggagactgtctttctatgaagagaactgacgcacatccttggagagggctccatcatcatactgtcatacaaatctgggcaaaagaggggcaagtgccaaatgagatccagtttggatacatgaatattaagttgtacaaaaaaaacaaggtctttgcagggcttcctgtggagctggggaagggtctatgtcccttgtcttggccagtagtccctcaaacc

SEQ ID NO: 57666 - DNA, 481 bp, Homo sapiens
ggagtgagtaacgggacccaccccacataacagggagcttcggaccctaacagaagggagctgagctcacctcctgtgaatgtccctctcctgtggccgggtggatgtgactgacagctgtcactcccttccatggggccagctcacagcaaaygagaacattcccttcctgatgagccctacataattttacatactcttctgttctttttctgttcttttccttaacacgcagctgccatgtcttgaatgatttacctttcaagatttacttcagtgactacagggtcaatttccctttcaagttatatgcagctttcaattgtaagcatttaaagaggtgggagctgaggttttcaactcaagcattaatggagtcaactaatccacatacgtattatgtgatttgttaaatgcttaaagccaacagattaatttgttttctcccctgaaatgctgtggatactgtgtgcaaatatta

SEQ ID NO: 57667 - DNA, 2250 bp, Homo sapiens
acagaggctgagatggggatccccttgccttgaggctcaggtgttgagtcactggctttgcctggggacaggggcctttggtcccagggatcctaccatgggatcttcaatccagtaacagctctcgtgcctagagctgatttctaaagttaaagattcgagagtgaagaggctatgtagttcagtgattaagagcatggactctgaggccagcctgcccacatttggatcccagctcaaccatgtgtcatctgttgtaaccttgagcaggtaacctctctgtgcctgtttcctctcccataaaatgaggataataatagtaatgacctcacagcattcttgtaaaggttaaatgagtgattatatgcaaagttcttggaacagtgcctgacacatagtaagcactacttaaatttagctgttattatttagggatggaaatgaacagttgataaacctgaattctaagagcataataaagttgtctggttcatcctgaagactctgcatttctatcacctaaagttacacctagaattaattctgggagacagaggtagacagagtgagatagagagagattaatagtctcctttatgagaggaactttttaatgccacaataaatgaagcagggatcatagaagggcaggtctcccatatttgagggtttgtacagcaccaggctcaggttaaagattgatttgttctttattttatatatgattgtatacaaagtgatgatttgatatgcatgcattatggagtgattaaatcaagctaatcagcatacccaacaacacatacttattgtttgtttttggtgagaacatttaagatctcctctcttggcaattttccagcatacaatgcattataatttactatagtcatcatgctgtataacagatctccagcatgtatttctcctaactgaaattttgcaccctttgaccaagatctctccaacatccscacacacggtttttgttaaccaccatctagtctctgtttctatgagttcaacttttttagattccttccacatataagtgaaatcaggcagtatttgtctctgtgcctggcttatttcactcagccaaatgttctccaagttcacccacactgttgcaaatgacaggattcccttctctttatggctgaatagtattccgttgtgtatttataccaccttttctttctccattcatccactgatgaacagttaggttgattccatgtctgggctattgtgaatggtactgcaatgaacatgggggtgcagagatctcttcaacatactgatttcattttctttggatatacacccagtgatggcattgctggatcctatgatagttctatttctaattttttgaggagtttctacactgttttccataatggttgtactaatttgcattcccatcaacagtgtacaagggttcttttttctccctatcctcatcagcatttatcttttgtggttttgataatggccattctaacaggtatgagatgatatctccttgtggttttaatttgcatttccctgatgattagtgatgttgagcattttttcatatacttgttggccatttcttggccatttgtaagtctccttagacatgtctattcatgtcttttgcccatttttaaattgggttatttgttttcttgttattgagttgcttgagttccttatgtatttcaataatggatgtcatacttttcttttctttttttttgcagttgcaagatttaatagagtgaagacagagctcccatacaaagggaggggacccaaagggggttgctgttgccggctcaaatgcctgggtttatatcccaatcattgtctctccccctgtgctctcaggcaatagatgattggctatttctttacctcctgtttttgcctaattagcattttagtgagctctctttactatccgattggttgggtgtgagctaagttgcaagccccatgtttaaaagtggaagcagtcaccttcccagctaggcttagggattcttagtcagcctaggaaatccagctagtcctgtctctcaatcccccctctcaacaggaaaacccaagtgctgttggggaggttggccgacgaccgctctaactgcttcctgctgaattggggcatagtaggggttgtgcagttgaaatttccttgggggagtgctttcgatatcattaacatcggtgcatgggctagcaggccggtccaggggtctg

SEQ ID NO: 57668 - DNA, 974 bp, Homo sapiens
tactacacataaaatctcattcctttgttgaatttcaggtcattcaaaaagtcttcaagattttattcacagcaaggaataatgacagatgtttacagagaaagttgctgctgcttttctagacagttttcagcagtttcccctctgttctctgcaggcacgtccttgtgatgcccagggctgacttggcttttctgatcccccgctaacctgtgtgtccagttcccggcctgcccttcctcaattttgtrcataatttcaatacactttgctaaaaggaaaacttctctctataattgtcatatgctgtttatgtcttaaaaggtcaccttaaataggtgatataaaaaatgatataaaaaatttcagtcaatggctgatttttttaaacgctccatttatttggaatgcaccgtctttcctttgcccctcgaaatgcagtcacattgcacttgtgtcctggcctgtctagttgcaccttatccatgttatcatgcagccaggcatttctaatacagtttcacactgctagcaaaattggcacttcatgtactattagccttgtagaaaataagtttgcttttcagaacgcagtagcatcccattatgatactgcgtggactcagctataccagggacaggtagcacaaatgtcatcacctccaccccaagctgtagaactattggctcataatggggcattcagctctaacttccagtgtccgcattggaaagcaccaatatgatcttccgagggactttaaacattttatgcttctctttttggatttcaatttgagtgaatgagttaatacagaaacacttttgtcttcaaaaagcttcctttttttttttttttggccatcctcgtgctgaaatcagacagtacaagtcttatttcattccctggaccaggacaaagtcactggaataagaaggcaagaacctttataggcccaaatgccttctcattg

SEQ ID NO: 57669 - DNA, 974 bp, Homo sapiens
tactacacataaaatctcattcctttgttgaatttcaggtcattcaaaaagtcttcaagattttattcacagcaaggaataatgacagatgtttacagagaaagttgctgctgcttttctagacagttttcagcagtttcccctctgttctctgcaggcacgtccttgtgatgcccagggctgacttggcttttctgatcccccgctaacctgtgtgtccagttcccggcctgcccttcctcaattttgtgcataatttcaatacactttgctaaaaggaaaacttctctctataattgtcatatgctgtttatgtcttaaaaggtcaccttaaataggtgatataaaaaatgatataaaaaatttcagtcaatggctgatttttttaaacgctccatttatttggaatgcaccgtctttcctttgcccctcgaaatgcagtcacattgcacttgtgtcctggcctgtctagttgcaccttatccatgttatcatgcagccaggcatttctaatacagtttcacactgctagcaaaattggcacttcatgtactattagccttgtagaaaataagtttgcttttcagaacgcagtagcatcccattatgatactgcgtggactcagctataccagggacaggtagcacaaatgtcatcacctccaccccaagctgtagaactattggctcataatggggcattcagctctaacttccagtgtccgcattggaaagcaccaatatgatcttccgagggactttaaacattttatgcttctctttttggatttcaatttgagtgaatgagttaatacagaaacayttttgtcttcaaaaagcttcctttttttttttttttggccatcctcgtgctgaaatcagacagtacaagtcttatttcattccctggaccaggacaaagtcactggaataagaaggcaagaacctttataggcccaaatgccttctcattg

SEQ ID NO: 57670 - DNA, 637 bp, Homo sapiens
tctgcttcagcccgttaatgacctgcccggggaacgtgcccatcaggcaggccacgccctctctccctcagtagaagcggctgtcccctcctgccagagcaccggcacacctcactgtccttcctccctccagcrctgtgctctcttctagactacgggcccagggaagagggagggccccactgtgctgtcctgtccctgagtaaggctgggtgaatggcaggggtgcgacaccagctggagcaggaggtggcagccatcgtgggcacactgaccgactggcagccctcccccaagcacactgcacacctgggggacagagcagggtgtgcccttgattatattaaataaaagaagcagccccatcaccagctggataaaccacagacctgaagcccctagggccgcccagttcagtctccatggggcagtgagtgagggtgggagacagcgcggccgtaggggcctgaggagccactcccctctatttggggaagggagaacagctccagcggcctcctcacctccttttctgtgaatgtcttgcttagaggagacaatattcttatattctttaaagaacattcttttgccgggcgcggtggctcacgcctgtaatcccagcactttgggaggc

SEQ ID NO: 57671 - DNA, 637 bp, Homo sapiens
tctgcttcagcccgttaatgacctgcccggggaacgtgcccatcaggcaggccacgccctctctccctcagtagaagcggctgtcccctcctgccagagcaccggcacacctcactgtccttcctccctccagcactgtgctctcttctagactacgggcccagggaagagggagggccccactgtgctgtcctgtccctgagtaaggctgggtgaatggcaggggtgcgacaccrgctggagcaggaggtggcagccatcgtgggcacactgaccgactggcagccctcccccaagcacactgcacacctgggggacagagcagggtgtgcccttgattatattaaataaaagaagcagccccatcaccagctggataaaccacagacctgaagcccctagggccgcccagttcagtctccatggggcagtgagtgagggtgggagacagcgcggccgtaggggcctgaggagccactcccctctatttggggaagggagaacagctccagcggcctcctcacctccttttctgtgaatgtcttgcttagaggagacaatattcttatattctttaaagaacattcttttgccgggcgcggtggctcacgcctgtaatcccagcactttgggaggc

SEQ ID NO: 57672 - DNA, 731 bp, Homo sapiens
aatcctttgttcaagggaaatgttataagaaaccttaatatgtaaaattgaggaaagcagacctttctgattgaagtagggggtgagagtttcactgggttgccccacagaaacatgggagaggttctggggaaagcytagggcagaagagagtttgcaaaccactgcatagcccccgagcctttattgcccaagcaccatcatttgagcacttccttcacatgtattgtcattgtctgtgtactgccagtattattttttacttcatcttttctttatatttattttttatatatttatatatttatttatatatatcattattttaattcatatttttaaaatatatttttcctgtaaatatatatatataaagatattttgaaaagttctcatacacaaaactaacaaaagtacaacaaactcaatatacacagcttcaacaatgaacgtatgccttcccctattccagctgtgtttcactactcccccagcactggattatttcgaggtaaatcacaaaacattatatcgctttatgtataaatattttagtaggtatctctaaaacataggagctctaaaactatacatgcacttatatacctatatgtaatcacaacaccattatcataaagaataccataataattccttaatactaattataatacctaatgttcaaatttctctaattatatctatattttacaattggtttgctcaaatca

SEQ ID NO: 57673 - DNA, 571 bp, Homo sapiens
gaacaaactattacatgagactttcatatatattggtgtgccataatcaacctactacaggttgagcatcccttatccaaaacgtttgggaacaggaccattttggatataggattttttcatattttggaatatctgcattatacctaccaatcgtggctccctaatcaaaaagtccgaaattcaaaatgctccwatgagtgattggactatcatgtcagcatgcaaaagtttgagattttggagcattgtggattttagattttcagatcaggtatgtccaacctgtactctatgttacacatttaagttttttcctatttaataaaaataacactgcaatgagcaccttcatgtgttaatcttcacctttcagatgatttccttcagatgggtttgtagacgtgtgactaccttctaccatcagggtccactggatgttaggtttgggtttcttttttgagcagttctaactatttgtaaggactgctacttcatgatttctatttttttcttggaagcctttcaaaaattcattctactttacaatttccatgagtccactggatgc

SEQ ID NO: 57674 - DNA, 571 bp, Homo sapiens
gaacaaactattacatgagactttcatatatattggtgtgccataatcaacctactacaggttgagcatcccttatccaaaacgtttgggaacaggaccattttggatataggattttttcatattttggaatatctgcattatacctaccaatcgtggctccctaatcaaaaagtccgaaattcaaaatgctccaatgagtgattggactatcatgtcagcatgcaaaagtttgagattttggagcattgtggattttagattttcagatcaggtatgtccaacctgtactctatgttacacatttaagttttttcctatttaataaaaataacactgcaatgagcaccttcatgtgttaatcttcrcctttcagatgatttccttcagatgggtttgtagacgtgtgactaccttctaccatcagggtccactggatgttaggtttgggtttcttttttgagcagttctaactatttgtaaggactgctacttcatgatttctatttttttcttggaagcctttcaaaaattcattctactttacaatttccatgagtccactggatgc

SEQ ID NO: 57675 - DNA, 921 bp, Homo sapiens
attaaaaggcttgaaaatgcattcctacttttaatggggggatgggatgacaattgtgtttttaaggttgaataatcactggtttatggcacttaactcttttactagttcacaaactatgagtatattgtttacattaatttaagcaatgcattatgttcacattatttcatgaatgttttagtgtagttatccaacaaatatttcatgaaaattcatttttttatccttctgtgtgtcacaaggcattatataatgtataagaatggagcttacagtgcagaaggagctgatggtgataaatttcacaagtaaaaataaagttcagggttaagatagtatcttattctctattaaatcagaggattaaccttcctatgcatttccagctacaaaatgtgacccatgatgaggtgagtgaagtcaaatcagcttttcaagactatatgtaaaataacatgaatagaaagaaatacttcaaatttatagaatgttaatctgtatagtctttgaggttaaattgatttagtatctttgactaaaacttatgaatcagtgagaatttgatggggaaatatgagcatgtaatttcgatccatcatctatctttatttgttggtttagagctaagcatatgtcagtattcccagtataggtctttcaaggtatgtctctgtatgtaagggtaatatamccttgtgagtatgagtatgagtgtgagtgtgtgtggagaaatcaattgcttattaatagctttaggaaatggtattagttatttagttgcctaattgggggagtagttttcattcattttgcttttcttttttttttttcaagacagagtctcactgtcatccagtctggagtgcagtgtggcatgatcatggctcattgtaatcttgaactcctgagcataaggga

SEQ ID NO: 57676 - DNA, 964 bp, Homo sapiens
gcatgtgcaattttcaaagcattgctgccggttgaacaaaacrtaagtgctggttttttgtaacctccctttctgtggccactttgtggccccggttatgaaagctttttagttttactttgatgtgccgtaaaaaacacaaatttagaatcagacatatctagactcagatactagctttgcatcctacactctaaaagcttccttttgttggaaagaaaatggggatgggaacatctaactctaattgttattgtgagtgtcaccttttataaactgagccactacagggcaatattttcaataaatgatggcttcttttttgtaactcagtggcccttatgccaaatttagaattacctgggagttttaaaaaattttagtactctgattgaagaccctagacttaggttcacctgagcctaggatggagctggaaatctatgtgttagaagtccctcagtttgttttacagtgctatcaggtgggaaccagtgctgtaataccatcagataaatgaaaaacatgacaaagtagatttggcattcaagtatagtgttctaacacctcttcatccccaactacatgtgtatgtgtacatgtgtgggtgtgttccaatacaatgactatttctgaataggtagctatcattatttgctcaggatactgcttctatgtatttttcatttcgtatttactcctctttggctgacaacctatgtagtgtgattatgaattaatgtagctacttttctcatatggaaaactcacacaaaggcaaaagtagttattaaagaggactagtgacagcatcactggaattaaatgtgtgcctctgaagctgattgctttggattgacagtacacagctcaaggtagatattctgatgtttttgaaatgcaccctacttctttatatgctgtctagtcttgtggcttcagaattacacaagcttaataataa

SEQ ID NO: 57677 - DNA, 964 bp, Homo sapiens
actgttattggtctgagaccatttcattgctattagctatactctgcatattatccagtaatttatgttctctgtggcattgccaaatgatccttacatttgataaactgtatgaattattatattcttattgaattataagtaattgcatctgtttcagttattgagaccacaytctgcatcatttgtgcatttatttttattgttgtaaaatcaaggccttagctaaataaattagtgataagcccggaaatgtttatgaagagtttatatcattaaggagttgagagagttttagaaattattttcaatgttaattcttttcaatctttcaatattaatgtgcaaactgaaaaatttgtttctcattttgtgaattagtcagctttgtggggtgcctataaaattactttgtctaaaaatatattaaattcttttattatagaacaaattgcattcttttgcccttgtctgtgaagacagaaattatatctaacttattctcctatcacagagtatggcaatgctaagtccacagtaggtgttcagtaaatagttttaactaagtaataatcacacaaccaaaattttctctgtttgccatttagaaaggaattacagtattaaaaacattaatcaaaaattatcctgaagaaacttacagtctcataatagttttaaatattttaaactcttgatttttcctgagatattctcaaattttctcttttactttcatgagttctgataaccaattcaactcagcaaggacaaaccaccatgtgagtagattagaagcagaaaaggcaaaggtgtttttagggtgcatggatccctttagtgattcatgtcacttggagctagtctggaattatacattgcttttccttggaaagtcctagtttagatctgttgtgctgatgtctaaataaattttagtatttttactccaaaataggccctg

SEQ ID NO: 57678 - DNA, 964 bp, Homo sapiens
actgttattggtctgagaccatttcattgctattagctatactctgcatattatccagtaatttatgttctctgtggcattgccaaatgatccttacatttgataaactgtatgaattattatattcttattgaattataagtaattgcatctgtttcagttattgagaccacactctgcatcatttgtgcatttatttttattgttgtaaaatcaaggccttagctaaataaattagtgataagcccggaaatgtttatgaagagtttatatcattaaggagttgagagagttttagaaattattttcaatrttaattcttttcaatctttcaatattaatgtgcaaactgaaaaatttgtttctcattttgtgaattagtcagctttgtggggtgcctataaaattactttgtctaaaaatatattaaattcttttattatagaacaaattgcattcttttgcccttgtctgtgaagacagaaattatatctaacttattctcctatcacagagtatggcaatgctaagtccacagtaggtgttcagtaaatagttttaactaagtaataatcacacaaccaaaattttctctgtttgccatttagaaaggaattacagtattaaaaacattaatcaaaaattatcctgaagaaacttacagtctcataatagttttaaatattttaaactcttgatttttcctgagatattctcaaattttctcttttactttcatgagttctgataaccaattcaactcagcaaggacaaaccaccatgtgagtagattagaagcagaaaaggcaaaggtgtttttagggtgcatggatccctttagtgattcatgtcacttggagctagtctggaattatacattgcttttccttggaaagtcctagtttagatctgttgtgctgatgtctaaataaattttagtatttttactccaaaataggccctg

SEQ ID NO: 57679 - DNA, 964 bp, Homo sapiens
actgttattggtctgagaccatttcattgctattagctatactctgcatattatccagtaatttatgttctctgtggcattgccaaatgatccttacatttgataaactgtatgaattattatattcttattgaattataagtaattgcatctgtttcagttattgagaccacactctgcatcatttgtgcatttatttttattgttgtaaaatcaaggccttagctaaataaattagtgataagcccggaaatgtttatgaagagtttatatcattaaggagttgagagagttttagaaattattttcaatgttaattcttttcaatctttcaatattaatgtgcaaactgaaaaatttgtttctcattttgtgaattagtcagctttgtggggtgcctataaaattactttgtctaaaaatatattaaattcttttattatagaacaaattgcattcttttgcccttgtctgtgaagacagaaattatatctaacttattctcctatcacagagtatggcaatgctaagtycacagtaggtgttcagtaaatagttttaactaagtaataatcacacaaccaaaattttctctgtttgccatttagaaaggaattacagtattaaaaacattaatcaaaaattatcctgaagaaacttacagtctcataatagttttaaatattttaaactcttgatttttcctgagatattctcaaattttctcttttactttcatgagttctgataaccaattcaactcagcaaggacaaaccaccatgtgagtagattagaagcagaaaaggcaaaggtgtttttagggtgcatggatccctttagtgattcatgtcacttggagctagtctggaattatacattgcttttccttggaaagtcctagtttagatctgttgtgctgatgtctaaataaattttagtatttttactccaaaataggccctg

SEQ ID NO: 57680 - DNA, 964 bp, Homo sapiens
actgttattggtctgagaccatttcattgctattagctatactctgcatattatccagtaatttatgttctctgtggcattgccaaatgatccttacatttgataaactgtatgaattattatattcttattgaattataagtaattgcatctgtttcagttattgagaccacactctgcatcatttgtgcatttatttttattgttgtaaaatcaaggccttagctaaataaattagtgataagcccggaaatgtttatgaagagtttatatcattaaggagttgagagagttttagaaattattttcaatgttaattcttttcaatctttcaatattaatgtgcaaactgaaaaatttgtttctcattttgtgaattagtcagctttgtggggtgcctataaaattactttgtctaaaaatatattaaattcttttattatagaacaaattgcattcttttgcccttgtctgtgaagacagaaattatatctaacttattctcctatcacagagtatggcaatgctaagtccacagtaggtgttcagtaaatagttttaactaagtaataatcacacaaccaaaattttctctgtttgccatttagaaaggaattacagtattaaaaacattaatcaaaaattatcctgaagaaacttacagtctcataatagttttaaatattttaaactcttgatttttcctgagatattctcaaattttctcttttactttcatgagttctgataaccaattcaactcagcaaggacaaaccaccatgtgagtagattagaagcagaaaaggcaaaggtgtttttagggtgcatggatccctttagtgattcatgtcacttggagctagtctggaattatacattgcttttccttggaaagtcctagtttagatctgttgtgctgatgtctaaataaattttagtattttyactccaaaataggccctg

SEQ ID NO: 57681 - DNA, 2405 bp, Homo sapiens
tgcattttaagactcatcggtatgacccaaatctgtccggtgtttgcacttgtcatacatttctcaagtattattttggagattttccaggcccgcagtgctcttggtcatacaattttcctttctctctcctcctctcttttctatccttacttcctctatgtatttttaaattagtaatatttttaacctgtagaacttttacggtgcctatttctggctccagaatagcagtatttatatctttagctcctaaaatctgaagaagcgtcttggatgaattcacagctgctaaatttataaagtgacattttaaactgtgtttagaatggattattgtcagatcagtaatcagtgaataatagcaaatgatgcagaaccctaaacatgtcttgttcttttttctctctgtgcctcaagtatatttatcaggaaacacctcagtgatttcttttgtacacaccctgtcactattgcaggctactgtatcatagaactatactccatgtatttaattcaaaataaacatattgatacaataatactagtagacattaatttgttctacattaactttctagagaatagacattttattaatttaatatggaaataaatatgagtgtacctaaatcataataaaccttaacgtattatgtattttagtctacatatcagaattttttgaattccattaatatacaatgtgaagagtgaaataaaacacttgggcctcttcgagggtggagggtaggaagagcgagaggatcaggaaaaataactaatgggtactaggcttgatacgtgggtgatgaaataatctgtataacaaatccctatgacacaagtttacctatgcaacaagcctacacttgtacccctgaacttaaagtaaaagttaaaaatatatttaaaaaaacagttgaaatatattaaaaattaaattacacagaaattgtggtagtgcttcttgctttattttactcatgacatattataatgttaatatttgttttcatatattttctttggttatttgtacacattatttcacatgtctttgtcttggtatttgtagtttctccaaacaaaagtattggaaaaaatgctatcagacgttgaaagagaagtatcagtaaagtatagtaataggcagagacaggacaaataaggaaaaaaattaatcaaaaataaaattcataaagttatgaaaaaaattagcaagcaaaatgaaagaaaatgatttgagggtactgaatgtaaaagtatgcatttaaaccatgatattataacctaatttctaagtgtatatttatattttatatatatatatatagttatggttcatatatcttcaatattttcttatggaaacaaacattgagattacatagcataaattttaaaatagatttttttcctcagttaccatcatttgttttatcttacatttagtgtacttttcaattataccatggcttagcttggaatggacatgaacagtttacatgaaaactttgttttaaaaagtctctgtagtcaactcctgaagacgtaaccacgataacatgaccacatcttttgtacagatttttcgttaagaaaaatttaaccccctcacttctgcatttcgtttattttcttcaggtattttatagaatcaaaaaggtgaatataaatatgtgtactacaatggttatttgtggcaataataggactaaattaattctcacaaatctattttagatctactgaatttgagcaaatcatgcctttgttaattggctttgatgacattactgaagagtattcagtatctttgatgtattttttgaatttttttattctagctgtaaaaccagatataattttggttcaatcctgtttttcctgtgtactaacaatagaatcatgtgcaaattactcaaaatctctgactttatttttctaatggttaaaatgmgtataaagtcaatgtcatggagctgttacaaaaattaaatgagtggctatactttctaaataccagttgcctcaacctgactttgtttactcttgtttataatgcagtgatacaacccaaaaagatgaaaatggcacactggaaataaacgatagtggaatattttgagtactctaatgtaattatataagtaaacgggaaaagtgcagggaggatattgatgtcttgcttttcttcagcagagctgcattaacataaaggggagtcattttattgaataataaaagactgacaatcactgtgattggctgacagccattagtgcagtgtaattctaaatagcttgtttttcaaagttcttcttgaataactcttcccagcctggttgaaaggttcaaaactcatttttaaagtgaagtttttcacatttgaataccactgt

SEQ ID NO: 57682 - DNA, 495 bp, Homo sapiens
tccataatgctgaagtataaagacccctctccttcagaaatgccatagtrcatcctgtctgttttattcatgtggaaatgaattcacatatttcaccttgtgacatttcttctatcatcttgaagaatgaaagttccctacaagaatgcatgttatttgaagatatttatttcttagtaacagtgttgcacttaataggcattcaataaatatctgctgattagaactgattgcaagaaagaggccagactttcgatattctagatctcaagaagtgaagagttcaaaatcagcaatacctcaattgacattaattggaattttggaaggatcaaagctaaagagaattttaaatagaacaattttctagaaaacattatttaatttttaaaaaacaataacatcaaaagtataattgctttttaattttttacctgttttatctaaatgtacagactgtgggaagtttttattactcatttgtctcaattctgg

SEQ ID NO: 57683 - DNA, 495 bp, Homo sapiens
tccataatgctgaagtataaagacccctctccttcagaaatgccatagtacatcctgtctgttttattcatgtggaaatgaattcacatatttcaccttgtgayatttcttctatcatcttgaagaatgaaagttccctacaagaatgcatgttatttgaagatatttatttcttagtaacagtgttgcacttaataggcattcaataaatatctgctgattagaactgattgcaagaaagaggccagactttcgatattctagatctcaagaagtgaagagttcaaaatcagcaatacctcaattgacattaattggaattttggaaggatcaaagctaaagagaattttaaatagaacaattttctagaaaacattatttaatttttaaaaaacaataacatcaaaagtataattgctttttaattttttacctgttttatctaaatgtacagactgtgggaagtttttattactcatttgtctcaattctgg

SEQ ID NO: 57684 - DNA, 654 bp, Homo sapiens
ggccaccaagtcctggcagcctcagaaaccctccagtagattttaaaaatattttgattcagcctatcaagttgttcttcagatgaacatttttcttcatcataggctcaacctggctaggccatctcactaggcgatgaactcccagataagcaacatagcacaacttactgggaagaatatgccagatagacttaggtgcaaatcctggctcaaccagtttctaaccaatytcaagctcttgggcaattattttacatctttgattcttcatttgtgtatctgtaaaatgggaattataatagtacttccctcatagggtgaggattaaatgaggtaatttgctgagaatagtgtctggcagacagccagtgccaagtaaatgttgttttcctgtcttttctctgcctggggccattcctgtggataaaatatatttgcctcaccatgcagtttgagagaaaataaaatatttaaataaatcttttacggataacttagaagattctctgctaccatagtggcgtggagaagtccatggtctataatttcactaataattacaaaaatgccacagtctttgcggggacatggatgaagctgaaaaccatcattctcagcaaactaacacaggaacagaaaaccaaacagtgc

SEQ ID NO: 57685 - DNA, 1378 bp, Homo sapiens
atcagagaaactcacctgtgcctgaacctaagagtccagagttttcattaggggttgagcatgtacgcattcaatgcctctaggacttccatagtctctccagatcccccaaagaaaagcaggtgtttagcataaattacttggtttgtacagtttatctagaaaaactggtacagtgtagttaaaggcaaaaaaaccccagcagaaacagtcattagttagaacaaggagctcaatttccaggagaagccaatggggccagtccaatcataaagacaggtttagtatagggatgtgcacagtttgagcaacgcagaacaaccaggttaactcttccctggaagatggctgatgcattagcagccactttgtgatttggggaatggaaactgagggtaactgagatgtctttctggatccacccatccagtctgagcctggctaacttttcaaattgtgtgtctgcatgtgtgtgtctgtgtgtgtgtgtgtgtgtgtgtgtgtgtgagataggacagagagagagagacagagggaaagagagagtcctacctgtacaccaaagctgctagtaatactagtctctgttaccattgactagatccaattattaactgacactgaagtgagtgcttatgctatctcatttcytcagtttaaaaataacaagaataaaatattatttgagtaaggttttagtcattgataattatgacataattacaattaaagacatatttgaatcttctaggaggcattccagcaggatgatctctagggctcactaccacttgctttaagttgtgatagttcaacaaagaggtcaggagttattttgtaaggaatcttgaagagctctaaatttcaattttctttatggaccaaggttagctaatgacaatttcaggtaaagagaaataaaaaattatgtttatatgattctgaatgccagctttgccagtgttctcttctcttctcccttctcttttctttttttcctctgtcccgtgtccttcttcattacatccctcaagtgcttagatttttctttcttcagagagctctgatgaccacagcaatgacttgtctgtaccactgtctctttaatactgctggaatttaaggcaaatataaaatgcactgtccaatggaccattcatatcttacttcttgtttcttagactgtgctgtaagagttggatcattatgagtatcaactcaaatgacatcgggagtaaattgagagacaaaagagtaatgaagttagaacctctttgggagctgtcttgacaggatagtcagaggttgcaagctacgttacacaatttttgaaaggaagtctataaatatattattttaaaaaataaactgaattatt

SEQ ID NO: 57686 - DNA, 1378 bp, Homo sapiens
atcagagaaactcacctgtgcctgaacctaagagtccagagttttcattaggggttgagcatgtacgcattcaatgcctctaggacttccatagtctctccagatcccccaaagaaaagcaggtgtttagcataaattacttggtttgtacagtttatctagaaaaactggtacagtgtagttaaaggcaaaaaaaccccagcagaaacagtcattagttagaacaaggagctcaatttccaggagaagccaatggggccagtccaatcataaagacaggtttagtatagggatgtgcacagtttgagcaacgcagaacaaccaggttaactcttccctggaagatggctgatgcattagcagccactttgtgatttggggaatggaaactgagggtaactgagatgtctttctggatccacccatccagtctgagcctggctaacttttcaaattgtgtgtctgcatgtgtgtgtctgtgtgtgtgtgtgtgtgtgtgtgtgtgtgagataggacagagagagagagacagagggaaagagagagtcctacctgtacaccaaagctgctagtaatactagtctctgttaccattgactagatccaattattaactgacactgaagtgagtgcttatgctatctcatttcctcagtttaaaaataacaagaataaaatattatttgagtaaggttttagtcattgataattatgacataattacaattaaagacatatttgaatcttctaggaggcattccagcaggatgatctctagggctcactaccacttgctttaagttgtgatagttcaacaaagaggtcaggagttattttgtaaggaatcttgaagagctctaaatttcaattttctttatggaccaaggttagctaatgacaatttcaggtaaagagaaataaaaaattatgtttatatgattctgaatgccagctttgccagtgttctcttctcttctcccttctcttttctttttttcctctgtcccgtgtccttcttcattacatccctcaagtgcttagatttttctttcttcagagagctctgatgaccacagcaatgacttgtctgtaccactgtctctttaatactgctggaatttaaggcaaatataaaatgcactgtccaatggaccattcatatcttacttcttgtttcttagactgtgctgtargagttggatcattatgagtatcaactcaaatgacatcgggagtaaattgagagacaaaagagtaatgaagttagaacctctttgggagctgtcttgacaggatagtcagaggttgcaagctacgttacacaatttttgaaaggaagtctataaatatattattttaaaaaataaactgaattatt

SEQ ID NO: 57687 - DNA, 684 bp, Homo sapiens
cgaacaaattattggacctcagaagagaaccatatcaatatttgtaggaaagatagatgatacaggaaaagaaatattttatataattattgatacttatagacataaggaaataaaaatccaaatgagattgtcatattttttcaatggattagtgacagatttcctaggtttaagaaataacaattaaatgtcaaatcaaaaatttggaaaaggaatatcaagctaatagttgaaaaatgaaataatataattttagacacagcatttcaacttcagcttaatgttgcggagtgagtgagaaaaacctgactttaatacaaataaaagtggaattttaaaatgccctttataaagattatgtgttattttgatacataattgatgagagtataaattggtacaatttttggatccttatttggcaatagatatctagagatgtgaaactgaatatttctcactatgcaaaaaagaaaaccattgaaaatattttcataaagtaatctcctctccaaacaatattttcacctttgagatgacaagtataactgcagtggtgattcatctagagtattaaaaatattactgagcttcatagctgcccaagagggatacagagtaaamgttcttttaaaatttccccttttactgcaatacatctttccttaaaaaaaaaaaaaa

SEQ ID NO: 57688 - DNA, 1878 bp, Homo sapiens
atttcatagttaaaaaaaaaaaaatcccctatatgtagccggaataaacagtcactgtgagttgtccattttagagcataggtttttaggtggtgaagacctgtccttagttgaatttgtatgtgaattaaactcttatttttataacaattcacttgagttctttaaataaagatgatgccaaagagatgtaaggcttgtctctcagaagaatagtaaggattaatggcttcaggtattaggagaattaaatagaatagtattctatcaccatctaattgctttttcttttgataatatgtgccacagaatgtgaaacagctactgttcactccactgagagatacttaggatgctttcggtcagcctagctgaattgttagcatgatccttaattaaaatcatccaaatgatagaaggttcttcctgaagtcagtggaaaaacctcttagcatacactctagaactcaaaaggagcttaaaagtgggaacaactttagagttacaggcagaattagacgcagttaataatagcacttctcaaactgtatgtgcttttaaaaaatttcagtatgttgtgagccaataattttgttaaatataatataaatgaatagataaatgaaaaaaaaacacatacaaaaacaagccataattttaaaatttagattcaacagacataatattactgtcaaattgcaatgaaggtttctaaatacttatcctctattattatatccatcttgacatagcctggtaacagtttgtggatcatcagaagcctgtgaaccaaactttgggttgcacgaatttcagtagaaattatatgaaataaaatttctttctctgccgtttacacgttagcttttgttcagtacagatttctgcttactttcaaatgctgtcttgtcttcaaagctttccttgactttsccaagctgacttgggtaattcctagcctataatcttgctgtatccccaaagggcctctagtatagcaactgtgatatcaattcatttatttcatttaaagaaaatgtaaaaatagtccttaagacctagaaaggtttgtggcacacagacaataagtaaatgtttatttaatgaatgaaataaaaaacgaatgaattgtagcaaaatcctgaggctttaataacaacacacactggataaaggaaaacttcattttgcagaaagaaaagacagtttctcagtctcaaaagacttatgtgaatctaattattataaaaataacccttgatagacacctgaacacatgcatacatttcataactgtataacacagactgtggaggtgaaggagcatatggacctaaataaaaactcaagaccccttaagagaacttgctagcaatgctgatttaaataatttttaacagtgagggggtcggaggtggggatgggaaagggagttgaaaattaatgcccccagagtttcgtggtactctgtgctatcttttttcttttccctgtccctccaactgttaatatttggtatcttgttatactacttttatttcagtaaatatttgatgacagtctattatctactctgttaggcaccttggagagtacaaagagaaatgcatgaaattaactaaaagacaaaaaaatgcattaggtagaagtgcaatagcacatgaacgaagaacttttaaaaatatgaataaattattttaaaattaaaagtgttcaaatacagaatgcttttcaaatctgtgtttcttctgaggcagtctatggatatgcttaggacagctgttttagatgacacatctatataaatgtgaagtagatttattttctttaaacaaaccattagtgtatgtgtgtatatacacacacacatacatgtga

SEQ ID NO: 57689 - DNA, 960 bp, Homo sapiens
gcatagcaaactacaccaattcaactcaaatcctggcagttgttaacacttttggaaagggaactgagctactgatatactactgtgtgcctactatactaataggcactttaatacattatctaatgtaatcccaacaatcctgcaagttacgtcttatcattcccaatttacagatatggacacagaatgcacacaggttaagtatccagtgctctgtcatacaactgaatgtgggggagtccaggctacatctagatgtgtacttccttcgataacatgctcctacctcccagggtattttccttttggcttccaaaacattttgtaagcaaccactggtaacctcaaataagtggtatgatttccattataaagaagamaagactgagaaagagtaacagagaaatgtctttctctagctcagaaagctacaatttcacatagtcctaaaatgcctgtcttcatctttctgttatctccttttgaatacacttcaatccactcataacccttttcctaaaagagaattcaaaagactgaggtggaatctctgcctcagtcttcctctttgaattgccatcagaaaaacgatcaggggaaatatgttcagccaagagaagggggcagtatcccagcaccatcattttccttttaaacactaaactccaggctatatactggaaacctatcttagggcccattatatgaatcccacagaaagagacccacaaaatttggagacaaaaaagcaatagggagacaaagtgaaggatgcttctctcaaacatcaggacaatttacttaactaatgagttatgagatagcaggtagcttgagtttcccaatatccaacggaattgtttcccaaatgaaaacaaccaatgccaccaaaaattagacttgagccaatggcagaaatcctttttacaatattttaatcgtaagtaatcagaatgc

SEQ ID NO: 57690 - DNA, 639 bp, Homo sapiens
ggggatcccaaacaactcagccatctagataaataacattttagtgcaaatttaaaaaaattgatatggatgcaaacaatccatgatgagcaaaataccaaaatgttaaataaagagagcagcagtctaggtataagcagacagccaggttcttttaaaagagtgggtctggctcgtgtaaaataaaccattgtaacatcttccaatcccactttaaatttagatctaggaagataacctagatctaggagacttgagtgctgatgatttacccacattctcatctttgtcatatccacatctgcatttgctaaacattctcatcatggatgttcgggaatgagcaataccagccgcagaattgtactaggaggatatgccaacaaaaggtacgcagcttccatcctttgaaactagactgaacagaaattttcaaggacgactgtaggaaaattcatgtcctggaaagaagtattayccaaaaatgttcaattctaaaacgatatttctttgaaataattatttatttgagtagagataaagctttggcctgcattatattctctcaaaaaaaaaaaaaaagacaactactatatatactgatacctatttattttctggaagtgtagttcagctgat

SEQ ID NO: 57691 - DNA, 713 bp, Homo sapiens
tatgggaagggggggaaatgtaatcacatatgacaaggattatcaaaactgcttacacagtaaatcaggaaactgataacaggctgacaatggcatatacctgactgaggaatttcaggattccccaggcttgtaaaacagaaataacaacacagaacgagctgtgccgtgctgtcggggactgggatacacctgggtgaagggtggagggtgagaaaggcctgggacaggtgaagcaagagtctgtctcaaggacccttctccaagaccttgttttgcagggtgccctttcttgttacactcttcagaaacatcttaatgggtcctgaccttggtcaacacagaattagagcagtaagtcaggggtgacatgaggaaactccttggggaacagaaagagacacagagaaatcaaagttgtggtaaggactggggtctatcagagctccaccttgacaggagagtcgggaaaagagtcattctgcttcgtttctggcatcaactgactttctgaggaatggcctagaaagctatatggggcttcacgagtagggacgtgcaggcacactgagaagctctcgctcctttttggaccctgcctttcagggtgttgagaggccatccagggcaggcaaaggcatgcagagtggtgtcatgttgtaccccaaataaaagggcaataaattaacttyctggaacatagagtcaccgca

SEQ ID NO: 57692 - DNA, 552 bp, Homo sapiens
tgcctaatgccacatgtaacatattgtcacctgctccctgctagacccccattccccgctgcccatcagatatgtccctggaacttccaactcagcccatcccaaattgaacccatgccttctctcctcttcacactctactccactacactgtcccagccaataatcccggcccacactctgcacttgactcctgccattccctccatcatgttcttccaactccacttcctggggaatcctaccgcagagtcaactcttcttcgccttccactcccaaccctcaccccagtcttggccttcaatatcagtcaccagaattattacagaatctcctaacttggttccttgtctccctccctaactccacataagtatatttaagtaccttaccaaaaagaaatcaggtatttttcatttgttcaaaattttgctataagacaaggtccgaaatgcttaggctcgcccctgcctactttctccaacctyatctcctactcctcaccagcatactctcaggccaagctacatctcacttatgttacctgaatg

SEQ ID NO: 57693 - DNA, 727 bp, Homo sapiens
tcccgccacagctggcagccccatgtctcctctggctgcacacaggatcactagggaactttaaaaaggcactgatgccagggctccacttcggccaatacaatcagtctctcagggcagcactgggaggaggtgtttgtggtgtttcatggacacacacactgccagcatcagggagtagtgacagggtactgagaacagcagaatatctagawgtgagttcttcataactgtggaacacagaagtcttccctcacagtgtggcccttgcccactgctgctggaggagagcgctaaggccctggaacactcgtccttacacagccagagtctagtgaaggccacagagccacagcccactgcctttatgcactgatccactccattttctcatttttagattgttttaacctttgaaagcacagatcccaatgcagacgagctcccaattcttggagttcacagacatttgatccgtgtttgaaaataccccagtccttgtgcagagttcccagaattccaagttttcctttcccaggctcgttcttggagctggcccatgatactagctggactcttgaacattcctgacccatcacggccacccttcgaggcttccgattatgcagacacaccatgcccctgcacagtgctcaaagtcaggctgccgcatgcttctatactagacagtcaaagtcggagcccagggctcagcaaagcacctggc

SEQ ID NO: 57694 - DNA, 1080 bp, Homo sapiens
aaagtgtttggtgccgtgcctggcatataagtttgtaattactgtaggttgttattgtttataataatagtaataacttgaagttgttattctataacagagaccaattggaagattcgtaaaaaataattggagtcctacttttttctcagctgaaaaggatgccaacacagagattctgatatccccttgctgctggcccaaaatgcccaagaaggtgaagaatgggacaaatgtgggacattttaccccaaaatcatgaacaagaaggtccaaagataaagacagacagtagcagtaatggcggagactgggtccaggcaatagctgtgaaggctggccacctggatgaacacccagagatgaccttgaagaacatctgccagctcaggaccacatcagggacttctagcccaacaataagctaagttaaaccaggacactatgggatattttagaagagcaaacagcagctcctcaatgccagtgcatctttaagtcccagctcaataccaaataatgcagatgtaagagaatagattcaygaaagaaaaaaaagtgaagcctctattcaagaactttcacaaggagtgtgctcaaactcctgtgtgcagtggaatgaccaaaaatctgcagcttcccagtcttactgtgaagtcggtagggttgaggtagaaccctttttccttattaacaagattctcagatgctttggatatagaacaatttaagagtcaacttaaaaagtactcccagaagcttcagctgttaagtgtctaattatccaagatgagaaactcctaaactggaatattttcaatgtacctaaaaaaaaactatcctcttgattgaatttgcacgttatcataaagttttgggttaaatgcctaacagttaaggttcaatatgaacctgaaataattatttctacagaaaaataactcataacaagaaataaccatttttgaagtattaaatatgattgacttaatttaaagttttcctaaattagacctgagttttattaatttatatatacactgttctattcaaatgtgttatacgtccagggaaaacttg

SEQ ID NO: 57695 - DNA, 717 bp, Homo sapiens
gcagccgtcttggatccacaagaataaaagccaccactaaggatggcagagcaaaaagctaaaaggaacctgggattcctatacagcccttgacagcttccctgccaatttggtattagggagctataaatcaaatcccagtcatatcagccattaagcagttaggtcttctgttacttagagatgaatgcatttctaactgatacatgaatccacaacaatctgccatgggctcatgtgattacattctgccttgctctccagtatcacagtcaaggtctgagtttaggacttctkcagggacaaaatctaatgactcttctaaatcacttttagacatcagcagttatgcatagcaccgtgaatgatctgctgtttatcacacaggatcatgatcttgccttttcaccatctttaagactgacaatggaatctcaaggtatatggaagatattaactccatttcttgtttattttttttcctagttgacctccatgtcaaatgaagttaaacagtctttcctgaaagtcaggcaagtttttgacagaaatgtgttcattatatgtacaataatctcttaattacacaaaaaaagagcaagctctcttagctttgaaaattgtatgatatactctaagacacctgacaatttctactacttctcattgcattgtctatagaatggcatgcattctttgacagaaacaaacttttgt

SEQ ID NO: 57696 - DNA, 717 bp, Homo sapiens
gcagccgtcttggatccacaagaataaaagccaccactaaggatggcagagcaaaaagctaaaaggaacctgggattcctatacagcccttgacagcttccctgccaatttggtattagggagctataaatcaaatcccagtcatatcagccattaagcagttaggtcttctgttacttagagatgaatgcatttctaactgatacatgaatccacaacaatctgccatgggctcatgtgattacattctgccttgctctccagtatcacagtcaaggtctgagtttaggacttctgcakggacaaaatctaatgactcttctaaatcacttttagacatcagcagttatgcatagcaccgtgaatgatctgctgtttatcacacaggatcatgatcttgccttttcaccatctttaagactgacaatggaatctcaaggtatatggaagatattaactccatttcttgtttattttttttcctagttgacctccatgtcaaatgaagttaaacagtctttcctgaaagtcaggcaagtttttgacagaaatgtgttcattatatgtacaataatctcttaattacacaaaaaaagagcaagctctcttagctttgaaaattgtatgatatactctaagacacctgacaatttctactacttctcattgcattgtctatagaatggcatgcattctttgacagaaacaaacttttgt

SEQ ID NO: 57697 - DNA, 716 bp, Homo sapiens
ttatcaactcttctgcaaaaggaatcaggtttgcccaggaacttcactgaataaagatgagtttatatcttaaaaaggaaacagctggatggcaaaagccagggcgggaggcagctcttgtttcattagtgaagggaaactcgagggcccggagagaacaactgggctggcagccacggcggggagaagaaaaggaaacacacgatcataaagaactaatcatgaaaaatggaaagtgagaaagagccaagaacaacaagcaataaatagatttggaagggggaaaaagatgaggaggaatgaaaagctatgctcaggaaagaagcaacaagagcatgtgcgtttcatttgaaaaaaattaatgattctgaaaatcattaaaaagtcttaaggaaaatgttttaagatagcttttcagacccaggttttatttctatgtgttgtttcagagtctattccagtgcatgaaaaaaaaaaatcatgtggaactagtgggagaaacttaacatacaatgtgcctgagtgattggtttccctctgctttttttttttttttaatgatttctgcctgatgggggggaatagaaacaattagtttggctatgtaggatcactgataaatctggggattctaagattaactcatacaattctagtcgtaattagaaatatcaaatacattttcacctgtgccrgaatcacgtaatgttcattta

SEQ ID NO: 57698 - DNA, 716 bp, Homo sapiens
ttatcaactcttctgcaaaaggaatcaggtttgcccaggaacttcactgaataaagatgagtttatatcttaaaaaggaaacagctggatggcaaaagccagggcgggaggcagctcttgtttcattagtgaagggaaactcgagggcccggagagaacaactgggctggcagccacggcggggagaagaaaaggaaacacacgatcataaagaactaatcatgaaaaatggaaagtgagaaagagccaagaacaacaagcaataaatagatttggaagggggaaaaagatgaggaggaatgaaaagctatgctcaggaaagaagcaacaagagcatgtgcgtttcatttgaaaaaaattaatgattctgaaaatcattaaaaagtcttaaggaaaatgttttaagatagcttttcagacccaggttttatttctatgtgttgtttcagagtctattccagtgcatgaaaaaaaaaaatcatgtggaactagtgggagaaacttaacatacaatgtgcctgagtgattggtttccctctgctttttttttttttttaatgatttctgcctgatgggggggaatagaaacaattagtttggctatgtaggatcactgataaatctggggattctaagattaactcatacaattctagtcgtaattagaaatatcaaatacattttcacctgtgccakaatcacgtaatgttcattta

SEQ ID NO: 57699 - DNA, 1008 bp, Homo sapiens
cagaaacactcatatcagaaggataataaatgcaagccagtatactataggttaggaagacaataaagataaatgggtttgctaccaacaagctcagagtataaagagaaagacaccacagtgtattttaataayataaaggttgggaatatttaaactgccctttcaaaagatactttcagttacccctaaaataaaacaaacatgttttctcattttttatatttcttatttacattaatgttagatagccaatgataatcaaagtaagcactaaaaagaaagtctactatgctgttgtctagaccttcaaaaccagaatctgcctttcagataattatccagtcccagtaatgtgtggagaatggtggaaattctttaaatattaccatttgcatacaagaatttatcaattttgcattaaaattctgcttctaaaacagttattacctccacaaaccatagaatagatttttctgagatatatgagtgaaatacccatcatatgatatgggcattttgtaaaagtgataatgtgagtgaaatgcatgatgctcaatccatggtttgaacccaagtctatcttcatcagatctacttgtccagtgtcttcaaaagtcacaaagaagaactaccctgcttagctttctatctcctactgacagcctgctaaccagttctctttctcatgccttaggccctgacaacgaagtctcatctaatgtgggggttagagtttatattaaaggtacatgcaatgtacagatctagatcctgtactagaaatacatgcacagtgttacaaaagtattaactgctggctacttggaaatgggctaaagacgagttttagcacgtcttcattgaggagagaacatttgcattttgagaaatacataaattctcctataaggcaggataggtagaaaatcataatccagacagtagtatcagaacgtgcaaatgcatggaaacttgaaagaacatgggatgtttggggaaccacag

SEQ ID NO: 57700 - DNA, 1008 bp, Homo sapiens
cagaaacactcatatcagaaggataataaatgcaagccagtatactataggttaggaagacaataaagataaatgggtttgctaccaacaagctcagagtataaagagaaagacaccacagtgtattttaataatataaaggttgggaatatttaaactgccctttcaaaagatactttcagttacccctaaaataaaacaaacatgttttctcattttttatawttcttatttacattaatgttagatagccaatgataatcaaagtaagcactaaaaagaaagtctactatgctgttgtctagaccttcaaaaccagaatctgcctttcagataattatccagtcccagtaatgtgtggagaatggtggaaattctttaaatattaccatttgcatacaagaatttatcaattttgcattaaaattctgcttctaaaacagttattacctccacaaaccatagaatagatttttctgagatatatgagtgaaatacccatcatatgatatgggcattttgtaaaagtgataatgtgagtgaaatgcatgatgctcaatccatggtttgaacccaagtctatcttcatcagatctacttgtccagtgtcttcaaaagtcacaaagaagaactaccctgcttagctttctatctcctactgacagcctgctaaccagttctctttctcatgccttaggccctgacaacgaagtctcatctaatgtgggggttagagtttatattaaaggtacatgcaatgtacagatctagatcctgtactagaaatacatgcacagtgttacaaaagtattaactgctggctacttggaaatgggctaaagacgagttttagcacgtcttcattgaggagagaacatttgcattttgagaaatacataaattctcctataaggcaggataggtagaaaatcataatccagacagtagtatcagaacgtgcaaatgcatggaaacttgaaagaacatgggatgtttggggaaccacag

SEQ ID NO: 57701 - DNA, 1008 bp, Homo sapiens
cagaaacactcatatcagaaggataataaatgcaagccagtatactataggttaggaagacaataaagataaatgggtttgctaccaacaagctcagagtataaagagaaagacaccacagtgtattttaataatataaaggttgggaatatttaaactgccctttcaaaagatactttcagttacccctaaaataaaacaaacatgttttctcattttttatatttcttatttacattaatgttagatagccaatgataatcaaagtaagcactaaaaagaaagtctactatgctgttgtctagaccttcaaaaccagaatctgcctttcagataattatccagtcccagtaatgtgtggagaatggtggaaattctttaaatattaccatttgcatacaagaatttatcaattttgcattaaaattctgctkctaaaacagttattacctccacaaaccatagaatagatttttctgagatatatgagtgaaatacccatcatatgatatgggcattttgtaaaagtgataatgtgagtgaaatgcatgatgctcaatccatggtttgaacccaagtctatcttcatcagatctacttgtccagtgtcttcaaaagtcacaaagaagaactaccctgcttagctttctatctcctactgacagcctgctaaccagttctctttctcatgccttaggccctgacaacgaagtctcatctaatgtgggggttagagtttatattaaaggtacatgcaatgtacagatctagatcctgtactagaaatacatgcacagtgttacaaaagtattaactgctggctacttggaaatgggctaaagacgagttttagcacgtcttcattgaggagagaacatttgcattttgagaaatacataaattctcctataaggcaggataggtagaaaatcataatccagacagtagtatcagaacgtgcaaatgcatggaaacttgaaagaacatgggatgtttggggaaccacag

SEQ ID NO: 57702 - DNA, 770 bp, Homo sapiens
acttacgtccttcaagggaggctgggtcccacgttcttatggtgaattcatcacagaaagtctcctgatttttggagccaccaccaatgaagttctcaccaaaggacaagaaggcaaggacaatcaaggccctctgggcaaagcctttatgatttctgcccttgttatgcttttaagcagccaaatatagtggtcatgcttggagctgcagaagctctgtagcagcttgggaaaacaagaccatcaccttgagaataacagagcagaaaaaaaagtcttcaatttttgattatgccattgaactgctgaagaagccacactcagagatacttaccgtcctacctccaaactttattatattagataataaaagtcctaatcatttaaaccagctgaattaacatttctattggctgccaaacacatcctgatcaacatcttatatacagttagacacaggttttggtcaaaagtggtttcacttctacttggtttatcttcctgatttgatcacctcttgctaaggaaaccctygacagcacagtgttggatatccagtgaccattagataaatgagtttttctcagaactttttataatttataggaaaactgtattttaagttacatttcagattgtttactattggacaaaacagaaaagtgcatccattgtaactagtcctgtatgactggggaagaaaaaataaattattccaactcacctgttggacttctctaggagcaagtaaggtgagatggttaggatcc

SEQ ID NO: 57703 - DNA, 868 bp, Homo sapiens
cggaatttggcaatacctctgtctgctcacatttataccagcaaagtgtacacctcgttaacagtcctgttattccgcatctgtgcccttgttgctcaggatgtcagacaatgctgctaatgagcctgagagtgtatgtgtaattcctttagaagatgaatacaaatgttagcttggccttcatcccctcaaaggtgtactgtttgtcacaaggcagagaaaaaaatatgagattcagaatagattagtaaaactctacctcattgtcataaaaaaaaaccctgaagaacctactttcttgttttcagtacactcattaggttcattacttcagttgattcattactttatctctcatatctgtcttggtgatggaagtttatttgaaagtttatttcccccaattttataacagtttccaacatgtgttcatgttccaaagagcttctgttttttcttccaaacaactcagtattcttaattaaatatcctagtattatcagtatctcctgctctctaaatctttacacacatgcacagrcacatgttattgaataattcataatttaggataattcataatcttctcagaggttacaataactcatctaatactgaaaataaaattcaaaaatgtgaattagtcccttcttcagttactatgaatttaacaaactgagaggtagcttcttctctgaatatttttacaagtggagattaatgttacatgacgtatttgaaccatttatttaattatttacttgtcaatatgatccctggaattagctgacttaaaatattgccctgaccacattttggctatatattttttaagtcactataactctcttaagtgaaatatatcatt

SEQ ID NO: 57704 - DNA, 1488 bp, Homo sapiens
atgggagattactaatgttcttgagactcatcctttagatgtgaggggattccaaacttcagctaaagatttcttacctttacttcctaactctaggtgacattacatttatggtctgcaacataaggtctgtcttgacatttcacactgttgatgttttacctttgttaagtgacttttgaatgtctaggaatgatgatttttggtcttgatttatcaccatgatgggatcaagctaaccaaagtggtctgcaaattttcatacatgttatagctcttgtgtaagtagttgggcccagtaaattatatttgcccttttcgtttgattctgattattgtgggaataactagagccataattacactcagaacattttattatttctatttgagattgtatctagtttacctgactgtggagagggcatgratgtgtgtgtgtgtgtgtgtgtgtgtgtgtgtgtgtgtgtagggtatataatgaacaatgagatgagatataagaatttacacttttaattataataaaaatgttaatgaggtcttcacagatattacaaaaatgtgtgcatgcatgtactcgaggtactacaaataggagaggttttaataaaagaagttagagattctcacaactgttggagcagtgagaacaaaggtcatggaaacagctactgaaaggagctcaccaggaagccatagcacatctcagtcatttgtacaggatccccaagcccagccctcctttatgcatctgctgacaactgcacttaggatagtatcggcgtctccttccaaatcttatatcagtgcctctcattggtagactctaacccaaaaccacaaagggaaagagatccaggaaagatggtacatgacgccagaaaaacactttgtggtcacaaagacagaattctgttctgaatgccaattacataaaacaaataaacaaactgatataaacagagatatggagatcactatgtcggccactataatttgttaatctaaaattaattaggtctggaaaaaaatgcatacattagaactgttctagaaaatccagcctcctcacttcattaaacaagtaaatgtagatggttgaaaggaaggaataaaagatactccagaggctttcttaaaattaggagacaggtaatgttattaccaaataacaattatagaaagtgaaacagttaagattaaataggttatgacatacgtaaggaacagattgatgttcagtgtggctggagattagctaatcaaaattgtcaaaacaatgtacaaggagcctggtgaggcagaaagtttctagatgagaagacctaataagctcatattagattttcttctggaatctaagtatatgaggaaggaataaacattttttcttctggatggataggaattccaggaatttatccatctcttgtaggttttctactttatatgtgtataggtgttcatagcagccttgaatgatct

SEQ ID NO: 57705 - DNA, 741 bp, Homo sapiens
cctcctaccaaagatatttctcccccctttttgagacaggatttcgctctgtcaccaaggctgggatgcagtggcatgaccagggctcactgcagcctggacctcccaagctcaagcaatcctcccaccttagcctctctccagtgacttggaccacaggcgcgcaccccatgcccagctacaatcattcttacttaataatttcttacacttagtatttacgcatttctcacacttgagactcacaaccacaacagccacgtgaggttggcagggctttgcacagatgtgcacagagcaaaaaccagcagaatgagagtgtaggcagggccagcatacttcctaccccactccccgcctatcaaactccgaagctaaggaagaacaaggaatggaaattcaatttcagtgtattcagtgataycccacctcctcctaaacagaatctgagataacacacagaaagctctctctgcaggtatatgcagagcaatgccacgcattgccagcgtctgtgcatgccttttcctttaaagaatggccggtggttttaaaagaaattgcaattttattaggagtctaatgaaaatttatttcttactcatcaacatatgttctgaccgttatttattccattcttggtttcctcatctgtaaaatgttaactgctgtgtacttggccctttctatgttattaatatgccctgagaattcagttaagggtttgaagtccattgagct

SEQ ID NO: 57706 - DNA, 819 bp, Homo sapiens
tgtaggattacccaggtacagttaactgggatattatcctattttctactaatgaggactttaggcatatcaatggttacatttgggtaagtcttttcaaagaatttttaatttaaaaagggtgaatcagaaatgaaacaaatgaatggtggtaaactgtggtggaatacagtttaatttttttgtttttataatatgaatttcaataccaattttctcataacagctatcatagaaaggccagaacatcctaggtactcagaaggccaggccatggcaattctaaacctaaatactttattcaaagcttgcctgtcttatttgattaatttggtcttctaatgaataattaattcatccaaaatagacataaaataattaaaactgacttaagcaaaatgaccaagtcctgttgggaaatcaaaccagcattaggttaaattctttcatattaactcactttccagcataggaaattaaccagatgattaaaggactgagtaagcttaggtaagcactgtcacacccsctacctgctccccataaactaatgctctcccattgccagggtactgaggtttacttaatgactgaacttcatttacctcctatgatatctccatactataaagaggttcacagatctttttgtgccaactaagtaactgttcttggccgggcacggtggctcagtcctgtaatcccagcactttgggaggccgacatgggcagatcacctgaggtcaagagcttgagaccagcctggccaacatggtgaaaccccatctctactaaaaatacaaaaaattagctgggtat

SEQ ID NO: 57707 - DNA, 1068 bp, Homo sapiens
ttaatttaacatgaacatttcaagttattccttctgtattatatatctctggcaggcaaaagataattttcaagttgggttatgaacctttgcagagcattttaaatcacaatttaagcatgatgttgaagtcctctgatgtgtgtttatgcatgaaacatctggaaatgagcatccaacaataaattaaaaggtttaaaaagcgtcatatctttattttcttactttaataaatcaaattatgcctttctccttatatgtgaattacacatctatcctttctcaatcacagacacacacacacacacacgaaaaggaaaaaagatgtatatccctgtgaaatagtgggaatcatttatcctacatcaactaaatatgtttaataaggtattatgtggtacttgcctgccagtttgaaatagtttatttcacataagcatccaacatagtgattgctttacaactctaagaatctcatctagaaatgagaccagtgacctctactwagccacatttatatgatttacaagtcaaggtttttgttccacttcttaaaaaaaagaaataaaataaaaatctcatatctgttataggaaaacggattgagaaaggatagattcagtatactgttgagtgacaatcaccattgtagcattaacttgttagagtgagccccgtatagggtggtgtggagctaccaaggtgggttgtagagatggagaagggaataatcctcgtaaagataaatgggcaggtttatattgttatcatcttgactcaagtgctatgggactgttagaagaaagccaataaataaatgagtgcctcattcccataaattcatagtaattattccaagattacccttaagtagctaagagatagctagcaattaatgctcccaaaggactacccattgcataaaagataatactgatcaagataaagatgcagtataggcttataagggcatgtttgtagagtatcctgggattctgagaaataaattcatagactctcagttgaaagtaattcaaaatctagatcaaaatcttcatcagattcttt

SEQ ID NO: 57708 - DNA, 1189 bp, Homo sapiens
tttagtaactatttaggtaacttggttttatatatgtttagtgtactacttttgaattacctagtaaggtcttctgcttattttgctactgaattatttaactttttactgatttgtataagcttttggtaaccccattataataaccatttgttcaaaattattttacatatatctccattcagctcctagtgttcatattcartgtttttgagagaaaagaagtccgtcccttctaaaattgtctactctctaaggagtttaaataagtaccaattagtaaatacaattagggaagtttaaacattgtctaattgaatttgatttgtggaaaataaatgtttctcaccttctattattatttaaccatgtataggaaggcagccaatacattctgggctgaaaagtctctttttaaaaagggaaaatgtattctatcaaaaagggtaccaaattacaagtttgcactgcacgttgctgaacacattgtcttttttcaagcttaaactttctaaaacgttagcagtgttccctctgaaacacagagctgctcacattacagccctgctccaaaacatttgatggctcataacagcctacacagctgagcccctcatccattttcctaaggccagtatctctcatcatgccaactctacacaacactcccaaactatattctcttgtcacactctacttcttgtcctaccctgtcctcaaataagccttatattttaatacttcaagtcctgtacttaaactacttttttgcctaaatttacatttcttctttcccacactcttcctctacacatggaaaacatgtacatttgagggtatcaccttttctttgcactgcaacttttcacttgccagttctccacttgttcttgctggttgtgagtcactggtgaattttagaactagaaccatattatatcaatctttatagttccgcagcctggtaccaggtgtgggcatcaaaaaatggttcccaatccaagcttgctgaaagtgatattcaacagatgacaaaagaaaggagccagaatgctggtctgctaatccacattgctttccactattgctttgctgaaactctcccaatgtcatgagaaatataacaatgataataataatactagcagtaaatagagaagacaagtcagttaaaattgagctggtagca

SEQ ID NO: 57709 - DNA, 766 bp, Homo sapiens
ctcttactgccctgctgtcaacttcaaggctttgggaagtgaaatgcacctctcttgctcaggaaraaattgggtagggtttctgttccaaaatcaactgttatgacttcaacacaaatttttaaaaagccactcaactcaaggttttaagcagaatgacatgaaaagtgagcatgcacatttatgaataaggtgaaaagggggtgggaggaagaaagtaaaaggccacagaacatgtgtttggctggctgcctggctatgaggtgaattttaagtaacttttcaggccatatttacctgaggggttcagacagcattagagtatggcctcagtttgctttccaaaagtatgctaagttacatacgatactctctttgaaagttaaacaatagatcaagagacctggtacaaaggatttctcatataagtaactggtagagaaaaattaaaatgtagttttgtatattatatttttgagaccaaccctactgaagaattctctacatatggaccatgatatgcagctagaaatcaccaagcagagatgttccaagtatcaattttgtgacaggtaatgtgacttctgcttccctttatttctaactagcatggatatccgatttgcttttggctttaagtccaaccataattgggctcataatgtcttttcgctttacctctttctgcacatcctttgcttggttttctgccttactgagaagagtttttaaatcagctgaatcccgaagatgctgttctttcaag

SEQ ID NO: 57710 - DNA, 655 bp, Homo sapiens
taaactgctgtccccaagtcaaaaggatggacagtattcccacttacttacctttctgctccaggatgacagacaccacatccggatggttataggcgatcgccatgtgcagtggcgtctgcagatggacgctgtccgccaagctggtcagggatgcggcctcctttggcagaggcagagcttcctccgtctgcaggtttgggttggcgccttgctgcaggagctctgcygtgaggttggccaggccatgccgacacgctgtgtgcaacggggtttctccctgaatggaaacaaatggccgaaatctgagcactcacaggaattcccttcacaaagagcgtggcagcctaagtgcaaaacctcgggtccttggctcatcctgccgccagctgcccctcctgacttctgttctctttctcctgagccatcgctctcagtatctttttttgtttgttttgagacggagtcccgctctgtcacccaggctggagtgcagtgtcaagatctcggctcactgcaacctttgcctcccgggttcaagcgattctcctccctcagcctcctgagtagctgggattacaggcacgcaccaccacacccagctaatttttgtatttttagtacagacaggtttcaccatgttagccaggctggt

SEQ ID NO: 57711 - DNA, 685 bp, Homo sapiens
atccaaaatgcatggaactagaagtgtttgatttttttcagattttggaatatttgcctatacataatsacatatcttggggatggaacccaagtctaaacacaaaactcatttatgtttcatacatatcttacacacttagtcttaaggtaatttttatatttttaataactttgtgcatgaaacaaaattttgactgttttgactacatctcaccacatgaggtcaggggttgaattttccaattgtggtgtcaggttggcactcaaaaagttttagatggcgcgtcctcattattatagcaatgagtatccccacctgtcagaaagtttttagagtttggatttttggattaagggtgctcagtctgtacaaaccccttatgaggtacctagtctgtttctgatctattctacagcataaggagattaatcttcccaaataaatgatttctgataccattactactatagttaaaaatcttatggcttcctactgacttctgaattccataaagtcctgaatcctccaatcaaaactttcacaatatggccatgaactaattttccagacttttcctccactactattcaaacccattgtggccatcctttcaaaattattatttacttattcactgtttttcaaatatacttcatgctttgctctgttgctttgtctaaac

SEQ ID NO: 57712 - DNA, 610 bp, Homo sapiens
ttagggagtgcgattctagacagagtatgtggttgttgtttaggccttctttctcctacagaggggtataacagctcacaggtcagaagtggctgaggatcatgcctcagtgtttmtttttagtcctgttttgttccataatgccttctccgttgagctcttctgctgacagattactgtaccttaaagtttcacagccctacttgctgctgggggctcacagagatcagcaaagagctattgctacattttcttcttttgcctctgattttatattgctttctgcttttcattccttgctctctccatttcctcctttttttctctttctatttctggatttttcctgaacacactgtgctctgtatgacacactgtcttaatctactcccttttcctgtcctgctctctctcatagtaagatgggctaccaattactcttcagaaaacgctcagtttggcaaaaaagcattgacttcttggtagtgtcaaaaagaaggcacttccacttgagagcaattcctaaaaattcatgaaaatatcttttatactttctgtttctggagagaaagtatcaccgaatttctcactaaactgaaaatgctttgag

SEQ ID NO: 57713 - DNA, 2691 bp, Homo sapiens
gagaaccactatataatagagaccaatcagatgaaataaatcaaaccattatatagtaaagaacctggctcaataaatagtagttgtggttattattatttcaggaatagacaggcattcattggcacagaaattgaaggttaagcaaatgcttctttccttttctttttcttttttttttctttttttgaaacagtgtttttcacacttgttgcccaggccaccgcaacctcygcctcctgggttcagcctcctgtctcaagccccgcgagtagctgagattacaggcatgtacgaccacgtttggctaattttgtatttttagtagagacggagtttctccatgtttgtcaggctgttctcgaactcctgacatcagttgatctgcccgacttggcctcccaaagtgctgggattacacgcatgagccactgcgccccacccttttcttttctttcatgcaggtcagtatagtcttgctttaaaaaactgaaaacaaaataaatatccatatgatttggatatttatcccctccaaatctcatgttaaaatagattccccaatgttggaggtagggcttggtgcgaggtgtttggattatgggggtggatccctcatgaatggcttggtgctttcctggcagagtgaactctacctctgagctcatgaaagatctggttgtttaagagtagacacctcccctttctctctattgttccgtctcttaccatgtgacacactggctccccttccccttccgccatgattgtaagcttggtctcacaagaagctgagcagatgctggtgccatgcttgtacagcctgcagaattgtgagccaaataaacctcttttctttataaattatgcagtctcaggtattcctttatagcaacacaaacagactaacacgaacatatacaaaagaatgcctctccaacaacaaaataggtatgtaacagtagcttctcacagataaacttaacgtttctttttgacatacatcttcttgtcttttgaattctttgaaaagcagaacatggttaatgataaaggttttataattttaattattttaattcaaatttcagttttcatatactgcagttatttttaatttgaaaactataatggttgaccatgaaaaattaatcttatgtaggtgaaaggtacagatttatttctagacaaatccagtttcattggcatgtcagattttattgataatcttttccttcttattcattgcagaagcttcaaaaaggacacactagatttaattagaaatgttaagattgcccaaaaaaggattacctagatttgagcaagttcaggatgaagacacctacctggaaaatttagcaatacaaagaaatgcatctgctttttttgaaaaatatgatcggagtgaaatacaagagttactaactactgcactagttagctggttgtctgccaaagaggatgtgcgctctcaagtagacctcccatgtggaattatgagtcaaatgaataacgtaggcttctccactgcaatcctactgactcccgtggaccctactgccctcttagactatagagaggtccatcaaatgataagagagttggctattggaatttattgcctaaatcaaatcccttccatcagtttagaagctaattatgatcagagttcttcttgtcaattacctccagcttattatgataccagaattgggcaaattctgatcaatattgactacatgctgaaagactatggcatggaatatatatgcccaaagaaaaacgagctagattctctgaattgtggcgtgcatcatggacattgatcctgatggaaaacctcaaacaaataaagacattttttcagagtttagttcagcaggtaagagaatttaacacttcttaaattttttttttttttttttggaacagagtcttactacgtcacccagggggggcacgaacccctgagctcaagccattcacccacctaggcctcccaaagtgctaggattccaggcgtgagccgctgcacctggccacttcttaattatttttattcaatgccatttttaaaatttttaaattttatttcgatagtttttgggggaacaggtggtttttggttacatggctaagttctttagtggtgatttctgagattttggtgcacccatcacctgagcagtgtacactgtaccccatgtgtagtcttttatccctcattttcttcctacctttcctctagaatccccaaagtccattatatcattcttatgcctttgcgtcctcatagcttagctcccacttataagggagaacataaaatatttggcttgccattcctgagttacttcacttagaataatggtctccaaccccatccatgtttctgtgaatgccattatttaattcatttttatggctgagtagtatttcatggtatatatattttctttctttctttttttttttttcttttttggagatggggtctccctgtgttgaacaggctggcctcgaacccctggcctcatatgatcatcccatcttgacttcctagagtgctaggattacagacatgtgccactgcacctggccaccacgtattctttatctactcattggttgatgggcctttagactggttccatgtttttgcaattgtgaattgtgctgctataaaca

SEQ ID NO: 57714 - DNA, 2691 bp, Homo sapiens
gagaaccactatataatagagaccaatcagatgaaataaatcaaaccattatatagtaaagaacctggctcaataaatagtagttgtggttattattatttcaggaatagacaggcattcattggcacagaaattgaaggttaagcaaatgcttctttccttttctttttcttttttttttctttttttgaaacagtgtttttcacacttgttgcccaggccaccgcaacctccgcctcctgggttcagcctcctgtctcaagccccgcgagtagctgagattacaggcatgtacgaccacgtttggctaattttgtatttttagtagagacggagtttctccatgtttgtcaggctgktctcgaactcctgacatcagttgatctgcccgacttggcctcccaaagtgctgggattacacgcatgagccactgcgccccacccttttcttttctttcatgcaggtcagtatagtcttgctttaaaaaactgaaaacaaaataaatatccatatgatttggatatttatcccctccaaatctcatgttaaaatagattccccaatgttggaggtagggcttggtgcgaggtgtttggattatgggggtggatccctcatgaatggcttggtgctttcctggcagagtgaactctacctctgagctcatgaaagatctggttgtttaagagtagacacctcccctttctctctattgttccgtctcttaccatgtgacacactggctccccttccccttccgccatgattgtaagcttggtctcacaagaagctgagcagatgctggtgccatgcttgtacagcctgcagaattgtgagccaaataaacctcttttctttataaattatgcagtctcaggtattcctttatagcaacacaaacagactaacacgaacatatacaaaagaatgcctctccaacaacaaaataggtatgtaacagtagcttctcacagataaacttaacgtttctttttgacatacatcttcttgtcttttgaattctttgaaaagcagaacatggttaatgataaaggttttataattttaattattttaattcaaatttcagttttcatatactgcagttatttttaatttgaaaactataatggttgaccatgaaaaattaatcttatgtaggtgaaaggtacagatttatttctagacaaatccagtttcattggcatgtcagattttattgataatcttttccttcttattcattgcagaagcttcaaaaaggacacactagatttaattagaaatgttaagattgcccaaaaaaggattacctagatttgagcaagttcaggatgaagacacctacctggaaaatttagcaatacaaagaaatgcatctgctttttttgaaaaatatgatcggagtgaaatacaagagttactaactactgcactagttagctggttgtctgccaaagaggatgtgcgctctcaagtagacctcccatgtggaattatgagtcaaatgaataacgtaggcttctccactgcaatcctactgactcccgtggaccctactgccctcttagactatagagaggtccatcaaatgataagagagttggctattggaatttattgcctaaatcaaatcccttccatcagtttagaagctaattatgatcagagttcttcttgtcaattacctccagcttattatgataccagaattgggcaaattctgatcaatattgactacatgctgaaagactatggcatggaatatatatgcccaaagaaaaacgagctagattctctgaattgtggcgtgcatcatggacattgatcctgatggaaaacctcaaacaaataaagacattttttcagagtttagttcagcaggtaagagaatttaacacttcttaaattttttttttttttttttggaacagagtcttactacgtcacccagggggggcacgaacccctgagctcaagccattcacccacctaggcctcccaaagtgctaggattccaggcgtgagccgctgcacctggccacttcttaattatttttattcaatgccatttttaaaatttttaaattttatttcgatagtttttgggggaacaggtggtttttggttacatggctaagttctttagtggtgatttctgagattttggtgcacccatcacctgagcagtgtacactgtaccccatgtgtagtcttttatccctcattttcttcctacctttcctctagaatccccaaagtccattatatcattcttatgcctttgcgtcctcatagcttagctcccacttataagggagaacataaaatatttggcttgccattcctgagttacttcacttagaataatggtctccaaccccatccatgtttctgtgaatgccattatttaattcatttttatggctgagtagtatttcatggtatatatattttctttctttctttttttttttttcttttttggagatggggtctccctgtgttgaacaggctggcctcgaacccctggcctcatatgatcatcccatcttgacttcctagagtgctaggattacagacatgtgccactgcacctggccaccacgtattctttatctactcattggttgatgggcctttagactggttccatgtttttgcaattgtgaattgtgctgctataaaca

SEQ ID NO: 57715 - DNA, 2691 bp, Homo sapiens
gagaaccactatataatagagaccaatcagatgaaataaatcaaaccattatatagtaaagaacctggctcaataaatagtagttgtggttattattatttcaggaatagacaggcattcattggcacagaaattgaaggttaagcaaatgcttctttccttttctttttcttttttttttctttttttgaaacagtgtttttcacacttgttgcccaggccaccgcaacctccgcctcctgggttcagcctcctgtctcaagccccgcgagtagctgagattacaggcatgtacgaccacgtttggctaattttgtatttttagtagagacggagtttctccatgtttgtcaggctgttctcgaactcctgacatcagttgatctgcccgacttggcctcccaaagtgctgggattacacgcatgagccactgcgccccacccttttcttttctttcatgcaggtcagtatagtcttgctttaaaaaactgaaaacaaaataaatatccatatgatttggatatttatcccctccaaatctcatgttaaaatagattccccaatgttggaggtagggcttggtgcgaggtgtttggattatgggggtggatccctcatgaatggcttggtgctttcctggcagagtgaactctacctctgagctcatgaaagatctggttgtttaagagtagacacctcccctttctctctattgttccgtctcttaccatgtgacacactggctccccttccccttccgccatgattgtaagcttggtctcacmagaagctgagcagatgctggtgccatgcttgtacagcctgcagaattgtgagccaaataaacctcttttctttataaattatgcagtctcaggtattcctttatagcaacacaaacagactaacacgaacatatacaaaagaatgcctctccaacaacaaaataggtatgtaacagtagcttctcacagataaacttaacgtttctttttgacatacatcttcttgtcttttgaattctttgaaaagcagaacatggttaatgataaaggttttataattttaattattttaattcaaatttcagttttcatatactgcagttatttttaatttgaaaactataatggttgaccatgaaaaattaatcttatgtaggtgaaaggtacagatttatttctagacaaatccagtttcattggcatgtcagattttattgataatcttttccttcttattcattgcagaagcttcaaaaaggacacactagatttaattagaaatgttaagattgcccaaaaaaggattacctagatttgagcaagttcaggatgaagacacctacctggaaaatttagcaatacaaagaaatgcatctgctttttttgaaaaatatgatcggagtgaaatacaagagttactaactactgcactagttagctggttgtctgccaaagaggatgtgcgctctcaagtagacctcccatgtggaattatgagtcaaatgaataacgtaggcttctccactgcaatcctactgactcccgtggaccctactgccctcttagactatagagaggtccatcaaatgataagagagttggctattggaatttattgcctaaatcaaatcccttccatcagtttagaagctaattatgatcagagttcttcttgtcaattacctccagcttattatgataccagaattgggcaaattctgatcaatattgactacatgctgaaagactatggcatggaatatatatgcccaaagaaaaacgagctagattctctgaattgtggcgtgcatcatggacattgatcctgatggaaaacctcaaacaaataaagacattttttcagagtttagttcagcaggtaagagaatttaacacttcttaaattttttttttttttttttggaacagagtcttactacgtcacccagggggggcacgaacccctgagctcaagccattcacccacctaggcctcccaaagtgctaggattccaggcgtgagccgctgcacctggccacttcttaattatttttattcaatgccatttttaaaatttttaaattttatttcgatagtttttgggggaacaggtggtttttggttacatggctaagttctttagtggtgatttctgagattttggtgcacccatcacctgagcagtgtacactgtaccccatgtgtagtcttttatccctcattttcttcctacctttcctctagaatccccaaagtccattatatcattcttatgcctttgcgtcctcatagcttagctcccacttataagggagaacataaaatatttggcttgccattcctgagttacttcacttagaataatggtctccaaccccatccatgtttctgtgaatgccattatttaattcatttttatggctgagtagtatttcatggtatatatattttctttctttctttttttttttttcttttttggagatggggtctccctgtgttgaacaggctggcctcgaacccctggcctcatatgatcatcccatcttgacttcctagagtgctaggattacagacatgtgccactgcacctggccaccacgtattctttatctactcattggttgatgggcctttagactggttccatgtttttgcaattgtgaattgtgctgctataaaca

SEQ ID NO: 57716 - DNA, 892 bp, Homo sapiens
tgcatggccatgcaaatcagcactagtctaatctgtttcccttaccattgctactctctttcgctaatttccactttattttttcaagtccaagttgcttacagggtaagatttcaaagcaagctccggttcctggtgtctctgcataactttggttttagttactaaggaaacacttctttgctgtgctacactgtaaatcctttaattctcccttttcctaattcttaagtaatccatttaaactgcaaaagcaaatactatgagagcatttcataaaacacactgcatgcaatccaataaacaagaaatcatatataatttaacttcaaaatttcatattaattgccattagaaattcaaattcaagtactgtatgcagggtaaatagatgaatagatgcagtgtatgatggatgaagccagcccatgttccataattctatggtgtttatcagtatcaaggaagatggcaaaggcaagtcagaggctggtacaaaatttaaggctaaaagtatctaagcttgcaagaaaaagcaggcgatatctaattatacactaattctaaaatgctttgttccaaagtgtttacccagaaactcaattattccttccacaaacattgatggagatcacaccttgtttaataaagtattagcaatatgatgrtatgttacctccccaccccagtagggagagaacctgtacagaaataaccatagaacaaagccaaatatgctaaggactaaagaaaggcacaacgttctatgagagatctatcagagaggggtttactgctggctgaggtgttagagaagctctaatgtagagacaaacattcctgctgggccctgttagcactgcaacatgccaagagggagcctgggagaaga

SEQ ID NO: 57717 - DNA, 945 bp, Homo sapiens
gccaaagttctgcttttgaatgtggggcttcattttatatatgcaaccttgcaaagcattttttaaaagctgtaacaagctttgccagtgctgcttgctccaaatgtgtgtgattactggttaatcagaatggttagtgtaagtgaatggatgttgtaatatgaataactgtgaatgttgactccctgttccctcttgaaaacaagctagttcagccagcttaatgaggtttttctggagtgtttacaaattttaaacaattaaaattaaattgaattgaagttctttgtaattataactgcatttacatcattatcatccaggcaattaggaggaggtgggacagatgaggcttttcaggtttaaagtcacaatcattattttcaaaaaatgatagcakatattttcaaaagtttctcatttcagttagccagaggaacaaataccttgagagttcatagtccagcatgttttctttcattgtctttttcagacatatacaaattagattcccttcataggaagacttttaaggatgattgccagtcttggcaacgttaatgactattcaaagctcacaaggaagcagtggtttgggcatgagcaggcattacattctgtggggtcgagcccagggggctgctgagactcgtttatccagaggtttctgaaaagtgtctaacacagcattgtttgtaatttggtcctgaataagggacttgggactggaaaaaaaacaaagctttgtgttcacatagcaggcatgaaaagtagtctgcgtggtgagggcagtgtacagtttgcaatcatcatggcagctgaagcagccagaaaaaaatgtcattgaatttactaaggtatgtgtggaatagtgctctttaagtgggtttctgtgatcaaagaaggaaacaagggcaaatcactctgaaatattttttgtatgca

SEQ ID NO: 57718 - DNA, 945 bp, Homo sapiens
gccaaagttctgcttttgaatgtggggcttcattttatatatgcaaccttgcaaagcattttttaaaagctgtaacaagctttgccagtgctgcttgctccaaatgtgtgtgattactggttaatcagaatggttagtgtaagtgaatggatgttgtaatatgaataactgtgaatgttgactccctgttccctcttgaaaacaagctagttcagccagcttaatgaggtttttctggagtgtttacaaattttaaacaattaaaattaaattgaattgaagttctttgtaattataactgcatttacatcattatcatccaggcaattaggaggaggtgggacagatgaggcttttcaggtttaaagtcacaatcattattttcaaaaaatgatagcatatattttcaaaagtttctcatttcagttagccagaggaacaaataccttgagagttcatagtccagcatgttttctttcattgtctttttcagacatatacaaattagattcccttcataggaagacttttaargatgattgccagtcttggcaacgttaatgactattcaaagctcacaaggaagcagtggtttgggcatgagcaggcattacattctgtggggtcgagcccagggggctgctgagactcgtttatccagaggtttctgaaaagtgtctaacacagcattgtttgtaatttggtcctgaataagggacttgggactggaaaaaaaacaaagctttgtgttcacatagcaggcatgaaaagtagtctgcgtggtgagggcagtgtacagtttgcaatcatcatggcagctgaagcagccagaaaaaaatgtcattgaatttactaaggtatgtgtggaatagtgctctttaagtgggtttctgtgatcaaagaaggaaacaagggcaaatcactctgaaatattttttgtatgca

SEQ ID NO: 57719 - DNA, 864 bp, Homo sapiens
agcaggaggattgtttctaaaatagcagttcgcaaagagtgatctccaaaaagtggatctttaggagtctccaagatcctttcagaggatctgcaatgacaaaactgttttcatagttgaactgggacattatttgtcctctttacaatgtagacatttgctctgattgtgcaaaagtaagcacaaatcccagcagtgggacaacaccaaatcagtagtaactgcatccttcaccaccatgcacttgcagtaaaaacaaacacaaagtgtcactgaagaatgtcccccgtgaagcagtcatgtccctcatgacagggtgggaaatgcacagaaacaatcctgctgcatcccaaggatgatggttgctgaagrccgtgccattgtgcaatggcctgcaatgcacaagctgcagctcttttttatggaacgccagttttacttgaaagcagaactgacagacaaactgcagttacccagatttgggcatttggcagacatttcctccaaaatgaatgacatgggcctgtcacttcaagaaaaacaaatgatagtgtttgttgtctgtgataacattcaagctttcaagtgaaaaatcagacttttgcaaaacctgtatccatcactgtaagtttgacagcttcccaatatttaaagatttttctgatgagatcagaagtagtactaacaactagttgtaaaaaaatattgtatagtgatcaaccagttgtagtgtaataagaaatatgtatttggcctttgaccctggttcctgactgatacagtttggctgtgtccccacctaaatctcagttgtagtttctgtcatccccacgtgtcatgggagggaccctgtgggaggtaatt

SEQ ID NO: 57720 - DNA, 536 bp, Homo sapiens
cccagcccaaattgctgaccttcagaattttgagctaaataaatggttgtttaaacaactaagttttgcagtgatttgttatgagcagaagctaactgatactggagcgcatggcatgcaatttcttttttcttttcagactcctcatttatggctgttctacatgtgctaggagcctctaagtgctcctagtattttcttgtaccaagaaaaagaagcaatgtgtaagaatataacagaggggtcccatatgagtgcagcacacaccagggcttcaggtagcttttagtctcctgctggagagaggtgtgccaatcgctctgatgtaaaggagagagtagtctggaaatagagacacaaggcttccctgctcagagatcacagcaaaggcagaaaatgagccagatagttccacatggctgggaggcctcacaatcatggcagaaggcgaatgaggagcaaagtcatgtcttacrtggtggcaggcaagagactatgacatgaaattttgtaacattttttctttactcatgtta

SEQ ID NO: 57721 - DNA, 985 bp, Homo sapiens
ctaaattcaatgtgaggtatatagctttgctccatgaggcctgccaggccaatcctttgtgattgcctatggtcaggcctgaaagatcacccatgggattttagctgtactactagttccctcatgtcatttttgagtcgatttatagaccaaacctctcccaaaatcctgcaaccagtgtgcgtayttttcttcactgtagattagctttgcctttcctagaacttgatgtgaatataatactaatgtcaatagatatggataaattgtaattacaggataggagagtagaaataaaatgaatgagcaaagttcatgagaaagtaaaaagagaaggcatctagagctcagattgagggattggaatagttattttattaacagcaaaattggaagagaagacagatggagttgaagataatttctaaaaagaaacttaatatcacctgagattatcattcatataattcctttgatgttcaatatattatattttattaatgattttctgattgcaaaccatcctgttgtaccctatttagtaactattattatttacccttcaactttaaatgataaaggttgatgcagaaatgcttatctgaaccatattgtagagaaaaaaattaaatcctcaatgaattgagagcatgtaaaaattatgaggaaagaaaaataccctaggaaaaaactaatcacatgagaaaagctggacgcattttaaaataattagttaatacatataatttagacgtctgagtagttaataatggtagagatgttgaaactgtcacccacattcatatgggtgaaaatcaccatgtttactagcaacctatggatgcacaaattgaatgaatgaatgaatacaaatgagtattatttatgtatatatgtgtgtgtgtttgtcccttttggtaaagtaacttcacatttaggaacttatcgtacaggagtgacaagagtctgctcatgttttcacctg

SEQ ID NO: 57722 - DNA, 985 bp, Homo sapiens
ctaaattcaatgtgaggtatatagctttgctccatgaggcctgccaggccaatcctttgtgattgcctatggtcaggcctgaaagatcacccatgggattttagctgtactactagttccctcatgtcatttttgagtcgatttatagaccaaacctctcccaaaatcctgcaaccagtgtgcgtatttttcttcactgtagattagctttgcctttcctagaacttgatgtgaatataatactaatgtcaatagatatggataaattgtaattacaggataggagagtagaaataaaatgaatgagcaaagttcatgagaaagtaaaaagagaaggcatctagagctcagattgagggattggaatagttattttattaacagcaaaattggaagagaagacagatggagttgaagataatttctaaaaagaaacttaatatcacctgagattatcattcatataattcctttgatgttcaatatattatattttattaatgattttctgattgcaaaccatcctgttgtaccctatttagtaactattattatttacccttcaactttaaatgataaaggttgatgcagaaatgcttatctgaaccatattgtagagaaaaaaattaaatcctcaatgaattgagagcatgtaaaaattatgaggaaagaaraataccctaggaaaaaactaatcacatgagaaaagctggacgcattttaaaataattagttaatacatataatttagacgtctgagtagttaataatggtagagatgttgaaactgtcacccacattcatatgggtgaaaatcaccatgtttactagcaacctatggatgcacaaattgaatgaatgaatgaatacaaatgagtattatttatgtatatatgtgtgtgtgtttgtcccttttggtaaagtaacttcacatttaggaacttatcgtacaggagtgacaagagtctgctcatgttttcacctg

SEQ ID NO: 57723 - DNA, 611 bp, Homo sapiens
acttgcagggcagttgtgacagtgccactcacactcagtgaagttgggctagtattggcattatgtttttttctggtttgctaccattaagtttggatgtcttactttttaaaaaaatgtcttcagtgacattttgattttatgcctctaccctttacagatatggatgcaaagttaatatgatgaatgacagttgacagcactaaattcagaggygcatataacttaccatttttaatttcttgcctggcaaccttgggtgccccatggttgcatccatccttcccttgcatcgggaccttagacaagagcacaccttggttgtacctgttcccccttttatgagatggaattcctttagcccacccaccctgaagagtgccttttgttcatgtggcgatgtgaggatagttagagaggctgtcccttagttttcacatactttaaaataacctaaacatcaggccaggtgcagtgctcatgcttgtaatcctagcactttgggaggattaagtggaaggatcacttgagaccaggagttcaagaccagcccgggcaacatagtgacaccctctacataaaatagaaataaacacattagctggatgtgg

SEQ ID NO: 57724 - DNA, 611 bp, Homo sapiens
acttgcagggcagttgtgacagtgccactcacactcagtgaagttgggctagtattggcattatgtttttttctggtttgctaccattaagtttggatgtcttactttttaaaaaaatgtcttcagtgacattttgattttatgcctctaccctttacagatatggatgcaaagttaatatgatgaatgacagttgacagcactaaattcagaggcgcatataacttaccatttttaatttcttgcctggcamccttgggtgccccatggttgcatccatccttcccttgcatcgggaccttagacaagagcacaccttggttgtacctgttcccccttttatgagatggaattcctttagcccacccaccctgaagagtgccttttgttcatgtggcgatgtgaggatagttagagaggctgtcccttagttttcacatactttaaaataacctaaacatcaggccaggtgcagtgctcatgcttgtaatcctagcactttgggaggattaagtggaaggatcacttgagaccaggagttcaagaccagcccgggcaacatagtgacaccctctacataaaatagaaataaacacattagctggatgtgg

SEQ ID NO: 57725 - DNA, 2377 bp, Homo sapiens
tgcattaaacagtttttggaataaatattgctagtatctcaaaaactaaagagaaaaattatcagtacaaaggatggactttgtactacaaaggaggtgaagcaacaacttcctctaaactaactaatgttaaatttttcatgctatccacattcataacttaagtccacatgcaaaagaaacaagcttgtgcaataatccaggccaaatgatggcggggaagagagggaaggagagctgatcatcacccagaaaatgatggagagagcaagcaggttagtgagagctacaagaggtatgagatgactacatgtgataaaatgaagcttatgaaagctttgggtgaatatcaggagaggttatcataaaatatgatgttttattatgagaatgtcctaaataatgtatagaaataacattacttgaataatttaaaaataacaggtctattaaagtcataaattagatgtccatattgtctgtacagcaaattgctacttcaatgaaatggaaaatggctactattctgaagcacccttagaacttattcaactgttctttaaacatcaaaataaagtaccaaaataaagaatgttgttatccttatcacaaacttattctgaccatatcatggcctgggtaaaagattgactgagcagtgtcaaaacagaaatttaaagcactatcttcatgaaaactacttaaattcatttttttaaaaaccactatcattctgctttaaatgccagaaataaagttttagattaaaatatttcaatggttgtctaaaatgctgcaataaaaactagacaaaaaatttttagtttttattttactccctttcttactaaatgtatgttaaaaaaaaaaaaaactctcaaatgatccagacaaaagctttcaactcaacacataattgcaagaaaattacaataattgtaccaattaaaaccatcttgaatgaacagtgtgtcatcttaatgttcccgtggtttacagaggggtctatttaattcgctgaaattgctttccagtgttagtatcaaatgtcatttgttaaaagttgaacaatttagaaaataatttaacaatttcaccaaacaccaagaaccaacattttctttttcacctgaataaagccagcagatgtgtcatcaaattgctataaaaataaacgaggctttttatgcattaaaaaaataaattttactactagcgttaaaaatactattttctgattgtttttaccaaatcatatttctttagtacaacaaatgaatatcaattacatactgctgctttttgtcggctgtaaataaaactttctcttattcaaatgacaagcaatagcatcaaagaactcaactacagttaactagaaacataatcatctagattattctcacatactttaatatctggctttccaatatgttaatcaaagtgtcttcctatagtttttcattccaaatccttattatatataattattttaagtcaattcatacgaattatcaatgattgcttactatattttttctcttccttagactagctacgaaatattctttgtaagtagttgcaggcatttaagacttaaatatacctatttcaccaggaagagaagaaaagcatctcaaaatcaccccaaatccagcccagtcatagatggcaagcctgccaaatgccgaagtttaaagtaatgagttggtttaatggcaaagcaaagttcacatccctcattctatccccacctaacacctctgcactttccaaagtgcaagaatacataaggcacctagcaaagtacctgacgtgaaggaaggaggtcagtaacactaagtgactcgacctccttaagcaagactccatgtgagacaactagttctccggtgcccatgactacgaattacttgaaatcccgacatccattcctggcgtgatatcctactcctcaggcaattcagacagggtctaagaatctaaagcagccacaaattccttccactactgtttcttaaracatcactccacagttcctaaacgaaggcttattcttttttatgacacatttttatttacacacaaatgataacaacaacaatcttgaggatagatgagagtgtcaagggattacctgtttacattaaatagggctttatgtataaatataacatgcgaaaaataaacctcattatattggtatgaattattacgaggcacttaaatatttttaaaacttaagttttaaccgcttagcaaacgttcataattatacagcacttgtattataatacaaacgtttattcacgaaataaaaccttgtatgtacaataaaatattgtactacagaaccaagagaaaaacgaatcatgca

SEQ ID NO: 57726 - DNA, 563 bp, Homo sapiens
ttgggttaattagagatggccccattaggaaggtgtttggatctggactttgagagatgaaagttatttcaatagtgagtgaagtataatggggaagaaaatgacattctaagcatcggaaggacattagcaaaacccataattcttagtggctaggctctgctatctcttgcctagctcaccaccatggcagtcacctgctcttgattccatcctgttcaccaatgacaaatccatttgtcctgaggtacgggcttttggcattccattcttgcgcttaaaaactgtacctaactccctcccatagcagacagaataggataggcttcttccctacctggtgttcaagttctaccamtgccctcctcccttcccccatttacctctctagaattaccaggtatctatgcatacatgaattctctgcttccattagatttacttgtcattccccaaatacaccatgcacttgcatattagcaaagccaagtttgtctttcacaaatgcagaggttaaataagagttaaggatgaaggtaaaccaaactttatttatatactat

SEQ ID NO: 57727 - DNA, 777 bp, Homo sapiens
aggctgaggcaggagaattgcttgaacctgggaggtggaggttgcagtgagctaaaattgtgccactgcactccagccygggtgacagaggaagactccgtctcacaaaaaaaaaaaaagaaaaaagaaattatgccagctgtttaatgtgagagaatagaaagaatgttcatggaatgtacctgccctgtaaaatgtttgatcattttcattaatgttgcagagaatccgactgctattaagagaaagtgaacaaattaagaatttaaaagacaggttcaggcatgtcataagtgaaaacaagaaggcttaatacaaacttgttgggttttgttcgtgtgtgtgtgtgtgtgtgtgtgtgtgtttttttttggttcagcctatctagccacctacaaataatcacatttctgttacctgaatttatttctcagcctgtaaaccttagtcactgttacctgtttcttgctcagtgaatatgatcttggcactgtcatctagaaagcaagatatttgattggttttctggttccttcgaagataataattccatatccagtttgactgattttcatacccctgaatcaactagttattttcatgaaatggtttttggatatctctcctctagtttggagaagtaataatcacaaagattaatattttgcttctagtacttacagtagaagaattttaaactggtacgtctactcctgttaaatagaaaggggattcgttgtattatgtgcttgcttttttttaatcaatagaataaga

SEQ ID NO: 57728 - DNA, 777 bp, Homo sapiens
aggctgaggcaggagaattgcttgaacctgggaggtggaggttgcagtgagctaaaattgtgccactgcactccagcctgggtgacagaggaagactccgtctcacaaaaaaaaaaaaagaaaaaagaaattatgccagctgtttaatgtgagagaatagaaagaatgttcatggaatgtacctgccctgtaaaatgtttgatcattttcattaatgttgcagagaatccgactgctattaagagaaagtgaacaaattaagaatttaaaagacaggttcaggcatgtcataagtgaaaacaagaaggcttaatacaaacttgttgggttttgttcgtgtgtgtgtgtgtgtgtgtgtgtgtgtttttttttggttcagcctatctagccacctacaaataatcacatttctgttacctgaatttatttctcagcctgtaaaccttagtcactgttacctgtttcttgctcagtgaatatratcttggcactgtcatctagaaagcaagatatttgattggttttctggttccttcgaagataataattccatatccagtttgactgattttcatacccctgaatcaactagttattttcatgaaatggtttttggatatctctcctctagtttggagaagtaataatcacaaagattaatattttgcttctagtacttacagtagaagaattttaaactggtacgtctactcctgttaaatagaaaggggattcgttgtattatgtgcttgcttttttttaatcaatagaataaga

SEQ ID NO: 57729 - DNA, 777 bp, Homo sapiens
aggctgaggcaggagaattgcttgaacctgggaggtggaggttgcagtgagctaaaattgtgccactgcactccagcctgggtgacagaggaagactccgtctcacaaaaaaaaaaaaagaaaaaagaaattatgccagctgtttaatgtgagagaatagaaagaatgttcatggaatgtacctgccctgtaaaatgtttgatcattttcattaatgttgcagagaatccgactgctattaagagaaagtgaacaaattaagaatttaaaagacaggttcaggcatgtcataagtgaaaacaagaaggcttaatacaaacttgttgggttttgttcgtgtgtgtgtgtgtgtgtgtgtgtgtgtttttttttggttcagcctatctagccacctacaaataatcacatttctgttacctgaatttatttctcagcctgtaaaccttagtcactgttacctgtttcttgctcagtgaatatgatyttggcactgtcatctagaaagcaagatatttgattggttttctggttccttcgaagataataattccatatccagtttgactgattttcatacccctgaatcaactagttattttcatgaaatggtttttggatatctctcctctagtttggagaagtaataatcacaaagattaatattttgcttctagtacttacagtagaagaattttaaactggtacgtctactcctgttaaatagaaaggggattcgttgtattatgtgcttgcttttttttaatcaatagaataaga

SEQ ID NO: 57730 - DNA, 986 bp, Homo sapiens
tttattgcttctccaacttttgcacaagcaagctagagttacacayacacacacacatatatataaaacatttattaatgtatagtatatttctcagtctgtttaggctgctataataaaataccttaactggataatttatagacaatagaaatttatttctcacagttctggaggctgggaagtccaagatcaaggcacttgcagatttggtgttgttgaggacctgttccttatagatggctacttgttgctacatgcttacatggtggaagggaaggaagcagctccctccaacctctctaatatggacactaataccatttatgaacgtggaacattcatgcctcaatcacttcccaaaaggctccacttcttaatactatcacattgggtatcaggtttcaacatacaaattttggtgtgaacctcaaattcagactataggtatttatctttgggaagttatttaaaattcagaattgacccttataatactcctgatagttattattaatcagatctatttcaattgaaataaaaacacatttctgttttttttgtttttgtttttgttttttggcagaaagacagtatttcacaaagttgaatgcacagaaagccctgtgacaactcctggaagttttccatctgaatatgtgcatctctattttttgtgtagtacaagtttagctcaatattgagctaagaacaaggaataactatctcttgcaacttctgcttctcttcatcctcaaaaacatcctcctagttcaacctctgattacttgtgctaagccaattgtaccagattcctctcacttaagagaactacaaattggttggatttgacaataagccagctttgcccagagcgaaaggtaagccagttcagtaagtaaaaaatacagaattctgagccataatcaaaaaggaatacctgttatatcttttaaaatgtatgtgtccacattatatgtaacaca

SEQ ID NO: 57731 - DNA, 986 bp, Homo sapiens
tttattgcttctccaacttttgcacaagcaagctagagttacacacacacacacacatatatataaaacatttattaatgtatagtatatttctcagtctgtttaggctgctataataaaataccttaactggataatttatagacaatagaaatttatttctcacagttctggaggctgggaagtccaagatcaaggcacttgcagatttggtgttgttgaggacctgttccttatagatggctacttgttgctacatgcttacatggtggaagggaaggaagcagctccctccaacctctctaatatggacactaataccatttatgaacgtggaacattcatgcctcaatcacttcccaaaaggctccacttcttaatactatcacattgggtatyaggtttcaacatacaaattttggtgtgaacctcaaattcagactataggtatttatctttgggaagttatttaaaattcagaattgacccttataatactcctgatagttattattaatcagatctatttcaattgaaataaaaacacatttctgttttttttgtttttgtttttgttttttggcagaaagacagtatttcacaaagttgaatgcacagaaagccctgtgacaactcctggaagttttccatctgaatatgtgcatctctattttttgtgtagtacaagtttagctcaatattgagctaagaacaaggaataactatctcttgcaacttctgcttctcttcatcctcaaaaacatcctcctagttcaacctctgattacttgtgctaagccaattgtaccagattcctctcacttaagagaactacaaattggttggatttgacaataagccagctttgcccagagcgaaaggtaagccagttcagtaagtaaaaaatacagaattctgagccataatcaaaaaggaatacctgttatatcttttaaaatgtatgtgtccacattatatgtaacaca

SEQ ID NO: 57732 - DNA, 416 bp, Homo sapiens
cataaataattcagaaaagaaaagctctgtgtaaaattaaaaccctaaatttaagtcctggctttgccaactattagttataaatgagggaccttggaaaagtatctcacccatccaagcgtttaaaatagatctcatagcatttctccaaggattggcaagattgtgaaaatggaaatcccgtgtaaggcgaagtacatttaaaaaggtacctcgccctaagtgggttttcttgctgtgacacttttattaagatataatttgaatgccatacaattcactcttttaaagtgtacacttcattgttttttagactattaacagagttttgtaataatcaccagaatcaatytgagaatattttcattaccccacaaagaaaactgatacattttagtcttcattcccaatcatcc

SEQ ID NO: 57733 - DNA, 635 bp, Homo sapiens
tcccagctactcgtgaggctgaggcaggaggatcacttgagtccaggaagttgacaaggctgcagtgagcggtgatcacactgttgcactccagcctggataacagagggggaccctgttccaaaataagaaagcaagcctgtgcagagcatccctcccatggggagccgtgaccttggcactggagactcctgctctataagccatcacattgctggtctgtcaatgccacttgtgtaatggtggggcagaggttgcaaactggcagctgtggactgtatttgtttagcctgtatggcattttattttattttttactgagccaacttaaaaaaattagaatattttgaataaaaatcagratgctgtattttccttgaaagctggggtgctctgggagcactgattggcagccatgggctgtcgctgagtggtgctaccccttctagatggaacttgttggtctagttggtcagttctcatgtagcttacttcattcatttacatttcctgccctgcacaagaattcacggctccacaatcaggaaatgtccacacaaatggcttggttctcttaaatagtataaaatagttgctcatagcctctctgggaggagaaaagctactaaagttat

SEQ ID NO: 57734 - DNA, 556 bp, Homo sapiens
ttttttttttttttttttttttttttttttggagacgaggtcttactatgttgctcagactggtctctaactcctggactcaagtgatcctcccacctcagcttcccaaagtgctgggattacaggctgtgtgtgctacacttgtatacgacttgtgtacagtaggcttgtttacaccggcatcaccacaaacatgtgaataaaataatgcattgtgctatgacattatracaggagttgctaggcaataagaatttttttagctccattataatcttacgaggctgaatatgtggtctatccctgactgaaacactgttatgtggcacatgaacttactatgttatgtgtattttaccacaatgaaaaaatgtgatgtgatatatcctttaaaaaaagaaggaattgttttgccagaaatatagctcaagagctcatcaattattgccacattgactaaagagtagcctccttgaagtcctacttagacatgactctcttcctaaatcccatgttattaatttaacgtaactcaatgtagcaaatatttattgta

SEQ ID NO: 57735 - DNA, 677 bp, Homo sapiens
tccctctcaacttcttgagtagctgggactacagacacacactactgtgcctggcagattcttttgtaatcaatataaatgattccttttattttctaatacagttttctcttargtttcatgccatatgactctcatgtttctatccttaatttttttgttggcatttgtctgttatgttatgttccctgtttttcttttcaacatattttatgttttgtcatactattttttaaacatctagagaagttattcctctcacattttatccatgaatttcctaatgagtttcatgaaaccttacatcaattagtatttttttagtaccaaatctaaactagtagcattttatttgtggcactaagaaacaagcattggagggagggagacagtggaggaagtaaatcagcaaaagtgcccagtttgaccctagattttaagagtcatatctcctagaaacagagaaagaacaagtaaaggccaatagtatggaatttataatttttgtgatattcaaagaaggaagatattgctcactgaaattgttggagcaaacttcatagatctttttaaaatagttactgaatgaaaagaagaccatttttgatttgtacagggggaataacataaacaaaaaaataattcactcattcattcatttcaagaaacattaaata

SEQ ID NO: 57736 - DNA, 2702 bp, Homo sapiens
ttgagacagattttaaaagtatttacctactttatgaaagttgtcaaaattacctccacataaaacacaagtgaattgcttatttattctaacaatccagttacaccaaaatatatggagctcagaaggcatgaaatcttcaggctgagaccaatgggtgccaaggaaacaggcagccacccgactactctgtgtcaaaggactcaagaaagtcagcacttgctcaaagtaggagaggaaggcctgaacatatagaaacagccattctgaatcttgacttccagaaaatcaggcactgtgacagcaccagatctgctctaagctctctggttcacatagttccctccacttcctgtttgatgccttacaactgatcctttgcattcacttatattatccgcctggaccctgcattcatccgcatgtgtaatccagacatttcttttgctaacactcatagttaacaacccaggctctgaggcgagatagcctaggttcaaatcctggttctgatacttactatctaaccatgacaagttacctaacctctctaaacttaagatttttcatttgcacgataggaatattagtaatacttaatttacaagttgttatgaggattaaaaacatayataaagcccatagaacagaacatagcaacagattgatgctcattgctaggtactgaggaagtaaataggtactaggtgttcttctgaaggtttcagtacacacaaatggatatcttagggatccaactgttctcaggaagccacttcaagtaaacatcactccctcccttgagctttccttaaccaggctttatcaatgctcagccacatattagcacacccagacctcagcatttccaattcatgttttttctttggaggatagatcaaatctaggttccataaaagcctagaaagggcccattttggaagactctaggaaagggaccagcattttgatgcaatttcagtttctctgagatggtagtactgataggaacaggagcagatacactctaggcagaaaagggcgggtccctggagaaactccaccctcaagccaaaaagcctgaaatcgtggcccaaagtgagaacttatatccctgttttcctgcttgaatgttgccttttcctaaaccaccaatggcccgccccctgccccatcatgtgtctataaaaattccagactcagctggtagatggaactatggctgggcgtcgcagagaagtggcttggcctcagagggacagcttgatgatgtaaccggagaagaatttggctggagagggccggacttcagggggctagtacctttctgatcagtcccattctcagctccccttcctgctaagagccattttaattggcaataaaatgctccgcatttaccatcattcaattcacttgtgctacctcattttttttattttttatttttggacactaggcaagagctcgggagccacaaatgcagacacaaaaggctgccacactggccctttgccttcgctgcttgagggcagctaccccacgtgaaaaggcaaagggttcactgaactgttaacacttaagctgtccgcggacagcagagctaaacgagcaccataacgcgccctctggggcttcaggagtcgtgggtaccctgcccggatactgctgcggacctgcacggagttcactccagccggcacttcagcatccgtctggttcctgtacccgctcacctatgtgctccctcccatgaagggtggaagtcagtgggtccgagtgagtggagttcgatcctgccggcacccaagcagccagcctcttccagcactcattcactcgttcccgcactcattcgctcatgtgctcccttcagcggaggagttgagatccgtgagctgagtaaacgaggcacccctggggcaagtcccacagaggggtcagggaaatattctacttcagtacttcccagctgccttcttattttattcatcccataaaaggattttactcctatacttgtattccttgaatttaaattttatcccttgtttcttaggtctgagaagttatcataatatgaagaagttcactggaattataagaacagatttttaaagaactgaatgagaaaaaaatgcaagcatcacctaaaacaaagaaaagaaacagaaaatccttcttccttacccaacccttccttcctatccccaatgtaaacacttattcactttcaggttatattcttcccccactcaaaaaaatcaggtttactcaaatatacatgtatatacattataagttataaatgcaaccatactacacacctccttctgcagaactttacatataaaaatatatacatatcaatcttttaatgtctgcacaggattatattgtatggaatattatccatgaatgatttatataactaatcctctgttgttacaatattacaaagaatgttggtgtgagtacgctgtgtgcctgcacatacacacacatacatacattcataggtcttgacatacttttcattcaagacatgttgaaaacctgaactaagtagcagtggagaggagatatggaaggtgtataaaattgaacatacaggggaccaaggaaatctaggacaattcccaggtttctttctttcttggacaaatgtaatgtgtaatgtaacgtaatgtgaatgcattgta

SEQ ID NO: 57737 - DNA, 686 bp, Homo sapiens
aggaatgctttgggtgaaagggcccagcaggactgaggcctgggagtgagctctgtaaccctctgtctccccatcagtaaaacggagagcgaagggaaagcagcatggtgagtggaaagaaccaggcttgagagtgcactgggtwcaaacccagctccacctgcaagctgtgggaccctgggcaaatggcttcagtctctgagccaaacttgttcacctctcaaatggagacaataatggcgtagaatatttgtgaaaattaaatcaaagtttataaaaacttctgatggtgcctggtccagagaccagctgtggttgttagaaataatagcagctattataataatagtgataattgtgtgccaagcacttgtctaaacactttacacgcagcagtttattttatcctcataggtgataattattcccatttcacagatgaggatgctaaggcacaagaggttaagtgactcactcaaatcacagaaaccagagggagaactccggtttagacgtggagttggggtgctttcagccacaacccagtactgcctctctcttccctccctgcagaatcagtgaggctaggggaggagtcagcatgagccccagccagcctcctcagcttcagggcctccccactgcagccacgaagaggagagggcttggcgagcgtgggcttggtc

SEQ ID NO: 57738 - DNA, 634 bp, Homo sapiens
cagtaggtaaccagtcatttgttgttttaatggaatataggatgaggccaagaggggcattgtttytgcatcaaaagccctggggaaattcatggccaacatgagtggtgaagagactccaacaggcatgaaagaagttggcaaaatttttatagagaagaggtatttttgtttgtttgtccgtttgtttgaaggcactaacaagagtattgttttcgatgatgtgtaaaagaatatgttgccactagcatttaacagaaacttaaaggtgttggattatatgacattaatacgtgtgtcaaatgaatctgttttaaagatgttgttatcaatgtaatgtcatctctgtgctcctgaagaaaggtggatgccattattgatattgagacatgatccccactttaggatggagagtcttggtaacactcccaaaaggcaacacaaagctgaagaaagcagagtacaagaaagccatcagggtaatagcatctcccaaatggttgagccaatcagagtagcaaattagcaagccatgagcattcaaagggaatctcctaggaactttccaccctagtttagaatgatcccattctcattgccattagtgttgaaaatggtagagtaagtcctgctg

SEQ ID NO: 57739 - DNA, 634 bp, Homo sapiens
cagtaggtaaccagtcatttgttgttttaatggaatataggatgaggccaagaggggcattgtttctgcatcaaaagccctggggaaattcatggccaacatgagtggtgaagagactccaacaggcatgaaagaagttggcaaaatttttatagagaagaggtatttttgtttstttgtccgtttgtttgaaggcactaacaagagtattgttttcgatgatgtgtaaaagaatatgttgccactagcatttaacagaaacttaaaggtgttggattatatgacattaatacgtgtgtcaaatgaatctgttttaaagatgttgttatcaatgtaatgtcatctctgtgctcctgaagaaaggtggatgccattattgatattgagacatgatccccactttaggatggagagtcttggtaacactcccaaaaggcaacacaaagctgaagaaagcagagtacaagaaagccatcagggtaatagcatctcccaaatggttgagccaatcagagtagcaaattagcaagccatgagcattcaaagggaatctcctaggaactttccaccctagtttagaatgatcccattctcattgccattagtgttgaaaatggtagagtaagtcctgctg

SEQ ID NO: 57740 - DNA, 634 bp, Homo sapiens
cagtaggtaaccagtcatttgttgttttaatggaatataggatgaggccaagaggggcattgtttctgcatcaaaagccctggggaaattcatggccaacatgagtggtgaagagactccaacaggcatgaaagaagttggcaaaatttttatagagaagaggtatttttgtttgtttgtccrtttgtttgaaggcactaacaagagtattgttttcgatgatgtgtaaaagaatatgttgccactagcatttaacagaaacttaaaggtgttggattatatgacattaatacgtgtgtcaaatgaatctgttttaaagatgttgttatcaatgtaatgtcatctctgtgctcctgaagaaaggtggatgccattattgatattgagacatgatccccactttaggatggagagtcttggtaacactcccaaaaggcaacacaaagctgaagaaagcagagtacaagaaagccatcagggtaatagcatctcccaaatggttgagccaatcagagtagcaaattagcaagccatgagcattcaaagggaatctcctaggaactttccaccctagtttagaatgatcccattctcattgccattagtgttgaaaatggtagagtaagtcctgctg

SEQ ID NO: 57741 - DNA, 634 bp, Homo sapiens
cagtaggtaaccagtcatttgttgttttaatggaatataggatgaggccaagaggggcattgtttctgcatcaaaagccctggggaaattcatggccaacatgagtggtgaagagactccaacaggcatgaaagaagttggcaaaatttttatagagaagaggtatttttgtttgtttgtccgtttgtttgaaggcactaacaagagtattgttttcgatgatgtgtaaaagaatatgttgccactagcatttaacagaaacttaaaggtgttggattatatgacattaatamgtgtgtcaaatgaatctgttttaaagatgttgttatcaatgtaatgtcatctctgtgctcctgaagaaaggtggatgccattattgatattgagacatgatccccactttaggatggagagtcttggtaacactcccaaaaggcaacacaaagctgaagaaagcagagtacaagaaagccatcagggtaatagcatctcccaaatggttgagccaatcagagtagcaaattagcaagccatgagcattcaaagggaatctcctaggaactttccaccctagtttagaatgatcccattctcattgccattagtgttgaaaatggtagagtaagtcctgctg

SEQ ID NO: 57742 - DNA, 634 bp, Homo sapiens
cagtaggtaaccagtcatttgttgttttaatggaatataggatgaggccaagaggggcattgtttctgcatcaaaagccctggggaaattcatggccaacatgagtggtgaagagactccaacaggcatgaaagaagttggcaaaatttttatagagaagaggtatttttgtttgtttgtccgtttgtttgaaggcactaacaagagtattgttttcgatgatgtgtaaaagaatatgttgccactagcatttaacagaaacttaaaggtgttggattatatgacattaatacgtgtgtcaaatgaatctgttttaaagatgttgttatcaatgtaatgtcatctctgtgctcctgaagaaaggtggrtgccattattgatattgagacatgatccccactttaggatggagagtcttggtaacactcccaaaaggcaacacaaagctgaagaaagcagagtacaagaaagccatcagggtaatagcatctcccaaatggttgagccaatcagagtagcaaattagcaagccatgagcattcaaagggaatctcctaggaactttccaccctagtttagaatgatcccattctcattgccattagtgttgaaaatggtagagtaagtcctgctg

SEQ ID NO: 57743 - DNA, 1520 bp, Homo sapiens
acatacctgcgttgtgaagcaactcgtctgcctgctttgttgggatctatgcctccttggctgaaagcagtgatgactgtggttaaggcggaaggtgtatttactgtcagaagactatcagttctttccctgtttcttatggagtctggtgtatgattcctggtatttattatctctttatcgttccttacagcataagaacccaggtatttgtaatcctaactgctgttgcgttatgagacttaactttatgaggtgtaaaagggtcacatgaaattacatagcagtgtgctgacaccatcttggtttagttttgtcttaagcacactgcctcctactgacttccatggctgccagtgtctcattttggagaggaggctacgctggagaatggaactatattttgagtcaagattctggggttctaatcctggctttaaggaaaaaagccatgtggtatattggaaagcccatgggcatagaaacaaaagggttctgggtttgcagctccctctatcaattgctagctgtgactttcaacacattacttaacctctaatccttattttgtttttaaaatggcaataggagtgtctgtgtcacaaggttgttgcgtttgaaagaaatgatgcatgttaatatgcttgaaatccagcgggccctcaataaattacagctattgttccctgagccccctgttaatcttcattgtagggaaataagtgagttgagctgctgcatcagcatttttttccagctctaagcctttaaggtttaaaataatctgacccctccatacacctacacctgctctgatttagaaaatgtaatactgtggtagaattccaaatcagaaataattgctgacatttactgatcatatcttgtatgccagagactgtgcaaagggctttacatacgttatctcatgtaatcatcataaataactcttcgaggtgtaggtattattatttcacagaagtaccagataagacagagaagtaacttatccactgctaataaaatgccaagcctagtaagtgtggcccgatagtgtgtgctattgatgctcacctgatagaggatggcaggtttgggcagagagaaaagttgggtggcagtgcagtcatcacacaaccaataggatggggagctctggagctgggatggccaagcaaagtagccctacattggtttaggggattttatacccgtttcaaccagttacttgactagctgttgcctagaaagggggtatacccgtggggagaggtgcttctctttggcagtactcagcagctggaggaatgcctgcttaggtcttgaagagggggatctgggtggtgtgccacagcatccactacaggamcaacagattcatatgcccactgcacagtatacactgagacagcagggtttgcagaagagaaagagtttagtgatggcagggtgccgagaggagatgggaggaaaccctcaaattcatctctctgaggagttctgtgctggggcttttaagg

SEQ ID NO: 57744 - DNA, 575 bp, Homo sapiens
tgccggtgtggtatgaatcttaaaaattcagctctgacaatctaatctcaataatgaaagtataaaaacgctattgcatcaatggaaatgcagatgtcactgggtggcaaatgcatcagtacaaaggcacatccaaagggaggcaaagtcggagacgtgcaggtgctgagttagatcytgactgcacacctggacctttacagcagtattcccagggggtgaccacatgtttgggtttgctcaggatggccccatttatgactgtttccctggcagaattaatcgtcgagaccccgttcactctcaagaatcttgatttgattgttaatctgatgaacagtgaaagtgttttcaatggctcaaatagcataaagaaacccagagtatctggagaatgaagcaatttgaggaagtggctcctatagatcctgaactccttaacaggccagattaatagcacttggtggaccttggctttcctgtgacatagtacgtcccagtgactccatttgctacagagtggagccatcatttgaatttccatcacggcctgtctctggagcagaccactgtgg

SEQ ID NO: 57745 - DNA, 1027 bp, Homo sapiens
tgaagtctccagtgaagcagaatcattggggtatatatatgcagagagagatttattttaaggaatcagctcatgcaagtgtgcggctgtcaagtctgaaatctgtaaagcaggctacagactagaaatccaggtaagaattgttgcagccttgggtccaaattccatggagcagcaagttggaaactcaggcagggtttcagtgttgcagtctcgagaatccttcttcaggaaacctcagccttttatcctgaaggccttcaaatgattggatgaagcccaccctcattatgaagggtaatcacctttactcagtctactgatttaaatgttaacaacatctaaaaaataccttcacaacaacatctagactggtatttaatcaaacagttggatatcatagcctagccaagttgacacataaaattgaccatcacaatagctaagaaattaagaatttcttatctgtttgtcttaggctccatttggaatggaagctgaatatgcacatcctttggagactctaattcttggaactggatttttcattggaatcgtgcttttgtgtgatcatgtaattcttctttgggcatgggtgaccattcgtttattagaaactattgatgtccataggtgagtattaatttctgttcaggtataaagcataatgaaatatatttattttcatggccataagattatcatatttctaaggagactaataggagaagttaatcttcttaatgttatattaagaaaacataactgttggataaaagtttaaataatagatgtttttacattctagcctatgctgttataatttttatagtgataatgtgttattagggcaagtatatattcaggaccagcaatttccttatccttctgtaataaacctaaacytaactcatatttgaaaaaaatatcaaagcattcagccttccttgaataagactttctaatctctactgttcagcactgataaaggcacttgcaagatgaaactactacttgtaacacatac

SEQ ID NO: 57746 - DNA, 2645 bp, Homo sapiens
catactgttctgtaacttgttacttggattaacactgtatcttagacatctttctatgtagagcgtatagatcttccctgttcttttaaatggctgtataattgtctatggaaggacttaatttatttaacccataccttgttgatggcttatttgtgttttgcttttattttttcctctttgtttttgctgctacaagcaatgcttccttccatcttagcggatctgtctttgtacccttgaatgagaaagttgctggatcaaaggatgtattcattttgaattaggtgttgctaatttttcctccaatgatacactgatgtatcccccctgcccacagtgtgtggtcatgcctgttctctcaccctcttaccagtactggacattaataagcttttaaagatttgctactcaggctaaaagtgtctctttgttttagggtgcatttcctcatttaatgaagtgaagattcttccttgtttagtgaccatttgcctttatttttctgtgaactgcttgtgaatggcatttgtcgttcttctgttgtctttttagtcttttttctaaagcacactttgtagccctttgttgtaaaatgttggaaatatttttcccagtttgtcatttaatctttgactttgtctttctattccccagtaggaggtacttaatttttatatactcatatttggcaggctttttctttataggttcttttggctttaagtgatacttttaaacccagctattgctcatttaaattagaaccttttccatgagaaccacactgacgatttctttaaatatagcttgaaaaaatttttcccctattgttcttttagctattgttcttgaaaataatgtgttttttaaaggaatatctacaaatagaaatggtgatgatatccagcaaatgttttaaaatggtgtaaaaccatttgtactcctttagtaattttttggtaaaaaatttatactcctttagtaattatcatttttaaaatgatcagaggatgcattttttaactgttttattttttgaaagctcattgtttaacttattatatatgtattcatttctacagaattataaggctgtctgcagagatttgaaaaatggcaacaaatgaaagtgtcagcatctttagttcagcatccttggctgtggaatatgtagattcacttttacctgagaatcctctgcaagaaccatttaaaaatgcttggaactatatgttgaataattatacaaagttccagattgcaacatggggatcccttatagttcatgaagccctttatttcttattctgtttacctggatttttatttcaatttataccttatatgaaaaaatacaaaattcaaaaggtgagtataagggactagaaatagaatattatcattaatgttgctgaatattttaaaagtacatagggctttgttttgtgaggctaaagcagtgatatccaatagaaatatgaagccacgtatgtaattttaaattttctagtagaatacatagaaaaggtaaaaagaaataaggmaattaatttcataatgtgtatcatttagctcaataaatgtaaactatcgctgggtgcagggtccatgcctgtaattccagcactttgggaggccaaggcaggaggattgcttgaggccaggagttcaagaccatcctgggaaacatagcaagaccctgtctctacaaaaaagatacaaaaatacccaggcatggtgatgtaagtcctagctacttatgaggctgaagcagaaagattgcagcactatactctagcataggcgacagagtgagaccttgtctcaaaaaaaataagaaataaatgtaaattattatttcaatcagtaatcaaattctaaaaaatacttaatgagatatttaataagtctttgcaattccgtgtgtattttacattaattttagtctatctcaatttagactagccatgtttaaagtgtttggaagccacatgttactagttgctcctgaattgagcaacacagtcctaggtcattattgataacatttcaagaatactttgttaaattgggctttaagtagatgtgatggttatctaacttaagtttatgaattttaatgtttaagctagctggaaaggaaaggtgtggtgatttgcgcatattttgcagttcaccccaactctatgttccagtaaatctaagggactgttaatacactacgaccttgatcagggctattcaagttttttttccctaaatatatggtaggtagttctgcagcattcgtatcatcccaaataaggaggtgatgctcctcgtttctggatatttgcttcattgcactaaatgttgagaggtcgctatgtacatgacaaggtgaaatctcatatgtagcctgtgagcttgacgtgagaatttggagtagcttattagaaagatgaattatttgttagaatttgtaagctgatgatagtttctagtgtttgctgtttacttttcataaaaagtcattccaaactaaaactcaggggcacacagtcttggtagaaagtagaccattgagagtattcatctatggaaagtaatttacattcacttagtacaattggccctccatatccatgggttgttgtatccat

SEQ ID NO: 57747 - DNA, 692 bp, Homo sapiens
acaaggaggaacggaagtacctgtgccctgagtgtggctacaagtgcaagtgggtcaaccagctgaaataccacatgaccaagcatacaggtgagtctgtgtggtttcgacaggcctgaagggttcctttgttccctggcaaacctaaccttaccaaggttggtccttgttccaattcagggccaacatcaatttcacattgggagtagacagcagggtggggttgtatgtgccagaatggctccccaacccactgaagacctgtcagaatcagaagggtaaacctgagagcctgggcatatgtactttccaaaagcttcccaggtgactgtgttacgaagtcagtcatttttcccctcttgagaacccccaactcaaacttgtatgactaagggcagatttgcttggctcttacacagacatgatggaactatcatgagttaaaaaggagaaagtgaaggattctcctgttctagtctgtccttttcttctcctgggtgtggatggaatccacaaacccgrttcttgaaagcacacaatcgtgtgcctgtgcttattgcatctgatccccctatgtggaggaattgattaggagcatttcaaggccctctgcttttatgaatgccacttatttcacctctacctcttccctcctaagtatttctttttttttttttttttttttttttttt

SEQ ID NO: 57748 - DNA, 635 bp, Homo sapiens
cactccagcctgggcaacaagagcgaaactccgtctcaaagaaaaataaaagaaaaaagaaatgtcagacaggactggaggactggagcattccaaagagatggtcattagtcaacttgctgcttgcattctttatatccactgattgcagtaactccatggcccagtaaaccttgctccaccgcctttcaatggtgatttgttccctgtcctgtaggactgaagccataccagtgtcccgagtgtgagtactgcaccaaccgggctgatgcactgcgtgtgcaccaggagacccggcatcgagaagcacgggctttcatgtgtgagcagtgtggcaaggccttcaagacgcgcttcctgctgcgcacccaccttcgcaagcacagtgaggccaaaccctatgtgtgcaatgtgtgccaccgtgctttccgctgggctgctggcctgcgccatcatgccctcacccacaccgaccgccaccccttcttttgccgcctctgcaactacaaggccaagcaaaagttccaggtggtcaagcacgtacgcaggcaccaccctgaccaagccgacccaaaccagggtgtgggcaaagaccccaccacccccmcagtgcacctgcatgatgtgcagctgga

SEQ ID NO: 57749 - DNA, 623 bp, Homo sapiens
ccacattcaaatttagcagcagatgcaaaaaactgaaaaaaataagtctcaataactaacttttctggtcttggtcagtttacttcgatgatcaaataacttgacaataatttcctcatttttctgtccccctatataccaagagatcttcaagacttatccatatttgtgctttcaaagtcctgactgttctcaaactccacagaaactgtacttgtcaagttcaccaataacctccgtgttgctaactccaatgaccaattctcartctatctgaccttacctttctgaggtattaggctgggtgggtcacttcctccaccctaaaacatgttcttcagttggtcaccacactcatgagaatttaaacactttttaaaaattggtttccagttcattcagttttcttcctactttactggccagaattcggagtagccttgtgctttgttctggtgatctcagaccatcttgtaagatatagaccatctagcagacatctcagacttaacagtttccaaaaccaaacttgatcacccttgctcacaacaaccaaatctgttcttttccagatcttcctcattgcagtaacttcctcattgcagtaactccatctttccagg

SEQ ID NO: 57750 - DNA, 2010 bp, Homo sapiens
ataaatagcttggtgcactccccgtggtaacgagtgagttcttgctctgtgggttcaggtgacagctggttgtttaaagcagccyggcaccttccactctcctttttccttccattctcaccatgtgacatgtctgctgttctccagccttctgctgtgactgtatgcttcctgagacctcatcagaagcacatgccagcatcatgcttcctgggtagcctgcagaaccctgagccaagtaaaccacttttctttataaattatccagtcaggtaatttatagcaatgcaaaacaaactaacacaagttactttccctctctggacattatctttaaaaagatgatgtcaccagagcaccttcagcaatccttcctgcgccataaatatcttctataatcaagcaatctattagagattcactaaaatttgcagcactttcaaattaacttactttccctctttctatgaacaatggcaaataatctgtatggttaagagatatttttcagacgttaagactttttttttcaagagaataagcacctgccaaactattttcaggaacaaattccctcagtcctctgaagttatttggagtttgactgtagctgtcaaaatggatagacttcaacacacccgaggacttgattttcatcataggttttgacacggaccttaaagctgagtaaaaacaaaggcatcttctcaaaaagattaggtgaggtatagtccaagaaaatttaaaagacacccacccactaccactaacaagtaaaagatggagttaaaaactgttgagctacaacaaggaagagagcttaaatttcttccaagcacaaacactgatgcattattcctaggaagtttttttaactaaaattctgaaaaagaatacaatgtgtacaagacagtgagtctcaaagtctgcgcctctgactagccacatcagtatcattttaataaatttctagaaatgcagaatctcaggctctcaccccagggcaactgcatcagaatggaagtgagaagcccaggcatctgtgttgtgatgagccctccaggacatcctgaggcatattaaagtttgagaaatgctgatttaagtgaccaaagtgtccctgaacgtggcccctgtgcaatcaggcagagttttattaccgacagttcttttcctgtgcatcctcctcctcccttcttttggtagtcatggcaaaatttcttttggctaaccatccttcctccactacaaacgatttagcagagtttatccatcaaagctctgccttcatatgtaacccaaggcctctcttcctttgggagtttgaattttgagcagacacacaagggaacaagaaggctggggtggcttcaacatctggatcctaaatagtatgtctttaattcttgcttactaattcttgagagcttccagaatcctgccctttccaagctgtagtgatgatccagcttttctgtccatcatatgagctacccagtatccttccataataaagcctttctgtttcccgaaaactgccagtgtcagttgctgctccttagaaccaaaggatacttaccaaagatattttaattggacgaaaggaccaagtacctgaacagtgaaggctgttgctaagctgtccaataagaccagtctgcaggaggaacatccatgcattgaccaaaataaaccccactgtggcacagaggccacaagcaattctgagcgacatgcacggatggaggccaaagcagctggtagagggctgagcccaggaaaagcactgtgaggagggctcttacgagatcccccactaggcactggtgaggggatggggctcccccagtggcatcactaaggtaaactgagatgtatctatgttagatgtttccatgttagtcatttaagactcattttaactgcccagtgggttcactttgcccactgcctagacagagctgatttaccaacacaggggaattgcaatggagaaacagtaattcacac

SEQ ID NO: 57751 - DNA, 2010 bp, Homo sapiens
ataaatagcttggtgcactccccgtggtaacgagtgagttcttgctctgtgggttcaggtgacagctggttgtttaaagcagcctggcaccttccactctcctttttccttccattctcaccatgtgacatgtctgctgttctccagccttctgctgtgactgtatgcttcctgagacctcatcagaagcacatgccagcatcatgcttcctgggtagcctgcagaaccctgagccaagtaaaccacttttctttataaattatccagtcaggtaatttatagcaatgcaaaacaaactaacacaagttactttccctctctggacattatctttaaaaagatgatgtcaccagagcaccttcagcaatccttcctgsgccataaatatcttctataatcaagcaatctattagagattcactaaaatttgcagcactttcaaattaacttactttccctctttctatgaacaatggcaaataatctgtatggttaagagatatttttcagacgttaagactttttttttcaagagaataagcacctgccaaactattttcaggaacaaattccctcagtcctctgaagttatttggagtttgactgtagctgtcaaaatggatagacttcaacacacccgaggacttgattttcatcataggttttgacacggaccttaaagctgagtaaaaacaaaggcatcttctcaaaaagattaggtgaggtatagtccaagaaaatttaaaagacacccacccactaccactaacaagtaaaagatggagttaaaaactgttgagctacaacaaggaagagagcttaaatttcttccaagcacaaacactgatgcattattcctaggaagtttttttaactaaaattctgaaaaagaatacaatgtgtacaagacagtgagtctcaaagtctgcgcctctgactagccacatcagtatcattttaataaatttctagaaatgcagaatctcaggctctcaccccagggcaactgcatcagaatggaagtgagaagcccaggcatctgtgttgtgatgagccctccaggacatcctgaggcatattaaagtttgagaaatgctgatttaagtgaccaaagtgtccctgaacgtggcccctgtgcaatcaggcagagttttattaccgacagttcttttcctgtgcatcctcctcctcccttcttttggtagtcatggcaaaatttcttttggctaaccatccttcctccactacaaacgatttagcagagtttatccatcaaagctctgccttcatatgtaacccaaggcctctcttcctttgggagtttgaattttgagcagacacacaagggaacaagaaggctggggtggcttcaacatctggatcctaaatagtatgtctttaattcttgcttactaattcttgagagcttccagaatcctgccctttccaagctgtagtgatgatccagcttttctgtccatcatatgagctacccagtatccttccataataaagcctttctgtttcccgaaaactgccagtgtcagttgctgctccttagaaccaaaggatacttaccaaagatattttaattggacgaaaggaccaagtacctgaacagtgaaggctgttgctaagctgtccaataagaccagtctgcaggaggaacatccatgcattgaccaaaataaaccccactgtggcacagaggccacaagcaattctgagcgacatgcacggatggaggccaaagcagctggtagagggctgagcccaggaaaagcactgtgaggagggctcttacgagatcccccactaggcactggtgaggggatggggctcccccagtggcatcactaaggtaaactgagatgtatctatgttagatgtttccatgttagtcatttaagactcattttaactgcccagtgggttcactttgcccactgcctagacagagctgatttaccaacacaggggaattgcaatggagaaacagtaattcacac

SEQ ID NO: 57752 - DNA, 2010 bp, Homo sapiens
ataaatagcttggtgcactccccgtggtaacgagtgagttcttgctctgtgggttcaggtgacagctggttgtttaaagcagcctggcaccttccactctcctttttccttccattctcaccatgtgacatgtctgctgttctccagccttctgctgtgactgtatgcttcctgagacctcatcagaagcacatgccagcatcatgcttcctgggtagcctgcagaaccctgagccaagtaaaccacttttctttataaattatccagtcaggtaatttatagcaatgcaaaacaaactaacacaagttactttccctctctggacattatctttaaaaagatgatgtcaccagagcaccttcagcaatccttcctgcgccatraatatcttctataatcaagcaatctattagagattcactaaaatttgcagcactttcaaattaacttactttccctctttctatgaacaatggcaaataatctgtatggttaagagatatttttcagacgttaagactttttttttcaagagaataagcacctgccaaactattttcaggaacaaattccctcagtcctctgaagttatttggagtttgactgtagctgtcaaaatggatagacttcaacacacccgaggacttgattttcatcataggttttgacacggaccttaaagctgagtaaaaacaaaggcatcttctcaaaaagattaggtgaggtatagtccaagaaaatttaaaagacacccacccactaccactaacaagtaaaagatggagttaaaaactgttgagctacaacaaggaagagagcttaaatttcttccaagcacaaacactgatgcattattcctaggaagtttttttaactaaaattctgaaaaagaatacaatgtgtacaagacagtgagtctcaaagtctgcgcctctgactagccacatcagtatcattttaataaatttctagaaatgcagaatctcaggctctcaccccagggcaactgcatcagaatggaagtgagaagcccaggcatctgtgttgtgatgagccctccaggacatcctgaggcatattaaagtttgagaaatgctgatttaagtgaccaaagtgtccctgaacgtggcccctgtgcaatcaggcagagttttattaccgacagttcttttcctgtgcatcctcctcctcccttcttttggtagtcatggcaaaatttcttttggctaaccatccttcctccactacaaacgatttagcagagtttatccatcaaagctctgccttcatatgtaacccaaggcctctcttcctttgggagtttgaattttgagcagacacacaagggaacaagaaggctggggtggcttcaacatctggatcctaaatagtatgtctttaattcttgcttactaattcttgagagcttccagaatcctgccctttccaagctgtagtgatgatccagcttttctgtccatcatatgagctacccagtatccttccataataaagcctttctgtttcccgaaaactgccagtgtcagttgctgctccttagaaccaaaggatacttaccaaagatattttaattggacgaaaggaccaagtacctgaacagtgaaggctgttgctaagctgtccaataagaccagtctgcaggaggaacatccatgcattgaccaaaataaaccccactgtggcacagaggccacaagcaattctgagcgacatgcacggatggaggccaaagcagctggtagagggctgagcccaggaaaagcactgtgaggagggctcttacgagatcccccactaggcactggtgaggggatggggctcccccagtggcatcactaaggtaaactgagatgtatctatgttagatgtttccatgttagtcatttaagactcattttaactgcccagtgggttcactttgcccactgcctagacagagctgatttaccaacacaggggaattgcaatggagaaacagtaattcacac

SEQ ID NO: 57753 - DNA, 2010 bp, Homo sapiens
ataaatagcttggtgcactccccgtggtaacgagtgagttcttgctctgtgggttcaggtgacagctggttgtttaaagcagcctggcaccttccactctcctttttccttccattctcaccatgtgacatgtctgctgttctccagccttctgctgtgactgtatgcttcctgagacctcatcagaagcacatgccagcatcatgcttcctgggtagcctgcagaaccctgagccaagtaaaccacttttctttataaattatccagtcaggtaatttatagcaatgcaaaacaaactaacacaagttactttccctctctggacattatctttaaaaagatgatgtcaccagagcaccttcagcaatccttcctgcgccataaatatcttctataatcaagcaatctattagagattcactaaaatttgcagcactttcaaattaacttactttccctctttctatgaacaatggcaaataatctgtatggttaagagatatttttcagacgttaagactttttttttcaagagaataagcacctgccaaactattttcaggaacaaattccctcagtcctctgaagttatttggagtttgactgtagctgtcaaaatggatagacttcaacacacccgaggacttgattttcatcataggttttgacacggaccttaaagctgagtaaaaacaaaggcatcttctcaaaaagattaggtgaggtatagtccaagaaaatttaaaagacacccacccactaccactaacaagtaaaagatggagttaaaaactgttgagctacaacaaggaagagagcttaaatttcttccaagcacaaacactgatgcattattcctaggaagtttttttaactaaaattctgaaaaagaatacaatgtgtacaagacagtgagtctcaaagtctgcgcctctgactagccacatcagtatcattttaataaatttctagaaatgcagaatctcaggctctcaccccagggcaactgcatcagaatggaagtgagaagcccaggcatctgtgttgtgatgagccctccaggacatcctgaggcatattaaagtttgagaaatgctgatttaagtgaccaaagtgtccctgaacgtggcccctgtgcaatcaggcagagttttattaccgacagttcttttcctgtgcatcctcctcctcccttcttttggtagtcatggcaaaatttcttttggctaaccatccttcctccactacaaacgatttagcagagtttatccatcaaagctctgccttcatatgtaacccaaggcctctcttcctttgggagtttgaattttgagcagacacacawgggaacaagaaggctggggtggcttcaacatctggatcctaaatagtatgtctttaattcttgcttactaattcttgagagcttccagaatcctgccctttccaagctgtagtgatgatccagcttttctgtccatcatatgagctacccagtatccttccataataaagcctttctgtttcccgaaaactgccagtgtcagttgctgctccttagaaccaaaggatacttaccaaagatattttaattggacgaaaggaccaagtacctgaacagtgaaggctgttgctaagctgtccaataagaccagtctgcaggaggaacatccatgcattgaccaaaataaaccccactgtggcacagaggccacaagcaattctgagcgacatgcacggatggaggccaaagcagctggtagagggctgagcccaggaaaagcactgtgaggagggctcttacgagatcccccactaggcactggtgaggggatggggctcccccagtggcatcactaaggtaaactgagatgtatctatgttagatgtttccatgttagtcatttaagactcattttaactgcccagtgggttcactttgcccactgcctagacagagctgatttaccaacacaggggaattgcaatggagaaacagtaattcacac

SEQ ID NO: 57754 - DNA, 2010 bp, Homo sapiens
ataaatagcttggtgcactccccgtggtaacgagtgagttcttgctctgtgggttcaggtgacagctggttgtttaaagcagcctggcaccttccactctcctttttccttccattctcaccatgtgacatgtctgctgttctccagccttctgctgtgactgtatgcttcctgagacctcatcagaagcacatgccagcatcatgcttcctgggtagcctgcagaaccctgagccaagtaaaccacttttctttataaattatccagtcaggtaatttatagcaatgcaaaacaaactaacacaagttactttccctctctggacattatctttaaaaagatgatgtcaccagagcaccttcagcaatccttcctgcgccataaatatcttctataatcaagcaatctattagagattcactaaaatttgcagcactttcaaattaacttactttccctctttctatgaacaatggcaaataatctgtatggttaagagatatttttcagacgttaagactttttttttcaagagaataagcacctgccaaactattttcaggaacaaattccctcagtcctctgaagttatttggagtttgactgtagctgtcaaaatggatagacttcaacacacccgaggacttgattttcatcataggttttgacacggaccttaaagctgagtaaaaacaaaggcatcttctcaaaaagattaggtgaggtatagtccaagaaaatttaaaagacacccacccactaccactaacaagtaaaagatggagttaaaaactgttgagctacaacaaggaagagagcttaaatttcttccaagcacaaacactgatgcattattcctaggaagtttttttaactaaaattctgaaaaagaatacaatgtgtacaagacagtgagtctcaaagtctgcgcctctgactagccacatcagtatcattttaataaatttctagaaatgcagaatctcaggctctcaccccagggcaactgcatcagaatggaagtgagaagcccaggcatctgtgttgtgatgagccctccaggacatcctgaggcatattaaagtttgagaaatgctgatttaagtgaccaaagtgtccctgaacgtggcccctgtgcaatcaggcagagttttattaccgacagttcttttcctgtgcatcctcctcctcccttcttttggtagtcatggcaaaatttcttttggctaaccatccttcctccactacaaacgatttagcagagtttatccatcaaagctctgccttcatatgtaacccaaggcctctcttcctttgggagtttgaattttgagcagacacacaagggaacaagaaggctggggtggcttcaacatctggatcctaaatagtatgtctttaattcttgcttactaattcttgagagcttccagaatcctgccctttccaagctgtagtgatgatccagcttttctgtccatcatatgagctacccagtatccttccataataaagcctttctgtttcccgaaaactgccagtgtcagttgctgctccttagaaccaaaggatacttaccaaagatattttaattggacgaaaggaccaagtacctgaacagtgaaggctgttgytaagctgtccaataagaccagtctgcaggaggaacatccatgcattgaccaaaataaaccccactgtggcacagaggccacaagcaattctgagcgacatgcacggatggaggccaaagcagctggtagagggctgagcccaggaaaagcactgtgaggagggctcttacgagatcccccactaggcactggtgaggggatggggctcccccagtggcatcactaaggtaaactgagatgtatctatgttagatgtttccatgttagtcatttaagactcattttaactgcccagtgggttcactttgcccactgcctagacagagctgatttaccaacacaggggaattgcaatggagaaacagtaattcacac

SEQ ID NO: 57755 - DNA, 2010 bp, Homo sapiens
ataaatagcttggtgcactccccgtggtaacgagtgagttcttgctctgtgggttcaggtgacagctggttgtttaaagcagcctggcaccttccactctcctttttccttccattctcaccatgtgacatgtctgctgttctccagccttctgctgtgactgtatgcttcctgagacctcatcagaagcacatgccagcatcatgcttcctgggtagcctgcagaaccctgagccaagtaaaccacttttctttataaattatccagtcaggtaatttatagcaatgcaaaacaaactaacacaagttactttccctctctggacattatctttaaaaagatgatgtcaccagagcaccttcagcaatccttcctgcgccataaatatcttctataatcaagcaatctattagagattcactaaaatttgcagcactttcaaattaacttactttccctctttctatgaacaatggcaaataatctgtatggttaagagatatttttcagacgttaagactttttttttcaagagaataagcacctgccaaactattttcaggaacaaattccctcagtcctctgaagttatttggagtttgactgtagctgtcaaaatggatagacttcaacacacccgaggacttgattttcatcataggttttgacacggaccttaaagctgagtaaaaacaaaggcatcttctcaaaaagattaggtgaggtatagtccaagaaaatttaaaagacacccacccactaccactaacaagtaaaagatggagttaaaaactgttgagctacaacaaggaagagagcttaaatttcttccaagcacaaacactgatgcattattcctaggaagtttttttaactaaaattctgaaaaagaatacaatgtgtacaagacagtgagtctcaaagtctgcgcctctgactagccacatcagtatcattttaataaatttctagaaatgcagaatctcaggctctcaccccagggcaactgcatcagaatggaagtgagaagcccaggcatctgtgttgtgatgagccctccaggacatcctgaggcatattaaagtttgagaaatgctgatttaagtgaccaaagtgtccctgaacgtggcccctgtgcaatcaggcagagttttattaccgacagttcttttcctgtgcatcctcctcctcccttcttttggtagtcatggcaaaatttcttttggctaaccatccttcctccactacaaacgatttagcagagtttatccatcaaagctctgccttcatatgtaacccaaggcctctcttcctttgggagtttgaattttgagcagacacacaagggaacaagaaggctggggtggcttcaacatctggatcctaaatagtatgtctttaattcttgcttactaattcttgagagcttccagaatcctgccctttccaagctgtagtgatgatccagcttttctgtccatcatatgagctacccagtatccttccataataaagcctttctgtttcccgaaaactgccagtgtcagttgctgctccttagaaccaaaggatacttaccaaagatattttaattggacgaaaggaccaagtacctgaacagtgaaggctgttgctaagctgtccaataagaccartctgcaggaggaacatccatgcattgaccaaaataaaccccactgtggcacagaggccacaagcaattctgagcgacatgcacggatggaggccaaagcagctggtagagggctgagcccaggaaaagcactgtgaggagggctcttacgagatcccccactaggcactggtgaggggatggggctcccccagtggcatcactaaggtaaactgagatgtatctatgttagatgtttccatgttagtcatttaagactcattttaactgcccagtgggttcactttgcccactgcctagacagagctgatttaccaacacaggggaattgcaatggagaaacagtaattcacac

SEQ ID NO: 57756 - DNA, 2500 bp, Homo sapiens
gtttcttagaatgtcatcgccttctttctacaaccaagacaagttccagttagatggaaagcatcaggactgtcagggcccctgctactcagtcgcagatgtggacatctcacactcactttgactctcactcaactcccccacattgtaggtccggcagaagtctgtgctcaaatgctacatgtgaatggggcagaaggctcaatgggcacatgctgcccacatctcctctatccatgctcatgctccaaaacactaggtcaaagagaaaattattaagaatttcaagatgggccggatgcagtggtttacacctgtaatcccagcactttgggagcccaaggctggatcacctgaggtcaggagttcgagaccagcctcgccaacatggtgaaaccccacgtctactaaaagaaatacaaaaattagctgggtgtggtggcrggtgcctgtaatcccagctactcgggaggctgaagcaggagaatcacttgaacccgcaggcagaggttacagagagccgatattgagccattgcactccagcttgggcaacaataacaaaaaaaaaaaggatttcaagctggtgacagcagagcattaaaccaagcatagggccctcctgagcatgaactctatgtgactgtactcgtcacgtgcccatgaagatggccttgatgacagccacacctgtgtaaggacaggctcaagacacacttccacagccatccttccatttgctggccagttcacccaaagccaaattaggttaggaccccacactctgaggccctgggtctcagatatgacggccaaaggatccaatactgaaacacaaaaaggatctgggtttaatgctcacccacctcaggaccagatgagccagaagacttcactggccttctttaacctttctaaggctgccacactgtgtgacagctcctttgtccacccagtaaagcaggggaggtgagcacgcagccatcttttgatatgcttaacaccaaggggagaggaagggaccaaccaaccatttaccagctcacagcaaggtggtaaacactaagcaatgccttgtacatatgttgactcaatcttacaaccctaacagacaggtaacattttactgctggagaaactgaggctcagggaagtggcgtgacttacccaagacctgcccagtcagctcagctgacttctctggacttatccacatccacggagaccccctcatgcagccctgccatccgcccagagactgggttaaaactcaagtgcatttaatgcaagaaaaaagagtgcaactcttgactccaaacgctctggaacatcaagtcaggagcaccctggaagggtctgattaaagggttaaagcaaaggctcctctgagacacgttaaatgtatgtggccacatctttgcctacatcagtgcagccccacgcatttccctaaatgcctgtaaagcagatctcacataattatgatcttcagctcggccctggccacattagaagtaatatatatttatggagtgaaaagctcaggtcctgcctctaacacagttatttacactcatcagggcctgctccagcaggccctgcgttccatgttatcacaccccgtcctgcctggtcacagccctctcctcagggtagcaattttgagcagagtttgaataagattgtctcgtgccaagtctgctttagaaggcagccaggtaaatgccctcagccctgctcaggaggagccacggggtgggatggtgggatgaggggcccagagcatcagctattcacccaaaagcaggatgaacaggagcagctggttctctggtcccagaagcttcgcctcccatcttgatgccacttctggtcacagccctaagcgtaggggaacatctgatggttggtggatggccacatcttctgactcgccgaggtgcaggctgacttcctgggtccctcacaccacaggccaccccacgcaggcctcaggtggtcccactgcctgccctgaggacccctccacaggattggtggtcaagggcctggaacactggaagtgtgggcctgggaagcaccgtggtcacacaaagagccctaaaacagaaaatgcaatccgggttcagattccttgcctgtgtcccctcgggtaaaccatgtgccttctcagagccttggcttcctcagccatcaacagggggaggcaccaaatgagatcaacaaagacgtccgcaccacttcacagaactctgcaggtgggggacagtccatcctctcattggcccaagaggcttcttttaggtgctgccagaggcaagaagataggaaccaccagctgcctttgcttccttcaggtaaccgcctcccaaccagtgctacctcgcatgccaacacagcgctgcaagtcagcaggcaccccgacccagttcctctttcccttcttagcagcagcagctctctggactctgaggcaaagtgggcctctgtctgtccccttg

SEQ ID NO: 57757 - DNA, 650 bp, Homo sapiens
caataagggaggaggacagtttatgctgcacttaacagttcactaaaaatttagtgatggaaaaaaaactgtagtggctgaaattatatctttgaacaatatgaagatttaaggtattttatttcttgttgttttagaattaccacttggtaatgtaggatgctatttctgtccatttttaaagatgattttactgtgggtactgtacctgagcatggatgaaaaagggcaaagaagtcagaatagtgatttccasaatgtcctctggtttggagtcgtgactaccatttatagtttttgttggcagatctattttctctttacaaaaggatagacaccagaatctgtaagtgaaatgccctggcttgaaaagggtgagatcttattatgaaaaattgatgttactgttgttttctgtgttctgccttttgcagatgatcccaattactctttggttgatgactacagtttgctctatcagtaaaatcaatggtaagaacctttatttttcacataattgagtcatgtgtagactggtaattgtgctattgaagcctttgaaccttatttataacactaccacaaactagcaaggccttgcatgaggcaggtacactggccagcatgctgtcccttcaggacacctctgt

SEQ ID NO: 57758 - DNA, 650 bp, Homo sapiens
caataagggaggaggacagtttatgctgcacttaacagttcactaaaaatttagtgatggaaaaaaaactgtagtggctgaaattatatctttgaacaatatgaagatttaaggtattttatttcttgttgttttagaattaccacttggtaatgtaggatgctatttctgtccatttttaaagatgattttactgtgggtactgtacctgagcatggatgaaaaagggcaaagaagtcagaatagtgatttccagaatgtcctctggtttggagtcgtgactaccatttatagtttttgttggcagatctattttctctttacaaaaggatagacaccagaatctgtaagtgaaatgccctggcttgaaaagggtgagatcttattatgaaaaattgatgttactgttgttttctgtgttctgccttttgcagatgatcccrattactctttggttgatgactacagtttgctctatcagtaaaatcaatggtaagaacctttatttttcacataattgagtcatgtgtagactggtaattgtgctattgaagcctttgaaccttatttataacactaccacaaactagcaaggccttgcatgaggcaggtacactggccagcatgctgtcccttcaggacacctctgt

SEQ ID NO: 57759 - DNA, 650 bp, Homo sapiens
caataagggaggaggacagtttatgctgcacttaacagttcactaaaaatttagtgatggaaaaaaaactgtagtggctgaaattatatctttgaacaatatgaagatttaaggtattttatttcttgttgttttagaattaccacttggtaatgtaggatgctatttctgtccatttttaaagatgattttactgtgggtactgtacctgagcatggatgaaaaagggcaaagaagtcagaatagtgatttccagaatgtcctctggtttggagtcgtgactaccatttatagtttttgttggcagatctattttctctttacaaaaggatagacaccagaatctgtaagtgaaatgccctggcttgaaaagggtgagatcttattatgaaaaattgatgttactgttgttttctgtgttctgccttttgcagatgatcccaattactctttggttgatgactacagtttgctctatcagtaaaatcaatggtaagaacctttatttttcacataattgagtcatgtgtagactggtaattgtgctattgaagcctttgaaccttmtttataacactaccacaaactagcaaggccttgcatgaggcaggtacactggccagcatgctgtcccttcaggacacctctgt

SEQ ID NO: 57760 - DNA, 1207 bp, Homo sapiens
  misc_feature (1)...(1207): n = A,T,C or G
gtgttgagcagtcagtgacgaccttgctaataagaaggagaatgccctggttcagatggttgataggtgccaggcccaactggctgagagttatctgcaatggccctaagtttcctaggaagctttgataagcatcagagctgcagctttctcaagaaggccaacagaactagggtctaagactgaagactatggaaactstcccctctattgtttcaaaaatccagaatcctaaaatttccagaatgtttcattgttcataaccctggaccttttcaaaatcctgtagtttatataataaaaagaccttaagtttttaactttttaaaagtagtgggatgtaaaagagactatcaaatagggtgacagttgaatttccatttgaaaaggaagaatttgagtctcagtgacaggaagtngatggaaaggctangatttgaataaaatcatatcctgatgtctgtttcttttaaaaaagtggaagaatgagctcagtattcaaattcttctggaatgatcttaagctggcctgcaggtaacattccccaagtccacatttacaggtcgggatgacccattgagaggaaactggatgaacaaaatcctggtgttcagccttacctggaaacgggcagaatacctgctgacaacttctgtcatcccagacaaatagctactttacaaagctccagattgaaagtgaaagaccagagatgttatgatttttttaaagagaataatcagttgaccggttcaaacaattaatgaaaatcacatggtgttccttacggtgatgggacagtagtcatggggtcttgatgactatgtgaggtgggcgaaatactggctgctattatttatgcgctgaggactggctctgggacagattttctcctttcctgctctcctctcctctcttcccccaactcccacctcaacagtcctacaaatctatgaggtttcacattggtgcctttccctactcactcttcagtactcaaaacaccctgaactgcagtgtggtctaccctgaggcctttgttttcaggtcttggaaagtgtgtgtgtgcaggatccccggctcctccaagcatgagatttctaagcatgtccctagaccaccactgtgccatctcgtaccttaaaaacttcttatgatattaatgaggaaagccacgctgctttcagcgatgtgtagatgctttgg

SEQ ID NO: 57761 - DNA, 1207 bp, Homo sapiens
  misc_feature (1)...(1207): n = A,T,C or G
gtgttgagcagtcagtgacgaccttgctaataagaaggagaatgccctggttcagatggttgataggtgccaggcccaactggctgagagttatctgcaatggccctaagtttcctaggaagctttgataagcatcagagctgcagctttctcaagaaggccaacagaactagggtctaagactgaagactatggaaactctcccctctattgtttcaaaaatccagaatcctaaaatttccagaatgtttcattgttcataaccctggaccttttcaaaatcctgtagtttatataataaaaagaccttaagtttttaactttttaaaagtagtgggatgtaaaagagactatcaaatagggtgacagttgaatttccatttgaaaaggaagaatttgagtctcagtgacaggaagtngatggaaaggctangatttgaataaaatcatatcctgatgtctgtttcttttaaaaaagtggaagaatgagctcagtattcaaattcttctggaatgatcttaagctggcctgcaggtaacattccccaagtccacatttacaggtcgggatgacccattgagaggaaactggatgaacaaaatcctggtgttcagccttacctggaaacgggcagaatacctgctgacaacttctgtcatcccagacaaatagctactttacaaagctccagattgaaagtgaaagaccagagatgttatgatttttttaaagagaataatcagttgaccggttcaaacaattaatgaaaatcacatggtgttccttacggtgatgggacagtagtcatggggtcttgatgactatgtgaggtgggcgaaatactggctgctattatttatgcgctgaggactggctctgggacagattttctcctttcctgctctcctctcctctcttcccccaactcccacctcaacagtcctacaaatctatgaggtttcacattggtgcctttccctactcactcttcagtactcaaaacaccctgaactgcagtgtggtctaccctgaggcctttgttttcaggtcttggaaagtgtgtgtgtgcaggatccccggctcctccaagcatgagatttctaagcatgtccctagaccaccactgtgccatctcgtaccttaaaaacttcttatgatattaatgaggaaagccaygctgctttcagcgatgtgtagatgctttgg

SEQ ID NO: 57762 - DNA, 594 bp, Homo sapiens
gagctggctggaaacaggtgaagaatgcccagttagaagatgccacacaatggatctatcctaaatctctgtcctaaatctatcctaaactccatattggacccagagcaagctcaggaaataagtcaaggctgcatctacagcctttgcataaattaggggagaacataccatggaaacwgaaattcttttcctttcccttgcagactttagataaccctttccacggggtagtctgtctgggaaagtttgcatgaaggccaagtctaggctaaactaggagctcttcatgtcccagggctatcggtcctgccctttttcttgagcagtaaataactctcagctttgaaaagcatgccctggtgacgtgttcatcatggccatgggaggagcagagtctggctgtctgggtgcagaactcagagctccaagcctcgtctgacactgattttctcaccgcgaaaaatggtggggaccgtggccctgagagtgaccaaggaaaggatcttatgttttatagtggatcacatggtgctccactgagtccccctgtgcagggctgatgtgccccctcccagctgctaggcatattgg

SEQ ID NO: 57763 - DNA, 594 bp, Homo sapiens
gagctggctggaaacaggtgaagaatgcccagttagaagatgccacacaatggatctatcctaaatctctgtcctaaatctatcctaaactccatattggacccagagcaagctcaggaaataagtcaaggctgcatctacagcctttgcataaattaggggagaacataccatggaaacagaaattcttttcctttcccttgcagactttagataaccctttccacggggtagtctgtctgggaaagtttgcatgaaggccaagtctaggctaaactaggagctcttcatgtcccagggctatcggtcctgccctttttcttgagcagtaaataactctcagctttgaaaagcatgccctggtgacgtgttcatcatggccatgggaggagcagagtctggctgtctgggtgcagaactcagagctccaagcctcgtctgacactgattttctcaccgcgaaaaatggtggggaccgtggccctgagagtgaccaaggaaaggatcttatgttttayagtggatcacatggtgctccactgagtccccctgtgcagggctgatgtgccccctcccagctgctaggcatattgg

SEQ ID NO: 57764 - DNA, 922 bp, Homo sapiens
agctggaatattctcccagatcttcatagtcacattgaaagtccctccctattggcccccatgctgtctggctctaccactcactgactcttctcacagtattcatgtcctgacctcccagtaaatcccattatggtcatcaaacttcggcaactgaatcactagcttcttcctcaccttaagcactgctggcatcctgtggacaatgcttccagcaccctggtttcattgtcccaaggtcaactgctccactagcaaaatattagcctcttggaccctggagcccacctccagtgaaaacatcccatccttgcagcttcctccctcttttttcctaccctactctccagcttcatggagcacccaggcccttgaagcctttcctccaaagctcttcaccctcctctgcttcatctccacccttgtccaggccagaccctaagtggaagaatgtcaaccacttctccccatcactctcaactcccttgtcctgccctgagctacgctggtccctcaagctcccaggatcccaactatccatgttccccaggattacaggacttactaaagaaacattacagctggggagattcracattcccaatatatagattccattctcagccaaaccctcaggtctgccaagatatcctgttatatacctgagtcagctctctttccccagtctctgcagtaatgattccaactttaatactcttttcaaaccctctccataacaacatctccactctgaataaggtacttgcctcttatttcaccaaaaacaggatgcctcaggcaagatctccctcggcttcctaagtgtttctgtacctaccgcttcttctccaaacagtgttctaaagttcattcttccatccacttttgctttagagaccatccctgaaacattaattctccc

SEQ ID NO: 57765 - DNA, 1582 bp, Homo sapiens
atgtgtctggagaaatatatgcttttatcagtctattgcaaatcagttatttttggttagccatcatccttccctacttttaaaatttttaatttttttctgataatggcactttcttccttgctttggggccttgttctgtatcatttcacagagcttttggtggggctgcccagcccaggaatgggggctgggtctcaataagccaaccagacactgtcttgggagaaggaaagtcatgggaagacacacagagaggctctcgtctgagatcagccacagggtcgctcattgtgcaggactcactgcctgcagtgcccaggctcctgccctgcgtcctgtccacccaaccaacagaggctgtgtgtgcatctctgttggttgtatgagatacccagtgttcttaggataagccccaacttttgtcatgtttaagttaatcagagttggtttccactgccccactccccccatccaaaaatcctaaatgaaaaaagtgagatagaaaagagtgtctatttaaagtgagttcttctttttcctaaacagctgttattaaattgatgccgtgttctgcatttcagagtgaggaaacatattggtagacacccattaagctctcagctgttgaccacgttttcagatgcattcagtagctccctgcctctgccctctctcctgtagacctgtcctccgttctgctgcctggagggtggctctgaggtgagcgtctgagtatctcgctccagtgagaattccagccagggatccctgaggtgagtaagagcgctcttatcctcatatygcagaaggtccacagaggggctcctgggctccatggaccctcagaattgtagatacaattgtatcggtgtgcactattgcaacagctgtgaccagagctttgtcagattctcaaagaggcttgttacttggccctcaaaggaggcctgctgcctagagaaaagaatccatgctcctgcactcgtcagctcagccacactttcggaccttttcctgcctcacttttgcctttgtgttctataaaactagcatctccaaagcacttgcaactgtttccatatgcgggggtgttttatgggtttatgttcttgcatatgctgtaccttctgaaatgttctctccatgcgacctctctgccccttgtcagtgtccttttcatccgtccgcaccccctcagagcatgactcccacggtagatccttgattaccccctgcagagaattgtcttctcacgatgacagctttattccaacccacctagatctgttccggcctaaaggtcacgtgttgtgctgctgatccgtgcagatctagttccttcccagggggctgtggtttttctcctgtgttccagcacactgctgggcccataacaggtctaaacaaacaagggtaggaaaaatgcatcttcccaattaataaataactgatttagttatgaactattaattttaataataaaaaggtgtttttttcctctggaattcttagattattttgttttgacttctccaccagtatttaccatattttgccttgtgtgatagtttttttgtgt

SEQ ID NO: 57766 - DNA, 1582 bp, Homo sapiens
atgtgtctggagaaatatatgcttttatcagtctattgcaaatcagttatttttggttagccatcatccttccctacttttaaaatttttaatttttttctgataatggcactttcttccttgctttggggccttgttctgtatcatttcacagagcttttggtggggctgcccagcccaggaatgggggctgggtctcaataagccaaccagacactgtcttgggagaaggaaagtcatgggaagacacacagagaggctctcgtctgagatcagccacagggtcgctcattgtgcaggactcactgcctgcagtgcccaggctcctgccctgcgtcctgtccacccaaccaacagaggctgtgtgtgcatctctgttggttgtatgagatacccagtgttcttaggataagccccaacttttgtcatgtttaagttaatcagagttggtttccactgccccactccccccatccaaaaatcctaaatgaaaaaagtgagatagaaaagagtgtctatttaaagtgagttcttctttttcctaaacagctgttattaaattgatgccgtgttctgcatttcagagtgaggaaacatattggtagacacccattaagctctcagctgttgaccacgttttcagatgcattcagtagctccctgcctctgccctctctcctgtagacctgtcctccgttctgctgcctggagggtggctctgaggtgagcgtctgagtatctcgctccagtgagaattccagccagggatccctgaggtgagtaagagcgctcttatcctcatatcgcagaaggtccacagaggggctcctgggctccatggaccctcagaattgtagatacaattgtatcggtgtgcactattgcaacagctgtgaccagagctttgtcagattctcaaagaggcttgttacttggccctcaaaggaggcctgctgcctagagaaaagaatccatgctcctgcactcgtcagctcagccacactttcggaccttttcctgcctcacttttgcctttgtgttctataaaactagcatctccaaagcacttgcaactgtttccatatgcgggggtgttttatggktttatgttcttgcatatgctgtaccttctgaaatgttctctccatgcgacctctctgccccttgtcagtgtccttttcatccgtccgcaccccctcagagcatgactcccacggtagatccttgattaccccctgcagagaattgtcttctcacgatgacagctttattccaacccacctagatctgttccggcctaaaggtcacgtgttgtgctgctgatccgtgcagatctagttccttcccagggggctgtggtttttctcctgtgttccagcacactgctgggcccataacaggtctaaacaaacaagggtaggaaaaatgcatcttcccaattaataaataactgatttagttatgaactattaattttaataataaaaaggtgtttttttcctctggaattcttagattattttgttttgacttctccaccagtatttaccatattttgccttgtgtgatagtttttttgtgt

SEQ ID NO: 57767 - DNA, 1582 bp, Homo sapiens
atgtgtctggagaaatatatgcttttatcagtctattgcaaatcagttatttttggttagccatcatccttccctacttttaaaatttttaatttttttctgataatggcactttcttccttgctttggggccttgttctgtatcatttcacagagcttttggtggggctgcccagcccaggaatgggggctgggtctcaataagccaaccagacactgtcttgggagaaggaaagtcatgggaagacacacagagaggctctcgtctgagatcagccacagggtcgctcattgtgcaggactcactgcctgcagtgcccaggctcctgccctgcgtcctgtccacccaaccaacagaggctgtgtgtgcatctctgttggttgtatgagatacccagtgttcttaggataagccccaacttttgtcatgtttaagttaatcagagttggtttccactgccccactccccccatccaaaaatcctaaatgaaaaaagtgagatagaaaagagtgtctatttaaagtgagttcttctttttcctaaacagctgttattaaattgatgccgtgttctgcatttcagagtgaggaaacatattggtagacacccattaagctctcagctgttgaccacgttttcagatgcattcagtagctccctgcctctgccctctctcctgtagacctgtcctccgttctgctgcctggagggtggctctgaggtgagcgtctgagtatctcgctccagtgagaattccagccagggatccctgaggtgagtaagagcgctcttatcctcatatcgcagaaggtccacagaggggctcctgggctccatggaccctcagaattgtagatacaattgtatcggtgtgcactattgcaacagctgtgaccagagctttgtcagattctcaaagaggcttgttacttggccctcaaaggaggcctgctgcctagagaaaagaatccatgctcctgcactcgtcagctcagccacactttcggaccttttcctgcctcacttttgcctttgtgttctataaaactagcatctccaaagcacttgcaactgtttccatatgcgggggtgttttatgggtttatgttcttgyatatgctgtaccttctgaaatgttctctccatgcgacctctctgccccttgtcagtgtccttttcatccgtccgcaccccctcagagcatgactcccacggtagatccttgattaccccctgcagagaattgtcttctcacgatgacagctttattccaacccacctagatctgttccggcctaaaggtcacgtgttgtgctgctgatccgtgcagatctagttccttcccagggggctgtggtttttctcctgtgttccagcacactgctgggcccataacaggtctaaacaaacaagggtaggaaaaatgcatcttcccaattaataaataactgatttagttatgaactattaattttaataataaaaaggtgtttttttcctctggaattcttagattattttgttttgacttctccaccagtatttaccatattttgccttgtgtgatagtttttttgtgt

SEQ ID NO: 57768 - DNA, 879 bp, Homo sapiens
tttctttaacacttgctagcatactctacatctccctatttagcttagcatttttatggtacttttggtagccaacttctaagacggcccccaatgaccccatgtcctggtttttacaccttgtagggtcctctccaacgtggggccagggttggtctatgtgatcattagtatacaatgtagtgaggagatatcactatgagattaggcaataagagaaactatgacttctgtcttggggctggctctctctgtttctctctctctcaaatcacttgctctagaggaagccaactgttattttgtgagtagccctatgggttggtctatgcaggaaggaactgaagtctctggccaacagtcagcaaggagctgacatctgatgacaacacatgaatgagtttagaagcagatcctccagccccagcaaagccttcagttgagaccacagccctgatgacagcttgactgcagccacacaacagaatccagagccagaagccccaggtcagccaccactggrttcctgactgcataggtctcaggacaatttgctatgcagtcattgtattagttcattttgtactgctgtaaaggaatatctgagatgaggtaatttataaagaaaagagatttatttggctcacgattctgcaggctgtccaaaatgcatggcgttggcatctgttcagcttctggtgaagcctcaggaagttttactcgtggtgcaaagcaaacggagctggtgtgtcacatggtgagagagagagcaagagaggaggaggcttgccacacccttttaaactacaaattcttgagtgaactaatagatggagaactcgctcattaccatggggatagcaccaagccattcatgag

SEQ ID NO: 57769 - DNA, 750 bp, Homo sapiens
aacatgagtggaaacacctctagtgagttctctaggtgaggactcagccaaaaagatgccactaacattgtattctccaacaattgaaaaatcagtaaaagctttaattaagcactatgaggaatgtgaggcccccacagtcactcaaacatttatccctcaagaggcataccaattatgagtttacaatctcaaagacaaaatgatcaactaaagccattgttttctttaggaattgcttattttttttccagctttccataatttgatttggttatatgataacccatgaaactgggttggatacagcagatgaagacagactgtagataagaaaaagcactttttttttwaaacttgtaattctagggcttagactcctgggcattttaagagcagcacttaaaactaaatgtgttgtgaaagattgagaatttaacaagcaccacctgtgagtaatttctcgttgatatgtacactgatgtataagacaacattattttaaagcataagaaatagttttggcttagtaaaatatcagactattttctcatatgataacttctggaagttgaaaacctttgttgtcacctgttagctatctgtcttgaaaacacaagaattacaatttccacgatgctgtcaaaggcacttttaatgcccatttgaccaccagatggctacagctcatgcaagaggaagatttagagaatgtgttataaaggttggcatgggagggaaaagggaaaa

SEQ ID NO: 57770 - DNA, 740 bp, Homo sapiens
ttttttttggagacagagtcttgctgtgtcacccaggctggagtgcagtggtacgatctcggctcactgcaacctccaccttctgggttcaagcaattctcctgcctcagcctcccaagtaactgggactactggcacccaccaccacgcccagctaatttttgtatttttagtagagacagggtttcaccaygttggccaggctcgtcttgaactcctgacttgtgatccacccacctcggcctcccaaagtgctgggattacaggtgtgagccactgcacccctggcccagtctggtaatttctttcacttctgatgcagttgcaaagcctccatggcctgacccagcctgcactgggctcctcatattaaaaacacttgccagagtgaaaagaaagataacagcattgctaagtggaagactcctctttgaatcatcttgaccgttgttccaagggagtattgtttgtagcacagatgtactctgtaaaaatccagtgttaggagtcattaaataaatctcacctgaaaaagccttctttgtattgacatttaacctggtattcaagattatccagatctatccttgagtcacttatttatcaacctacccagactggttctctcattctgttagttatctattgctgcataacaaatttcttcaaaacttagtggcctaaaacaacttacagttattctctcccatgggtcagaaatttgggcctggctaagtgga

SEQ ID NO: 57771 - DNA, 2357 bp, Homo sapiens
acggagaagagtctaacagcaggtgatactctccttttcaacagcataaagaaaaaaagatgcattttcatatacttatggcatgtttctgattataaaagtaatacagactcattaaatacgaaaaataaaagatacgatatagttggaaataaaagtgcccacttatcccagcatccagaaaggcacacctatgatattgtggtacactgcctccatctcttatcggtgtgtgtgtgagtgtatgtgtgcaccgctgtgtgtgagcaggtgtgcactgcctccatctcctatcggtgtgtgtgtgtgtatgtgtgcaccgctgtgtgtgagcaggtgtgcactgcctccatctcctatcaatgtgcgagtgtatgtgtgcaccgctgtgtgtgagcaggtgtgcactgcctccatctcttatcggtgtgtgtgtgtatgtgtgcactgctgtgtgtgagcaggtgtgcactgcctccatctcctatcggtgtgtgtgtgtatgtgtgcactgctgtgtgtgagcaggtgtgcactgcctccatctcctatcggtgtrtgtgtgtgtatgtgtgcactgctgtgtgtgaggtgtgcactgcctccatctcctatcggtgtgtgtgagagtgtatgtgtgcactgctgtgtgcgagcaggtgtgtacatgttcacacggatatactgttctccaaatttggatcctattgttcaatttgaagcctacttttaaaaacttaacattaggccgggcatggtggctcccgcctgtaatcccagcactttaggaggctgaggcgggcagatcacctgaggctgggaattcgagaccagcctgaccaacatggagaaaccccttctctactaaaaatacaaaattagccaggcgtggtggcgggtgcctgtaatccaagatacttgggaggctgagacaggagaattgcttgaacccgcgaggcggaggttgcagtgagctgagatcgcgccattgcactccagcctggacaagaacagtgaaaccccatctcaaaaaaaaaaaaaaaaaaccttaacattaaaacaaaacaacagcattttcttttgtcactgtaagtgatgttctaagtatgattttattcatgactgaaggccatccattttttaatgtagatgtaccataattcacgtaaacacttaccacattgcattggaggttttatttttccttttggcattatgaataatgtcgcgcactaccacggttcatacacacatgctccttctctaacctcgctggagctagaatcactgaatgaagtcatattggcttatttaaaggatctaaaagttatgctgcaggtgtggcccattgcatcccacttcccacacagcacgagaaagaattcactaactatggcattgttgtgaatgctgagtaaagagccaatgtgttctgatatctgtgctaatttaaggagaacattccacttggtggtttaaatttacattccttgaatgacttatgagtaagccacatattgcacaaggatcatttataattattctgtcttccatttatgtctatttttattataatattagaataaactgtcatatataacaatgcttgtaaaattcattacattgacctatgtgtagattactatgtcagtaccacatatttaaaaaactgatgtaaactttagaataattttaatcccatatatttcatatatatctgtctgggatcctatatagccaagatatatatagatagatacctttaataatctcatgtgtatattccataaacagcatttcttttttttttttttttttttttttttttttttttgagacggagtctcgctgtgtctcccaggttggagtgcaggggcgtgatctcggctcactgcaagctccgcctcccaggttcatgccattctcctgcctcagcctcccaagtagctgggactacaggcgcccgccaacacacccggctaattttttgtatttttagtagaaacggggtttcaccgtgttagccaaggtggtctcgatctcctgacctcgtgatccgcccgtctcggcctcccaaagtgctaggattacaggcgtgagccaccgcgcccggcctccataaacagcatttctaaatgcaccactttcccatccaagaccatagtaactgtaaaaaaaaaaaattacttctcagaatgttgtcgttttctctgtttagatttcacacataagtaaaggttatgatccatctacctgtgttgatagttgttcataggtattttgtgcagttttctatgctatgtgaatagagtattttcttcaattacagcatctaaataactactaatatgtagaaa

SEQ ID NO: 57772 - DNA, 981 bp, Homo sapiens
tgtgataaatccatcctaatctgacccatctgcatgatttaaatgagtagatacttagggcacctgcccttgcacaaaagtgaactcatgcttctcggaactctgcatgaccaaaacaaaagataacgtcagaagaactgtatggatccctctgccgtgtggttatggtagcctgtgatttatatacaccctgctttagcatttgcgggcctgttagtcttcaaaaagctcatatcaagtcggctctgactttttgcaractaatctatgtgaaaatgcagtgctcacctaactgatttattttcacatttagaagtaataaaattaatagtgcagttctcatctcagttgataaaattaactctttttttctaactaacttctttcagttatcttctttatttctaaaggaaagttattccagtcatttgatacaaatggctttaattagtttaaggcaaacataacctttaacaaatccaggcttgggattgctggttgtgcgctaaaggataaaaacagtgcagtgcttatggcattgatttgtaacgtcaggctgcacaatccaatttgggttggcatcaaagcaaaccacccatcacttgaaagaataattcctctgccaaggccagccccgaatacacacaaaatgcatttttatgacaagggcaggtacatttttcaaacgacggggagggggagactcaccataactatgttctatttggcactacccaccataggggcttctctgacttaaagcatagcagacattttctaaggaacttgcatttttaatgactatttctttgtttttgcttttaaataaattaaaacttttaaaataatcaatcctatacttacaatgaagcaactgatacaaagagaccctttgttggggaaatactcaactgaaggttcttgtctgagatttaccttttcccatttctattgagctacctatcaaatgggccagccttt

SEQ ID NO: 57773 - DNA, 981 bp, Homo sapiens
tgtgataaatccatcctaatctgacccatctgcatgatttaaatgagtagatacttagggcacctgcccttgcacaaaagtgaactcatgcttctcggaactctgcatgaccaaaacaaaagataacgtcagaagaactgtatggatccctctgccgtgtggttatggtagcctgtgatttatatacaccctgctttagcatttgcgggcctgttagtcttcaaaaagctcatatcaagtcggctctgactttttgcagactaatctatgtgaaaatgcagtgctcacctaactgatttattttcacatttagaagtaataaaattaatagtgcagttctcatctcagttgataaaattaactctttttttctaactaacttctttcagttatyttctttatttctaaaggaaagttattccagtcatttgatacaaatggctttaattagtttaaggcaaacataacctttaacaaatccaggcttgggattgctggttgtgcgctaaaggataaaaacagtgcagtgcttatggcattgatttgtaacgtcaggctgcacaatccaatttgggttggcatcaaagcaaaccacccatcacttgaaagaataattcctctgccaaggccagccccgaatacacacaaaatgcatttttatgacaagggcaggtacatttttcaaacgacggggagggggagactcaccataactatgttctatttggcactacccaccataggggcttctctgacttaaagcatagcagacattttctaaggaacttgcatttttaatgactatttctttgtttttgcttttaaataaattaaaacttttaaaataatcaatcctatacttacaatgaagcaactgatacaaagagaccctttgttggggaaatactcaactgaaggttcttgtctgagatttaccttttcccatttctattgagctacctatcaaatgggccagccttt

SEQ ID NO: 57774 - DNA, 981 bp, Homo sapiens
tgtgataaatccatcctaatctgacccatctgcatgatttaaatgagtagatacttagggcacctgcccttgcacaaaagtgaactcatgcttctcggaactctgcatgaccaaaacaaaagataacgtcagaagaactgtatggatccctctgccgtgtggttatggtagcctgtgatttatatacaccctgctttagcatttgcgggcctgttagtcttcaaaaagctcatatcaagtcggctctgactttttgcagactaatctatgtgaaaatgcagtgctcacctaactgatttattttcacatttagaagtaataaaattaatagtgcagttctcatctcagttgataaaattaactctttttttctaactaacttctttcagttatcttctttatttctaaaggaaagttattccagtcatttgatacaaatggctttaattagtttaaggcaaacataacctttaacaaatccaggcttgggattgctggttgtgcgctaaaggataaaaacagtgcagtgcttatggcattgatttgtaaygtcaggctgcacaatccaatttgggttggcatcaaagcaaaccacccatcacttgaaagaataattcctctgccaaggccagccccgaatacacacaaaatgcatttttatgacaagggcaggtacatttttcaaacgacggggagggggagactcaccataactatgttctatttggcactacccaccataggggcttctctgacttaaagcatagcagacattttctaaggaacttgcatttttaatgactatttctttgtttttgcttttaaataaattaaaacttttaaaataatcaatcctatacttacaatgaagcaactgatacaaagagaccctttgttggggaaatactcaactgaaggttcttgtctgagatttaccttttcccatttctattgagctacctatcaaatgggccagccttt

SEQ ID NO: 57775 - DNA, 751 bp, Homo sapiens
agtggtaatatcaaaaaactgcaagtggaaccatcgtaagtcggggaccatctktccttttagaaaaacgaaaattacgcaccttttgtttcatttatttctatgaatttatcctaagaaaataatctaaaacatggaaaagatgttcataattttaatggaaaaacaaaaatggttatcttgtactgtgaactgaagaatcataaggttcataaatttggaaaggagagctttatttctcataaaaggtaacagcctgcaggctggccatccagcaagcacttggagggaggagtaaagagaacagaaatgtatgccaagagggatggtcaaatataagtatttaacagattataggaggagtcctgaatatttatgaaaggagaaacatgcacatgcgcaactaagcttcatgcctgtattgggactttttgtgttataaagaaatatctgaggctggataatttataaagaagagaggtttaatttgctcatggttctgcaggctgtacatggatggcagcaacagggctggacttctggtgaggcccaggaagcttacaatcacagcagaaggtgaagagggaagccagtacatcacatggccagagaaggagcaagagaaagataggggaaggtcctaaactcttttaaacaaccatatcctgcctgaactgagcgagaacccactcgtcaccaaggggatggtgctgagccattcatgagggatctaccctcatgacccaaacac

SEQ ID NO: 57776 - DNA, 1674 bp, Homo sapiens
taagtgtgagaaagtcagatataacacctgagccattctgctctctgaaggtgcaaaggtgcatatatatagtggattaacacaatgagttattcatatgagaaaaaactcaaactatctgactgttgaaaagatggcaaaagattctgacttttccttctacatcgaagaaaagcctatttttcctgaaaacaattcatatttatgttatatatacataacataaatatatatacatgtcatatatatattctgagtttttaattatttggtttaatttagttcttaaatattgcactgagtaatgaaataaacagctagctgcttttggatcttgccaacaaattcatttaaaactgaacacaagaaaaaatactgcaactttttcaggaatctggtttgccaaggaacaaaaattctagctcttcacccataagcccgaaaatcataactaaaagatatagctggtcactgagctcttgtaacacgcaccaagaacagcttgaaattccagaggaattctgggaattgaaggttggagtggggaagattccagacacagcgagtaaaaatattcaaggactgttcagacctgaaaaacaccatccatggtattgagcaattacctcccaaaggccatgtcacatgtgttttctgagagcaaaccatggtgactagataattcccagagcatcaagatatattcttatgtacagttaattgcacaaactaccagatccttctagccattactgaaacacatttttaaaattacgcttaaaagcttacctaaaccacactacttataaagatcaaattattcctccagccttttgacacctgtattggcttatatgaggacacatagagaatgggaatgtcagtatactataacgactttgtataatttgtatatggtagtataaggactaagttaaatagtcagattttaaattgtagccaaaagctaagtaggtccatactatccagggtctctttgggattcattttaataaaaatcatcaggaccaagaggatccatagccattttgtcaacagcattattaattcagagatagktttatagtatagtatttctatttaaaaacaacattttcatgtttctttcctccacctcttcatgctccctcatttcagtctccttgatctaatattaagatataagaagcatccagaaataaatgataattgaaatggtaacagaatatttaatatgaagttgaagtccaaatttaacagcctgtaggaaaggacatttggaatgatcttggtaagatacaatatacattcagaattagaaggaacaaaatggttttatggtcgtatcttaagctttattggatgtgtttaatgaatcagaggattagaaggaaacttaagaaatcattttgaccatcttactgtctctaagcagacaggacttcaaccagtacaaagaaatgtataatgccactgaaatgagagtctactgccaaccctactgttttaggaacaaagcaatgttctattcagaagtacagcagatatcagcaagcaaaaccacttatgtcaatatcagcctatatcataaaccatcagttgttctcagggccaaaataactgatcaagtcctggatatgagatcatcttctgtcacctttaaattgactgtat

SEQ ID NO: 57777 - DNA, 1674 bp, Homo sapiens
taagtgtgagaaagtcagatataacacctgagccattctgctctctgaaggtgcaaaggtgcatatatatagtggattaacacaatgagttattcatatgagaaaaaactcaaactatctgactgttgaaaagatggcaaaagattctgacttttccttctacatcgaagaaaagcctatttttcctgaaaacaattcatatttatgttatatatacataacataaatatatatacatgtcatatatatattctgagtttttaattatttggtttaatttagttcttaaatattgcactgagtaatgaaataaacagctagctgcttttggatcttgccaacaaattcatttaaaactgaacacaagaaaaaatactgcaactttttcaggaatctggtttgccaaggaacaaaaattctagctcttcacccataagcccgaaaatcataactaaaagatatagctggtcactgagctcttgtaacacgcaccaagaacagcttgaaattccagaggaattctgggaattgaaggttggagtggggaagattccagacacagcgagtaaaaatattcaaggactgttcagacctgaaaaacaccatccatggtattgagcaattacctcccaaaggccatgtcacatgtgttttctgagagcaaaccatggtgactagataattcccagagcatcaagatatattcttatgtacagttaattgcacaaactaccagatccttctagccattactgaaacacatttttaaaattacgcttaaaagcttacctaaaccacactacttataaagatcaaattattcctccagccttttgacacctgtattggcttatatgaggacacatagagaatgggaatgtcagtatactataacgactttgtataatttgtatatggtagtataaggactaagttaaatagtcagattttaaattgtagccaaaagctaagtaggtccatactatccagggtctctttgggattcattttaataaaaatcatcaggaccaagaggatccatagccattttgtcaacagcattattaattcagagataggtttatagtatagtatttctatttaaaaacaacattttcatgtttctttcctccacctcttcatgctccctcatttcagtctccttgatctaatattaagatataagaagcatccagaaataaatgataattgaaatggtaacaraatatttaatatgaagttgaagtccaaatttaacagcctgtaggaaaggacatttggaatgatcttggtaagatacaatatacattcagaattagaaggaacaaaatggttttatggtcgtatcttaagctttattggatgtgtttaatgaatcagaggattagaaggaaacttaagaaatcattttgaccatcttactgtctctaagcagacaggacttcaaccagtacaaagaaatgtataatgccactgaaatgagagtctactgccaaccctactgttttaggaacaaagcaatgttctattcagaagtacagcagatatcagcaagcaaaaccacttatgtcaatatcagcctatatcataaaccatcagttgttctcagggccaaaataactgatcaagtcctggatatgagatcatcttctgtcacctttaaattgactgtat

SEQ ID NO: 57778 - DNA, 526 bp, Homo sapiens
tcagagtaagattttcagtacttcagttttctgccagatgtagaagtgtgcatgatacagttaatcaggaagagtctcggaaacccatttaaagcttattaacattgatatttattcagttttaaatacccagtgtcggatttattctgttaatttcaagaaacaattggtaggaatcaccctttgctcttcttaaatgattagataagtattttttccatatcattagacattgcaaaggtttaagagttcttgaaccgtggaatcttatgtagaagttataacgactctttataaaagctgaagatcmacctgcaactttcgatatttctctactttataatctactttctctttagtggcctgcacactgactaaatagccattgcaaactcttaatttcccttttgctgaattaccctgctctctgatcagaggccatactatctgtgaaattttgcttcagaaaagcctgcactgcaaaaccaaacagtacagagatgtataaaagatctcctcaacctta

SEQ ID NO: 57779 - DNA, 719 bp, Homo sapiens
taatacctaggtgatgggcagataggtgcagcaaaccaccatggcacacgtttactatgtaacaaacctgcacatgtatcctggaacttaaaataacataaaattgaaaaaagaaacagtgaaagaaagaagaatttcaaaaatatcactaaggcaacgaatgtaatttatcttctcaatttcaaatattgaaattaacactttagctagaaatgtcattaaatttataaagggtaaagaaagcaaaatctttaatatatttattaaattaatgcaaggctgaatcaagtaaaagtatttgccttcaactatrctttccgttgataaacatttattatgccatatccttggtgaagctcttagtcttttatatacatagcataacaattaattgataaattaaaatttgtggaagataaagacaaaaataatgcaatgatatcaaattccaagtaagcattttttattttttggcataaaattaaacttttgattacaaatagtgattatatattatgaacattagtgatttttaagcataattaattgatgttttatgtaattatttgtacagttgactaaaaattttataaaaatgataattattttctagatttctaattgttatatcctctaaatatgatctgttcaccttcaacatataacatagaactttctccttgaaataaaagagtcgattgattgatttattaaagaca

SEQ ID NO: 57780 - DNA, 713 bp, Homo sapiens
cagaatccagtgtctaagtccaagttaagggacatgatgatgtctaaataaaaccccaaatcctaactaaggacacaattcctaccactgtacacctcttctcccgtggaaaagagctacctttctagaggaaacagtatggggtccttcaatcccaaagtggcagccttttcctcctgagtagtaaaagaagcattctgagaaggtgattgtgccatccaaaccttggaaagcaaatgggaaaagggaaaaagaaaactagattttccccccagagcaaagctcacagcagagcacattcctcacccttttcctttcaactggacaaaaccagcttgctcctgtgcacaagcctaattcctgaacatgaactacaatgaaactaaccaggggggaaagagaccaaatgagaaaagggggaatccattaagaaacgcttgaaggctgggggcagtggctcacgcctgttaatcccagcactttgggaggccgaggcagaaggattgtttgagcccaggagttcgagcctgaccaacatagtgagacctcgtctctacaaaaaaaaagtcaaagaatgagacaggaggattgcttgagccygggaggtggaggctgcagtgagcagtgattgcaccaatgcactcccacctgggtgacagagtgagaccctgcctaaagaaaaagaaacacttggagacaagatggcatcttcc

SEQ ID NO: 57781 - DNA, 584 bp, Homo sapiens
accccacccccccmcacacacacatccctacacagatacacacacctacatacacatacacactgttcctaccattaaattttgcaatctgtggcacattatagaatggacataggtgaaagcatgtggtcatgagaaataaagcaaagagaaacaaagtttattgcttctcatgtaagcacaaaccaacttaatgtcatgagagaaagagagagaagaaaaaggagaaagaagggaaattgactggggggagaaggaaagattggaagccctggtccctggatgagggaccttgttgagataatctccatcctcactccctccttcttgccctcgtagggcagaattctaatatgacattctagaaaattaaaatctatccaattaaaaaaatatctgcagggaaagagatttcaaaacctccctcagtaactaaaatgattaactgcacgctaagagaatacatttctccaaatcgttaaggctttcttgctgcagtttaaaatggtcttctttccattgtagaaggctcagttcattgccatcctttgtctgaaacagggatattaagttgaccgctagat

SEQ ID NO: 57782 - DNA, 584 bp, Homo sapiens
accccacccccccacacacacacatccctacacagatacacacacctacatacacatacacactgttcctaccattaaattttgcaatctgtggcacattatagaatggacataggtgaaagcatgtggtcatgagaaataaagcaaagagaaacaaagtttattgcttctcatgtaagcacaaaccaacttaatgtcatgagagaaagagagagaagaaaaaggagaaagaagggaaattgactggggggagaaggaaagattggaagccctggtccctggatgagggaccttgttgagataatctccatcctcactccctccttcttgccctcgtagggcagaattctaayatgacattctagaaaattaaaatctatccaattaaaaaaatatctgcagggaaagagatttcaaaacctccctcagtaactaaaatgattaactgcacgctaagagaatacatttctccaaatcgttaaggctttcttgctgcagtttaaaatggtcttctttccattgtagaaggctcagttcattgccatcctttgtctgaaacagggatattaagttgaccgctagat

SEQ ID NO: 57783 - DNA, 584 bp, Homo sapiens
accccacccccccacacacacacatccctacacagatacacacacctacatacacatacacactgttcctaccattaaattttgcaatctgtggcacattatagaatggacataggtgaaagcatgtggtcatgagaaataaagcaaagagaaacaaagtttattgcttctcatgtaagcacaaaccaacttaatgtcatgagagaaagagagagaagaaaaaggagaaagaagggaaattgactggggggagaaggaaagattggaagccctggtccctggatgagggaccttgttgagataatctccatcctcactccctccttcttgccctcgtagggcagaattctaatatgacattctagaaaattaaaatctatccaattaaaaaaatatctgcagggaaagagatttcaaaacctccctcagtaactaaaatgattaactgcacrctaagagaatacatttctccaaatcgttaaggctttcttgctgcagtttaaaatggtcttctttccattgtagaaggctcagttcattgccatcctttgtctgaaacagggatattaagttgaccgctagat

SEQ ID NO: 57784 - DNA, 880 bp, Homo sapiens
ccctcaaccctgaagggggaaggcaagtgatcttactggaacccagtgcaaaccaaacagaatccttgaaagaggaaccttctgagaaaagccgaggatacaaagcaacctagaggaatctaggagaatgcaaccattgcccaaacctttggcctagcggagggcaggaaggtcagggaataagtactccagcttctctctcttccttctccttcatcttctactaatgcttctgattggccaaacccaagtaaagtcaaggaggttgagagtgaagcagtccatggacgtctgcctcccaagmctcagagtggggaagagatgatggagagtaggtctggagaggcaaacagagtattagcacaggaaattaatcaatacttggtgactggaatttttctttcttccccgcttctttataccaactttatacatcaagatttaccatagagccatagattttcctccttctgttttttttgtttgtttgagacagggtctcattctgtcactcgggctggagtgctgtggcacaaacatggctcactgcagcctcaacctcctgggctcaagtgatcttcccacctcagcctcccgagtagctgggactacaggtgccacacacttcgctatttttaaaattttctgtaaaaacagggcctccctatgttgtccaggctggtcttaaacttctaggctcaactgatctgccctcctcagcttcccaaagttctgggattacagatgtgagccactgcccccgccccttctgttctttataatggaaatggctattactttagtgtttgtctttaagaaacacaatttctcatgaagtaatatgtatgtgtatacacacacataaaattaaaaaggcata

SEQ ID NO: 57785 - DNA, 543 bp, Homo sapiens
tcaggagatcgagaccatcctgactaacacggtgaaaccccatctctactaaaaatacaaaaacaaaattagccgggcgtggtggcgggcacctgtagtcccagctactcaggggctgaggcaggagaatggcgtgaacccgggaggyagagcttgcagtgagccgagatcgcgccattgcactccagcctttgagacagagcgactccatctcaaaaaaagaaaaaaaagccacttgatttcaatttataactaaattgaatttataactaaagattttcaatttataactaaagattcattgttctgaacatcttggagaattatctgtaaaacataattctgaaatatatcctccatctacatagaaagaaagagattatgcatgtaagtttaataccttcgaattaaaatattaaaaatgggagaaaaggtcaatttttatgcttttacatgagcctaagtgttggataagaaggaaagaattagaacaaacaatgtatgtgaaataaagcatgtaaataatcattcttcattcttcat

SEQ ID NO: 57786 - DNA, 543 bp, Homo sapiens
tcaggagatcgagaccatcctgactaacacggtgaaaccccatctctactaaaaatacaaaaacaaaattagccgggcgtggtggcgggcacctgtagtcccagctactcaggggctgaggcaggagaatggcgtgaacccgggaggcagagcttgcagtgagccgagatcgcgccattgcactccagcctttgagacagagcgactccatctcaaaaaaagaaaaaaaagccacttgatttcaatttataactaaattgaatttataactaaagattttcartttataactaaagattcattgttctgaacatcttggagaattatctgtaaaacataattctgaaatatatcctccatctacatagaaagaaagagattatgcatgtaagtttaataccttcgaattaaaatattaaaaatgggagaaaaggtcaatttttatgcttttacatgagcctaagtgttggataagaaggaaagaattagaacaaacaatgtatgtgaaataaagcatgtaaataatcattcttcattcttcat

SEQ ID NO: 57787 - DNA, 543 bp, Homo sapiens
tcaggagatcgagaccatcctgactaacacggtgaaaccccatctctactaaaaatacaaaaacaaaattagccgggcgtggtggcgggcacctgtagtcccagctactcaggggctgaggcaggagaatggcgtgaacccgggaggcagagcttgcagtgagccgagatcgcgccattgcactccagcctttgagacagagcgactccatctcaaaaaaagaaaaaaaagccacttgatttcaatttataactaaattgaatttataactaaagattttcaatttataactaaagattcattgttctgaacatcttggagaattatctgtaaaacataattctgaaatatatcctccatctacatagaaagaaagagattatgcatgtaastttaataccttcgaattaaaatattaaaaatgggagaaaaggtcaatttttatgcttttacatgagcctaagtgttggataagaaggaaagaattagaacaaacaatgtatgtgaaataaagcatgtaaataatcattcttcattcttcat

SEQ ID NO: 57788 - DNA, 1407 bp, Homo sapiens
aacattgttgaatatttctttagggcaaggtgatttgatttttcataactattctcatttaattaataccagggaggcacagttatattccttttataggcaaagaaactgagatcgctaagttatttttgtttgtttgtttttgttttttaagagatggggtcttgctctgtcatccaagctggagtgcagtggcacaatcatagttcactgcagcctggaactcctgggctcaaaccatcctcccgcttcagtctcccaagtagctggcactacaggtgcatgccattatgtctggcttgagattgatagtttttaaataatgctcaaaattatagatctggatttaaaactaaatcctaatcctatattcacttgactccgggactctggcttccccccactgcagcccaagaagtaacctgcccaaagtaaataatagcaacaaataaatttaaaaatgttacttagcaagtggcataaaacaataaaacagagctgagtaaggtgtttgtgtttagtatatccaggtgtcccctattaaggctcatccctcacctctagccaagaaatcaaattgtgatattcaattaactgagaattaggccgctcctttcaggaacctgccaatacacataataaacacaaacgggctctgctgagtagaacaatgtgaactcaagagtgaacagctgtgaaggcaagccttggctctgcctctgaccagccatgcacatctgggcaagtcacttcccctagattccatttccccatctgcaaagtgggcactgcaagacctacgtcaccggtttgctgggagaatagcataagtttcccagacctccaacctggggatattaaacagggctataccagcagcattacctgtatgtccctaactcttcccggagaaaccacagaatagccagcacctcctccaggcacacccacaccacagtacacacagaaacacagtagggtgtttcagcattcttccttacaaattcgccagccaccaagcaccacctccattctctgcttctcttgtgctaggactttaggatgaaattcactgtagktcccccacaccctgtaatagaatccataaatgagccctcctgatatgtccagagctgctgctgggctgcctcctgccactgctgccctgtcctgctgggccttcccacctcctagggcatctccatgggacacgggaatccactaaagctcatgcttgtgccaagatggtgctgtgggaccccaccccatgccctgatccctgcagaagggagaggaaatgccctccttctccacaccaggttacacatgggtgcacggtcccctgtgtcttgcaaagtgtttgtgaacacacattctcagtttctcctcatgaccctcccattccca

SEQ ID NO: 57789 - DNA, 1407 bp, Homo sapiens
aacattgttgaatatttctttagggcaaggtgatttgatttttcataactattctcatttaattaataccagggaggcacagttatattccttttataggcaaagaaactgagatcgctaagttatttttgtttgtttgtttttgttttttaagagatggggtcttgctctgtcatccaagctggagtgcagtggcacaatcatagttcactgcagcctggaactcctgggctcaaaccatcctcccgcttcagtctcccaagtagctggcactacaggtgcatgccattatgtctggcttgagattgatagtttttaaataatgctcaaaattatagatctggatttaaaactaaatcctaatcctatattcacttgactccgggactctggcttccccccactgcagcccaagaagtaacctgcccaaagtaaataatagcaacaaataaatttaaaaatgttacttagcaagtggcataaaacaataaaacagagctgagtaaggtgtttgtgtttagtatatccaggtgtcccctattaaggctcatccctcacctctagccaagaaatcaaattgtgatattcaattaactgagaattaggccgctcctttcaggaacctgccaatacacataataaacacaaacgggctctgctgagtagaacaatgtgaactcaagagtgaacagctgtgaaggcaagccttggctctgcctctgaccagccatgcacatctgggcaagtcacttcccctagattccatttccccatctgcaaagtgggcactgcaagacctacgtcaccggtttgctgggagaatagcataagtttcccagacctccaacctggggatattaaacagggctataccagcagcattacctgtatgtccctaactcttcccggagaaaccacagaatagccagcacctcctccaggcacacccacaccacagtacacacagaaacacagtagggtgtttcagcattcttccttacaaattcgccagccaccaagcaccacctccattctctgcttctcttgtgctaggactttaggatgaaattcactgtagttcccccacaccctgtaatagaatccataaatgagccctcctgatatgtccagagctgctgctgggctgcctcctgccactgctgccctgtcctgctgggccttcccacctcctagggcatctccatgggacacgggaatccactaaagctcatgcttgtgccaagatggtgctgtgggaccccaccccatgccctgatccctgcagaagggagaggaaatgccctccttctccacaccaggttacacatgggtgcacrgtcccctgtgtcttgcaaagtgtttgtgaacacacattctcagtttctcctcatgaccctcccattccca

SEQ ID NO: 57790 - DNA, 1389 bp, Homo sapiens
gtctttgtagatattttttcatgagcaatttaaaggtacttgcattcattatgcccctcaactcaatacctcagtatatatttttaatgaggatgttttcttacatagctaaaataaagtttacaaattcaggaaatttatcacagatatacaattttaaataatctacatttaatattttaatattgtcaattatcctttatagcatattttcccccaccacaggattcagtctgcaatgccatatcccatttatcttttgtctttggtcttctttaatctagaatagtttcttgtcataagattgacaatttgaacaatacagataagatatttcatatcttctcagggtatcctgatccaaagatgcatgatatccatctgcccttggccaattttgagcaatttataatgagaactctgactcccaaaaatattaacacttgtaatcatttgctctaatctacattaaaatagtttcagaattgctataaacacgtcatgcaaaacataaacctactactgagagcgcaagatttgattaaaggttttattctgaagaatacagtcttgtaatcaaactaccatctttgagttatttgcaattgatgtttctcctttactgagattatgaagtagagttgcattcatttatttctatttgcattcatttttattttttcttaaaattgtcaatttaatgtacttttggaatatatggaatattaacatatttcccaaactcaaaactcgatgacatacctagaaaattaactctactctggcccttcaacaccattgatcctacatcttttaataatcaattgycttgttttctggtttatccttccagtgttttgttaaaattggaatatatcgtatattttataatttctctctctttctttacaaaggtagcatactatatgtagtctttgacactttgcctattttaattaacagtatctctcagaaaacactatgaagtcattcatagagatcattcttattctcttatccaactgcgtatttttctttttgtgtaagtgccattttttagctactcttctatatttggacatttaggtaatttccagtattttgcaatacaagcaatgcttttaataatctgttcatatgtacttttgtattgttaaaggtatgtttttagggtgcatttctagaaatcggagtgctggatcaaaggataaatacatattttttcttttttacatattgccaaatccccctccataagcgttgttcacttagcttttccaccagtaaagtataagagtacccacttcactagagacttgctaacaatttattgtcaagcttttgaaatcttgcctatctgtgcagttgtgcattggtattgttataatg

SEQ ID NO: 57791 - DNA, 1389 bp, Homo sapiens
gtctttgtagatattttttcatgagcaatttaaaggtacttgcattcattatgcccctcaactcaatacctcagtatatatttttaatgaggatgttttcttacatagctaaaataaagtttacaaattcaggaaatttatcacagatatacaattttaaataatctacatttaatattttaatattgtcaattatcctttatagcatattttcccccaccacaggattcagtctgcaatgccatatcccatttatcttttgtctttggtcttctttaatctagaatagtttcttgtcataagattgacaatttgaacaatacagataagatatttcatatcttctcagggtatcctgatccaaagatgcatgatatccatctgcccttggccaattttgagcaatttataatgagaactctgactcccaaaaatattaacacttgtaatcatttgctctaatctacattaaaatagtttcagaattgctataaacacgtcatgcaaaacataaacctactactgagagcgcaagatttgattaaaggttttattctgaagaatacagtcttgtaatcaaactaccatctttgagttatttgcaattgatgtttctcctttactgagattatgaagtagagttgcattcatttatttctatttgcattcatttttattttttcttaaaattgtcaatttaatgtacttttggaatatatggaatattaacatatttcccaaactcaaaactcgatgacatacctagaaaattaactctactctggcccttcaacaccattgatcctacatcttttaataatcaattgtcttgttttctggtttatccttccagtgttttgttaaaattggaatatatcgtatattttataatttctctctctttctttacaaaggtagcatactatatgtagtctttgacactttgcctattttaattaacagtatctctcagaaaacactatgaagtcattcatagagatcattcttattctcttatccaactgcgtatttttctttttgtgtaagtgccattttttagctactcttctatatttggacatttaggtaatttccagtattttgcaatacaagcaatgcttttaataatctgtkcatatgtacttttgtattgttaaaggtatgtttttagggtgcatttctagaaatcggagtgctggatcaaaggataaatacatattttttcttttttacatattgccaaatccccctccataagcgttgttcacttagcttttccaccagtaaagtataagagtacccacttcactagagacttgctaacaatttattgtcaagcttttgaaatcttgcctatctgtgcagttgtgcattggtattgttataatg

SEQ ID NO: 57792 - DNA, 1389 bp, Homo sapiens
gtctttgtagatattttttcatgagcaatttaaaggtacttgcattcattatgcccctcaactcaatacctcagtatatatttttaatgaggatgttttcttacatagctaaaataaagtttacaaattcaggaaatttatcacagatatacaattttaaataatctacatttaatattttaatattgtcaattatcctttatagcatattttcccccaccacaggattcagtctgcaatgccatatcccatttatcttttgtctttggtcttctttaatctagaatagtttcttgtcataagattgacaatttgaacaatacagataagatatttcatatcttctcagggtatcctgatccaaagatgcatgatatccatctgcccttggccaattttgagcaatttataatgagaactctgactcccaaaaatattaacacttgtaatcatttgctctaatctacattaaaatagtttcagaattgctataaacacgtcatgcaaaacataaacctactactgagagcgcaagatttgattaaaggttttattctgaagaatacagtcttgtaatcaaactaccatctttgagttatttgcaattgatgtttctcctttactgagattatgaagtagagttgcattcatttatttctatttgcattcatttttattttttcttaaaattgtcaatttaatgtacttttggaatatatggaatattaacatatttcccaaactcaaaactcgatgacatacctagaaaattaactctactctggcccttcaacaccattgatcctacatcttttaataatcaattgtcttgttttctggtttatccttccagtgttttgttaaaattggaatatatcgtatattttataatttctctctctttctttacaaaggtagcatactatatgtagtctttgacactttgcctattttaattaacagtatctctcagaaaacactatgaagtcattcatagagatcattcttattctcttatccaactgcgtatttttctttttgtgtaagtgccattttttagctactcttctatatttggacatttaggtaatttccagtattttgcaatacaagcaatgcttttaataatctgttcatatgtacttttgtattgttaaaggtatgtttttagggtgcatttctagaaatcggagtgctggatcaaaggataaatacatattttttcttttttacatattgccaaatccccctccataagcgttgttcacttagcttttccaycagtaaagtataagagtacccacttcactagagacttgctaacaatttattgtcaagcttttgaaatcttgcctatctgtgcagttgtgcattggtattgttataatg

SEQ ID NO: 57793 - DNA, 498 bp, Homo sapiens
aatggattctgcacattttacaataggaaatgacatgctgtttggtttctgtgataacaggacaggatatcataaactggacgtaaaagttcagaatgcctgtggaaataaggataggttaaactcgctcaagtattaagaatgtggcagattgtattttctaaagatggtcatgacaatatctatcatctcccacccatgttttggcactgggacctcgccatgtcccagcagtaggcagaatcttgttccttcccttggagttggtgcgggtcctgtcaytgctttgtctgatagacatgatggaagtaatattgccccagttctcagtgaggcattaactagcttggcagggttcacttcctgtcttttggaagacaggtagaggagaagggtgacttccctgagacttccatgctgtgtgaagcccaaatcccatggagaggccatggagagggagaatggcagcagaatgagtgaagaaatcatcctggatgt

SEQ ID NO: 57794 - DNA, 1234 bp, Homo sapiens
tatcacttattcgaccccaactggtggggagaagagagtcggtatgattagtccatatacccactatgactgtgccaaacttttggagatgttccaacccgtagcattctttagattgttttcttttcttcacaaatgtgaagaccttccattgctaagaaaagtaaatatgtcagtctgctctgtgctcaccaccctcactatgtaatataaaattttcaaagtaaaattactgatttatttctgcttcttactcaccagaagaatgattacaccagtgtcatatagatggccagcagggtgttagaattctgtctcagaatgttaacattctttttctgcctacttccccaatattactttccagtttttgaaagctcctggctttgtgaactcacagtagcaaaccatgaatgatagatgagaagaaaaattctatcctttctaactaataaactggaggatttcagacaatgctcccaatttctcagacaaaaggagattccgattatttgcaggaatataataacataaaaaacaacaacaacacttgtatggaaaacaaaattattttcatggggcagaggaaggaaataaaaataaaagagragaattagaaagagaggtaagtaatttatgttgcaaaaggtataatttttttcctttcatgtttcaatgcttttgtctacaacaaggcaatctgaaaataaaaattgtttacatagacgcccctcacctgtcctactcaaatctatcttctttgcctactgcatggtattttaaaaattgggtctactttattttccattgtgttcattttaattcaaccaacgtcatgatggaattgtgactatttcttaatcaaagcaaacagcacacaactcaatccatccggactttcaccaaccatgctggctccatgagactgttcagctctggccacactgagccgcccacctccctgtggctttgatcctgggcttgatcctgaggcagccagggcaggagcccaaaaggaccagactgctggaaaccactgattccctctcttccccacagagacacatttcagagttttcattcctgttttgccatttagcagctttctaatcataggcaagttacttaaactccatgagtctatttttttctaatcaataagttgaagacagcaatgtcagctaaagtctcctattaaaaactagctgtaacatatgcaaagcatatagtgtct

SEQ ID NO: 57795 - DNA, 1356 bp, Homo sapiens
tctccccattgttgcccaaataatctttcaaaaaatatcatcaattttctgctcattattctttgtaggctctgtctgcttctggcataaagtttagacacccaagcctggcatccacactatcatctatatttgtactgaaacctctcagctaggttccggtttccttgtgcagcccatagtctggggtcaaatgatttgcctgtctccaaaggagccactcacacccatgggtcagcccagcactcagctgcatcctgtgctggcttctccttctgagactgtttattctttcttcaagcctcagctgcaatataatccactctcggaaaactttccaaattgctctccacccagaggttagtcacttccttctctttgtcctgtggaacctcacagatacatatttcaaagcatttctgtcccgatgccatagaattgttcataagtcagtggcctggaaagaccacaaactcttccaggcctggcactttttcatatttatttggtgtcatcctttggacaaaatgggaaacataggaaagaattaataacgaataacaaattgtggagggaggagagggagaaggaagtatttactcaaagtctcgtagcttgggggaaacagtgggaggtaagacaagacactgagataaggaatgagatgcaaagaaggcgttgggaatggaaaaacagtaagtttatttgtaacatgtggtataccaagggcctgtggggcactgggtggggttgtcaagtggacagtagggtatgcttctgaatgttcctcaatgtttgaggcaaaggagaaaggtcaggtttggaagtgaaagtttttaaaagtcagcagcctttgtaggtagctacagccatggatatcatgaaagtctgaaaaactgcggagagctataaaaccctgtataatcaaagattttaaaagtagacatcaacagaatgagaagacatgccccagactgggagaaaacatttgcaaaagacatatccgataaaagactgttatccaaaatatacaaagaactcctaaaactcagcaatgagaaaatgaacaatctgatttttaaaataggcaaaaggcctcaaaagacacttcacaaaagaaggtgtacagaaggcaaataagcgtatgcaaagtgcttcatatcatgtgacattagggaactgcagattaaagcagcaatgagataccacaacacacctattaggacaccaagggacaaaacactgacagcaacaagaggaaagatgtggagcagcaggagctcacagctgctgctggtgggaatgcaaaayggtgcagccactttggaagacagttcaatagtttcttacaaaact

SEQ ID NO: 57796 - DNA, 872 bp, Homo sapiens
aggattcttccagctcacctttctgccatctttagtatatggttctcatcatcatcatctaagatgtgaactagagccacattcatagcagtgggattagaaaaataaacaattgtcatcaaggagtccagctctaggcaacaaccataagcatttgcaaggcttggtcccaaccataagcatttgcaagactttacctgggaggcctcataggagaargctgccctcctcacatcagacttggtgcacagcaagtacattccagttctctggaaggagttgcagtcagattcagctgctcccccaaccctgcctggacaagccatattcatatgctcagaagctcatatgctcatattcctggcctaggtgcctccattgagaggcctctttattggggtcctcagatgttgtcccaagacctccttttcagctggtttggctgaggcaattttgcccgcaatgactcagtatttctcaactcccagttctaccccctttccttcctctggtctcctaggttcataaaatgcagaagccatttattagtggctcttctcagtgagacaattcttcccatgtgtactgcatgtcatctgccctctcttgctgccattccacagagaaaaatggaatgctagggaactggggccctttgcttatacttgcctgcactgcagcagtaagtgaatggagctttgactattattttcagtatgacttgaacatcttgaccggcagcttgacagttatttgcctgaagtttcttcaggaggtttcccaaaactgccttgcaactatttttcttaattccattggtgagaacttggttacatagccatagccagccagttaccagggagactggaaaa

SEQ ID NO: 57797 - DNA, 644 bp, Homo sapiens
tctgtcaaagtcttagaaagtttcaatcgaggtttttttgggctttgttctcatctagaggctcaactggggaataattctcttccaagcacactcaagttgttggcagaattcattttcttgcagctttatgattgagggtagcttgttgctgtttatctactggaggctgccccagcaactagaggtgcctgaagttcactgatacatgagtttcyccagcatggcttctcctttcaccaggccagcaagagtctcagataagtctggtgtcatgccagagtcttaaataacgtaaaataatgtagtcatgggaataacagcatgtcatctttgccatatgctattgtttagaaataagtcacatgttccaccacacttaagggaacaggattgcaaaaaggcatgaaccacaggaggtggggttcatggggctactttcattgagtctgtccacaacacctactgagcttcaggagttattaatgtatacccagggcctaacaaaatgccaaacatattgacaagtatttgccaaattcatcaatttaaaatgtatcctcaatgtactattcactaagacagagataacaaatgattttttaaagttaaatataaaaaagcgttaaagaactgacaagtgt

SEQ ID NO: 57798 - DNA, 893 bp, Homo sapiens
tgcatactgaggtgttttttttaaactatcatccaaccttgtgatcaaaaaccaagtgttgcaagaatcttttccacaaatctgtatcraaatttcaagctaatgtccacaactctcttttttttttttttttagagacagagtcttgctctgtcacccaggctgtagtgcagttgcacaatcatagcttactgcaccctctatctcctgtgctcaagtgatcctcctgcctcagcctcctgaatagctgagactacaggcaggcaccaccatgcctggttaatttttttttttttttttaagtagagacaaggtctcactatgttccccaagctggtcttgaactcctgagctcaagtgatcctcctgcctcagcctcccaaagtgttcagattataggcatgagccactgtacccagccagtccacaactcttaggaggaagactaattttgcattcagaaagagactaatttcacatacagaaattagtcttcctcctgaggaaaagaaattaggctaatttcctttcttgagtcttttccctaatactctgagccaataaaatgaaaaccatcattctcaatatatttcaccacttgtactctccttgcatttctccctctataatcttattaattgctggaattactcttctctgagtgtgtctcagtgctcctcttgcttattacttgctggtggcttgagaattgtcatctttcaaagtaattagaatgagaagaaatggcaatgagaggagaggctggaggaaaccatcttaaaagtaatttccaaattgccatcaggatagttatccagtttttaaagtttgtttaagtaagagatatgctggtaaatgttttccccccagtgattttcaataatacaatacag

SEQ ID NO: 57799 - DNA, 893 bp, Homo sapiens
tgcatactgaggtgttttttttaaactatcatccaaccttgtgatcaaaaaccaagtgttgcaagaatcttttccacaaatctgtatcgaaatttcaagctaatgtccacaactctcttttttttttttttttagagacagagtcttgctctgtcacccaggctgtagtgcagttgcacaatcatagcttactgcaccctctatctcctgtgctcaagtgatcctcctgcctcagcctcctgaatagctgagactacaggcaggcaccaccatgcctggttaatttttttttttttttttaagtagagacaaggtctcactatgttccccaagctggtcttgaactcctgagctcaagtgatcctcctgcctcagcctcccaaagtgttcagattataggcatgagccactgtacccagccagtccacaactcttaggaggaagactaattttgcattcagaaagagactaatttcacatacagaaattagtcttcctcctgaggaaaagaaattaggctaatttcctttcttgagtcttttccctaatactctgagccaataaaatgaaaaccatcattctcaatatatttcaccacttgtactctccttgcatttctccctctataatcttattaattgctggaattactcttctctgagtgtgtctcagtgctcctcttgcttattacttgctggtggcttgagaattgtcatctttcaaagtaattagaatgagaagaaatggcaatgagaggagaggctggaggaaascatcttaaaagtaatttccaaattgccatcaggatagttatccagtttttaaagtttgtttaagtaagagatatgctggtaaatgttttccccccagtgattttcaataatacaatacag

SEQ ID NO: 57800 - DNA, 682 bp, Homo sapiens
atcatattgcttgattttctgcagtgataataataatactggaattccaccaatgggtaatttatattggctgtgtccaatcagaaattttcaaatatccttcccccatctgccaaaaacaaaacaaaatataaaaccagcttgctttcctcctccttagtttaaaagatacaaataaaatagtgttctatccttgatctgtttctgataggtgttttcttccattaattttaatttagktttatttattctgaagtgagtcctgaattgcataaatttgcataaatacctcctactatattgctgcagaaaatccactgaattgcaaaatgaggaaagagtcagctctcaatgtctgggggaacttttctcactttgtgaggttgacattgtttcctgaggtttctgggtactgagcaatgataacatttctccccatcagtttacttgtgcctagctcttcttcataatggaagtgcacccagagacattctcacattgaggaccgtaggttcagaatgaagtgttgaaaccagcctcagaaaattaaaaagacgtgaaacaaggggcaaagacaagggcaaacaaccgttttgtttatgtaactctcaagcgaaaaattcccttgagcgtggggctctctggactcaatcagcctatccctttctgatcactgccactt

SEQ ID NO: 57801 - DNA, 813 bp, Homo sapiens
actataaagcctaataaattttttaaatctagaaaaataatattttttacgtaagagtttatcctgtcttgcatctggcctgtttacaaaaagaaataaacatgataaaccagtggagttaaaggtgaggaatttctataatttacaacaatgtatgtacatttcagaatagctagaatacttcaaagatttctayatttctagcataaagaaaatataaatatttaaagtgatggatatcccaattaccctcatttgatctttataccttatacgaatacatcaagtttaaaaaataaagataatttctagaaaaataaaaataaaggttagagattgggcattttcacctatattacactcaggaccaggaaaagcacttgtgggcttaattgtatggtcacacatggatattatgtactgtgtggtaggtattagtatttaggtttagctttctggaggatactgacagcctgttatttagcagaatgtctagagaaaacttgcagcttttcagtaaggaggtttgatggtaggtttttattttagttgtagaaataggttgtaaggagccatcagtattttcagagagttgcacaaggacctggctataatgttatatttggagtcactgacatagcaggagttatagataaaccaaacttgttattgaagcattctggaactccaaagaataatgttgctggaagtagtccaaagcagaactacatttaccaagttctgcactgcggtagttagtgcaatagaggtaggtccaagggtgactcagagcataccaacattttttaatcc

SEQ ID NO: 57802 - DNA, 813 bp, Homo sapiens
actataaagcctaataaattttttaaatctagaaaaataatattttttacgtaagagtttatcctgtcttgcatctggcctgtttacaaaaagaaataaacatgataaaccagtggagttaaaggtgaggaatttctataatttacaacaatgtatgtacatttcagaatagctagaatacttcaaagatttctacatttctagcataaagaaaatataaatatttaaagtgatggatatcccaattacyctcatttgatctttataccttatacgaatacatcaagtttaaaaaataaagataatttctagaaaaataaaaataaaggttagagattgggcattttcacctatattacactcaggaccaggaaaagcacttgtgggcttaattgtatggtcacacatggatattatgtactgtgtggtaggtattagtatttaggtttagctttctggaggatactgacagcctgttatttagcagaatgtctagagaaaacttgcagcttttcagtaaggaggtttgatggtaggtttttattttagttgtagaaataggttgtaaggagccatcagtattttcagagagttgcacaaggacctggctataatgttatatttggagtcactgacatagcaggagttatagataaaccaaacttgttattgaagcattctggaactccaaagaataatgttgctggaagtagtccaaagcagaactacatttaccaagttctgcactgcggtagttagtgcaatagaggtaggtccaagggtgactcagagcataccaacattttttaatcc

SEQ ID NO: 57803 - DNA, 711 bp, Homo sapiens
tccagcttgaccctagcctgccaaaatagagatgctgaaaatcaaagcgatgagccactaccaccaactgcaataatttttactgaatgcacttagaattcctggcctgtgttctgattgccaatacctaaccctttccaaagaaccaagattaggctgtttagagaagatataccatcacggggaagccagrgaccaaggaaagtgctcacttttagtcgcctcttccaatcatcaaatattcttcctttccttccctgttcttgcatcctgcagcaacaggattcattatattatgtatagattttaagttaatatgtctgtttacagatctgataatcatggtgataggtgccttggaaaataaaggagatgttaccagccgtaatgttgatccctgacttcaaatctcctatcatgccaacaacatatcttatccacacttgcctctaaacgtaatacatgtcctgacaattaccatgaaagttctttgcatattgactcagatcagtaagatgagtaaaaaggctttccaatcttaggaattctgactttcaaagtaaaattcaatagaagatttctagaaacataatttaagtaattttgaactgctgaataaaatttattccataaaatatgctgtggccacaatttcctaaatgtgctctagttggaaatttttttttaatcttgaagtttggatgaggtcct

SEQ ID NO: 57804 - DNA, 658 bp, Homo sapiens
atgctaggtgtgtaaatgaaatatatatatagttatataaacaatataatatatatttatatatataatacttatatttttttttcagaaattaatttgaaaactacttgtcttttttttttttttgagatggagtcttgccctgtcacccaggctggagtgcaatggctcttgcagtgatcttggctcactgcaatgtctgcctccygggttcaaatgattctcctgcctcagtctcccaagtagctgggattacaggcacacaccaccatgcccagttaattttttttgtatttttagtagagactgggtttcaccatgttggccaggctcgtctgaaactcctgaccttgtgatccacccgcctcggcctcccaaaatgctgggattacaggggtaagccaccacgcctggccaaacactacttgtctttcaaaagtacttattatgcaggaactaaaatcatttcctttttcaacaccagcactgttatttctaagtactactttggaagtttttcatgcagaacattgcacaatagcaagacttagattggtgagaggtatgactttgcagaggaaaacaaaagataggtgtattagtccgttttcactcagttgataaagacatacccgagactgggcaacttactgagaaa

SEQ ID NO: 57805 - DNA, 658 bp, Homo sapiens
atgctaggtgtgtaaatgaaatatatatatagttatataaacaatataatatatatttatatatataatacttatatttttttttcagaaattaatttgaaaactacttgtcttttttttttttttgagatggagtcttgccctgtcacccaggctggagtgcaatggctcttgcagtgatcttggctcactgcaatgtctgcctcccgggttcaaatgattctcctgcctcagtctcccaagtagctgggattacaggcacacaccaccatgcccagttaattttttttgtatttttagtagagactgggtttcaccatgttggccaggctcgtctgaaactcctgaccttgtgatccacccscctcggcctcccaaaatgctgggattacaggggtaagccaccacgcctggccaaacactacttgtctttcaaaagtacttattatgcaggaactaaaatcatttcctttttcaacaccagcactgttatttctaagtactactttggaagtttttcatgcagaacattgcacaatagcaagacttagattggtgagaggtatgactttgcagaggaaaacaaaagataggtgtattagtccgttttcactcagttgataaagacatacccgagactgggcaacttactgagaaa

SEQ ID NO: 57806 - DNA, 1036 bp, Homo sapiens
gtctatgtcaggccaggtggagtggctcatgcctgtaatcccagcactttgggaggccgaagtgggcggatcacttgaggtcaagagttcaagaccagcctggtcaacatggtgaaaccctgtctctactaaaaatacaaaaattagccaggcatggtgccacgcaactgtaatcctaggtactggggatgctgaggcaggcaaattgtttgaatccaggaggtggaggttgcagtgagccaagatcatgcccctgcactccagcctgggcgacaaggcaagactttatttgaaaaaaaaaaaaaaaaaaaaaaaaagagcctatgtcattaataaggggcattcaagttaaaatgtctgtgtctggagactaacaactgatcttaatcctaagcagcacgttttaaaattatactgtttgtggctaaaatacctcttaattggatattacatttaatattgctagtgttgactttgtgtgcatgtgtgaaaaacaattattactcaatggcacaccttagaataaatggcatctttgatttgaggaatgagtatataggtccaaacctcgaacttaaggatcagatattggatttctctgtgcccccaagagagtacatggttgagggtaagaagagaaactttccatcttttcagagaggtacagagtctttgtttctatgtcattcctggaatgaaactagtaagtcttatctatgactggaatacatcgtagctaatattgacttctgaagaactacwaggaattgttttaaagggagccagccacctgttcactgcttttcctgcattcctttgttcttaaatgtgaatctgctaacctcacatgtccctatgatcactgggattcatagtcatctttaaatatagctgcctttcccttctgtcttcattcatattttgcccgaaccttctcattcatgagaaactctagttactttagagatgtaaaatcttgggtctatggccaaatagcagctggccagttttcaagtgaaattcttggtaacaaaca

SEQ ID NO: 57807 - DNA, 1036 bp, Homo sapiens
gtctatgtcaggccaggtggagtggctcatgcctgtaatcccagcactttgggaggccgaagtgggcggatcacttgaggtcaagagttcaagaccagcctggtcaacatggtgaaaccctgtctctactaaaaatacaaaaattagccaggcatggtgccacgcaactgtaatcctaggtactggggatgctgaggcaggcaaattgtttgaatccaggaggtggaggttgcagtgagccaagatcatgcccctgcactccagcctgggcgacaaggcaagactttatttgaaaaaaaaaaaaaaaaaaaaaaaaagagcctatgtcattaataaggggcattcaagttaaaatgtctgtgtctggagactaacaactgatcttaatcctaagcagcacgttttaaaattatactgtttgtggctaaaatacctcttaattggatattacatttaatattgctagtgttgactttgtgtgcatgtgtgaaaaacaattattactcaatggcacaccttagaataaatggcatctttgatttgaggaatgagtatataggtccaaacctcgaacttaaggatcagatattggatttctctgtgcccccaagagagtacatggttgagggtaagaagagaaactttccatcttttcagagaggtacagagtctttgtttctatgtcattcctggaatgaaactagtaagtcttatctatgactggaatacatcgtagctaatattgacttctgaagaactacaaggaattgttttaaagggagccagccacctgttcactgcttttcctgcattcctttgttcttaaatgtgaatctgctaacctcacatgtccctatgatcactgggattcatagtcatctttaaatatagctgcctttcccttctgtcttcattcatattttgcccgaaccttctcattcatgagaaactctagttactttagagatgtaaaatcttgggtctatggccaaatagcagctggccagttttsaagtgaaattcttggtaacaaaca

SEQ ID NO: 57808 - DNA, 1439 bp, Homo sapiens
ggggctgggaataaataagcaagaataatgttgcccatatttgctcatcttagaaaggctccacaaccattctgtgtgaagtgattattccagggtaattgtgccctgactgtgctgcatctcagtctgacttgtctttttgaaaatcactggattactctcattaataggggtatttctgtttctatttgaaaatggccaactgtcctctgcaggtgtcctgatttggtttgctagtttagaccctgaaggtagcagtgagaaaatgttttggccacatcagaatacctattctcagctggagtagatatagaaatttcttaataatatctaaccgttttctctataaccattatatttaacagtgataactggagggcagagagggacacagatgacacaatctttgaagtttaatttggttataaggttttttgttcttgttttgttttgctttgtttttggatacaaggtcttgctctggtgcccaggctggagggcagtggcacaatcataactcataatttggttgtaactgttctttaaaaaatatttttggctgagtttggtagctcacacctgtaatgtaaacaattkgggaggccaaggtgggatgatcgctggatcctatgagttcaagaccagtttgggcaatataagtaggctcagcctctacaaaaaaaattttaaaattggctgggtgtagcattgcatgcctgtagtgtagtcctagctatttgagaagctgatgtgaaaggatcactcgagcctaagagtttgaggctgcactgacccatgattcagccacttcactgacagatgtgtgtgtgtgtgcgtgtgtatgtataatcaatatggatgtgaaaaaaattcaagcccgggagaaaagtgaaagcccatagtgggggatgtggagaaaggtgagtgcggctccagcaactcagtgaaacttggttttccatcttgaagaattgcccatacacactgaaaccatagcctagaacatgccagttatcacactacacctgctgggataccactatgtacccttttttaaaaaaataaaatctttcacctaagagaagcagaagagaaaaggagggtttcacatctaaagccttcattttctttatgaaacaacagccacttgtcatttgagttgtccaaaggcgactgacagcactaatacacttaatgaatcaaccaggaaaaatgggcctctcgggtgaggaggaggcacaatagtaactaaacccaatccattctcagctttacatggtgcccgtatcttaagaagtggtgttagccatgtgaaccgttttcactggacaaggccagaagaaagaacatttagtacaacacaatcatgaggctgcaaatcaaactggtagtgggagcatgcacaaggcttcagtggctgagacactggtggctaccct

SEQ ID NO: 57809 - DNA, 802 bp, Homo sapiens
ggatccacctcacacaagtccagggtaattacaatgtattggcaacacccattcactatgttgtacattttgaaaaagctattaatttcactacatctgcatttaacagttcagcacacaattgcagacactgtgcagtctttttcttggaatgctggtttcctgggctcagtgctttctccagaggttttgcacaatttggggattttctctaaagaatggagaaggctttttttgctaaatacaaaagacaagctcttgagaggaaaaatcatgtttctatataaaagtaaatgtgattcccaaaggcctactttgaaagaaaagggacaaaactgaggtgtcattccagacagtgtgataggtatgtcaacaaatgataggtatgtccaacrgacacatccaaatacacgcttcctaaaaatggatcaatatttttttattcaagaaatctctgtgagctgctttccaaattggcaaaatcagttattttgaacgggtagaaaatcttcaaattttgagggtaaattggaagttgaagaacaatcaagtcattcacagcagggtctgataagtcaggaggatgaatgaatggaaagaatgctgttggtgtccaaaggtaaacctggcttgcttctggcaggtgtcatctaaggcacatacaatgtgacagctttgaagggcagagggtcttgacattgactctccacaatgatatggagatcagtgtgagtgccggcatgttgactcctgggagactactaagcatttgccacctcttccaaggtggaggcccacaaaa

SEQ ID NO: 57810 - DNA, 979 bp, Homo sapiens
ttaaatataattagatatttgcttgatttaactgtgagcttatgtcttttgttgagagtttctggattcagggggtcttgatagaggaccatgatgaagtatggagacatgttctcagtgcctagaccagcagctaaaagccagaatcaagcccaatcggccccttctttctgtgctttccctgttttgccttctggctattttaggaggggttggatcctccaggtatagccttcacagctctgtctttagtcctaatggactcrggcaggccctgatcttcacagttttcctgggtgccatgtggctacttgggacctaaaattactgagggaagacattacggatgctacctgtgtcatggtttcaaaattctgttcagtaatttaaaatcttaaagtcacgttaaattaagtaatagatagccataaaatatcttgagtcatttgtaagctaaaatagtgaaatattaaccattaaaaattagtttagttctatataccatgacatgtttcttgtatatggtatagaaaacctaaatatctttagttctgttaataaacagtaatttgaagaactatatttcttaaaagttgtaaaatggtttttatctaaaaatactgatataagacagttgaaaaataactttttagggtttcattgaatattggggctcctaagacttaattactagatatgagagaaacaattctgcatagagtgtataaaaagcaagatatgccttatttttcttttttgagactgagtcttgttctgttgcccaggctggcatgcagtggcatgatctcagctcactacaacctctgcctccccggttcaagtgattcacctgcctcagcctcccaagtagctgggattacaggtgctcgccaccacacccagctaatttttgtatttttagtagagacagagtttcaccatgttggccaggctggtctcgatcccctgacctcaagtg

SEQ ID NO: 57811 - DNA, 1359 bp, Homo sapiens
agatcatagtccttttataatgccattgattgttttaaagacacggcccttttccaggcaggtctggaatccatggcttcactgtaagcatgaacacaccagttctcccaaggcctccaacagcatgtctggcctctcaaggccaaatgacttgaatttgtcccaagggcctggagctgtatttggtcaagtatctatttatgctttattacagaaaggatttaatgctgtactcttcagcattatcaggaagsaaagagttaatgattttccaacatcagcaaaaactaaataatctacttttttactgtatttattgtcctgctatttttaaccttatttgggggaataaattcagcaaggaaaaaagattataataacccacaacctggaattaaatatcgacattaaatatatatctatatatcctctcttttaaaaaattttaagaggctcaggaacaaagaccaaaaccttccaactcagcccagactaatgaaccagtcaagtcacatggcactcagtgtttttcagaccatatccagggagctcttgcattcctcagaagagtgccaggttcctggcaaggagagggccaggaaataggacagcaagaggcgggagtttgaggatcccactgctgcatttcccttgacacctcaccatctccgatttcatttgaaaaagggttccactgaactaaccaacgtaaaggcggagcttagcaaggattatttctggctacacatgggtggaagggaagagaacaagagaaggagttgctacattttcattgcttgcaatatcaacttaatgagctgtgaacattttctctcagagagcaactgcgtctctccctaagtactcagttctttcaacacatcaattgtcttttgtcacatcagacaagtcaatctcatggcgtctgtccaccaggcaatagatacaataccaggtcactctcattccttagataaccattttaaaaaggaagacatcagtgtgtcaaaagctgtattcatgtttcctaataacatcccattgccatccttttttaacctaattgttcttctgcatgcaagagtggtaaagagaaccacacagtctcttctgggaaccttctggtgagaccttggtgaatggcagatccctgacaaagttctgacattaattcccttctcctgtctatccaggcttagtttctacttctgacacaaacccagagaacagaaatgtaatcatgatgtcccagctgggctgaccaaggcagctgcagcattagaaggcaacgaagctgtcttatactgctttctattctgctctgggagtcagagaaatataagctagtatttggaatat

SEQ ID NO: 57812 - DNA, 1012 bp, Homo sapiens
gggcatcccccagataagacagccctcttcttttcccaatgagaaaatccctaccccctacaaattttggtcaatctgcccaaataaactttatgactcacatgaaatcacataccctatgagttagaaatagtacttttcattccatgtccaccttccatgaagcaatttagctcacagtcttcccaggtagtgtccacatgcctgtcctcaatttgtgagttgtgtaaccattcttctaagcacagcacctccttaccttccaagttgcctatcacacagcacttttcaaaacgatgtgcaacactgccactgaaacacctaccctaggccatcagaagcccttcagagtgaccaagaaagttgccctcagaggcaaaaatatattgacgatccacacagcatattagtgatcgtgttacttttaaagtgaccttcaatggtcttaataaaatttcaaatgacagagggcagctagctcttcaggaaacccatttcctcttcttgccaaccgcagagctgggctacatttcctagccttcaaggtaggtgggcgtgaccataaggctgaactgttcttaatgaaataggagaagtgacacattccactcccaggcctagcctatcaaaatctcccatatgcagtcctccatgatctttctgcttccgccagttcaatgctgacaagtacgtgaccttagcagctgcctgttaaataaagtggaaccacagacaggaagaggctgggtcgccaaatcaccaggtttcacataaacacgcccacttcrggctttatacaagtggaaaataatcttccatcatgtttgagtcacggtacatatttgggtttatttgttacaacaactagcactaccttaactaattcaacgttcaatatctggcaactctgaagttataacctcaagaacaagtactaaatctgtattcaatttctttgcctctcttttttaaaatttaaccccttttcatgaagcaacctcgataagcattc

SEQ ID NO: 57813 - DNA, 828 bp, Homo sapiens
gggatcctggaaccaattcccccaggatgccaagggataactgaacatacacttttgcatctggcttctttcactcagcataatttctgtaagattcatccatgtggttgtacatatttggaaatttgtcccctttaattactgaatagaaatttatcgtatgaatgtactatagtttgtttattcattctcctttgactgacacaaggacatctctaatttggtggtatgatgaataaagctgctacaaatattttgaagtcttttgtgggcatatatagattcatttctctcgggtaaagacctagggatgaaactgctgagccaaaggataggtgtgtgtttacatttgttagaaactttcagacagttttctaaagtggttgtgtcatsttatctttcatttaaccttcaatattagatgtattttaagctgccgtaaatatcttttggaagtaggtgagttttaagtgaaggaatgaatgaatgatggatggatgacccaacaattcagctatcctctaacccagtatgtggccaacacagagcctgtgctcactgtcctcatcctgctgggtttcttgaactcagggtggctccatctgcacagcaaaccacaccaccaaggctggcccctcctagcttttcaaccccattgccactgtagatgccttggcaggaaatccagccaggctcatcctaaagaaatcccattccctttgctagagcaggagcaggaagcccatgctgttggctatagagaggagcagtcagctcaggcactgctctcagctctgttaccaaccaggtgtccaaagaagctgagta

SEQ ID NO: 57814 - DNA, 731 bp, Homo sapiens
aaagtctgattctcatccttggtggtgagaggggaagcgggtggggtgtcccacatttgttttctcctcgggcacttcgcttagcctttagtgcctgccccatatatctgccacctctgtaaagtgctccctttaccctcagtagccaataccctgatactcccctgttattagttaataattcttaactttcccatttaaaatcctgtgtggttttcgtctcttgtttgtctgatagttttctttcatttttcaacatctatttttgactttctttttgtatttgtcctgcttatcgaggaccttgtttgtagaaatgcatcaagaaataaattctttcatgccaccaaattcaggagactcgagtgagtatgctaagtggtttcagatagctgaccctgaaagtgtgcagagctgagcaatgtgtatggttcccccaaagcaactgtccctatgtcttcaagttcccagggtttaaaacaccatgttgcttatgccactgggcagcaagaagtgggcaagtcacctcccctctctaggcctcaggatctccttttgtgtccggagttggttccttccagtgagttcttggtctggctgacttgaagaatgaagtcgcggacctttatggcragtgttatagctcttaaaagtggtgcaaacccaaagactgagcagtagcaagatttattgtgaagaaggaaagaactaagcttccacagcatagaagg

SEQ ID NO: 57815 - DNA, 1661 bp, Homo sapiens
ctggcatcttgcacatatctgattacatgattatcatgctgtagattttgcaagctctttgaaaacatgcctttagatctggggttattgccattttcaggctggagtttatgaggctggagaccttggagatgaccaacggagggtcatctcttcagttgctaaatcattatgacttagattaagaatgatagaaatattttttagcatcattactgacttgcaagtggactgaaagaattaaagatgcacagaaaaacatctttaccccttaattaaaaagaagcccttttggatcccaaggaaataggaaaataaaactaacatcctggaaagtataatgggagaatgttaaatgatgtctgccaaaatttctccttgtgttaccccacttgtaatgccaaaggccaattacaacttgttttgtggtaagggatgtgtctgatttaaacaatagaagattatagtagaatgctgagaattttcacaattaaaaaaagcaatgtttccaggtatttgcaatgcaacagaattcttctctccaaaggtttaaacttgtacactttatacaatgccgtctttgtttcttttcttcttctccttttctctctgtgtctttctccttgcctctctatctctgtctctctctctttttagttccctgattggttgctaaattcctttaaagttctaagctatgtatcattaaggactgatagtaaaaaacaacattgaaaatggttttgattctggttagaaaaatacccctggagaagatattttaccaaataatattgctgttttgcagaagattcagttttgtcttttgtctgctcaagttcttgtgcacctttcccaatgcaaaaggaaataaatacacttctcttaagtatcactcctccaaggagaatatgttggtttaaatggaggaggcaactgtggctgaataatatttctcagcatcatttgtgtgatacaaggatgttccctcccatgtagaggatgtaaaggaagtggcagactgtgtttccctctagatcaggccagccaggctcttactgtatccatgatagtctcctttcatgactatactaggaatacccctttcttaggatcctatactaatccctgtggcctactaagataagaacataccaagttgtcaaatctccccaattctctggttacttcttctcctatgttcatttctgggattgaagttggaatagggctaagagttatgtttcttatctttatctaaatggctcttgaatggtagcctgatttttctccctaaatcacaaaatgaaattacttcttagttgctttcttcttgtctggggaacatagttctaatgaagttctccaataaacaatcaacaaagaagattatagtagaatatagtgtatatagtgacctccttcaaatgaattaccctcattcttcttgctctttatatttctccaatattatcatctccttgagaactgggaatgtgtcttgctcatttttgtataatattctatataatgttcaataatatttattgtaatggaagtttcacaagkttccacaaggtcagttgcttttggaatcctgctaattctgcctttccttccttccttccttccttccttccttccttccttccttccttcct

SEQ ID NO: 57816 - DNA, 986 bp, Homo sapiens
ttttttttttacgtttgcggagaatattctacaattaataacagtgcaaagcactcaagaattttagcagtagcttgagtatctatttagatggttcagtgatcatagtttcctgtcaaaagcaggtagctaatatttaatatgtatttaaataggaaaaggaaacaatccaggaaatcaatgtagtacatataattaataaatgatgtctgaaattttatgttcaattcctgttactgtcattcatccaacaaacacaatgtttaagctagttcctgmaatactaataggtcactctgaaaggtcctcagagtgaaagtgcaccaacagcaatagcttatcccaattctatacttgacagggcattggttctccatctgcttgtttctctgatttcctttggctccaaggctgatcccattactagtagcataagcatatctggctcctagaattgccttaatagataatattctattctaatagagtcctagaaacacactttaccctcctcaaaatataccaatatgaaatttaatttggtataaccacattagaaaaaataatatttactaaagcttaacttatacatgccctataacccagcaacagaaatgcctacatatgttcacccaaagagatgcaccagaatgtttatagtagtgttatttgtaatgtacaaaagtggatactatccaaatgtccaactacagtagaatgactaagttgtgctgtaatcacacagtggaatactttattgcaatggcaatgaataactatatgtaacaatagggatggatctcacaaacctactgatgagtgaaagaagctagatacaaaagagtacatatcgtgtgaatctatttatgtaaagaacaaaaagaggcaaaattatttttttctttgggaagtctggaaaattgttacccttaaagaggagtagaaacaggaaggagttacaaagagagcttctaagatgctagtta

SEQ ID NO: 57817 - DNA, 1825 bp, Homo sapiens
tcaaaaggaaagatgggagactaatatgggctccccagtattttattttgccaaaaaaaggatacttcaaagagcaatcattaaaggatacttcaaaaagctttgatacttcataaaggaaaggatactataacagcaaaattttggaataccataatctcagagttgttcaagagtcaacattggtggctacttgaacagaaggaagaatattttctttttggaatgggacttgggattcaaccccagctccactgttattacctatataacactgactaagataattaatctttcagaccctcatctgcaagatgaaaacatgtatctcatgtggttgttagaatgccaccaatgaataaatgccacattccaatggtatttggtacatagtaggtgctcaataaatatccattctctccctcttgcactgcattcttcctttctcttgttacttatgttagaggattgttttgatgttcaaataagaaaataatgagaaaatgcttggtgaaccataaagcactatttaaatttgaggttcatgagacatacagtgctttgcattaagcatatgcattttcctttttataagatgtgtagaaaactggcacaatcacactcaggaagcaaaatgtaatgcctttgtcttatttcttgagggctcacgtggtcttttgggtgaaactatatgtaaaatatagatggtattttagaaaatactgtccatatagtgcacatagtgttgcttttgcatgtttttaaaacaaagaacattaaccagtcaactcacagatcttcctgtatgacaaactaaggtgtagttataaagtccattgaagctataaagtgtttagagttatattgcattaagtgctattgcattcaatctcaccaagctgttaaggtgttttataatgggatgtaaatatttatggtctgtttgagaataaccaaagaaaagtgcttttcattattttagttcatatgctattagccaggtatatcttttagtctttcaacgctttcatggcttgggaaaatgatgtcaactttggggcaatatatggttggggaaaaaaattagtctacttttgttactgtgtcaaattgcccgggagctgcttcgctgaacgagtgcctggggagcacatactacattttctgtgtattcttttggtaccaagtagagccttaataatgcttctatagatgtataatgaataatagttgtccacagctaacaaaacactgtaacattctgcagagaaactggtgagtttcacattcttaacctgatttgatacatcccagatagttttaagaaaaagtatttctgctttaaattcctttcctttaaagaaaacttgaaaaacaattgcatatgtttcctcaagaatcaaattctgtttttaggactccatcttggttctgacatttttgtatgtgtatctctaaggctattgcagccatcagaggtagttcatgcaaaagaagttaagctattgttcatcactaaagcaaataggaaagtctggaagacacactttttattaaggaaataagaaaaggcgatactattttcatgatcacatactgtactttacaacatctrgttatagaaaacaggaaaggttaaagatcaaaaaaataacgattcaaaaccactttgttctcagatctgtcactgtggtttttgtcagataagtttaaatcctggtaattggtttatgccaaaggacagaggagagtcatttcaaagctttcctgttcgtagactattaaattgccagatataacactcacaacaaagtgacacataatt

SEQ ID NO: 57818 - DNA, 1825 bp, Homo sapiens
tcaaaaggaaagatgggagactaatatgggctccccagtattttattttgccaaaaaaaggatacttcaaagagcaatcattaaaggatacttcaaaaagctttgatacttcataaaggaaaggatactataacagcaaaattttggaataccataatctcagagttgttcaagagtcaacattggtggctacttgaacagaaggaagaatattttctttttggaatgggacttgggattcaaccccagctccactgttattacctatataacactgactaagataattaatctttcagaccctcatctgcaagatgaaaacatgtatctcatgtggttgttagaatgccaccaatgaataaatgccacattccaatggtatttggtacatagtaggtgctcaataaatatccattctctccctcttgcactgcattcttcctttctcttgttacttatgttagaggattgttttgatgttcaaataagaaaataatgagaaaatgcttggtgaaccataaagcactatttaaatttgaggttcatgagacatacagtgctttgcattaagcatatgcattttcctttttataagatgtgtagaaaactggcacaatcacactcaggaagcaaaatgtaatgcctttgtcttatttcttgagggctcacgtggtcttttgggtgaaactatatgtaaaatatagatggtattttagaaaatactgtccatatagtgcacatagtgttgcttttgcatgtttttaaaacaaagaacattaaccagtcaactcacagatcttcctgtatgacaaactaaggtgtagttataaagtccattgaagctataaagtgtttagagttatattgcattaagtgctattgcattcaatctcaccaagctgttaaggtgttttataatgggatgtaaatatttatggtctgtttgagaataaccaaagaaaagtgcttttcattattttagttcatatgctattagccaggtatatcttttagtctttcaacgctttcatggcttgggaaaatgatgtcaactttggggcaatatatggttggggaaaaaaattagtctacttttgttactgtgtcaaattgcccgggagctgcttcgctgaacgagtgcctggggagcacatactacattttctgtgtattcttttggtaccaagtagagccttaataatgcttctatagatgtataatgaataatagttgtccacagctaacaaaacactgtaacattctgcagagaaactggtgagtttcacattcttaacctgatttgatacatcccagatagttttaagaaaaagtatttctgctttaaattcctttcctttaaagaaaacttgaaaaacaattgcatatgtttcctcaagaatcaaattctgtttttaggactccatcttggttctgacatttttgtatgtgtatctctaaggctattgcagccatcagaggtagttcatgcaaaagaagttaagctattgttcatcactaaagcaaataggaaagtctggaagacacactttttattaaggaaataagaaaaggcgatactattttcatgatcacatactgtactttacaacatctggttatagaaaacaggaaaggttaaagatcaaaaaaataacgattcaaaaccactttgttctcagatctgtcactgtggtttttgtcagataagtttaaatcctggtaattggtttatgccaaaggacagaggagagtcatttcaaagctttcctgttcgyagactattaaattgccagatataacactcacaacaaagtgacacataatt

SEQ ID NO: 57819 - DNA, 1160 bp, Homo sapiens
tgcatttattacctagagaggcttagagaaagagtaagagaatgggataggaacattagtaaagacaatagaagacaaagccaattttgtagactaaatygaatttctgtcagtgtcgtgattttgtctaactccataaactgaaggcaggcaaactccccatttgctgtacagtggatctttctttacttccctctgataaatggagatctctacactcatttaaccagtgtttcaccaccacattctcagctgatatctggtctgcatgtacagccgcagggacagacagacctgcacctaagacttgctataatacatgcgaataatcaatattttctggtgtgatgatctcgctctgggaaataatgctcatgcactaattgagctaatgagaatatattagctattggtttagtgaaagtgatggcagagtaatctaattcttactggctcctggataatcttcaatttaaaggtaatgatgttaaggaatgttcaattgagtacgctcaagtgcacatggtatgtacttcttaggtgggacaaacggctctcataagttataatgattctttagagtggagattctccatctggggttcatggatagaactcaggaattctgtgtaattggattaaaaagagactacggctttattttcatgaatcactaatgaaatttagtattttctttcactatgaatataggcaactaattatagtagtattagcagtactgtgacttagtcattactagaaatcacagatttttttgtatcacattgtatttgtttcctatatcatgagatattgtttatgttcaacaatactgcaagaatatgatattagacctgaaactagatcttattatttaatgcattaattaaaagtatattaatatatcagtgatttgtttttaaaatattttgatattagtatttaaatatgattcatttcctttgtatgcctatgtgttttgttttatgcttttaaaaacacaattatgagaagccatcacagacttcacctgactgtaaagaggtctgtgtgcaaaaggttagggcctcttgcttagaataaggaccatggagcctttctccccctatagaaaagttgctatttgcaatacaaattctttctgtttttctgacacaggg

SEQ ID NO: 57820 - DNA, 1160 bp, Homo sapiens
tgcatttattacctagagaggcttagagaaagagtaagagaatgggataggaacattagtaaagacaatagaagacaaagccaattttgtagactaaatcgaatttctgtcagtgtcgtgattttgtctaactccataaactgaaggcaggcaaactccccatttgctgtrcagtggatctttctttacttccctctgataaatggagatctctacactcatttaaccagtgtttcaccaccacattctcagctgatatctggtctgcatgtacagccgcagggacagacagacctgcacctaagacttgctataatacatgcgaataatcaatattttctggtgtgatgatctcgctctgggaaataatgctcatgcactaattgagctaatgagaatatattagctattggtttagtgaaagtgatggcagagtaatctaattcttactggctcctggataatcttcaatttaaaggtaatgatgttaaggaatgttcaattgagtacgctcaagtgcacatggtatgtacttcttaggtgggacaaacggctctcataagttataatgattctttagagtggagattctccatctggggttcatggatagaactcaggaattctgtgtaattggattaaaaagagactacggctttattttcatgaatcactaatgaaatttagtattttctttcactatgaatataggcaactaattatagtagtattagcagtactgtgacttagtcattactagaaatcacagatttttttgtatcacattgtatttgtttcctatatcatgagatattgtttatgttcaacaatactgcaagaatatgatattagacctgaaactagatcttattatttaatgcattaattaaaagtatattaatatatcagtgatttgtttttaaaatattttgatattagtatttaaatatgattcatttcctttgtatgcctatgtgttttgttttatgcttttaaaaacacaattatgagaagccatcacagacttcacctgactgtaaagaggtctgtgtgcaaaaggttagggcctcttgcttagaataaggaccatggagcctttctccccctatagaaaagttgctatttgcaatacaaattctttctgtttttctgacacaggg

SEQ ID NO: 57821 - DNA, 1160 bp, Homo sapiens
tgcatttattacctagagaggcttagagaaagagtaagagaatgggataggaacattagtaaagacaatagaagacaaagccaattttgtagactaaatcgaatttctgtcagtgtcgtgattttgtctaactccataaactgaaggcaggcaaactccccatttgctgtacagtggatctttctttacttccctctgataaatggagatctctacactcatttaaccagtgtttcaccaccacattctcagctgatatctggtctgcatgtacagccgcagggacagacagacctgcacctaagacttgctataatacatgcgaataatcaatattttctggtgtgatgatctcgctctgggaaataatgctcatgcactaattgagctaatgagaatatattagctattggtttagtgaaagtgatggcagagtaatctaattcttactggctcctggataatcttcaatttaaaggtaatgatgttaaggaatgttcaattgagtacgctcaagtgcacatggtatgtacttcttaggtgggacaaacggctctcataagttataatgattmtttagagtggagattctccatctggggttcatggatagaactcaggaattctgtgtaattggattaaaaagagactacggctttattttcatgaatcactaatgaaatttagtattttctttcactatgaatataggcaactaattatagtagtattagcagtactgtgacttagtcattactagaaatcacagatttttttgtatcacattgtatttgtttcctatatcatgagatattgtttatgttcaacaatactgcaagaatatgatattagacctgaaactagatcttattatttaatgcattaattaaaagtatattaatatatcagtgatttgtttttaaaatattttgatattagtatttaaatatgattcatttcctttgtatgcctatgtgttttgttttatgcttttaaaaacacaattatgagaagccatcacagacttcacctgactgtaaagaggtctgtgtgcaaaaggttagggcctcttgcttagaataaggaccatggagcctttctccccctatagaaaagttgctatttgcaatacaaattctttctgtttttctgacacaggg

SEQ ID NO: 57822 - DNA, 1160 bp, Homo sapiens
tgcatttattacctagagaggcttagagaaagagtaagagaatgggataggaacattagtaaagacaatagaagacaaagccaattttgtagactaaatcgaatttctgtcagtgtcgtgattttgtctaactccataaactgaaggcaggcaaactccccatttgctgtacagtggatctttctttacttccctctgataaatggagatctctacactcatttaaccagtgtttcaccaccacattctcagctgatatctggtctgcatgtacagccgcagggacagacagacctgcacctaagacttgctataatacatgcgaataatcaatattttctggtgtgatgatctcgctctgggaaataatgctcatgcactaattgagctaatgagaatatattagctattggtttagtgaaagtgatggcagagtaatctaattcttactggctcctggataatcttcaatttaaaggtaatgatgttaaggaatgttcaattgagtacgctcaagtgcacatggtatgtacttcttaggtgggacaaacggctctcataagttataatgattctttagagtggagattctccatctggggttcatggatagaactcaggaattctgtgtaattggattaaaaagagactacggctttattttcatgaatcactaatgaaatttagtattttctttcactatgaatataggcaactaattatagtagtattagcagtactgtgacttagtcattactagaaatcacagatttttttgtatcacattgtatttgtttcctatatcatgagatattgtttatgttcaacaatactgcaagaatatgatattagacctgaaactagatcttrttatttaatgcattaattaaaagtatattaatatatcagtgatttgtttttaaaatattttgatattagtatttaaatatgattcatttcctttgtatgcctatgtgttttgttttatgcttttaaaaacacaattatgagaagccatcacagacttcacctgactgtaaagaggtctgtgtgcaaaaggttagggcctcttgcttagaataaggaccatggagcctttctccccctatagaaaagttgctatttgcaatacaaattctttctgtttttctgacacaggg

SEQ ID NO: 57823 - DNA, 725 bp, Homo sapiens
tgtcttttccagcctcttcagcttacagattataaaactgaaccccaggaaggtcaagaaacttactgaaagtcacgtagttagtttctggaataactgagaatatagtgcagttgtataacacagtggttaagactggtaaggacatggattctggagcttgactgcctgtattcaagttaccaggaacaactattcactaaataagaaacataggaaatttacttaaatccctgtgcttcagtttcctgatatataaatcatggttaacaatagtacttacctcacaggctgtcatgacgtttaaatcaggtaaggcatatagaagacttttagcacaatgcctaacacttaataaaacacttaatactttaatttttaccatgaattttagatatcttttctttccacrcaagattttaggcaaccatatatagtcaccaattccttcacggtgaaaatacattctgaatcttaacaatttttaccctttacactgatagcaccctaaaccccattatcactcacctagattactgcaatagcctcctcattggtcttcctgctttctctcttgtcttttgttctggttattgatggttgcataacaaaatacaccaaacttatgcttacaattttgtggatcaggaattcagaagagttcaggaagacaacttgtttctactccttgcattgtcacctagggtggcttaactgaggttgga

SEQ ID NO: 57824 - DNA, 725 bp, Homo sapiens
tgtcttttccagcctcttcagcttacagattataaaactgaaccccaggaaggtcaagaaacttactgaaagtcacgtagttagtttctggaataactgagaatatagtgcagttgtataacacagtggttaagactggtaaggacatggattctggagcttgactgcctgtattcaagttaccaggaacaactattcactaaataagaaacataggaaatttacttaaatccctgtgcttcagtttcctgatatataaatcatggttaacaatagtacttacctcacaggctgtcatgacgtttaaatcaggtaaggcatatagaagacttttagcacaatgcctaacacttaataaaacacttaatactttaatttttaccatgaattttagatatcttttctttccacgcaagattttaggcaaccatatatagtcaccaattccttcacggtgaaaatacattctgaatcttaacaatttttaccctttacactgatagcaccctaaaccccattatcactcacctagattactgcaatagcctcctcattggtcttcctgctttctctcttgtcttttgttctggttattgakggttgcataacaaaatacaccaaacttatgcttacaattttgtggatcaggaattcagaagagttcaggaagacaacttgtttctactccttgcattgtcacctagggtggcttaactgaggttgga

SEQ ID NO: 57825 - DNA, 567 bp, Homo sapiens
aaagaaggaagctagactcagatacttgtatttactcagtttacttagggtcagtttagtgtaatgatcaagactaggagcctcactcaaacttcctccttcaaaatattaggcccatgcaggtagraagctggcagtgaaaagggggtggggagctgagaggcctcctctacatctcttggtgttgcatttctacccttctccccatcttaatgattacggtttctgaccctgattcccacagtggtgggttcaagttgggggtgagtatgggaggaaggtaggggaacagagaaggtctgcgtgtctggtaccattgtgagcaggcactggagcatggtgggccaggcagaaggctgaacctgattctcctgtgagcacttgtgagattttggcactcttccttcagcaaccagctactgaagatctttcatctgttatgttctatcacaaatgaggtgtcttagtccatttgtgtgacacacaggaatatctgaggttgagtgatttataagacgagaggttgtcttgcaggctgcacaggaagcatggggacagcatctgctg

SEQ ID NO: 57826 - DNA, 1350 bp, Homo sapiens
taataagaatgtgataaattgtggattcctcttcctaatgtgtatgttcatacgagcataggcagacaggtgaaaggtggttcacaggtccctaaagcctagtaagaccctgaggatcactctgctcccttccaaaattactgtggcatcaaaaacaaatgacatagttgaacccaaaacagttttattaattgtttatttgtaacctgctgtcttacaattgcactccctactagatcttctttttattattagtgaaactgattatttggtgaatcaggcagaaaggaacgattctcaattacctgagggtcccagggggctgatttctayggaagttcattacatatacaataggtatgttacaaaaataattaaatgaagggcggcatgctggtcttttgagctacagtgttgtgctctcttcgacctaactattggctaatatctgccttagctggaattgtcttgtttacacattttccaacaagttaattgtttagcaaagtgtttacacattgattatagattgattaatggccattgacaaacacattgctcttgaatttcactcaatcagcattttcataggctttaccccctgtggtgaaaggatgatgatttacgtaaaaaactaaccattaaccctagaattggaacacaaacaaaagataattggaaatcttgccaatttaactcttagtataagaaataagatccaggggttaggagtcatgtggatttgagttcaagtctcagctctgcctctttccagatctgtgaccttgggtaactctctaagcctgctttcttcatctgtagagtgagataacaacagtgtacaactcagagcattgtggtgaggattaaatgagataatgcatcaaagggcttatcatagtgcttgtcaaatgctagttactgttacctttattatttttattattatatctgcaataataaaaaaaacacattgacacatcaaaattattcagcaaacaattactcactacctgctacaggttatgctccaaagacactgtagatattacactatttctgcccttaaggacacatactgaactgaaatgatttgcttgtatatgatctcctctgcatgacaatgaggcccttgagggcaggcactgtgtcttatttagttttcacttttagtttaatgagcaactctgaaacaaagggctgctcttgccagtcactgttaagctgcctacagagtaatgtccaagcttccacccagcccttcatgagtggtctctgcctatctctctgccatctctgttctcctttgtatattaagctccctccaaactactcagttatagactcctg

SEQ ID NO: 57827 - DNA, 1013 bp, Homo sapiens
ggcagaggcagagtgtggcaaattaaagggcacctgcctcatctagaggcagcctctacccagcacgagcaggttagtgccaagagaggaagagaacccagttttgtcagatctccaactatcaaagaaagctggaaacctggcttttaagttatacttaccaattttgtaagaaaaaaaaaatcaggtcgagctaaacaccttaccactgtgggacagatccacccatcctcctccgggcttctcaatagttcatgtcatagggaaacctggctctttatttctaggaaccttaaaaacargtctataaatgccaccattcgctccagtattacatttggagtctttctgaatggtggcaccacctaagtctgcagaaggccgattctgtgggttattttagaagagccagtgggtttctgaaagctttgtatgaatgctaaaggttagtatgtctcttacaccagatttgaaatcctgtacaaataagtcagtggagcactaatgaaaaaactactgtgatagggcctgtgctgctccgattagacattagcggctgcatcaagaagagaaatacctgaagattagcacagtaatttgtttctctacacctgaatcatttaatctctgtccttaagcaagcagtggtctatggatatggtacagaattaaaattgcatttataaagtgatttccaaaagacttaagtttttaataaacagatggatcatttaaatatagttaatacaccccccccccaccttattaccttaaatattctctacttagaaattgtaaatattcactgtctcaattgtgagaaggttggaataccaggtaatattatgtaatgttttcatagttaatatttgtaacataagacctacatattgtgaaatagaagagtttaaaccaaaataatctattcttgtaattcaggacatctcaattccatcaatttaaagaattatttaaatgttgcagccaattctaactattataattctatacca

SEQ ID NO: 57828 - DNA, 674 bp, Homo sapiens
atgtttgctatgggagtctatttaggcattatgggatgttaactcaagatgttttgggaactgttgccttagtatggaaagcttatgactcactccccacaaaatagtctaattattttatatctccagtaaactttttattggatatggttttacaaaatttacttagccatcttacttagccctgcaataactgacttttgactggttccaaaacagaaattgtcttcataggaaaaggatttgctcttgttgtgaatatttcaaagagtgctctagatatgctcatgtaaattccagaacctcaggtctaaaaatattctggaaaaatacccgatcattggcataaatgtgtaatatcctaagatgactgatttgaaagagtgtacactcatttgggtgtataaattctggtttatttgtgcacaaaacatccctctacaggaaggtaattatgatcgtaagctttggagcttgactacctgggcttgaatctcaggtagtyaccatgctaccttgaaaaagttatttaagtcttttctgtctcagaaacttaatatgtaaaattataatgatggttgtaatagtacctatttcattggattgagatgcaagtgtattaatatacatttcctaataaatgatagttcttattaatattatttaaaaatgca

SEQ ID NO: 57829 - DNA, 1105 bp, Homo sapiens
ggctgttgctctccctgacttctgctattaaagcttttgtcagagtggataaattaaactctctgagcttgagtatagattgtctttggctctggctgttgcaatttgaaacgttacccaagtttccagtaaaaaatcagggcctagaagagggagcctgtgggtttcttttttctgtcaagatttatcctctttggtacttgtggttgttcaggtaaacttaatagtgagataataactagatacatccgtttcacttggtattggagacacaagcaaggagatctatgtcatttggtctgtcaatccattaggaataatcaggtaaatttagaaagaaaaatctctaagccctgcctcaaaaccgtggcatcagaattttctggaatggagcaatgtttatgtgaaattaagttttaaaaacttcatgagtgattctgatgcacatcctggataagaatggatgatgctttactaagcttccctggtgatttaaatgtccctgccctccaaggagtcacatgaaactccaactagagttacagtcttaacaattccctcacagctcatcatctgaaagttgagaaaaagagtcaaggagggtaagcagccctcatccccatcccacacagcttcccagtggcagcgccagagcctcaacccatgtctttgaatgaatggtacagagggaaggcagaattgatcatggcaggaccaatcagagagagagaacttccagcaataaggaaagtcctgaacaggctttaaaaaaggaaacraatatggatagttccaaggcagacaggtctatatggaggaaaaagtaaggcatcccctcctccaacgtgccgcctccatagctatgatgaatttttccagtgaaggtaaactctacctggcaggattgctggaagaatgggagggtaacatctggtgaaggataaaaatagaaagtattattgggctttctgaggctgcttacttgaaagaagagcataaataattcctttgcccagagcccttatctgttctttatgcctttgactgtgggtgtgcagcaggtggggagagagaaggggctggtgaggaaatttctcatcagtgg

SEQ ID NO: 57830 - DNA, 861 bp, Homo sapiens
ccttataatatgatgtggcaaccatgaatattttaaaccatgctgcccaggaaaaaataccagggaccttcttatgatggtaatattaaactcaagtctttggttattggttgcagagggttatgtcaagtccatatgacaaacagtgatcaagatggagagctacgtttgtccctttcttgacttgtaaactttctcaattttcatttcatttttatttatttttattttattttattgagacaaggtctctcactctgttacccaggctggagtgcagaggcacaatcatagctcactgcagactcgacttcctgggttcaagcagtcctcccaccccagtctcccaagcagctgggactaaaggtgcacaccaccaagcgcggctaatttttaaaaaatttttttaggccgggctcagcggctcatgcctgtaatcccggcactttgggaggccaagttgggcagattgcctgagctcaggaattcgagaccagcctggggaacatggcgaaaccccgtatctactaaaactacaaaaaattagccgggcgtggtggcgggcacctgtagtcccagctgctgggggtgctgaggcaggagaatcgcttgaacctgggaggcggaggttgcagtgcggcgagatggcaccacttctctccagcctgagtgacacagtgaggctctgtctccaaaaataaataaataaaataaattttttttttgtagtgacagrgtctcaccatgttgcccaggcgaaacttccttaatattttaaaagaattacaaatatcctattaatttatttttcaatatttatgcagtagaactatctggaaagtctttgtctgaaataacatg

SEQ ID NO: 57831 - DNA, 1279 bp, Homo sapiens
tcagcaggtttttaaaccaaaatctataaaggcttcattcagaacctttgctcagatctagagacctggtcctaattatttcctattggtttctttatagaccccagaagaaaatatcatgtgagactcctggcttacaacaacatagacgatggctatcaggcagatcagactgtcagcactccaggatgcgtgtgtaagtgaaagccatggcagtttgttttactatggctcacaccgttctttctcctcctcctcctttaagttacagtctcactactacttggaagctttggtggcttaatttmtatcctctgtgctgtatagcgtagtttttttgttttgtttgtttgtttgttgcctcccgggttcaagcgattctcctgcctcagcctctcgagtagctgggactacaggcaccaccaccacacctggctaatttttttttttttgtatttttagtagagacggggttttcaccatgttggccaggctgttctcgaactcctgacctcaactgatctacccgccttggcctcccaaagtgctgggattacagacgtgagccaccgcacctggctgaagtatcttaaacaaataggtgctcagtaaatatttaagtaagatatattgaattataagtcctattttcattttgcatacaaaagaccattagacatttaactgaggaaaataaccactgaatatctacataccaaattttttaaagtctgcttttccctcgaggctgtttctctccaattgctgttcacttgtactgctcctaagaaggatgttctagtcttaagtcccccactggttttctcagtgtctttggctagtagcctgacttctctgtgcttctgccttccaatctgttaccagtaatatagtcacgcacagcagaatgacatttctgtcaacaatggaccacatatgtgacagtggtcccataaaattataatggaggtgaaaaattcctatcacctatgacattgctgttacaatctcatagagcaacctgttaccatttctctgtttggatatgtttggatacacaaataccattgtgttacagttgcccacagtatttagtacaatatcatgctatacagttttatagcctatgggtgataggctgtaccataaagcccaggtgtgcagtaggctataccatctaggtttgtgtaactgcactctgacagccacagaatgatgaaatcccctgatgaaaaacctaacacatttcttagaatgtatgcctgttctttagtgatgc

SEQ ID NO: 57832 - DNA, 1279 bp, Homo sapiens
tcagcaggtttttaaaccaaaatctataaaggcttcattcagaacctttgctcagatctagagacctggtcctaattatttcctattggtttctttatagaccccagaagaaaatatcatgtgagactcctggcttacaacaacatagacgatggctatcaggcagatcagactgtcagcactccaggatgcgtgtgtaagtgaaagccatggcagtttgttttactatggctcacaccgttctttctcctcctcctcctttaagttacagtctcactactacttggaagctttggtggcttaatttctatcctctgtgctgtatagcgtagtttttttgttttgtttgtttgtttgttgcctcccgggttcaagcgattctcctgcctcagcctctcgagtagctgggactacaggcaccaccaccacacctggctaatttttttttttttgtatttttagtagagacggggttttcaccatgttggccaggctgttctcgaactcctgacctcaactgatctacccgccttggcctcccaaagtgctgggattacagacgtgagccaccgcacctggctgaagtatcttaaacaaataggtgctcagtaaatatttaagtaagatatattgaattataagtcctattttcattttgcatacaaaagaccattagacatttaactgaggaaaataaccactgaatatctacataccaaattttttaaagtctgcttttccctcgaggctgtttctctccaattgctgttcacttgtactgctcctaagaaggatgttctagtcttaagtcccccactggttttctcagtgtctttggctagtagcctgacttctctgtgcttctgccttccaatctgttaycagtaatatagtcacgcacagcagaatgacatttctgtcaacaatggaccacatatgtgacagtggtcccataaaattataatggaggtgaaaaattcctatcacctatgacattgctgttacaatctcatagagcaacctgttaccatttctctgtttggatatgtttggatacacaaataccattgtgttacagttgcccacagtatttagtacaatatcatgctatacagttttatagcctatgggtgataggctgtaccataaagcccaggtgtgcagtaggctataccatctaggtttgtgtaactgcactctgacagccacagaatgatgaaatcccctgatgaaaaacctaacacatttcttagaatgtatgcctgttctttagtgatgc

SEQ ID NO: 57833 - DNA, 1328 bp, Homo sapiens
atacacaaaaacattatttacttagtttttattaatcacttcatcactagagcaaattttttattgtctttgcttgctgtcttaaatgagaataatgtatatgggggtgctttagaaacataaataaatgttagttgttgttatttatcacaaacataaaagcctcttgaaacttcaaaataatatataacaaatgtaggcaagttttaacttttaaaagttagaatcattgaaaaacrtgtatttcagtgctgaactttggttgtaccatattaaagatttagttcaaaaagtttatcaaggatccatttaacacgtcttcacaacataatatatgtaactgtaacatgggggaaagcatacatttttatggattaaaaaaataatagtatgacaccagattcctcctccactagggtctttggaatcaatgaatttcatatttcaagtgagttttcaggatatctgtttgtacagatacgagacagatcttagcatatagtaaattctcagtaagtattgttgattaacttgtggatggtaccacatgaaattgctaatattagatcagttgaaaattgactgcaattagtaaagttggtataacgtacgttcccagttgtgctatttagaattatgatagtattatgctcctacttttctttgatattgagttgtcttggtattgtttattgttttccagagaaatactatagtatccacagaagaattgtgaatacttttttataattttgaactgggacatattgcagatgaggaaggtagaaacatccatttggccttagagggctctgctagtaaaagaactactcagtggtggtttgaaaaatcttgttctggggatctgaatttcaaaaatgaaccctaggggagatcaaaatccattttaaacaaagatcaattaagagccaaagtgaaatctaacttgcaaacaacaatttgaagccttgcagcagacttaaggaattcccgctctgactggggaaaagtataaaaatggacctgagagtaccctcttgagggatgatcaagaatggagacagttggaggtgtgctcattaagattcaaaacagcagaaatccatttttggagcagattataacctgtggccaaaaaaaaaaaatgtgtgctgtttgacaactaatggcaatttatacaatcattggaggctggtaaagctccctaatatgttgccaccattatcattgcaaccaaaaaaattctgaagattgtgtggtgatctacgaaagagataaataattactgttatttaaacccaagtgaaacaatgacggcagcagcatat

SEQ ID NO: 57834 - DNA, 1328 bp, Homo sapiens
atacacaaaaacattatttacttagtttttattaatcacttcatcactagagcaaattttttattgtctttgcttgctgtcttaaatgagaataatgtatatgggggtgctttagaaacataaataaatgttagttgttgttatttatcacaaacataaaagcctcttgaaacttcaaaataatatataacaaatgtaggcaagttttaacttttaaaagttagaatcattgaaaaacatgtatttcagtgctgaactttggttgtaccatattaaagatttagttcaaaaagtttatcaaggatccayttaacacgtcttcacaacataatatatgtaactgtaacatgggggaaagcatacatttttatggattaaaaaaataatagtatgacaccagattcctcctccactagggtctttggaatcaatgaatttcatatttcaagtgagttttcaggatatctgtttgtacagatacgagacagatcttagcatatagtaaattctcagtaagtattgttgattaacttgtggatggtaccacatgaaattgctaatattagatcagttgaaaattgactgcaattagtaaagttggtataacgtacgttcccagttgtgctatttagaattatgatagtattatgctcctacttttctttgatattgagttgtcttggtattgtttattgttttccagagaaatactatagtatccacagaagaattgtgaatacttttttataattttgaactgggacatattgcagatgaggaaggtagaaacatccatttggccttagagggctctgctagtaaaagaactactcagtggtggtttgaaaaatcttgttctggggatctgaatttcaaaaatgaaccctaggggagatcaaaatccattttaaacaaagatcaattaagagccaaagtgaaatctaacttgcaaacaacaatttgaagccttgcagcagacttaaggaattcccgctctgactggggaaaagtataaaaatggacctgagagtaccctcttgagggatgatcaagaatggagacagttggaggtgtgctcattaagattcaaaacagcagaaatccatttttggagcagattataacctgtggccaaaaaaaaaaaatgtgtgctgtttgacaactaatggcaatttatacaatcattggaggctggtaaagctccctaatatgttgccaccattatcattgcaaccaaaaaaattctgaagattgtgtggtgatctacgaaagagataaataattactgttatttaaacccaagtgaaacaatgacggcagcagcatat

SEQ ID NO: 57835 - DNA, 1328 bp, Homo sapiens
atacacaaaaacattatttacttagtttttattaatcacttcatcactagagcaaattttttattgtctttgcttgctgtcttaaatgagaataatgtatatgggggtgctttagaaacataaataaatgttagttgttgttatttatcacaaacataaaagcctcttgaaacttcaaaataatatataacaaatgtaggcaagttttaacttttaaaagttagaatcattgaaaaacatgtatttcagtgctgaactttggttgtaccatattaaagatttagttcaaaaagtttatcaaggatccatttaacacgtcttcacaacataatatatgtaactgtaacatgggggaaagcatacatttttatggattaaaaaaataatagtatgacaccagattcctcctccactagggtctttggaatcaatgaatttcatatttcaagtgagttttcaggatatctgtttgtacagatacgagacagatcttagcatatagtaaattctcagtaagtattgttgattaacttgtggatggtaccacatgaaattgctaatattagatcagttgaaaattgactgcaattagtaaagttggtataacgtacgttcccagttgtgctatttagaattatgatagtattatgctcctacttttctttgatattgagttgtcttggtattgtttattgttttccagagaaatactatagtatccacagaagaattgtgaatacttttttataattttgaactgggacatattgcagatgaggaaggtagaaacatccatttggccttagagggctctgctagtaaaagaactactcagtggtggtttgaaaaatcttgttctggggatctgaatttcaaaaatgaaccctaggggagatcaaaatccattttaaacaaagatcaattaagagccaaagtgaaatctaacttgcaaacaacaatttgaagccttgcagcagacttaaggaattcccgctctgactggggaaaagtataaaaatggacctgagagtaccctcttgagggatgatcaagaatggagacagttggaggtgtgctcattaagattcaaaacagcagaaatccatttttggagcagattataacctgtggccaaaaaaaaaaaatgtgtgctgtttgacarctaatggcaatttatacaatcattggaggctggtaaagctccctaatatgttgccaccattatcattgcaaccaaaaaaattctgaagattgtgtggtgatctacgaaagagataaataattactgttatttaaacccaagtgaaacaatgacggcagcagcatat

SEQ ID NO: 57836 - DNA, 1965 bp, Homo sapiens
ctttatgccaaatacatattttaactctttttagctgggtgtagtcccaacaaacagacttgttagtgagcgtttgcaaaaaaaagaaaaaggggagggagtctgggggagggatagcattaggagaaatacctaatgtaaattatgagttgatgggtgcagcaaaaccaacataggcacatgtatacctatgtaacaaacctacacgttgtgcacatgtmccctagaacttaaattaaaaaaaaaaaaaggccaggcgcagtggctcacacctgtaatcccagcactttgggaggccaaggcgggtggatcacgaggtcaggagatcgagaccaccctggctaacacggtgaaaccccgtctctactaaaaatacaaaaaaattagccaggcatggcggcgtgcacctgtagtcccagctgctggggaggctgaggcagaagaatggtgtgaacccaggaggtggagcttgcagtgagccgagattgcaccactacactccagcgtgggtgacagagcaagactccgtctcaaaaaaaaaaaaaagagtagttaggcatcaattatttcaaaaccaaactgtttttatggcaacatgcgatagtatttaaacaaccaatcttaaatagttatatgaaaacaatatctctgctattaaagatatacagtataactgacacgaaggagttaatttccatgaatcacatattaatattgatcccattgttcttacaataagaccattcatttagtttgtggttaaccatgctgataggctctgagtcataaaattcttgataaaataatggaccagattttctccccaattttgaaaacaattttaatcacttttaggaaacttttaaagtaatctcttctaaatttattaattcattcaatgaatatgcattcagtgtctagtatatgctaggcgccaaggatctaatgaggaacaaaactaacagaggttttattctcagggatctttgttaatggtggagaaaagcatttaattaaattactatccaagtgtaataaattcaaactgtgataaatgctatgaagaaaaaggacagagcacccccaaaagctgagcattgcaaaagtacagagaatcccaaattcaaaaatccaaaatgctccaaatctggaacttttttagcactgacatgatgctcaaaggaaatactcattggaacatttcagccttttggatttgggatgctcaaccggcgtaatgcaaatattacaaaatttaaaaaaaaatgtgaaatctgaaacacttctcgttccaagcatttcagataaggaataatcaacccaaattataaaagcaaataacagaggtttgaagcaatttaataaagacagaaataacaataggttaacatttattgccagtgctgcattgagcacattacatattccagcttatttagttctcaaaactattactcacccaattttcagttaaggaaactggacagggaaattaagcaacttgcccaaagtttgcagctagtaagtggtgatactgggatctgaatccaggtagtcaacttccaagacccttatgagtaaaatttgagttccccaaactttctgtagaagatacaaattacaggttctaggccaggcgcagtggctcacacccgtaatccctgcacttcaggtggatcacctgaggtcaggagttcgagaccaacctggccaacgtgatgaaaccccatctctactaaaaatacaaaaaattagctgggtgtggtggcaggtgcctgtaatcccagcttctcaggaggctgaggcaggagaattgcttgaacctgggaggtggaggttgcagtgagccgagatcgcaccactgcactccagcctgggaaacaagagtaaaactctgtttcaaaaaaaaaaaagtacaggttctactcctaagcaattctgctgctcagtataaagtgaaatgca

SEQ ID NO: 57837 - DNA, 748 bp, Homo sapiens
atatagttctgaggtttctggccygtaaaggttgggggatacaatgttgcctgaatcagaacataggaagagagatcagatggtctgctgaataaccattccaaactctcatttgatcagaatgagaagacactggacatgttaaggcaaactgggaaactgtaaaattggccatggactaataacagaaacaacttaaaatatatattcatcttgatttaagtgttttttttttaatttttgatttacagctgttctacaatgataagtcttgattttttcactaatggctcatacgtaaggctatcattaagatttacagaaagacatctttgagattctgtaacagcagcctaaaaaaacagtgtttactgtttttccaattttaatgcaatctctttttttttttttttttttttttgagatggaggctcactctgttgcccaggccggagtgcagtcgtgcgatctcagctcactgcaacctctgtctcccgggttcaagcaattctcctgcttcagcctccccagtagctagaactacaggtggatgccaccacggccagctaattttttttttttttgtattttcagtagagacggggtttcaccatgttgtccaggctggtcttgaactcctggcttcaagtgatccactgccttggcctcccaaagggctgggattatctttcgtgagccaccgcgccaagccaaggatatttttttaaaagactaagtggcagggtgt

SEQ ID NO: 57838 - DNA, 683 bp, Homo sapiens
tcccacttcggcctcccaaagtgytgggcttacaggtatgagccaccgcgcccgaccgataaacatttttgctaacagatttaaactagcgtctcctgtaccttttttctacacacctcgaccccagggctgcagttctgcctgcctgaggtcggatgcggtcggctgcagggcagggctccgggctgaagcgcagcgattcccgccgccgtgagggggcgctctgcgggcctcggcctcggcccttccggacgcccgcacaggtcgccggacccagagagtcggcccttaatagccccctcctggaagcgctaggtcccgaaactggccttcccccggggcccatctcccggctaatgtttaacccggccacactccacattatccacactcaggagaccggggtgaggtgagggtggaggctgggggaggtcacctccaaatcgccaacttccgagcctttgctccaggcaaacggccttcctacatcccttccaggtatcaacctacagctcctgcgcacctactatgtgcccatttccacaacaggtcatgagcacctaatatgtgttcattagaccaaaacatgagcatccattacgagtccacacctactatgtgtgcattcacccacaacgtcctgagcacctactatgtgtgcattctcttaaaatgcaatgagc

SEQ ID NO: 57839 - DNA, 1316 bp, Homo sapiens
gcatataaatgggatttgcttgatctgaatctaagaccatagagcagttacaatattgagaaattcttatttgtgatattttggggagaaaatcaacttttatgttgctaataaggtctcatgggggtagagaggtgattgataaggtattgggcttctttctgagataatgaaaatgttcaaaagttgcctgtggttagggttgcacatattaatgaatactcatacactgacagggattcattctgagaaatgcgtcattaggtgatttgattgttgtgcaaacatcatagagtgtacttacaaaaacctagatkgtgtagcttaccacacacctaggatatatggtagagcctattgctcctaggctacaaacttgtactgcatgttactgaactatatactgtaggcgactgtaacacaatggtaagtatttatgtatctaaaatacctaaacatagaaaaggtacagtaaaaatacagtagaaaacataaaaagtggtacacctgtatggggcacttaaccatgaatggagcttgcaggactggaagtttccctgagtgagtcagtgagtgagtgttgagtgaatttgaaggcctaggacattattgcacacctctataaactataaacaatgtacgtttaggctacactaaatttataaaaaatatttttccttcaataaaattaaccttagcttactgaaactataaacttttaaatttttaaaaaatattgactcttgtgtaacaacacttagcttaacacacacattgtatagctacacaaaatgttttcttcctttatgtccttattctacaaactttttctatttttaaaatttttactttttaaactttcttgttaataaactaagaaacaaacacacacattaacctaggcctacaaagggtcaggatcatgaagacatcaccaagtgacaggaatttttcagctccattataatcctatgggatgactgttgtctatggggtcagttattgaccaaaacgtccttatgtagcgcataacacatcacaattcaaaaaaccattgaattgtactctcaaactggtgcattttatgttatgtgaactatatctttataaagctatttctaaaaaaggactgagaattccataaaatgtttcatttgttggtggaatggcttcattaatatattttaaaataattctcatagcatcctatgatatttgactcaaatcaatattgacttattcatgactttgcttataccctgttctctgtccagagacctattactggagtctgacacaattttgatctgtaatgc

SEQ ID NO: 57840 - DNA, 1316 bp, Homo sapiens
gcatataaatgggatttgcttgatctgaatctaagaccatagagcagttacaatattgagaaattcttatttgtgatattttggggagaaaatcaacttttatgttgctaataaggtctcatgggggtagagaggtgattgataaggtattgggcttctttctgagataatgaaaatgttcaaaagttgcctgtggttagggttgcacatattaatgaatactcatacactgacagggattcattctgagaaatgcgtcattaggtgatttgattgttgtgcaaacatcatagagtgtacttacaaaaacctagatggtgtagcttaccacacacctaggatatatggtagagcctattgctcctaggctacaaacttgtactgcatgttactgaactrtatactgtaggcgactgtaacacaatggtaagtatttatgtatctaaaatacctaaacatagaaaaggtacagtaaaaatacagtagaaaacataaaaagtggtacacctgtatggggcacttaaccatgaatggagcttgcaggactggaagtttccctgagtgagtcagtgagtgagtgttgagtgaatttgaaggcctaggacattattgcacacctctataaactataaacaatgtacgtttaggctacactaaatttataaaaaatatttttccttcaataaaattaaccttagcttactgaaactataaacttttaaatttttaaaaaatattgactcttgtgtaacaacacttagcttaacacacacattgtatagctacacaaaatgttttcttcctttatgtccttattctacaaactttttctatttttaaaatttttactttttaaactttcttgttaataaactaagaaacaaacacacacattaacctaggcctacaaagggtcaggatcatgaagacatcaccaagtgacaggaatttttcagctccattataatcctatgggatgactgttgtctatggggtcagttattgaccaaaacgtccttatgtagcgcataacacatcacaattcaaaaaaccattgaattgtactctcaaactggtgcattttatgttatgtgaactatatctttataaagctatttctaaaaaaggactgagaattccataaaatgtttcatttgttggtggaatggcttcattaatatattttaaaataattctcatagcatcctatgatatttgactcaaatcaatattgacttattcatgactttgcttataccctgttctctgtccagagacctattactggagtctgacacaattttgatctgtaatgc

SEQ ID NO: 57841 - DNA, 1316 bp, Homo sapiens
gcatataaatgggatttgcttgatctgaatctaagaccatagagcagttacaatattgagaaattcttatttgtgatattttggggagaaaatcaacttttatgttgctaataaggtctcatgggggtagagaggtgattgataaggtattgggcttctttctgagataatgaaaatgttcaaaagttgcctgtggttagggttgcacatattaatgaatactcatacactgacagggattcattctgagaaatgcgtcattaggtgatttgattgttgtgcaaacatcatagagtgtacttacaaaaacctagatggtgtagcttaccacacacctaggatatatggtagagcctattgctcctaggctacaaacttgtactgcatgttactgaactawatactgtaggcgactgtaacacaatggtaagtatttatgtatctaaaatacctaaacatagaaaaggtacagtaaaaatacagtagaaaacataaaaagtggtacacctgtatggggcacttaaccatgaatggagcttgcaggactggaagtttccctgagtgagtcagtgagtgagtgttgagtgaatttgaaggcctaggacattattgcacacctctataaactataaacaatgtacgtttaggctacactaaatttataaaaaatatttttccttcaataaaattaaccttagcttactgaaactataaacttttaaatttttaaaaaatattgactcttgtgtaacaacacttagcttaacacacacattgtatagctacacaaaatgttttcttcctttatgtccttattctacaaactttttctatttttaaaatttttactttttaaactttcttgttaataaactaagaaacaaacacacacattaacctaggcctacaaagggtcaggatcatgaagacatcaccaagtgacaggaatttttcagctccattataatcctatgggatgactgttgtctatggggtcagttattgaccaaaacgtccttatgtagcgcataacacatcacaattcaaaaaaccattgaattgtactctcaaactggtgcattttatgttatgtgaactatatctttataaagctatttctaaaaaaggactgagaattccataaaatgtttcatttgttggtggaatggcttcattaatatattttaaaataattctcatagcatcctatgatatttgactcaaatcaatattgacttattcatgactttgcttataccctgttctctgtccagagacctattactggagtctgacacaattttgatctgtaatgc

SEQ ID NO: 57842 - DNA, 528 bp, Homo sapiens
acctggctaatattttgtaactttagtagagatgggatttcaccatgttggccaggctggtctcgaaatcctgatcttgtgatccacccgcctcggcctcccaaagtgctgggattacaggcgtgagccactgcgcccggcccccattttcttatacatccccctgatgcagagctcaggcacactacagttwccatgggcacacattgtggtgagtgttttgtgagttttgtggagatccctgaagatttcagggatatctcaagagagttcattctgttgccaggctcatccttttgtcctttgacttctcacacccagattctcttggggctccacatttctctctctgcacttggactacctaacttcacctggcccgagtgaatccctcttccccgccaagaaacacactccctcgccaacatccactcactgcctaagcctgggaccggtcatccttctttccttctctctctctctgtgtctcatgtccaaataccaagtcatatctaccctaaatacctc

SEQ ID NO: 57843 - DNA, 528 bp, Homo sapiens
acctggctaatattttgtaactttagtagagatgggatttcaccatgttggccaggctggtctcgaaatcctgatcttgtgatccacccgcctcggcctcccaaagtgctgggattacaggcgtgagccactgcgcccggcccccattttcttatacatccccctgatgcagagctcaggcacactacagttaccatgggcacacattgtggtgagtgttttgtgagttttgtggagatccctgaagatttcagggatatctcaagagagttcattctgttgccaggctcatccttttgtcctttgacttctcacacccagattctcttggggctccacatttctctctctgcacttggactacctaacttcacctggcccgagtgaatccctcttccccgccaagaaacacactccctcgccaacatccactcactgcctaagcctgggaccrgtcatccttctttccttctctctctctctgtgtctcatgtccaaataccaagtcatatctaccctaaatacctc

SEQ ID NO: 57844 - DNA, 264 bp, Homo sapiens
aaaaccaagttttcttaatataactcrtaagtcatgatagtccaaagggaagtgcccctcctcaccctcactttattctgcttagaaactgtcttgattattcttgcctttattcttccataggaattttaggataatatgatcaaatgccatgagcactctatgttgatctgaagtaaactggtatcctttttttttttttttttttttttgagacagagttttgctcttgttgcccaggctggagtgcaatggtgcaatctc

SEQ ID NO: 57845 - DNA, 264 bp, Homo sapiens
aaaaccaagttttcttaatataactcgtaagtcatgatagtccaaagggaagtgcccctcctcaccctcactttattctgcttagaaactgtcttgattattcttgcctttattcttccataggaattttaggataatatgatcaaatgccatgagcactctatgttgatctgaagtaaactggtatcytttttttttttttttttttttttgagacagagttttgctcttgttgcccaggctggagtgcaatggtgcaatctc

SEQ ID NO: 57846 - DNA, 1286 bp, Homo sapiens
aaatcaataatacagactagaaagtcaaaccaaatacatatgggaatttagtatacgatataaactacacccttagggaaaatgcggactattcatttaatgatattgagacaagtggatcatcttattaaaaaaaagctggatctcaggtcttacaccaaaataaattttaggtagattaaatatataaacatgaaaaggaaatcatacaagtagtatataaaaatgggagatttaactaataatatcagaatggggaaggctcttctaagaaaccacgcccacacacaaattagtaaattcgacaaaacagaaacaacaaaaaattttgtgttaaaagtaacactaaatcaaaatgaaaagataaaaggcaaacacaaaattgacaaggatgcttgcaacttgtgtaactgataaagggctattttcctgaatatatttctctattctataattactttctttaatatattttaaaaacttctgtaagtaagtatgaaatagacaaatgataagaacagttatcagaaaatgaaatacaaatgattcaaacatgaaaagatgctcgagctcagtctataataatagacccttaaaagtataatgaaatatctttttttaaacccctatctgattagcaaagaccagcaagttggaaaaacagagggctttttcaaagatcaagcttgtgagccaaactaaaggattctgtgctttcaagaattacactgtttagagtttggactttttgaaaaaaatgtacatgtctatgaaataaattggccttttaaaaaagagtttgcagcaatgctgaaagtagtggccaaaagcatgatcaagagataggatattcatctaatctcaaaccatctccctacaagctatttatcaattacaaagtgaaaaatactaactgcacagtggtgaatccaggtagccaccatcctgtcaggaagcccaaaccagccacctggggaaggactggggttctcggccacacacaacacccagtgctgtcatgtgggtaaaggagtcttcasatgattccagcgtttagcctttgagtttttcaactaaggcccctgacatcatggagcggagacaagccatccttgatgttctctatacaaattcctgatctctagaatccacaagcataataaatggctgtttaacggtgctgagtttgggggtaatttgttatgtagacaaagcaaatggaacagggagtgtctgccaaatttctccaccatgttaccattttctcttttgtaagtaataagtaa

SEQ ID NO: 57847 - DNA, 1286 bp, Homo sapiens
aaatcaataatacagactagaaagtcaaaccaaatacatatgggaatttagtatacgatataaactacacccttagggaaaatgcggactattcatttaatgatattgagacaagtggatcatcttattaaaaaaaagctggatctcaggtcttacaccaaaataaattttaggtagattaaatatataaacatgaaaaggaaatcatacaagtagtatataaaaatgggagatttaactaataatatcagaatggggaaggctcttctaagaaaccacgcccacacacaaattagtaaattcgacaaaacagaaacaacaaaaaattttgtgttaaaagtaacactaaatcaaaatgaaaagataaaaggcaaacacaaaattgacaaggatgcttgcaacttgtgtaactgataaagggctattttcctgaatatatttctctattctataattactttctttaatatattttaaaaacttctgtaagtaagtatgaaatagacaaatgataagaacagttatcagaaaatgaaatacaaatgattcaaacatgaaaagatgctcgagctcagtctataataatagacccttaaaagtataatgaaatatctttttttaaacccctatctgattagcaaagaccagcaagttggaaaaacagagggctttttcaaagatcaagcttgtgagccaaactaaaggattctgtgctttcaagaattacactgtttagagtttggactttttgaaaaaaatgtacatgtctatgaaataaattggccttttaaaaaagagtttgcagcaatgctgaaagtagtggccaaaagcatgatcaagagataggatattcatctaatctcaaaccatctccctacaagctatttatcaattacaaagtgaaaaatactaactgcacagtggtgaatccaggtagccaccatcctgtcaggaagcccaaaccagccacctggggaaggactggggttctcggccacacacaacacccagtgctgtcatgtgggtaaaggagtcttcagatgattccagcgtttagcctttgagtttttcaactaaggcccctgacatcatggagcrgagacaagccatccttgatgttctctatacaaattcctgatctctagaatccacaagcataataaatggctgtttaacggtgctgagtttgggggtaatttgttatgtagacaaagcaaatggaacagggagtgtctgccaaatttctccaccatgttaccattttctcttttgtaagtaataagtaa

SEQ ID NO: 57848 - DNA, 662 bp, Homo sapiens
ctggctaatttttgtattattagtagagatgaggtttcattatgttggccaggctggtctcgaactcctgaccttaggtgatccacccgcctcagcttcccaaattgctgggattgcaggtgtgagccaccatgcccagccaaggatgtaccttttaaatcaagctcttttgattagttaaatatttgttgttgcatttatcaactatatggaaagacaggacctaacaggaatggtgtactgagcagatgtgggaacaaaattagatagatacgatattgatggcacatgaggagtgttggtgagatattccttagcctgagatgtgtcatattgatgagttcacacattttctccacccactaatacatctccagcatctagaacaactttamatgatatgagcgcaaaacagaaggggttgagtgacagaaggtaacatgatttgggagagagatgcaagattgggtatttgtggtcagagaatagtgatccacttgaattaaaggattcattaaaatgtttgtagcaggctcaatcatctcaacctttgataattttatcacatacatatgggattatatttagcctgaccaatttcaaagactttatttatgtttttgagacagagtcttgctttgttgctcagggtagattgtaac

SEQ ID NO: 57849 - DNA, 1058 bp, Homo sapiens
aatttaaaaaaaccacaacataagaaaaattatcatctaggggaggggacaaaataggatagagaggcagggctaggagccagatttttaagaagttatcttactttgaagatttgactttcaaaccttgtaaatattttacattcttataaaacaaaattaagtcttaaaaattgaaagtgaaatgaatcaaatgaataaatatgtccacttagtggcataaatacagagagaaaccattccaattgactaatggaacattccctaaagacaaacagaaaaaaattcatcaagtcttttttattaccagtcagtcgtaatagtgttagaattgttatgctggctgggcacagtggctcacacctgtaatcctagcactttgggaggctaagatgggtggatcacctgaggtcaagagttcaagaccagcctgaccaacatggtgaaaccccatctctactaaaaatacaaaattagctgggcgtggcggcacatgcctgtaatcccagctacttgggaggatgaggcaggagaatcgcttgaatctgggaagtggaggctgcagtgagctgaggtcgcaccactgcgctctagcctgggctacaaggagaaactccatctaaaaaaaaaaaaaaaaaaaaaaargacctgttattctaagattgttgcatgtgagctctgggaaatcaaacaagccattgtactggcatctttgagaacctctatttttgacatctctaaaggcaatgttgccataagattgacagggtcaaggacaaaccccaaatcccacatttgtagcacgttagaagcatcagtataaaccctttcctggctctgattcctgaaagggcccagaagtaatgatcaaaccaatagcaggaaacagccagagacctggacagttctggaataggcagaaatgtacaagctgagcttgaagtatcttgttataccaacatcaaggcagtgttcaaacaccacgagtgctgggaataaggacaagttttgagcaactataaggacagtatacctacagcagattgaaactcatcaaa

SEQ ID NO: 57850 - DNA, 542 bp, Homo sapiens
gacgaacccagggattccctgggattcaaagggtacaatgtaccatcctgggggctgacaacatgctcagagatgctaccctcagccctgctatcatgtgtggtcaggttcaaccttatttaggtatcctggggaggcaacagggaccatctgtcaagaactccttaaaaacatgcagagctgctaaggagaaggggcagaaacagccctagaggcatctgcctgggggcggggggctgcctggcctctaggggcaggcagtgaggacgaggtgagccagctaatgatgcatctgagggagagcatgcacaggggacacaggcagggaagcccagagcccagagaagggatctcagtgcagtgttcctagggtgcagggcagaggaggcaagatggggctcaaaggaatgtgagagggctgggccaagactggactgctcagcagctggaacccacagcagactgtgttgggctctctgtctgcgcccactggggccctgatacccacaaaacccctcaaggyaaggaggtccccccaactg

SEQ ID NO: 57851 - DNA, 812 bp, Homo sapiens
agatctttcttaatttattttagcaacttttatagttttcagtgtataagacttgcacctaattgtttgcatatattcctaagtgttttgttcttttagatactactataaatggaattgttttctttatctccttttcagatcaatcattgctagtgtgtagaaatacaactgctttttgtgtgttaattttgttaattccttcaactttgccaatttcatttattagcattaacaacatttttttaagaacactagcagttttggggtataagattatgcaatctgcaaatagaggtagtcttcttcctttccaatttagatgacttttatttctttttcttgcctaatttatctggctggtactcctaataytatgttaaatagaagtgcaaaggtgggcatccttgccttgttcttgatcttaaggggaaaacgttcagtgggcctccttcaatcagttgaaggccttaagagaacaaacattgatgtttttcaaagaacaagggattctccccaagactgcaacatagaaactctacctctgtctgtagcctagcctgtgaaccaattccttaaaacctctctgctctctttctctctctctctcaaacacacacatacacacacacacgcacacacacagatggtccctgacttacaattgtttgacttttgatttttgactatatgctgatgctttcagctgtgtacattaatggtgagtacccatacaaccccattctgtttttcactttcagtatagtattcaataagttatgtaaaatattcaacactttattgtaaaatag

SEQ ID NO: 57852 - DNA, 658 bp, Homo sapiens
acctcattgtatgtgtgtgtgttgtttctaaagacctgtggtatttattattgttagaatgctttcgatgtctttggtggtatgaactgtgaggtatctctgaaggatagcatttcactgtatttcacagaatatacatatacagtccatcaaaactctgggggttatttgcaaaacatagttctcattttccaacaagctttcagcggaagaaagtttcatagaaaaaaatacaaatttcctaccactctactttgtgagaacctaaagagactgttaggttataaaaaagaaaattgagggataaatttaacacttaaaagtgactcttctagcaggaggtttgggcacccagccagattaaggagaagtagctttatacacacatcttaacagcagtctgaatatcmaatcttcactactctttgcttaaagcccagtacctactgagtcatcccagccagcatgtcccttctaacttgtcatcctgtttgttatcactctatgccctctgcagtactctggactttgaatgtgagattactttatttaagtgaactgcaattgaaaaaagaactcttttgattgaatcttgacctgcagtaattgggaacttatgtaaggaccccatgatactcatattaaggggagtgtggga

SEQ ID NO: 57853 - DNA, 579 bp, Homo sapiens
cattctctcacactagaggtagttactatggtacatagtatgagagaggtatcaatttaaagataaagatgaggatacaaacacagaaagttaaagtatctttcaaagcaccataatttgaagccagacagttctagtccaagccaaactactattgtcctctctgctacatattagcagcaaactcatcttactactcttgctgatggcttatatttggtgataatcaagaacaatactgaaaagcatgcttcaaaaatagaaaaaaagcttcatcttccccaaacataattttatttaactgaaaaatatcagtgtgcaaattgaacatttttggtacataaagtcaagtgttactaattaagtaaatgagtgatgaatcataatatcaacccagtcattaaacaaaattataatgaaattacatttaccaactagtttacagtacaraaaatataatgagccaactttaaagaaagcttccaataattttattaaggccttccaataattttatttagttaaggattctgttgtattatcttaaaagattaatacaaatagaaaatggaagagtaa

SEQ ID NO: 57854 - DNA, 558 bp, Homo sapiens
tgcctagaaggaataatattatcattattcatcataaatacccttataactttaaatatacatttcaccctagcattcataatacccattaccctcccagtatttgctgcctgcaaagctgcagtgggcctcgccttactagtttcaatctccaacaygtatggcctagattatgtacataacctaaatttacttcaatgctaaaaattattattccaacaattatactgctatcaataacatgactctctaaaaactcaataatctaaatcaatatgactattcacagcctaatcatcagcttcattgccctattattttttaatcaattcagcaatctattcaacttctcattaactttctcttctgatcgctgacatcaccccttctaatcttaacagcctgactactacctcttataattatagcaagccagtaccacctctccaatgagtcacccctatggaaaaagctctatatttccatattgatttccctataattttttttaaattatagcattcacagtcacagaactaattatattttatatactct

SEQ ID NO: 57855 - DNA, 1096 bp, Homo sapiens
gcattataatcatttataaaaagctttgatgagaaaatatgatgaaataggcacttaaataatactggacatatttattatgtcattaatatatagctactatttttgcacaaaatgtaaaggcaataaggtgacctttggaagcaaagcattatattactaaataatataaacaatataaatacagtacaatatgatataaaataaaatgaacaattagaaataaatttatacaattatatagacaaagtctgagaaaagttgatgaaaatgctgataacattttgtatgcagtaaacttagacatataaatcaaagattttaatatatggtgtgcctattaattatctaattcactttttatataacatatacatttgagtacattagctcagaacctgtgaaattacaggcatagttggtatacagcaaatcagaaagaaagaaaaaaatatatataggacacagccctagtaatcttcatagtaaagaagataaaatttaaaaataatggttattaagaaagaggtaacaatttcgagtttattatatgctggacagtgtcctatggtattagtgttttcatgcgttctgtgagctgagtagatcaaatcaactattccacagtacaggcatttctcatacagcatttaaatttctaagcttagttcctactaaaataaagatactttcraagtgaaatagatgtttagattttcttgtacttaatcagatgctttgtactctgataaaagttatcactttcattttctgtatgatcagttgactggaaattataaagcagaaaacatatgacatctgtccctggcctctctcaaatctcgaccaaatctcaatgtctcccctactcctctcacagatgtctaacataaggcacaaacagatttttaaaaacagcttaacatagtggtctccaaaaatctgcacaaattttccaaatccctcaaagcaacagaagagcagttacattatttagatcctcacagcaaaaatatgagtttgtctctcactgtgaaggcaccagcagattattaaataaactgaagatttagagaattcaaaagcctaataagta

SEQ ID NO: 57856 - DNA, 922 bp, Homo sapiens
tggaggccagtggcagcaccattattccttagggccatcttaggttgaagggaccttgggataatccattccagcctctcctcccagcacacaacgctatgtatctgctggagtcagtgcatggcagcatcagtttctacttcattgcagggcaacaggtaagactccaaagcccatatcaaaaggatgttaagttcaactcctaacttcattcattcccacctatcccaaattcaatgactatttctgctcctgaaagtgtgycctatcctcacctttaggcctagctttttgtatacttgctatacctgcaccctcagccagtctgcaaattcaacactgcctcctccccaaagtttgaactcaaggccctcgccttttctctgtgcacacctcacagactccatgtccaaccaccacatgggtaacgcccaaacctcaagctccaggcctaacttgttgccgaagctctagttccccacctcccactgtctactacacatctctcttcaatgttcagccatccctctctgttggtaggaatcattattatacctatcactttgagacttactgcttgtcaatactttgtaagtgctgccattctaaggtaattctcaattagcccatttaatcttcacaactctttgaggtaggtatacaattatcatccttattttgcagaaggagaaaaatgcaatgttaaataactaaccgaatattatagaatgaatacatgatgatgcagattcaaacccagaagaagcctggctgtaaagtgcatgctcttaacgtgataacagcattgctttgacagacataaaaatgagctcatcacccccatcagaattccccattctagtcacccaggcttggaaccttggagctatcttttgtaaatggccatgtgaaaaaatgactc

SEQ ID NO: 57857 - DNA, 1081 bp, Homo sapiens
tttggaaaattactgctgagattgacctagaggaggggttaactccactctttttaaaggatcaggctgtcttcacactcagtgaaagactcagctgtttgagctgccaggcgtgccccacccagtgctctccaagagctgtgggccaggacgaccactctgcaaatcacagacgcttacttaggcagatgctgctcagggcttgcctctggtgactgcaggagttaagttttaaaggaggggggctacaacttgtgtacctttcagtatgatgttgcctccagtttcctcctggtttgacctgcaccgagcctccctttccagtcctggtctcgactcagaactctttcctagtgcttggctgttccaactcccaccaactctagcatcaaaatgtgccaagacctttactgcatttgttagattattttccttataacattggtactttaaatcagctaatcctgtattatttaacccaaagcatttgaatttccagcgaaccttattttgtcagccttattttgggtatcaccaaccccattttgtaaatgaaggaactcagccttagaaagattaagtgacttgctcacgatcacatagctagctgaggacagaaacgaaccttggccaggttttctcacttccaagccagggctctgtccaggatataaagctgcttcatgtgagatttaggagtgtttgtgacgttctcatgggggttgaatagggaccaggastgcatactttgcacagcaagacattttaaagaaacatcacccagtaacatggaagacaaagtcaccagcagagtgggtgactggctgagtagggagagcactaaactgacagctcagatccggcatcgacttttctccttaaacacgttccactcactccttactttgttgtggataatcatcagtcctatgtattatttgactaccttcattattaatctctttttatgtctctacatattatgggtgataatcacagtacaatggattagtcactgcactttatgacatggtgattaaggtttattagactgtagcatgtttctgagaagagcagtcat

SEQ ID NO: 57858 - DNA, 989 bp, Homo sapiens
aacttccaaaaggtctgaccttttgatgtttttataaaatacttacaaaatgaaaataatgaattcaatgatagtattgcctattcctcgtctcctcccccatctcttatgtgcacacgataagacaatcacagttctcgaaccagggtcctttatcatccatagattcctccaaaatcacttgttttatttatatattcttttatattccacctattgtaaagccttttagtccaatatcctcgcatatgtataagttcttaacatgtagttattatctaatttacctaaatagtattgtgtttatatgtgtgtgtgtgtgtgtgtgtgtgtrtatatatatatatacttcatcctgtttcttactctttccactgtatttaagtcctcttcctcctgtttctgcatgctacgtaatactccatgggtgcatcagccaattgttaatctgtctcctctctcagtaaaaacacacagatggtctccaaactcacatcatgacaaaacacaccagtcaatatccttgcaaaagttcatttacgaccaagagctcagcggacacagaagatgtctgtgtttgcccaagtgctgccagcgtgctttacagaatggctgcattggtctacattcctaccagcaatgcacaaggattcccataccctatgttccacccgtacttaacactatatggctgtccagtttttgttagtctaaacggtagatccataccatggtttgaacatctctgaaaactgatgagtttgaacattcctttatatggcttgttggccttttaggtttctctgcctctcattagctcttcacagactttgttcattttctcactagggttcccgctttttttcactgttgacttgcaggagtttctagttaaatttagacactggaaaatttgttttcccaaaatgtcttctgtatttaactttgacatcttcatcaaacaaaaagcattaatcttgattaattaa

SEQ ID NO: 57859 - DNA, 989 bp, Homo sapiens
aacttccaaaaggtctgaccttttgatgtttttataaaatacttacaaaatgaaaataatgaattcaatgatagtattgcctattcctcgtctcctcccccatctcttatgtgcacacgataagacaatcacagttctcgaaccagggtcctttatcatccatagattcctccaaaatcacttgttttatttatatattcttttatattccacctattgtaaagccttttagtccaatatcctcgcatatgtataagttcttaacatgtagttattatctaatttacctaaatagtattgtgtttatatgtgtgtgtgtgtgtgtgtgtgtgtatrtatatatatatacttcatcctgtttcttactctttccactgtatttaagtcctcttcctcctgtttctgcatgctacgtaatactccatgggtgcatcagccaattgttaatctgtctcctctctcagtaaaaacacacagatggtctccaaactcacatcatgacaaaacacaccagtcaatatccttgcaaaagttcatttacgaccaagagctcagcggacacagaagatgtctgtgtttgcccaagtgctgccagcgtgctttacagaatggctgcattggtctacattcctaccagcaatgcacaaggattcccataccctatgttccacccgtacttaacactatatggctgtccagtttttgttagtctaaacggtagatccataccatggtttgaacatctctgaaaactgatgagtttgaacattcctttatatggcttgttggccttttaggtttctctgcctctcattagctcttcacagactttgttcattttctcactagggttcccgctttttttcactgttgacttgcaggagtttctagttaaatttagacactggaaaatttgttttcccaaaatgtcttctgtatttaactttgacatcttcatcaaacaaaaagcattaatcttgattaattaa

SEQ ID NO: 57860 - DNA, 989 bp, Homo sapiens
aacttccaaaaggtctgaccttttgatgtttttataaaatacttacaaaatgaaaataatgaattcaatgatagtattgcctattcctcgtctcctcccccatctcttatgtgcacacgataagacaatcacagttctcgaaccagggtcctttatcatccatagattcctccaaaatcacttgttttatttatatattcttttatattccacctattgtaaagccttttagtccaatatcctcgcatatgtataagttcttaacatgtagttattatctaatttacctaaatagtattgtgtttatatgtgtgtgtgtgtgtgtgtgtgtgtatatrtatatatatacttcatcctgtttcttactctttccactgtatttaagtcctcttcctcctgtttctgcatgctacgtaatactccatgggtgcatcagccaattgttaatctgtctcctctctcagtaaaaacacacagatggtctccaaactcacatcatgacaaaacacaccagtcaatatccttgcaaaagttcatttacgaccaagagctcagcggacacagaagatgtctgtgtttgcccaagtgctgccagcgtgctttacagaatggctgcattggtctacattcctaccagcaatgcacaaggattcccataccctatgttccacccgtacttaacactatatggctgtccagtttttgttagtctaaacggtagatccataccatggtttgaacatctctgaaaactgatgagtttgaacattcctttatatggcttgttggccttttaggtttctctgcctctcattagctcttcacagactttgttcattttctcactagggttcccgctttttttcactgttgacttgcaggagtttctagttaaatttagacactggaaaatttgttttcccaaaatgtcttctgtatttaactttgacatcttcatcaaacaaaaagcattaatcttgattaattaa

SEQ ID NO: 57861 - DNA, 989 bp, Homo sapiens
aacttccaaaaggtctgaccttttgatgtttttataaaatacttacaaaatgaaaataatgaattcaatgatagtattgcctattcctcgtctcctcccccatctcttatgtgcacacgataagacaatcacagttctcgaaccagggtcctttatcatccatagattcctccaaaatcacttgttttatttatatattcttttatattccacctattgtaaagccttttagtccaatatcctcgcatatgtataagttcttaacatgtagttattatctaatttacctaaatagtattgtgtttatatgtgtgtgtgtgtgtgtgtgtgtgtatatatrtatatatacttcatcctgtttcttactctttccactgtatttaagtcctcttcctcctgtttctgcatgctacgtaatactccatgggtgcatcagccaattgttaatctgtctcctctctcagtaaaaacacacagatggtctccaaactcacatcatgacaaaacacaccagtcaatatccttgcaaaagttcatttacgaccaagagctcagcggacacagaagatgtctgtgtttgcccaagtgctgccagcgtgctttacagaatggctgcattggtctacattcctaccagcaatgcacaaggattcccataccctatgttccacccgtacttaacactatatggctgtccagtttttgttagtctaaacggtagatccataccatggtttgaacatctctgaaaactgatgagtttgaacattcctttatatggcttgttggccttttaggtttctctgcctctcattagctcttcacagactttgttcattttctcactagggttcccgctttttttcactgttgacttgcaggagtttctagttaaatttagacactggaaaatttgttttcccaaaatgtcttctgtatttaactttgacatcttcatcaaacaaaaagcattaatcttgattaattaa

SEQ ID NO: 57862 - DNA, 989 bp, Homo sapiens
aacttccaaaaggtctgaccttttgatgtttttataaaatacttacaaaatgaaaataatgaattcaatgatagtattgcctattcctcgtctcctcccccatctcttatgtgcacacgataagacaatcacagttctcgaaccagggtcctttatcatccatagattcctccaaaatcacttgttttatttatatattcttttatattccacctattgtaaagccttttagtccaatatcctcgcatatgtataagttcttaacatgtagttattatctaatttacctaaatagtattgtgtttatatgtgtgtgtgtgtgtgtgtgtgtgtatatatatatatatacttcatcctgtttcttactctttccactgtatttaagtcctcttcctcctgtttctgcatgctacgtaatactccatgggtgcatcagccaattgttaatctgtctcctctctcagtaaaaacacacagatggtctccaaactcacatcatgacaaaacacaccagtcaatatccttgcaaaagttcatttacgaccaagagctcagcggacacagaagatgtctgtgtttgcccaagtgctgccagcgtgctttacagaatggctgcattggtctacattcctaccagcaatgcacaaggattcccataccctatgttccacccgtacttaacactatatggctgtccagtttttgttagtctaaacggtagatccataycatggtttgaacatctctgaaaactgatgagtttgaacattcctttatatggcttgttggccttttaggtttctctgcctctcattagctcttcacagactttgttcattttctcactagggttcccgctttttttcactgttgacttgcaggagtttctagttaaatttagacactggaaaatttgttttcccaaaatgtcttctgtatttaactttgacatcttcatcaaacaaaaagcattaatcttgattaattaa

SEQ ID NO: 57863 - DNA, 981 bp, Homo sapiens
taagggttcactgagaatttttatacacaagacctacaattatttaatgtacagaaaacagaaaatgacttcttatgctttcactgaaagatcataaaaaaaaactggaaactggctgggggtggtggctcatgcctgtaatcccagcactttgggaggctgaggtggatggatcacttgaggtgaggagttcaacaycagcctggccaacatggtgaaaccccgtctctactaaaaatacaaaatttagctgggcatggtggcacgtgcctgtagtcctagctactcaagaggctgaggcataagaatcacctgaaaccaggaggcggagattgtagtgagctgagatcgcgccattgcactctagcctgggtgacagagtaagactgtatcaaaaaacaaacaaaaaagtggaaattcatattttatatatgtaactctacgatctatcactgataggacacaaaaggaaaatagccttgcattcagcgaaataatgctatggacagcacaggtaggcattttggaacagaaagcaagaagcacttttccgtcaatttagctttccctcggacagctctgcatacacagaactcataagccgatcatgtcctaaaaatcaaataaatgctatgcagcgttctgatgatgtttaaacaaagaataaataagacaaattaacaattaaaatgactttatttgaatttgtcataagcagtcctactgatggatagttatagaaatgaaaaatacgcagccataaaaaagaatgagttcatgtcctttgcagggacatggatgaaactggaagccatcattctcagcagactaacagaggaacagaaaaccaaacactgcatgttctcactcataagtgggagttgaacgatgagaacacatagacacagcgagaggaacatcacacactggggcctatcggggattgaggggcaaggggagggagagcattaggagaaatac

SEQ ID NO: 57864 - DNA, 981 bp, Homo sapiens
taagggttcactgagaatttttatacacaagacctacaattatttaatgtacagaaaacagaaaatgacttcttatgctttcactgaaagatcataaaaaaaaactggaaactggctgggggtggtggctcatgcctgtaatcccagcactttgggaggctgaggtggatggatcacttgaggtgaggagttcaacatcagcctggccaacatggtgaaaccccgtctctactaaaaatacaaaatttagctgggcatggtggcacgtgcctgtagtcctagctactcaagaggctgaggcataagaatcacytgaaaccaggaggcggagattgtagtgagctgagatcgcgccattgcactctagcctgggtgacagagtaagactgtatcaaaaaacaaacaaaaaagtggaaattcatattttatatatgtaactctacgatctatcactgataggacacaaaaggaaaatagccttgcattcagcgaaataatgctatggacagcacaggtaggcattttggaacagaaagcaagaagcacttttccgtcaatttagctttccctcggacagctctgcatacacagaactcataagccgatcatgtcctaaaaatcaaataaatgctatgcagcgttctgatgatgtttaaacaaagaataaataagacaaattaacaattaaaatgactttatttgaatttgtcataagcagtcctactgatggatagttatagaaatgaaaaatacgcagccataaaaaagaatgagttcatgtcctttgcagggacatggatgaaactggaagccatcattctcagcagactaacagaggaacagaaaaccaaacactgcatgttctcactcataagtgggagttgaacgatgagaacacatagacacagcgagaggaacatcacacactggggcctatcggggattgaggggcaaggggagggagagcattaggagaaatac

SEQ ID NO: 57865 - DNA, 981 bp, Homo sapiens
taagggttcactgagaatttttatacacaagacctacaattatttaatgtacagaaaacagaaaatgacttcttatgctttcactgaaagatcataaaaaaaaactggaaactggctgggggtggtggctcatgcctgtaatcccagcactttgggaggctgaggtggatggatcacttgaggtgaggagttcaacatcagcctggccaacatggtgaaaccccgtctctactaaaaatacaaaatttagctgggcatggtggcacgtgcctgtagtcctagctactcaagaggctgaggcataagaatcacctgaaaccaggaggcggagattgtagtgagctgagatcgcgccattgcactctagcctgggtgacagagtaagactgtatcaaaaaacaaacaaaaaagtggaaattcatattttatatatgtaactctacgatctatcactgataggacacaaaaggaaaatagccttgcattcagcgaaataatgctatggacagcacaggtaggcattttggaacagaaagcaagaagcacttttccgtcaatttagctttccctcggacagctctgcatacacagaactcataagcmgatcatgtcctaaaaatcaaataaatgctatgcagcgttctgatgatgtttaaacaaagaataaataagacaaattaacaattaaaatgactttatttgaatttgtcataagcagtcctactgatggatagttatagaaatgaaaaatacgcagccataaaaaagaatgagttcatgtcctttgcagggacatggatgaaactggaagccatcattctcagcagactaacagaggaacagaaaaccaaacactgcatgttctcactcataagtgggagttgaacgatgagaacacatagacacagcgagaggaacatcacacactggggcctatcggggattgaggggcaaggggagggagagcattaggagaaatac

SEQ ID NO: 57866 - DNA, 981 bp, Homo sapiens
taagggttcactgagaatttttatacacaagacctacaattatttaatgtacagaaaacagaaaatgacttcttatgctttcactgaaagatcataaaaaaaaactggaaactggctgggggtggtggctcatgcctgtaatcccagcactttgggaggctgaggtggatggatcacttgaggtgaggagttcaacatcagcctggccaacatggtgaaaccccgtctctactaaaaatacaaaatttagctgggcatggtggcacgtgcctgtagtcctagctactcaagaggctgaggcataagaatcacctgaaaccaggaggcggagattgtagtgagctgagatcgcgccattgcactctagcctgggtgacagagtaagactgtatcaaaaaacaaacaaaaaagtggaaattcatattttatatatgtaactctacgatctatcactgataggacacaaaaggaaaatagccttgcattcagcgaaataatgctatggacagcacaggtaggcattttggaacagaaagcaagaagcacttttccgtcaatttagctttccctcggacagctctgcatacacagaactcataagccgatcatgtcctaaaaatcaaataaatgctatgcagcgttctgatgatgtttaaacaaagaataaataagacaaattaacaattaaaatgactttatttgaatttgtcataagcagtcctactgatggatmgttatagaaatgaaaaatacgcagccataaaaaagaatgagttcatgtcctttgcagggacatggatgaaactggaagccatcattctcagcagactaacagaggaacagaaaaccaaacactgcatgttctcactcataagtgggagttgaacgatgagaacacatagacacagcgagaggaacatcacacactggggcctatcggggattgaggggcaaggggagggagagcattaggagaaatac

SEQ ID NO: 57867 - DNA, 1289 bp, Homo sapiens
gtaacgtttctgagtctcagattcattctttgagaatcagggtcattgtaagaattaaacaacaccaaaaaaccaaaaagctcttaacagagtcctggcacatagtatgtgtttgttccaagatagtaactagatatgggggcgacagaccaaactcctagtaagtgtgtgacttgtcctaagccctcaacaaaacacagcttcagcatattcttctgttccagatctatgtatgtgtaggaactggggttggtactgaggggaaaaagtgagggatagtggatgagaaaaagcaagtgctactcaataactcagccactattgcctacaacttccatttaaggaacaccacaatcttaaaattggtagcagagcccaatttcaaaagttctgtcctagggcccccaactctgtccgctacactcacaaatcacatacctggacattccattttctcagttgcctgggtgactccatttctgaatttacttacctaagtccttgtggaattcttcaggtgacttttaagatggaggaaaatgatcaactataaccaatctttccaggttacaagaagctttctggagactacatgaaaaagagcagaggtgggtctccctagaagcttggttctgagataaatcagtcagctaagagtgagcacagcaaggactctcaggaatttacctgctgtccttgggagcatctgactgcagcagctgggctcctgggctggctccctacaggcaagcagtctctctctggcccaggcccaggcccacccaggctcgccgagctctgtcctgctttcttcttcctcttgatgtaagaaggcattcccttagcaggcaaagggccattggctggaatgtttgctcagcttgtacgcaggtttccactcctgggcaatgcccctgtgacttgcacatctagcttaattgaatgttctcagtaagagaactagatgctccattagatttgtcctcacatggaggccccggggaaagtgtgtcttggagttccttcagccactargtagggctgggtctagtcttaatttttcatgtaaattgtgccccttcttaaggcagaacaggagaacagggggattacaaatcctcatccctcccatggccacaaggactcaaattgctctggtccaagaaggggccctttgcaatccccttgtcctctccaacctcccccaacagttgagagtaggtagtaagctggcagtggtcaatccaaaccacctcttcccaagggagctgttcctgcctctctaccaa

SEQ ID NO: 57868 - DNA, 1491 bp, Homo sapiens
agaggctgtgggagcccaggtgagagtccagggagtgggattcactagggctgggctctaaggagagaagaatggagctgaaggagaggaaaggaggcgctgtggagaagagctcccagtagcccaccacccggtgaaggcctgaggtgggacagcgggaagtacacttaggagctcatcaggagggcaccagggaactgaggaggaaggcgaggaagatcccacagcccagcctgggcttggcagagcacagatgagcactgtgacaccctctacaccccacatttgagcccccacatcttccctgagcactgtgagccctgccatgtgctgggcatgctgaagggaagacaggcaggaggaggaggcccagcctgtgtcctggggagatttcagtcttagtggagcagaaaaggcccacctagcaacacggggctgaaaaaagtgttggacttcagaggcaaggtggtcctgtcatcccagcatagccatgagtgtgccctagactgggacacatgtcgcagatgtgggcacacagaaagtgcagtgggcatcactcatatttggggctgcccaccttcttttgaatagccgtcccatatggggcagttctgtgttatgagcctggcctccccacagtagtgctcagcactctgtttgccccttgctcactgtgtggctctcagcaaatccttcccttttcagggcccctgtgctctcatctgtcacatggggacattaactcaggccttgaatgtagagagctaaggttctaggatccttgtgttccttgccatgctcagctgagtcaggacagtcagcaacagccgaataaaggatttgggagaggagacttatgggagatgggtgtggcgttagtggggccactccctgcaggaggacctccccaccccaggcctcccacctgggcctgctgatcactactgccccctgctgttggggtgaagcctgcaatgcgacacatgcacgagggaggcaggtggagccacatgtgctcccccagctttgcataggagtaagtctgctctctgctccagagagaaatggggcataaaaggacttggggggcagatcctctctctgatccagaaattcactcggggcacagtctagtcccaggctagagagaacgcaaaacatagtgtggttaaygtgtggtgagacatgtcatgggtaaagactactcatgacctcatgccataaataagacaggacacccattcacttatccgtgctccttccatcccaggcctgtagagggaagtggggacccagaaatcagtcctcagcttcaagaagctcataagaacacttggtttcctcatcaactgatcttctcttcatgtgtttatccagaaggctactgtgcatatgaagggttccggattcactcagaggcacaagagacaattgcttgttttcagctatgacatacatttttgcctcttctggaaatattagtcaggaagt

SEQ ID NO: 57869 - DNA, 1360 bp, Homo sapiens
gatggaactggcctttgtcatttttatggaaataaaagaagggaggttttcctcaataaatagaggatataaaataagattataggaataatttttcctcaggcttttcattttaaaaaatttcaaagatacagaatgctgaaagaggaacacttatatcatacatctagatttaataactgttaacattttgccacatttactgtactcagtagactacacatttttcagaattatttgagaataagttgcagacatcagtacacctcacccctaaacacttaaacacgtatctcctaaaagcaaggatattctcctacagaatggtaatacctaagaaagggcaatacttacatactttagtcatactaaatactttaataatactaattattaaatactactacaataataatactactaataataaagtaatacttaagaaaattaataattcctagtttataatatccagtttaaattcaaatatccttgattgtctctaaaatgactttttgaaaagaagcaggatcccatcagagattgacactttgtcaatctgtataaggacaccagtcatagtagattaggggtccaccctacctcattacaacctcatcttaactaataacatttgcaatgactctatttctgaagaagctcacactctgagctactgggggttaggacttaaacatgaattttgaagagggacataattgagcccatagcaactgcaagagattgatattgttatgtctctttagcctcttttaattgacaacatcctcactacttttgttttatgtttttatgacattgactttttaaacagtacagggctattttcttgtaaatagtccayattctggatgtgtctcattgtttcctagcctcctagcctgtcagtgactggctgagcccagggaagcagagcagggaggaattatgtgaatttcatggtaaataaaagttgtgatgtgtggagaggcagaatggtgccttggcagagagcaggacaagcattcaggagacctggcttcaaagcccaaccactgcctaccagttgtctgcctccttggacttccccaccaacccaccatgcataatgggggacaggcccaggtgatgtacatggttagcaaatacagccttagggaagggctcaaaaaaggataggagcccatgagagaacacaacagtaaaattgaaggcaaccccattggccaaaaccggaatgaattgagaaataagtaaacaagaaaagtattgcattataattcataaaataaatatccacgattccttactgatataaaaataaaaattccaaaaataaattgggaagaagggatagttc

SEQ ID NO: 57870 - DNA, 1049 bp, Homo sapiens
ttttyaacaaatgtatcgagcacctatgacaaatcaggaagtgctctaggcattggagatatagtgggaaatgaggagacgagttccctgccagcatagagtttacatgctagtggggagacagaaagtaaacaaatagtttaaggttattttgggtagtggtgagtgctgagaagaaaattaaaagaataatggagtggcgtgtgatgggtggtcagggaaggtttgagggggtgacagtggaacccaggtttgaacgctgactagtattattctggacacaggggacagcaagtgcaaaggttttgggtgtgttcaagaacatgaagccaggtgtgatggctcacacctgtaatcccaacactttgggaggccaaggcaagagggtgacatgaggccaggagttcatgatgagcctaggcaacatagtgaggcttctgcctctacaaaaaatagaaaataaaaaaattagctgggcctggtagcacgttcctgtggtcccagctactcaggaggctgaggggggagaatcacttgggcccaaggatttgagaaagctggtgtgttgggagttgaaagtgtgtgagccggaggggttgggggtgtggtcagggagtgagagtagaaaggtaggcagaaggcaaagcagataccagccttatgctgggaagacaaattaatcctctttgtattctttaaggatcactatggccacagcatggaaaatgaatcataggagggcaagattgcaagcagagaggatgagagacccattaggaggctgctgtgttgtccaggcaggaaatgaccatggcttgggctagggcagtgcctgtggagctggagaaaagaggacagattcagcatatattttgcagataaagctcacggggtttgcagatgaatatgaagtgagaggaaatgatagaaatgaatttgggtcccaggcttaggcctgaataactgggcagatgacaatcccattgcctgaaatggggaagtcaccgggaggagtgagttttggtggggaggtaccaggctggggtggc

SEQ ID NO: 57871 - DNA, 635 bp, Homo sapiens
ttaatacattctggatttgttttccacaayaaattccagagaactgatacaatattctcctaagttgattatcagaattatgacttagaaacttccacccaaagagtcattctgtgatgtacattcaagtgatgccaagaatatagctactgtaggtgtatcatggccatagtgtatggattctgtcttcaaaacaaggattccgtcttcaaaacagattttttaaattgtctcaattgcaacaatacatatgaaaatactttggaagttttaatgagagtacatgaaggaatcattactgtttactactctacaaaggaccagggctcaacttagattggagatacataacaaaggaaacagaaatacagagatgtcccaatttgtatgcacagcaatagcaacattaggttgcagtctgtcctccatcaacccttccctcacccctgccttcagagatacctggtgcctccaacatctgagcatcttcagggagctagggcaggaattgatctttttctctctggctttccctacagactaaggtgtaggctttctcagctctgctaagtcagttatcacttgtccatctggttccagtctgtaaacatttgttgacatctttgatttgttac

SEQ ID NO: 57872 - DNA, 635 bp, Homo sapiens
ttaatacattctggatttgttttccacaataaattccagagaactgatacaatattctcctaagttgattatcagaattatgacttagaaacttccacccaaagagtcattctgtgatgtacattcaagtgatgccaagaatatagctactgtaggtgtatcatggccatagtgtatggattctgtcttcaaaacaaggattccgtcttcaaaacagattttttaaattgtctcaattgcaacaatacatatgaaaataytttggaagttttaatgagagtacatgaaggaatcattactgtttactactctacaaaggaccagggctcaacttagattggagatacataacaaaggaaacagaaatacagagatgtcccaatttgtatgcacagcaatagcaacattaggttgcagtctgtcctccatcaacccttccctcacccctgccttcagagatacctggtgcctccaacatctgagcatcttcagggagctagggcaggaattgatctttttctctctggctttccctacagactaaggtgtaggctttctcagctctgctaagtcagttatcacttgtccatctggttccagtctgtaaacatttgttgacatctttgatttgttac

SEQ ID NO: 57873 - DNA, 801 bp, Homo sapiens
aaaaactattcgctggagattgaacactatgaaattctaaaattgctcttaccctctaataatgggggcaaaactattcagccaagcatcctcatcccttatgactcattcattctytagagaactactcagaatctgaaggcaatataatgctgatggcttattttgccagtcattgagactggtaatagtagaggggatgagagcatggactctggagccagactataagggtttgaataccaactccattatatactgctcttgtgatcttgggtaagctacttaagtcacttaacctctgtaatctccagttttttttatttgtaaaacacggtagttgcaagtaacaagaggtatataaagctcttagaatagtgcttggtgatagcatgccttatattgacctttgctgttaaaattatttaaatggtattatttcaatattaaataaataagacctctttattaatttctaaaattcctgtaattttatactaacttctgttgatgctccaaatatgtctaattgttatctttgtctatttttgaaacctcttattcaccccagtgtactgtcatcctatttcaattacctaccagctaaagtcattgaaattagtccaacaggtcagtctaaaatgatagggtttattttatgctctaagattgattaaaaatcccattattataaatgttgccctaagatacaagtggcaaacataaaaccttgttttttgcttctgaaaattcctatcactgttgttggaagaaggtaagagcaataacctttttgaacag

SEQ ID NO: 57874 - DNA, 801 bp, Homo sapiens
aaaaactattcgctggagattgaacactatgaaattctaaaattgctcttaccctctaataatgggggcaaaactattcagccaagcatcctcatcccttatgactcattcattctctagagaactactcagaatctgaaggcaatataatgctgatggcttattttgccagtcattgagactggtaatagtagaggggatgagagcatggactctggagccagactataagggtttgaataccaactccattatatactgctcttgtgatcttgggtaagctacttaagtcacttaacctctgtaatctccagttttttttatttgtaaaacayggtagttgcaagtaacaagaggtatataaagctcttagaatagtgcttggtgatagcatgccttatattgacctttgctgttaaaattatttaaatggtattatttcaatattaaataaataagacctctttattaatttctaaaattcctgtaattttatactaacttctgttgatgctccaaatatgtctaattgttatctttgtctatttttgaaacctcttattcaccccagtgtactgtcatcctatttcaattacctaccagctaaagtcattgaaattagtccaacaggtcagtctaaaatgatagggtttattttatgctctaagattgattaaaaatcccattattataaatgttgccctaagatacaagtggcaaacataaaaccttgttttttgcttctgaaaattcctatcactgttgttggaagaaggtaagagcaataacctttttgaacag

SEQ ID NO: 57875 - DNA, 801 bp, Homo sapiens
aaaaactattcgctggagattgaacactatgaaattctaaaattgctcttaccctctaataatgggggcaaaactattcagccaagcatcctcatcccttatgactcattcattctctagagaactactcagaatctgaaggcaatataatgctgatggcttattttgccagtcattgagactggtaatagtagaggggatgagagcatggactctggagccagactataagggtttgaataccaactccattatatactgctcttgtgatcttgggtaagctacttaagtcacttaacctctgtaatctccagttttttttatttgtaaaacacggtagttgcaagtaacaagaggtatataaagctcttagaatagtgcytggtgatagcatgccttatattgacctttgctgttaaaattatttaaatggtattatttcaatattaaataaataagacctctttattaatttctaaaattcctgtaattttatactaacttctgttgatgctccaaatatgtctaattgttatctttgtctatttttgaaacctcttattcaccccagtgtactgtcatcctatttcaattacctaccagctaaagtcattgaaattagtccaacaggtcagtctaaaatgatagggtttattttatgctctaagattgattaaaaatcccattattataaatgttgccctaagatacaagtggcaaacataaaaccttgttttttgcttctgaaaattcctatcactgttgttggaagaaggtaagagcaataacctttttgaacag

SEQ ID NO: 57876 - DNA, 801 bp, Homo sapiens
aaaaactattcgctggagattgaacactatgaaattctaaaattgctcttaccctctaataatgggggcaaaactattcagccaagcatcctcatcccttatgactcattcattctctagagaactactcagaatctgaaggcaatataatgctgatggcttattttgccagtcattgagactggtaatagtagaggggatgagagcatggactctggagccagactataagggtttgaataccaactccattatatactgctcttgtgatcttgggtaagctacttaagtcacttaacctctgtaatctccagttttttttatttgtaaaacacggtagttgcaagtaacaagaggtatataaagctcttagaatagtgcttggtgatagcatgccttatattgacctttgctrttaaaattatttaaatggtattatttcaatattaaataaataagacctctttattaatttctaaaattcctgtaattttatactaacttctgttgatgctccaaatatgtctaattgttatctttgtctatttttgaaacctcttattcaccccagtgtactgtcatcctatttcaattacctaccagctaaagtcattgaaattagtccaacaggtcagtctaaaatgatagggtttattttatgctctaagattgattaaaaatcccattattataaatgttgccctaagatacaagtggcaaacataaaaccttgttttttgcttctgaaaattcctatcactgttgttggaagaaggtaagagcaataacctttttgaacag

SEQ ID NO: 57877 - DNA, 801 bp, Homo sapiens
aaaaactattcgctggagattgaacactatgaaattctaaaattgctcttaccctctaataatgggggcaaaactattcagccaagcatcctcatcccttatgactcattcattctctagagaactactcagaatctgaaggcaatataatgctgatggcttattttgccagtcattgagactggtaatagtagaggggatgagagcatggactctggagccagactataagggtttgaataccaactccattatatactgctcttgtgatcttgggtaagctacttaagtcacttaacctctgtaatctccagttttttttatttgtaaaacacggtagttgcaagtaacaagaggtatataaagctcttagaatagtgcttggtgatagcatgccttatattgacctttgctgttaaaattatttaaatggtattatttcaatattaaataaataagacctytttattaatttctaaaattcctgtaattttatactaacttctgttgatgctccaaatatgtctaattgttatctttgtctatttttgaaacctcttattcaccccagtgtactgtcatcctatttcaattacctaccagctaaagtcattgaaattagtccaacaggtcagtctaaaatgatagggtttattttatgctctaagattgattaaaaatcccattattataaatgttgccctaagatacaagtggcaaacataaaaccttgttttttgcttctgaaaattcctatcactgttgttggaagaaggtaagagcaataacctttttgaacag

SEQ ID NO: 57878 - DNA, 695 bp, Homo sapiens
ttccattttatggcctcaatctcagaagagatgtaaatttcatacctgaaccctaagtaaatatcttttctccatttggcacacaaaaatgtgagagctcaatatgtagtatttgttcctgtattaacagaatgcaattcaaaacagcatattcagtaatgaacccttaatgctaagtaaaaagaaaaaaataatatagtgatctggggtcaattatgggaatccgtattgggagttgttaaaaaagaaaaaacagaatatttcactaagtctccaaatatatcaccagagaagtcgggttgttcccttttggtttaatgatgctaacagtaggaccaaagtgctaacaataggatgaaggggcagggggagartctgttttcccgttgcaacctcacctcatgaatcctgaaattagattgctagtttactgggtctgggaactccatttcagatgtgaatctgagagttcctcagataaaacacataatttaaaaaggatgtttatattaattacaagacaggacaaaacatttgatctttataaaagaaaaaattatatctactatgtacatgtgtagattatatgtataaatcataatggaaaaaggtaaaaagtatacctgaaggaatttactaccaggcatcacctaagaaataaggatatgtatataacgtgcacagacaacttcatt

SEQ ID NO: 57879 - DNA, 695 bp, Homo sapiens
ttccattttatggcctcaatctcagaagagatgtaaatttcatacctgaaccctaagtaaatatcttttctccatttggcacacaaaaatgtgagagctcaatatgtagtatttgttcctgtattaacagaatgcaattcaaaacagcatattcagtaatgaacccttaatgctaagtaaaaagaaaaaaataatatagtgatctggggtcaattatgggaatccgtattgggagttgttaaaaaagaaaaaacagaatatttcactaagtctccaaatatatcaccagagaagtcgggttgttcccttttggtttaatgatgctaacagtaggaccaaagtgctaacaataggatgaaggggcagggggagaakctgttttcccgttgcaacctcacctcatgaatcctgaaattagattgctagtttactgggtctgggaactccatttcagatgtgaatctgagagttcctcagataaaacacataatttaaaaaggatgtttatattaattacaagacaggacaaaacatttgatctttataaaagaaaaaattatatctactatgtacatgtgtagattatatgtataaatcataatggaaaaaggtaaaaagtatacctgaaggaatttactaccaggcatcacctaagaaataaggatatgtatataacgtgcacagacaacttcatt

SEQ ID NO: 57880 - DNA, 695 bp, Homo sapiens
ttccattttatggcctcaatctcagaagagatgtaaatttcatacctgaaccctaagtaaatatcttttctccatttggcacacaaaaatgtgagagctcaatatgtagtatttgttcctgtattaacagaatgcaattcaaaacagcatattcagtaatgaacccttaatgctaagtaaaaagaaaaaaataatatagtgatctggggtcaattatgggaatccgtattgggagttgttaaaaaagaaaaaacagaatatttcactaagtctccaaatatatcaccagagaagtcgggttgttcccttttggtttaatgatgctaacagtaggaccaaagtgctaacaataggatgaaggggcagggggagaatmtgttttcccgttgcaacctcacctcatgaatcctgaaattagattgctagtttactgggtctgggaactccatttcagatgtgaatctgagagttcctcagataaaacacataatttaaaaaggatgtttatattaattacaagacaggacaaaacatttgatctttataaaagaaaaaattatatctactatgtacatgtgtagattatatgtataaatcataatggaaaaaggtaaaaagtatacctgaaggaatttactaccaggcatcacctaagaaataaggatatgtatataacgtgcacagacaacttcatt

SEQ ID NO: 57881 - DNA, 695 bp, Homo sapiens
ttccattttatggcctcaatctcagaagagatgtaaatttcatacctgaaccctaagtaaatatcttttctccatttggcacacaaaaatgtgagagctcaatatgtagtatttgttcctgtattaacagaatgcaattcaaaacagcatattcagtaatgaacccttaatgctaagtaaaaagaaaaaaataatatagtgatctggggtcaattatgggaatccgtattgggagttgttaaaaaagaaaaaacagaatatttcactaagtctccaaatatatcaccagagaagtcgggttgttcccttttggtttaatgatgctaacagtaggaccaaagtgctaacaataggatgaaggggcagggggagaatckgttttcccgttgcaacctcacctcatgaatcctgaaattagattgctagtttactgggtctgggaactccatttcagatgtgaatctgagagttcctcagataaaacacataatttaaaaaggatgtttatattaattacaagacaggacaaaacatttgatctttataaaagaaaaaattatatctactatgtacatgtgtagattatatgtataaatcataatggaaaaaggtaaaaagtatacctgaaggaatttactaccaggcatcacctaagaaataaggatatgtatataacgtgcacagacaacttcatt

SEQ ID NO: 57882 - DNA, 695 bp, Homo sapiens
ttccattttatggcctcaatctcagaagagatgtaaatttcatacctgaaccctaagtaaatatcttttctccatttggcacacaaaaatgtgagagctcaatatgtagtatttgttcctgtattaacagaatgcaattcaaaacagcatattcagtaatgaacccttaatgctaagtaaaaagaaaaaaataatatagtgatctggggtcaattatgggaatccgtattgggagttgttaaaaaagaaaaaacagaatatttcactaagtctccaaatatatcaccagagaagtcgggttgttcccttttggtttaatgatgctaacagtaggaccaaagtgctaacaataggatgaaggggcagggggagaatctgttttcccgttgcaacctcacctcatgaatcctgaaattagattgctagtttactgggtctgggaactccatttcagatgtgaatctgagagttcctcagataaaacayataatttaaaaaggatgtttatattaattacaagacaggacaaaacatttgatctttataaaagaaaaaattatatctactatgtacatgtgtagattatatgtataaatcataatggaaaaaggtaaaaagtatacctgaaggaatttactaccaggcatcacctaagaaataaggatatgtatataacgtgcacagacaacttcatt

SEQ ID NO: 57883 - DNA, 1985 bp, Homo sapiens
tctcttgaataggttatttataagtaaggtttagatgataggttatatgctcatcatatttatgagtaacttaagttcttttctgtgttactaattatttgtgaagctattacattcagaagcaaaagtatttttcattcaactaagaaataaagctttgatactatcaacctacattaatagctcaggtgacaatgatgaatagagtcttccaaattttcagatttcagtggactgataaagttcaacgaatttcactaaacatggcttaccatcttgtagaaatgtcttaatgggtaaaaagcatgattcacatataactattttgccctaaatacaagaaaataacatatatttttagaattaatttctagccagggattaggacaggctttaaaatattatattaccatgtaaggttttaggaaaagttcttaatactgctgacattttaaaacttgcctgaaaaattggctgttggcatattctaatcctactaggaggactgagtagcaaagcttatctctcattattttttcctctgggagaaaggacaaagaggtttgataaataactagtgaatattaaatggcagtgatcagtattaatttagggtaattgttttaatgtatggccaattgacataacattatacggactcaaatatttatcaatgatacaagttcattttgagggtgtaccatttatttaaaatgaatcttcctgtggacaaagtgccaagcattctgaaaattcacaggtcccagtttcctggtttattttgttcactcctgacttattaacccatttaattaaaaatgacatattacttcctatatttgtattctttacatataaatctgccagaacagagaaacaaattcatcttcattctcatgacagagatagagaaaattgccacttgtacaaaaaatattcattacatttgtggtcttataaacagcatcctggaatttctctccggtgtcacttggatttattttagtgtatactattcgaagataatggctgaaatcaaacgatgaatcctttagtgaattgagaagatggtgtggcttccaaaaatatgacagcttttgtttcttcttaaaaagtccatcctccattgcagggatttttggcatacctaaatttatgtccatttgttcatttgtcacacaaatagaaatgcatcctttaagcaacaggcacaatatgggatgctgcaggtgagataacagcatggcacatggtttctgtttaaacgttccttacaagctaattatggagatcagacattgcacaaatatctaattcaaggtggtgtgtgtgtgtgtgtgtgtgtgtgtgtgygcgcgcatgtgtgcattccatgcaaaagatacaaatttggtactgtagaagcatacacaggaggaatcacatcattctgcctagataaatcagagaaagtaatttaagaggaaaataatattggctaaatcttgaggctttgaaccttgatttcgaaaaattggtcatcaggagtaaggagcacacctagtcagaagaaacaccatgaactcacccagggcaaacactactgtttttgacttctggcaatctttacaaattggctgaaattaaggtaattaaggtcaaatcttaatttgatcaacactgagaaatttcctggaatgtgggattttcagtgttaaaacaaggacacacatgaacaaactgagatgattgctcaccctagattaaatacaagttttttcctacctttatcttctttccaatgttattcttatttctatgtcatacctttccaactttaatctacaagtatttttacatatgaatctaataatccattaaacccagcaaatcaattgaagactttcccccttttgtgtgatctgcaagggtttaaccttcattgtcttcagaaagtggggtggagagatgatactacattcagactccttagcatggcaaaaaca

SEQ ID NO: 57884 - DNA, 1985 bp, Homo sapiens
tctcttgaataggttatttataagtaaggtttagatgataggttatatgctcatcatatttatgagtaacttaagttcttttctgtgttactaattatttgtgaagctattacattcagaagcaaaagtatttttcattcaactaagaaataaagctttgatactatcaacctacattaatagctcaggtgacaatgatgaatagagtcttccaaattttcagatttcagtggactgataaagttcaacgaatttcactaaacatggcttaccatcttgtagaaatgtcttaatgggtaaaaagcatgattcacatataactattttgccctaaatacaagaaaataacatatatttttagaattaatttctagccagggattaggacaggctttaaaatattatattaccatgtaaggttttaggaaaagttcttaatactgctgacattttaaaacttgcctgaaaaattggctgttggcatattctaatcctactaggaggactgagtagcaaagcttatctctcattattttttcctctgggagaaaggacaaagaggtttgataaataactagtgaatattaaatggcagtgatcagtattaatttagggtaattgttttaatgtatggccaattgacataacattatacggactcaaatatttatcaatgatacaagttcattttgagggtgtaccatttatttaaaatgaatcttcctgtggacaaagtgccaagcattctgaaaattcacaggtcccagtttcctggtttattttgttcactcctgacttattaacccatttaattaaaaatgacatattacttcctatatttgtattctttacatataaatctgccagaacagagaaacaaattcatcttcattctcatgacagagatagagaaaattgccacttgtacaaaaaatattcattacatttgtggtcttataaacagcatcctggaatttctctccggtgtcacttggatttattttagtgtatactattcgaagataatggctgaaatcaaacgatgaatcctttagtgaattgagaagatggtgtggcttccaaaaatatgacagcttttgtttcttcttaaaaagtccatcctccattgcagggatttttggcatacctaaatttatgtccatttgttcatttgtcacacaaatagaaatgcatcctttaagcaacaggcacaatatgggatgctgcaggtgagataacagcatggcacatggtttctgtttaaacgttccttacaagctaattatggagatcagacattgcacaaatatctaattcaaggtggtgtgtgtgtgtgtgtgtgtgtgtgtgtgtgcgcrcatgtgtgcattccatgcaaaagatacaaatttggtactgtagaagcatacacaggaggaatcacatcattctgcctagataaatcagagaaagtaatttaagaggaaaataatattggctaaatcttgaggctttgaaccttgatttcgaaaaattggtcatcaggagtaaggagcacacctagtcagaagaaacaccatgaactcacccagggcaaacactactgtttttgacttctggcaatctttacaaattggctgaaattaaggtaattaaggtcaaatcttaatttgatcaacactgagaaatttcctggaatgtgggattttcagtgttaaaacaaggacacacatgaacaaactgagatgattgctcaccctagattaaatacaagttttttcctacctttatcttctttccaatgttattcttatttctatgtcatacctttccaactttaatctacaagtatttttacatatgaatctaataatccattaaacccagcaaatcaattgaagactttcccccttttgtgtgatctgcaagggtttaaccttcattgtcttcagaaagtggggtggagagatgatactacattcagactccttagcatggcaaaaaca

SEQ ID NO: 57885 - DNA, 1985 bp, Homo sapiens
tctcttgaataggttatttataagtaaggtttagatgataggttatatgctcatcatatttatgagtaacttaagttcttttctgtgttactaattatttgtgaagctattacattcagaagcaaaagtatttttcattcaactaagaaataaagctttgatactatcaacctacattaatagctcaggtgacaatgatgaatagagtcttccaaattttcagatttcagtggactgataaagttcaacgaatttcactaaacatggcttaccatcttgtagaaatgtcttaatgggtaaaaagcatgattcacatataactattttgccctaaatacaagaaaataacatatatttttagaattaatttctagccagggattaggacaggctttaaaatattatattaccatgtaaggttttaggaaaagttcttaatactgctgacattttaaaacttgcctgaaaaattggctgttggcatattctaatcctactaggaggactgagtagcaaagcttatctctcattattttttcctctgggagaaaggacaaagaggtttgataaataactagtgaatattaaatggcagtgatcagtattaatttagggtaattgttttaatgtatggccaattgacataacattatacggactcaaatatttatcaatgatacaagttcattttgagggtgtaccatttatttaaaatgaatcttcctgtggacaaagtgccaagcattctgaaaattcacaggtcccagtttcctggtttattttgttcactcctgacttattaacccatttaattaaaaatgacatattacttcctatatttgtattctttacatataaatctgccagaacagagaaacaaattcatcttcattctcatgacagagatagagaaaattgccacttgtacaaaaaatattcattacatttgtggtcttataaacagcatcctggaatttctctccggtgtcacttggatttattttagtgtatactattcgaagataatggctgaaatcaaacgatgaatcctttagtgaattgagaagatggtgtggcttccaaaaatatgacagcttttgtttcttcttaaaaagtccatcctccattgcagggatttttggcatacctaaatttatgtccatttgttcatttgtcacacaaatagaaatgcatcctttaagcaacaggcacaatatgggatgctgcaggtgagataacagcatggcacatggtttctgtttaaacgttccttacaagctaattatggagatcagacattgcacaaatatctaattcaaggtggtgtgtgtgtgtgtgtgtgtgtgtgtgtgtgcgcgcatgtgtgcatkccatgcaaaagatacaaatttggtactgtagaagcatacacaggaggaatcacatcattctgcctagataaatcagagaaagtaatttaagaggaaaataatattggctaaatcttgaggctttgaaccttgatttcgaaaaattggtcatcaggagtaaggagcacacctagtcagaagaaacaccatgaactcacccagggcaaacactactgtttttgacttctggcaatctttacaaattggctgaaattaaggtaattaaggtcaaatcttaatttgatcaacactgagaaatttcctggaatgtgggattttcagtgttaaaacaaggacacacatgaacaaactgagatgattgctcaccctagattaaatacaagttttttcctacctttatcttctttccaatgttattcttatttctatgtcatacctttccaactttaatctacaagtatttttacatatgaatctaataatccattaaacccagcaaatcaattgaagactttcccccttttgtgtgatctgcaagggtttaaccttcattgtcttcagaaagtggggtggagagatgatactacattcagactccttagcatggcaaaaaca

SEQ ID NO: 57886 - DNA, 1985 bp, Homo sapiens
tctcttgaataggttatttataagtaaggtttagatgataggttatatgctcatcatatttatgagtaacttaagttcttttctgtgttactaattatttgtgaagctattacattcagaagcaaaagtatttttcattcaactaagaaataaagctttgatactatcaacctacattaatagctcaggtgacaatgatgaatagagtcttccaaattttcagatttcagtggactgataaagttcaacgaatttcactaaacatggcttaccatcttgtagaaatgtcttaatgggtaaaaagcatgattcacatataactattttgccctaaatacaagaaaataacatatatttttagaattaatttctagccagggattaggacaggctttaaaatattatattaccatgtaaggttttaggaaaagttcttaatactgctgacattttaaaacttgcctgaaaaattggctgttggcatattctaatcctactaggaggactgagtagcaaagcttatctctcattattttttcctctgggagaaaggacaaagaggtttgataaataactagtgaatattaaatggcagtgatcagtattaatttagggtaattgttttaatgtatggccaattgacataacattatacggactcaaatatttatcaatgatacaagttcattttgagggtgtaccatttatttaaaatgaatcttcctgtggacaaagtgccaagcattctgaaaattcacaggtcccagtttcctggtttattttgttcactcctgacttattaacccatttaattaaaaatgacatattacttcctatatttgtattctttacatataaatctgccagaacagagaaacaaattcatcttcattctcatgacagagatagagaaaattgccacttgtacaaaaaatattcattacatttgtggtcttataaacagcatcctggaatttctctccggtgtcacttggatttattttagtgtatactattcgaagataatggctgaaatcaaacgatgaatcctttagtgaattgagaagatggtgtggcttccaaaaatatgacagcttttgtttcttcttaaaaagtccatcctccattgcagggatttttggcatacctaaatttatgtccatttgttcatttgtcacacaaatagaaatgcatcctttaagcaacaggcacaatatgggatgctgcaggtgagataacagcatggcacatggtttctgtttaaacgttccttacaagctaattatggagatcagacattgcacaaatatctaattcaaggtggtgtgtgtgtgtgtgtgtgtgtgtgtgtgtgcgcgcatgtgtgcattccatgcaaragatacaaatttggtactgtagaagcatacacaggaggaatcacatcattctgcctagataaatcagagaaagtaatttaagaggaaaataatattggctaaatcttgaggctttgaaccttgatttcgaaaaattggtcatcaggagtaaggagcacacctagtcagaagaaacaccatgaactcacccagggcaaacactactgtttttgacttctggcaatctttacaaattggctgaaattaaggtaattaaggtcaaatcttaatttgatcaacactgagaaatttcctggaatgtgggattttcagtgttaaaacaaggacacacatgaacaaactgagatgattgctcaccctagattaaatacaagttttttcctacctttatcttctttccaatgttattcttatttctatgtcatacctttccaactttaatctacaagtatttttacatatgaatctaataatccattaaacccagcaaatcaattgaagactttcccccttttgtgtgatctgcaagggtttaaccttcattgtcttcagaaagtggggtggagagatgatactacattcagactccttagcatggcaaaaaca

SEQ ID NO: 57887 - DNA, 1985 bp, Homo sapiens
tctcttgaataggttatttataagtaaggtttagatgataggttatatgctcatcatatttatgagtaacttaagttcttttctgtgttactaattatttgtgaagctattacattcagaagcaaaagtatttttcattcaactaagaaataaagctttgatactatcaacctacattaatagctcaggtgacaatgatgaatagagtcttccaaattttcagatttcagtggactgataaagttcaacgaatttcactaaacatggcttaccatcttgtagaaatgtcttaatgggtaaaaagcatgattcacatataactattttgccctaaatacaagaaaataacatatatttttagaattaatttctagccagggattaggacaggctttaaaatattatattaccatgtaaggttttaggaaaagttcttaatactgctgacattttaaaacttgcctgaaaaattggctgttggcatattctaatcctactaggaggactgagtagcaaagcttatctctcattattttttcctctgggagaaaggacaaagaggtttgataaataactagtgaatattaaatggcagtgatcagtattaatttagggtaattgttttaatgtatggccaattgacataacattatacggactcaaatatttatcaatgatacaagttcattttgagggtgtaccatttatttaaaatgaatcttcctgtggacaaagtgccaagcattctgaaaattcacaggtcccagtttcctggtttattttgttcactcctgacttattaacccatttaattaaaaatgacatattacttcctatatttgtattctttacatataaatctgccagaacagagaaacaaattcatcttcattctcatgacagagatagagaaaattgccacttgtacaaaaaatattcattacatttgtggtcttataaacagcatcctggaatttctctccggtgtcacttggatttattttagtgtatactattcgaagataatggctgaaatcaaacgatgaatcctttagtgaattgagaagatggtgtggcttccaaaaatatgacagcttttgtttcttcttaaaaagtccatcctccattgcagggatttttggcatacctaaatttatgtccatttgttcatttgtcacacaaatagaaatgcatcctttaagcaacaggcacaatatgggatgctgcaggtgagataacagcatggcacatggtttctgtttaaacgttccttacaagctaattatggagatcagacattgcacaaatatctaattcaaggtggtgtgtgtgtgtgtgtgtgtgtgtgtgtgtgcgcgcatgtgtgcattccatgcaaaagatacaaatttggtactgtagaagcatacacaggaggaatcacatcattctgcctagataaatcagagaaagtaatttaagaggaaaataatattggctaaatcttgaggctttgaaccttgatttcgaaaaattggtcatcaggagtaaggagcrcacctagtcagaagaaacaccatgaactcacccagggcaaacactactgtttttgacttctggcaatctttacaaattggctgaaattaaggtaattaaggtcaaatcttaatttgatcaacactgagaaatttcctggaatgtgggattttcagtgttaaaacaaggacacacatgaacaaactgagatgattgctcaccctagattaaatacaagttttttcctacctttatcttctttccaatgttattcttatttctatgtcatacctttccaactttaatctacaagtatttttacatatgaatctaataatccattaaacccagcaaatcaattgaagactttcccccttttgtgtgatctgcaagggtttaaccttcattgtcttcagaaagtggggtggagagatgatactacattcagactccttagcatggcaaaaaca

SEQ ID NO: 57888 - DNA, 720 bp, Homo sapiens
tcttttggtaaatgtatacaaacgtttctgttgagtatacacccaagagtgaaattgttgaattgtagaatatgtatatgttttgctttgcaaccaattttccatagtggttgtaattagggcagcgctgaaacttaaactctcagagtcattagctaatatctactgaagtccccaaaaaacccctctgaggttaaacttatcacagtgtttccagtgttttgatcaggtttaactccagaattagtggagctcaactttgtataaatggtttgttaagtaaattcatagtctctacaagattgtggagaaaatgcttcatcttcttacaaaaataaatggaaayacttgaacttcatttatatacatatacagcctgggtgagaccactgccccctaggtagcctggcaccgtttgtacagtccttaggactcctaggtctgtccaagttcaacaagctcattcccaagatttgctgcaaattccacagctctgctttctaagcattttattcactggatgcttttttctctactgtattggataaaactagaggggaaatgcaacctattttctgggttccaaaagcaatccactctcaccagtgatttcatgagttttaatcaatgttgctgaagattggtgggccacaaagagaaaaacattatggagaacgtggtttaccattacccaggctctactcccttcctgttggatcc

SEQ ID NO: 57889 - DNA, 720 bp, Homo sapiens
tcttttggtaaatgtatacaaacgtttctgttgagtatacacccaagagtgaaattgttgaattgtagaatatgtatatgttttgctttgcaaccaattttccatagtggttgtaattagggcagcgctgaaacttaaactctcagagtcattagctaatatctactgaagtccccaaaaaacccctctgaggttaaacttatcacagtgtttccagtgttttgatcaggtttaactccagaattagtggagctcaactttgtataaatggtttgttaagtaaattcatagtctctacaagattgtggagaaaatgcttcatcttcttacaaaaataaatggaaacacttgaacttcatytatatacatatacagcctgggtgagaccactgccccctaggtagcctggcaccgtttgtacagtccttaggactcctaggtctgtccaagttcaacaagctcattcccaagatttgctgcaaattccacagctctgctttctaagcattttattcactggatgcttttttctctactgtattggataaaactagaggggaaatgcaacctattttctgggttccaaaagcaatccactctcaccagtgatttcatgagttttaatcaatgttgctgaagattggtgggccacaaagagaaaaacattatggagaacgtggtttaccattacccaggctctactcccttcctgttggatcc

SEQ ID NO: 57890 - DNA, 720 bp, Homo sapiens
tcttttggtaaatgtatacaaacgtttctgttgagtatacacccaagagtgaaattgttgaattgtagaatatgtatatgttttgctttgcaaccaattttccatagtggttgtaattagggcagcgctgaaacttaaactctcagagtcattagctaatatctactgaagtccccaaaaaacccctctgaggttaaacttatcacagtgtttccagtgttttgatcaggtttaactccagaattagtggagctcaactttgtataaatggtttgttaagtaaattcatagtctctacaagattgtggagaaaatgcttcatcttcttacaaaaataaatggaaacacttgaacttcatttatatacatatacagcctgggtgagaccactgccccctaggtagcctggcaccgtttgtacagtccttaggactcctaggtctgtccaagttcaacaagctcattcccaagatttgctgcaaattccacagctctgctttctaagcattttattcactggatgcttttttctctactgtattggayaaaactagaggggaaatgcaacctattttctgggttccaaaagcaatccactctcaccagtgatttcatgagttttaatcaatgttgctgaagattggtgggccacaaagagaaaaacattatggagaacgtggtttaccattacccaggctctactcccttcctgttggatcc

SEQ ID NO: 57891 - DNA, 720 bp, Homo sapiens
tcttttggtaaatgtatacaaacgtttctgttgagtatacacccaagagtgaaattgttgaattgtagaatatgtatatgttttgctttgcaaccaattttccatagtggttgtaattagggcagcgctgaaacttaaactctcagagtcattagctaatatctactgaagtccccaaaaaacccctctgaggttaaacttatcacagtgtttccagtgttttgatcaggtttaactccagaattagtggagctcaactttgtataaatggtttgttaagtaaattcatagtctctacaagattgtggagaaaatgcttcatcttcttacaaaaataaatggaaacacttgaacttcatttatatacatatacagcctgggtgagaccactgccccctaggtagcctggcaccgtttgtacagtccttaggactcctaggtctgtccaagttcaacaagctcattcccaagatttgctgcaaattccacagctctgctttctaagcattttattcactggatgcttttttctctactgtattggataaaactagaggggaaatgcaacctmttttctgggttccaaaagcaatccactctcaccagtgatttcatgagttttaatcaatgttgctgaagattggtgggccacaaagagaaaaacattatggagaacgtggtttaccattacccaggctctactcccttcctgttggatcc

SEQ ID NO: 57892 - DNA, 922 bp, Homo sapiens
tggaccaggtcctaagcagttaggaagagctggggattattttattccaaactgtggttacatttgtggcttctaactattagctccttttctataggcacaaggcacagttatatgcaaacaaaatacaaaataatcagcaatatcttttattgccctaatttaacattattaaaacaacacaatactgctttggaagaaagtggtagaaagcaaaagctcctaaacagaaattaagtcccaatatgctggcatattatctacacaacatggctagattactttctgttttcctgccgtgagtaagccatgtatacaaggaaataaaggaatccagaaagatgtttgacattcccagaacggctttgacacttttaagaactgaaggcagaagaatttcaagcacatcgagcttttcacaaagcaggcattcaaygtttgttgcaagcggttcaaagtaggtgaacaaataaaaacactgaagtgctttcttaagagacacattcagaaaaacaactaattctaaatattgacacatattgactctacttttagtctcaaaaacatgtcaccaacttcaacaaaaagaaaaaaggatagacacagtaagtgcaacaaaatcttgaataattgttggatctgggtgctgggaccatggaggttgattgtattattatttctatatgtgtacttttgaaatttttaataaacatttattttaaaaaatcgtcacctaaagaatgcattgtttgatgatctgttcacttcctatttgtttggaggtatgtattatacccagttcaaatagagttacaaataccttcaacaaaatgtccaaaatttttcattgcacttgagttttactgcatgaaacattgtttgaagtgagtgcttttgggattctttttataactgtagtatt

SEQ ID NO: 57893 - DNA, 753 bp, Homo sapiens
gcagctgtaaaattatcacatttgcttcaggtgaagtcttcaaaatatttctttctttttattgagtgccaaaatgacatagacgttggattttgtcaaggttgcatgtgcctacttgctaataaatctgagtgtgacagaatgtagtaagagatttgtttttgttacagtcttaattgagagcagtggggtaaacgtcacggcataccccccmccccataaccatatacaactactcacatccatcagggtggctcaggtcacaaggtgtaataaatacatcttgtatatttacataattatatgtctacctacgtatctgttgaaccaaggtttttggtttctaaagtcttcttgctcaggagttgacaaaccataacccataggccaaatctggaacgctgattttgtaaatgaaattttactggaacaaagtcatgtctctatgtctctttattgacatattatctgtggctgctttcatgctacaggtagttgtgacagaactgtatggcctgcaaagataaaaatatacttattgtctggccctttgcagaaaacgtttattgacccctattgtagcccatcggggtttctcacccttctggatgaatatttaaatgcaattaagaaaaatttcttgccagttttatccagaaagaacaaaagttctcagcacattatgaagtgattaagggagaaggcatgatcatgtgttaaaggcttgcctgatgggaatggaaagtagaggca

SEQ ID NO: 57894 - DNA, 753 bp, Homo sapiens
gcagctgtaaaattatcacatttgcttcaggtgaagtcttcaaaatatttctttctttttattgagtgccaaaatgacatagacgttggattttgtcaaggttgcatgtgcctacttgctaataaatctgagtgtgacagaatgtagtaagagatttgtttttgttacagtcttaattgagagcagtggggtaaacgtcacggcataccccccaccccataaccatatacaactactcacatccatcagggtggctcaggtcacaaggtgtaataaatacatcttgtatatttacataattatatgtctacctacgtatctgttgaaccaaggtttttggtttctaaagtcttcttgctcaggagttgacaaaccataacccataggccaaatctggaacgctgattttgtaaatgaaattttactggaacaaagtcatgtctctatgtctctttattgacatattatctgtggctgctttcatgctacaggtagttgtgacagaactgtatggcctgcaaagataaaaatatacttattgtctggccctttgcagaaaacgtttattgacccctattgtagcccatcrgggtttctcacccttctggatgaatatttaaatgcaattaagaaaaatttcttgccagttttatccagaaagaacaaaagttctcagcacattatgaagtgattaagggagaaggcatgatcatgtgttaaaggcttgcctgatgggaatggaaagtagaggca

SEQ ID NO: 57895 - DNA, 1511 bp, Homo sapiens
ttctaacttatctcttacacttaggcacccagaagcttctctataggcaacattcttcatcaaatctctacccaacacccttttccaaatttagctcaaaagacttactttccttcctctttgcttttgcctatgatttctctattctcccctgaactaaccttgattttttcctttgcaaatttccttctttgcttctccagttcttgctttctctcttgtcttccccatcaagcttcaagacttgaattcacaaattcagcttctgtcttgggaggcaaagatgagggcagtggaaaaagtggaaaaagaaagcttttatttaggtggtgaaggtggggagacagttggggagaaatgagaaagagattgcaaagacttaaaaacttctaacttaattcacatcatattaatatcacttaagatgacaaagacttgtggtggctaaggctcaaactggcccaggacaattctttcattgattttaacattttttttcctctagagtgcacrcaagatgaaactcagcttctatcttgatagaagtgaacaggaacataaatactgtttttcaagaagcaggcactgccatggatattttacctatttaatagtcacagcaacctggtggttatgaaattcttaatttcagttttacaaataaggatccaaagtaacagaaaatttaaggtcacgtggctaaaatttatcaggccgagactccacacaagattgtctgccttcaaagcccaaggctgctcaggggtttaatcatgattcagtaatatctttgagcacccactgggtcatcaggcacagtgttggatgtagaaacatagagatagaagatatagtttctggcttgaaggaactgcagtgctcaaatttccactacagctcccagattctactacatggttctacttctttttcaaaggatcacatttggaattgtaccttatggttttgcatatttcctttcgtgacttgtaataaatcacaggaatagaaatttcttctatagttgctctgtttaacacatagcatttaaaaatcaattggatatttcataaacaataatattgaagagctttttattgactcatcactgagctagatgttgtgccatggttaatccaggggagaattagacacactctgacccttaagctgtttgctgtctagggaggaagatagctgtgatggagttctgacagctaaaagtagttagaagcttagagcagatgtaaatatcttgctccaaggaaccaggtgtgatgaacagggaaactattgaataatttcatatttgttctgttggtagcatttatagacagtaggtagcttatattgtagttatatagactaatttggagagaaaacagagtattcattgagatttgggtggtaaatatctatttctcatgttggaaaaaaccatgaattttgatctatttttatttgcaattttcgccttgaaaagtaagtttgccttaaatgtggaaactggc

SEQ ID NO: 57896 - DNA, 1511 bp, Homo sapiens
ttctaacttatctcttacacttaggcacccagaagcttctctataggcaacattcttcatcaaatctctacccaacacccttttccaaatttagctcaaaagacttactttccttcctctttgcttttgcctatgatttctctattctcccctgaactaaccttgattttttcctttgcaaatttccttctttgcttctccagttcttgctttctctcttgtcttccccatcaagcttcaagacttgaattcacaaattcagcttctgtcttgggaggcaaagatgagggcagtggaaaaagtggaaaaagaaagcttttatttaggtggtgaaggtggggagacagttggggagaaatgagaaagagattgcaaagacttaaaaacttctaacttaattcacatcatattaatatcacttaagatgacaaagacttgtggtggctaaggctcaaactggcccaggacaattctttcattgattttaacattttttttcctctagagtgcacgcaagatgaaactcagcttctatcttgatagaagtgaacaggaacataaatactgtttttcaagaascaggcactgccatggatattttacctatttaatagtcacagcaacctggtggttatgaaattcttaatttcagttttacaaataaggatccaaagtaacagaaaatttaaggtcacgtggctaaaatttatcaggccgagactccacacaagattgtctgccttcaaagcccaaggctgctcaggggtttaatcatgattcagtaatatctttgagcacccactgggtcatcaggcacagtgttggatgtagaaacatagagatagaagatatagtttctggcttgaaggaactgcagtgctcaaatttccactacagctcccagattctactacatggttctacttctttttcaaaggatcacatttggaattgtaccttatggttttgcatatttcctttcgtgacttgtaataaatcacaggaatagaaatttcttctatagttgctctgtttaacacatagcatttaaaaatcaattggatatttcataaacaataatattgaagagctttttattgactcatcactgagctagatgttgtgccatggttaatccaggggagaattagacacactctgacccttaagctgtttgctgtctagggaggaagatagctgtgatggagttctgacagctaaaagtagttagaagcttagagcagatgtaaatatcttgctccaaggaaccaggtgtgatgaacagggaaactattgaataatttcatatttgttctgttggtagcatttatagacagtaggtagcttatattgtagttatatagactaatttggagagaaaacagagtattcattgagatttgggtggtaaatatctatttctcatgttggaaaaaaccatgaattttgatctatttttatttgcaattttcgccttgaaaagtaagtttgccttaaatgtggaaactggc

SEQ ID NO: 57897 - DNA, 1511 bp, Homo sapiens
ttctaacttatctcttacacttaggcacccagaagcttctctataggcaacattcttcatcaaatctctacccaacacccttttccaaatttagctcaaaagacttactttccttcctctttgcttttgcctatgatttctctattctcccctgaactaaccttgattttttcctttgcaaatttccttctttgcttctccagttcttgctttctctcttgtcttccccatcaagcttcaagacttgaattcacaaattcagcttctgtcttgggaggcaaagatgagggcagtggaaaaagtggaaaaagaaagcttttatttaggtggtgaaggtggggagacagttggggagaaatgagaaagagattgcaaagacttaaaaacttctaacttaattcacatcatattaatatcacttaagatgacaaagacttgtggtggctaaggctcaaactggcccaggacaattctttcattgattttaacattttttttcctctagagtgcacgcaagatgaaactcagcttctatcttgatagaagtgaacaggaacataaatactgtttttcaagaagcaggcactgccatggatattttacctatttaatagtcacagcaacctggtggttatgaaattcttaatttcagttttacaaataaggatccaaagtaacagaaaatttaaggtcacgtggctaaaatttatcaggccgagactccacacaagattgtctgccttcaaagcccaaggctgctcaggggtttaatcatgattcagtaatatctttgagcacccactgggtcatcaggcacagtgttggatgtagaaacatagagatagaagatatagtttctggcttgaaggaactgcagtgctcaaatttccactacagctcccagattctaytacatggttctacttctttttcaaaggatcacatttggaattgtaccttatggttttgcatatttcctttcgtgacttgtaataaatcacaggaatagaaatttcttctatagttgctctgtttaacacatagcatttaaaaatcaattggatatttcataaacaataatattgaagagctttttattgactcatcactgagctagatgttgtgccatggttaatccaggggagaattagacacactctgacccttaagctgtttgctgtctagggaggaagatagctgtgatggagttctgacagctaaaagtagttagaagcttagagcagatgtaaatatcttgctccaaggaaccaggtgtgatgaacagggaaactattgaataatttcatatttgttctgttggtagcatttatagacagtaggtagcttatattgtagttatatagactaatttggagagaaaacagagtattcattgagatttgggtggtaaatatctatttctcatgttggaaaaaaccatgaattttgatctatttttatttgcaattttcgccttgaaaagtaagtttgccttaaatgtggaaactggc

SEQ ID NO: 57898 - DNA, 491 bp, Homo sapiens
cactccagcctgggagacagagtgagattctgtttctaaaatataaaaaaaaaaaaaatttaaagaaaaaaaaaagaactccaggcctakgttctcccaatgggacgatgttgccaacacaaaagtggtttcatggaggcaaattaaaggaaattatcaacctaaaactggaccttgaataagactttgaaggttccaaggggaaaaagaaagaaaatttgaacttttcatccaaagatacccaagttcctagtattgcctctctcgtgctcctcccttcctccccggccacagggaaaaggcatctctccagccatgaagtgacgttgtagagtggtgaagagcaggaactatggagccagatgtctggggtggcttagcgcttctgtcacattttagctgtgggcatggcagctccaacgtggcacccactgatcctccagccccagttaagtgttccagtggctacagctctaggtgatatctgacat

SEQ ID NO: 57899 - DNA, 491 bp, Homo sapiens
cactccagcctgggagacagagtgagattctgtttctaaaatataaaaaaaaaaaaaatttaaagaaaaaaaaaagaactccaggcctaggttctcccaatgggackatgttgccaacacaaaagtggtttcatggaggcaaattaaaggaaattatcaacctaaaactggaccttgaataagactttgaaggttccaaggggaaaaagaaagaaaatttgaacttttcatccaaagatacccaagttcctagtattgcctctctcgtgctcctcccttcctccccggccacagggaaaaggcatctctccagccatgaagtgacgttgtagagtggtgaagagcaggaactatggagccagatgtctggggtggcttagcgcttctgtcacattttagctgtgggcatggcagctccaacgtggcacccactgatcctccagccccagttaagtgttccagtggctacagctctaggtgatatctgacat

SEQ ID NO: 57900 - DNA, 491 bp, Homo sapiens
cactccagcctgggagacagagtgagattctgtttctaaaatataaaaaaaaaaaaaatttaaagaaaaaaaaaagaactccaggcctaggttctcccaatgggacgatgttgccaacacaaaagtggtttcatggaggcaaattaaaggaaattatcaacctaaaactggaccttgaataagactttgaaggttccaaggggaaaaagaaagaaaatttgaacttttcatccaaagataccyaagttcctagtattgcctctctcgtgctcctcccttcctccccggccacagggaaaaggcatctctccagccatgaagtgacgttgtagagtggtgaagagcaggaactatggagccagatgtctggggtggcttagcgcttctgtcacattttagctgtgggcatggcagctccaacgtggcacccactgatcctccagccccagttaagtgttccagtggctacagctctaggtgatatctgacat

SEQ ID NO: 57901 - DNA, 491 bp, Homo sapiens
cactccagcctgggagacagagtgagattctgtttctaaaatataaaaaaaaaaaaaatttaaagaaaaaaaaaagaactccaggcctaggttctcccaatgggacgatgttgccaacacaaaagtggtttcatggaggcaaattaaaggaaattatcaacctaaaactggaccttgaataagactttgaaggttccaaggggaaaaagaaagaaaatttgaacttttcatccaaagatacccaagttcctagtattgcctctctcgtgctcctcccttcctccccggccacagggaaaaggcatctctccagccatgaagtgacgttgtagagtggtgaagagcaggaactrtggagccagatgtctggggtggcttagcgcttctgtcacattttagctgtgggcatggcagctccaacgtggcacccactgatcctccagccccagttaagtgttccagtggctacagctctaggtgatatctgacat

SEQ ID NO: 57902 - DNA, 2402 bp, Homo sapiens
tgaaaagtaaattactgatcttctttaaacctcctctcctaagagaaatgmctaagaaaaagcaaagattcttgttggaagacaactggttagggagaaggaggattgtttggggagaggtctttcctacagttttcatgttgccaaagcaacaccttagtccaacttttctgagtagacatgcaacatatcagagtaagacagtctttatttttccatttgtatccacttttacatttttccatctgtattagttattcctggttctgaacctattgatatgcttataaacgaatattgtcattacatttcatcaatatataacagcaggtgagtaatggtgttaaagaaacctcagtgctgtttgggcttgagacacttttctctatcactggacattattagtatcctttctaactttcctcagctttccatgcggctgaatgccaggctacatatgctcaccaggcaaccaaagtccaggataaagaccaagctcgtcatgtctcagctgtcatgttttctcttgggatgagttggtcttcatctcattttcaagctggccccattgttttgtagtgatggaaatctgtcaccaaaatcttggtgggccttcccagaatccaggctgtgctgatgtaagttatggggccaaaaggagttgtggcttggcaaagtgacattttatttaaaatattctggtaatgtttataaagcacattaagcacttttacaatattttaaaaatcaaggaaagttacttggtattatcacatgtcttccaaggaaattgttttgaaagttgtggtccaacattcctaaaaacaaataattagattcctagccttatagcaatggtgtgatcagtctctcagagagtgagcatttattggtccctccctcccctttcttactcaggctactctctaatcatattttgttttcttttctagtcttccctctgttgccacaatatttttttgctagcagcctcaatttttccagctgttagctactggagctttttttattatgatacatttttctgaaatccctagactcctctatttcttagatctgtcttataagacagctcatgaaacagacaatggagagaatttattgaatgttcactgcgtgaacaggaaaggccaaggtaagatgcagaaatacttatggtccagttgggagacacaatataaatgcatgaaaatgacaagcagagatgaagcaaacagtgccagtaagtagctccagatggataattgagggatatccagtgggatcaggttcattaggggagatattctggaagagaaaaattgagagtggaggacaaaaggaaggactggagcaagactactgggaacaggagagaatgctctcattattgcctcacagagagttatatggcgattcacctgtggagctttgcttctaacagtcactttaacaatagcctgcatagcacttggactcctgagtgctagactggcttcctagctctgtgtgtgtattagtctgttcttacactgctaatgaagacatacctgagactggataattataaaggaaagaagtttaattgactcacagtgccacatggctggggaggcctcacaattatggtggaaggcaaggaggagcaagtcacatcttatatggcagcaggcaggagaagaatgagagtgaagcaaaaagggaaaccccttatacaaccatcagacctcgtgagatttattcactgccatgagaacagtatgggtgaaactggccccatgattctattatctctcaccaggcccgtcccataaaacgtgggaattatgggagctgcatttcaagagatttgggtggggacacagccaaagcatatcagtgggtgagtgagaaccagtgtcgttaactgtgcactcccacaactgttcattaagtcctttcaactggacatttctaaggaaactacgaggttaagaggtgggtgtatatattcatttgcctagggagtttggtgaaatggtaactttgaaaatgttttctttgctaaaaagattttgttcctgaagcctgttctttgtgaaaaatatcatatctccccatttggaaaatcacgttgaatacagaaagtggcagcttgtgaaaacacacactcaacgtgtttcttactttctcaaggcgataaactatagttgatgaactgcaaacctctctgaattatagaacctctctgctaacccgggggattttaacagatttttaaacttctgtctcttaattttgtttttcttcccttggtaagtgaataagtagagttaaccttacaatcagatcaaacacttcattctgatcccaggaagcttgggtccttagcacctggatttttagcagtttatagaatgtgc

SEQ ID NO: 57903 - DNA, 2402 bp, Homo sapiens
tgaaaagtaaattactgatcttctttaaacctcctctcctaagagaaatgactaagaaaaagcaaagattcttgttggaagacaactggttagggagaaggaggattgtttggggagaggtctttcctacagttttcatgttgccaaagcaacaccttagtccaacttttctgagtagacatgcaacatatcagagtaagacagtctttatttttccatttgtatccacttttacatttttccatctgtattagttattcytggttctgaacctattgatatgcttataaacgaatattgtcattacatttcatcaatatataacagcaggtgagtaatggtgttaaagaaacctcagtgctgtttgggcttgagacacttttctctatcactggacattattagtatcctttctaactttcctcagctttccatgcggctgaatgccaggctacatatgctcaccaggcaaccaaagtccaggataaagaccaagctcgtcatgtctcagctgtcatgttttctcttgggatgagttggtcttcatctcattttcaagctggccccattgttttgtagtgatggaaatctgtcaccaaaatcttggtgggccttcccagaatccaggctgtgctgatgtaagttatggggccaaaaggagttgtggcttggcaaagtgacattttatttaaaatattctggtaatgtttataaagcacattaagcacttttacaatattttaaaaatcaaggaaagttacttggtattatcacatgtcttccaaggaaattgttttgaaagttgtggtccaacattcctaaaaacaaataattagattcctagccttatagcaatggtgtgatcagtctctcagagagtgagcatttattggtccctccctcccctttcttactcaggctactctctaatcatattttgttttcttttctagtcttccctctgttgccacaatatttttttgctagcagcctcaatttttccagctgttagctactggagctttttttattatgatacatttttctgaaatccctagactcctctatttcttagatctgtcttataagacagctcatgaaacagacaatggagagaatttattgaatgttcactgcgtgaacaggaaaggccaaggtaagatgcagaaatacttatggtccagttgggagacacaatataaatgcatgaaaatgacaagcagagatgaagcaaacagtgccagtaagtagctccagatggataattgagggatatccagtgggatcaggttcattaggggagatattctggaagagaaaaattgagagtggaggacaaaaggaaggactggagcaagactactgggaacaggagagaatgctctcattattgcctcacagagagttatatggcgattcacctgtggagctttgcttctaacagtcactttaacaatagcctgcatagcacttggactcctgagtgctagactggcttcctagctctgtgtgtgtattagtctgttcttacactgctaatgaagacatacctgagactggataattataaaggaaagaagtttaattgactcacagtgccacatggctggggaggcctcacaattatggtggaaggcaaggaggagcaagtcacatcttatatggcagcaggcaggagaagaatgagagtgaagcaaaaagggaaaccccttatacaaccatcagacctcgtgagatttattcactgccatgagaacagtatgggtgaaactggccccatgattctattatctctcaccaggcccgtcccataaaacgtgggaattatgggagctgcatttcaagagatttgggtggggacacagccaaagcatatcagtgggtgagtgagaaccagtgtcgttaactgtgcactcccacaactgttcattaagtcctttcaactggacatttctaaggaaactacgaggttaagaggtgggtgtatatattcatttgcctagggagtttggtgaaatggtaactttgaaaatgttttctttgctaaaaagattttgttcctgaagcctgttctttgtgaaaaatatcatatctccccatttggaaaatcacgttgaatacagaaagtggcagcttgtgaaaacacacactcaacgtgtttcttactttctcaaggcgataaactatagttgatgaactgcaaacctctctgaattatagaacctctctgctaacccgggggattttaacagatttttaaacttctgtctcttaattttgtttttcttcccttggtaagtgaataagtagagttaaccttacaatcagatcaaacacttcattctgatcccaggaagcttgggtccttagcacctggatttttagcagtttatagaatgtgc

SEQ ID NO: 57904 - DNA, 1093 bp, Homo sapiens
atgatatagagggtgctgtgctagatattatagtagttggtggatgaggaagacccagtcttggccttggaagagtcattagacataatgtcgaatgtgtaaaatattcactcatccatttgttcagtcaaaatttactgagggtccatatgtgaatgacactgctccacgctgtatatggagcacagatggttgagaaacaactcttgcctttatagagaaagtgtaaaagaaaaaaaaaaaaagcaaacgattaaatatttaaaagagtaaatagacacttgtaaatagagtctgagtgaagtggagcactgaggaaggagagattatttacaacagaaagatcagggaacgtttctgtcatagccctgggagtaggggaaccagcaggagaccagtgggtatggaagaccactccgctctccmcttagcatcatggtgccattagcatggccaaacttgtgtggaatccagttccaatattcttagacctgaagatgctcttgtttggctagaagtgagacaatgtaacttagcctaagttcattatcaccaaacagctatttttgttttttgcatagctcagtaactctgtggttctaatcttctcattctccctggtaattctgacgcccccagtttaaggagcactgatctgaacagatgggacactggccctttcaagtaacctatattattacatgcttatgataggaaattaatagctctaatcttattttctaatgaaactgacagcttatgggactcattagttaacaagcccctttaatgactgagagcttaccaaagagtacaggaattttagttttaagttcaaagttgtgtttcaaaatagcaggaagatgtttgctgaattggctagcttatcttcagccatttgtaaatctttaattcaaaaaatattcttgcttttctcgcattgttatttgtccactgatgaattccctgctacacactttccttccatgggcaactaaccaatatacttagtctctttttcctggaaagaacataaaacataacatgacttttatacagaatttttatttataaaattgaccttttcttgaat

SEQ ID NO: 57905 - DNA, 739 bp, Homo sapiens
cagatcatatggaaagaccacgtagaggagaacagaggtgctccagttggcagccctaattaagctcctagtggacagtcagaaccaactgtaagccattttggatgttctggatgtccaggttgaaccccccccagtgactgcagccccagggagtatcacatggagcagaagaactgactgagcctagccaacttgcagtgtcatgagagataatatagtcattgttttaagtaactacattttgggatggcttgtgatacagtagtagatacttaaaacatctcactattggtattatttgtgtccagttattcatgcctaccaatgacwtggaatcataactataagaacaaactagtagtgttagtgaatcactaaacagctcatgaatttttgtcctcacatttcctagtctgagtcatattattcaaaattccattctggatatcttgtataacacattccaggaatatgtgtaatatattccaagattctctgaatgtgtaactggaggattgtttaagaaactaagattacattttttaagagttggaaagtcagagaatctatgatctggtatgtctgggtctctccccatccgcagaagacacaaatgaaagctagacaatctgaaattatcctcctctctcttacatcaagaagcctagaaagtataataaaaagacactaataattaaaaattttggttgtgatcaaaaagatacaacatatttat

SEQ ID NO: 57906 - DNA, 739 bp, Homo sapiens
cagatcatatggaaagaccacgtagaggagaacagaggtgctccagttggcagccctaattaagctcctagtggacagtcagaaccaactgtaagccattttggatgttctggatgtccaggttgaaccccccccagtgactgcagccccagggagtatcacatggagcagaagaactgactgagcctagccaacttgcagtgtcatgagagataatatagtcattgttttaagtaactacattttgggatggcttgtgatacagtagtagatacttaaaacatctcactattggtattatttgtgtccagttattcatgcctaccaatgacatggaatcataactataagaacaaactagtagtgttagtgaatcactaaacagctcatgaatttttgtcctcacatttcctagtctgagtcatattattcaaaattccattctggatatcttgtataacacattccaggaatatgtgtaatatattccaagattctctgaatgtgtaactggaggattgtttaagaaactaagattacattttttaaragttggaaagtcagagaatctatgatctggtatgtctgggtctctccccatccgcagaagacacaaatgaaagctagacaatctgaaattatcctcctctctcttacatcaagaagcctagaaagtataataaaaagacactaataattaaaaattttggttgtgatcaaaaagatacaacatatttat

SEQ ID NO: 57907 - DNA, 769 bp, Homo sapiens
tttcttcataatggagcaattgctacaagagcaccaaacacaggtgccctaggactcaggagcagggagagctagcccaaggtcactctgagctgcccgacctctggactcccagcctggggctcttcccaaaatcagaatgcccttgtactttctgattttccactccatccgccatcagccaatgaaaattattctagccggtggtgttcatgtagtcattgactgttagctttgaaagggaccctaaagcccctctccagcagccgcctatatcaactggtattccctccacaccttagacattctcggcaacaggggattctctatctccaagaaaacaactgcacactttcagaatggcagcctgcatgaaaaaagactgcgtttggggggctgcaggcttggtgggagccagccatattaagtggctgccaaaaagttagggctatcatgggctgcatttaatagttacwtggtgcctagaagggaagtaacagataaggggtgcgccccctgctggggagaccacagtttctcctgggctccatttagggctgttttttaaaagatatcttagacagctgcagccttgggattcaggctccaaatccactgttcacattgtccacctttcctctcctcaagggggggactttccagcaaacagtgaggcaggcaagcttgagaccctcctttacctgttcttctccctccctcccgcacttgcttcccacttgaccccagagcataaggggcaagaactccc

SEQ ID NO: 57908 - DNA, 1113 bp, Homo sapiens
ctctggctcacactgacatgtgaaaactcaggaaaatactatagaaccaacatgacattacagtgtttccatattttctggccagcctctcccagacactcattaccagacatgcaagggagttttgaggataagcccccactcagctacacactgtgctatgaactcagcccccaagtgggctgggttctctggggctcagttgggtctcctgtgtcctttggggagaagagatctcccttttcaagattggaccatgctccaaggacagaagccaggtgtctggctgtctggtacaatcagtagcttttttcaggattcaggaaaggctcagagggtgataactaggtctgggagtctgcagacaggagaactcacctgctaactgacgcacagggatgcagtcccatggagaaatagctagtgcctcatctctaggaggattccaataggggcagcatgatagccaagcagagatgttgtgggataattcatttatttagttcagctcctactctctatcagaccctgtgcccagtgcttggaatacagtggtgagtaacatacaagcctgtcttcaaaggatcttagagtcttaaatgggaaagctagacacacacagttaatagataggcctgggccaggggacagagataaggctggggcagagaggaaagtgatgtaatgggtctctagtttccacaatggaatgttggtatcagggactgaagtggatcgcttaacatcctgtgcccaaggcacagttgtggcaccttggaagtttttttttttgttgttgttgttgttktttttgagacagtctcgctctatcgcccaggatggagttcagtggcatgatctcggctcactgcaacctctgcctcccaggctcaaacaattcttgtgcctcagcctcccaagtacctgggattacaggtgtgtgccaccacacctggctaatttttgtattttttagtagagatggggttttgccatgttggccaggctggtcttgaactcctggtctcaagtgatctgcctgcttcagcatctcaaactgctgggattataggcgtgagccaccgcatctggccctgcatcttgcaagtcttt

SEQ ID NO: 57909 - DNA, 656 bp, Homo sapiens
agaaaatgttcgatataattcaatttatataaagttccagaacagacaaatctaacctatggaggaaaagaattacaagagtggctttgtctggtaggtggggcagggattgactaggaagaggcaggaggkaatggtaatggggttaggtactgctctatatcttggtagggattgggttgcaccggtttattcatttgtcaaaatttggaaaagtttcacttaagatgctgcatttttttgcttatgaatttcacctcaaaaaattaaacaaggctggccgaggtggctcacacctataatcccagcactttgggaggccgaggtgggcggatcatgaggtcaggagttcgagaccagcctggccaacggtgaaaccccgtctctactgaaaatacaaaaattagccaggtgtggtggcgtgcacctgtaatcccagctgctcaagaggctgaggcaggataactgcttgaacccgagaggcagaggttacagtcagctgaaatcatgccattgcactgtagcctgggcaacagagcaagactccgtatcaaaaaaaaataataataataaattaaacaatactgaaccctagttaatgaaaggcatgctgaagtaattaggggaaagggtgtcgatgtctgcaatagattttt

SEQ ID NO: 57910 - DNA, 1172 bp, Homo sapiens
gcagcttcacctgcacatgcccagggcgtgttctggtgtcttccctcatgccgaaatcaattcagtccagagaggaggtgactgggagccaccatggggcatatcactggtctttaactggctgttgggtccagaggcaggacaatcagagacccctctcagggcctttgctctgtccttagaggtagaaggcagcctgtgccccaactccctcaccccctacaaaccacactccaggcaagggtggccagcagtagtctgtgggtcgtctcttccttgtgagcacatcctgccacagcactgcttcacaggagagagccatgtggacaagccccatccttctattctactctgtactcatccagcaattgctgcagagccaccccatggtggctctgcaagtggctaaggatacagggcttaataagacaccatcttttgtagccagcctccaagatgtatccttgggatccttgcttstggcattcacacacttctcggccccctctcacgttgaatcagggctggccttgatcactggattacagtagaagtctcagcagatgatttccaaggtgaaggcttgtagtttccaccttgctctcctgaatggctcgttccagggtaagccagccaccagaccatgaggacactcgagcagctccataaacaggaccccagggaaagatactgagcccctggacaatagctagcattcattttccagccatgtgagtgacctaccctagaagtagacccccagccccaatcaagcccttagatgacacatgactgcaactacatgagagatctcaaacaagagctgcccagccctgacacttccaaatccacaaaaattatgaccgttttttttaaaaaagattattgctgtttaaagccactgcattttgaagtgatttgttatgcattaatagataataaaaagcaaactgacttagccatttttattactgtcctaaattctctgcaacaacatccctccttatgtcctgcacactgggtaaactacagcacctgccatgtcctggatagatgtatgggagtggaattgctgggaattaggataggggtatgttggcttttaccagtttattttcccaccagtaatgtatgagagctttatctcctccacctcctcaacaactcttggc

SEQ ID NO: 57911 - DNA, 696 bp, Homo sapiens
taagctcaccgaccagacatcaagcctgtttagactttttcaaggagctagcagggaggcagacaggggcacagtcatccatacggcagtgtggtgagagtgagccctggatagacacctgtgaggacaggagcagctgaggattattattatgagacaggtttttaattattattattatgagacagcttcctggaggaagtggctttaagctgggtgttcaaagatgagtaggaaagagccaggagaaaaaagcactgaagaaagcatcaggtgcaaaggcccagagttgatagagaagtggkaggttctctcaacagccggtagctcagacaaggcgggaaagaaactggctgaggaagtcttctgtatccactgctgaccactgacccagcccaccagccagagcccctagatagcagcagcaccagctggggcctcacccagctttgcccttagagacgatgcagttagatggttgggaaactttgcgcgcggtcagctctcaggagtctccgtccccaggctttggctcccttcccttcctccattcaagcattgctcagggctgagctgggccaaatgaaatcacaatgctggctggccctggctcctcctgatggccccctgatttatgtcacagcattcccaatatgccttattgccaaactgggccaactcatagcatttacttta

SEQ ID NO: 57912 - DNA, 696 bp, Homo sapiens
taagctcaccgaccagacatcaagcctgtttagactttttcaaggagctagcagggaggcagacaggggcacagtcatccatacggcagtgtggtgagagtgagccctggatagacacctgtgaggacaggagcagctgaggattattattatgagacaggtttttaattattattattatgagacagcttcctggaggaagtggctttaagctgggtgttcaaagatgagtaggaaagagccaggagaaaaaagcactgaagaaagcatcaggtgcaaaggcccagagttgatagagaagtgggaggttctctcaacagccggtagctcagacaaggcgggaaagaaactggctgaggaagtcttctgtatccactgctgaccactgacccagcccaccagccagagcccctagatagcagcagcaccagctggggcctcacccagctttgcccttagagacgatgcagttagatggttgggaaactttgcgcgcggtcagctctcrggagtctccgtccccaggctttggctcccttcccttcctccattcaagcattgctcagggctgagctgggccaaatgaaatcacaatgctggctggccctggctcctcctgatggccccctgatttatgtcacagcattcccaatatgccttattgccaaactgggccaactcatagcatttacttta

SEQ ID NO: 57913 - DNA, 696 bp, Homo sapiens
taagctcaccgaccagacatcaagcctgtttagactttttcaaggagctagcagggaggcagacaggggcacagtcatccatacggcagtgtggtgagagtgagccctggatagacacctgtgaggacaggagcagctgaggattattattatgagacaggtttttaattattattattatgagacagcttcctggaggaagtggctttaagctgggtgttcaaagatgagtaggaaagagccaggagaaaaaagcactgaagaaagcatcaggtgcaaaggcccagagttgatagagaagtgggaggttctctcaacagccggtagctcagacaaggcgggaaagaaactggctgaggaagtcttctgtatccactgctgaccactgacccagcccaccagccagagcccctagatagcagcagcaccagctggggcctcacccagctttgcccttagagacgatgcagttagatggttgggaaactttgcgcgcggtcagctctcaggagtctcsgtccccaggctttggctcccttcccttcctccattcaagcattgctcagggctgagctgggccaaatgaaatcacaatgctggctggccctggctcctcctgatggccccctgatttatgtcacagcattcccaatatgccttattgccaaactgggccaactcatagcatttacttta

SEQ ID NO: 57914 - DNA, 767 bp, Homo sapiens
  misc_feature (1)...(767): n = A,T,C or G
cacacattaggttatgttacacttgctcagcttggatcacagaaggctcctaaagtgccttgcaacttgagtgtcagcagctacaagacctcccctaattaatctttcaggaatctcaactggtgactcaggagaagagctctctgtaaatccacaatactcaccagctggccagagaatagcagaaacgaaggctagcccagtgcccaaacacaggaacatgaggggaactatctcagcccaaggcagttcctatgaacagccctagggtagggaagcaatatgaaaaagaagacagatcccactctgcaaggaactaagaggttctactcaggaaaagaaaggtccatatatgctactgaaggttgccaactttggggaattcttaagactgataagtggcggggcacagtggctcacacctgtaatcctaggagaccgaggctggaggactgcttgagctcanggaggttgaaaccagcctgagaaacatagtgagaccccatctatacaataaatttttaaaaacttagctgggcatgatagcacatgcctgtagtcccagctactcgagtggcttaggtgggtcaattaagtccagcragccaaggctgcagtgagctgagatcaagccactgcactccagcctgagcaacagagtgagaccctgtctcaaaacaaaacaaaacaaaaaggctgacaagactatgagccagtaaccagagtaagcgcaatgtattatacagtgactgaaaaaaacgctggct

SEQ ID NO: 57915 - DNA, 593 bp, Homo sapiens
ggggaaaaatgcactctaaattttctgttcccagaaattgtagaagacgaatagacctcaccttaccaggaaaaactaaattgctctgtttttgcagggagtgaaaacaacatgaacagtttcaggttctgcaatgtgccatctacaataatctgaagcatgaattctaaatgtcctaaaaatgaacacataactgcaccttcttgaaagcmgacaagtaacatccttccttactcctgaatcagcctcagagacggccttaatggtgcataacaaggagacaccgaaaggcacattgagccagactctgataaactctgaagaaactggaggtaagaaaagaagaaaatcaatactgatccatacaaatgagagcaatacaaaataaaatcaatcaattgtgagataaaaaatatatcataccttatcattttgttatactgaattattaaagagaagtctcaataacacgtatttttaaattttgaattaactggtagaaaattcaaaaataacaaatatatgttttttaaatggaatcaatattttactatttacacctattctgattttaaatcatccagcacactctt

SEQ ID NO: 57916 - DNA, 661 bp, Homo sapiens
ccaatacccagccccccgggtcctggggacgacctgtgctccgacctggaggaggcccctgaggctgaactgagtcaggctcctgctgaggggcccgacttggtgcccgcagccctgggcagcctgaccacagcccaaattgcccggagtgtctggaggccttggtgaccaatgccagccagagtcctgcgggggtgggcccggccctccctggatctcctccctcctcccaggggttcagatgtggtggggtagggccctggaagtctcccaggtcttccctccctcctctgatggatggcttgcagggcagcccctggtaaccagcccagtcaggccccagccccgtttcttaagaaacttttagggaccctgcagctctggagtgggtggagggagggagctacgggcaggaggaagaattttgtagagctgccagcgctctcccaggttcacccacccaggcttcaccagccctgtgcgsgctctgggggcagaggtggcagaaatggtgctgggcactagtgttccaggcagccctgggctaaacaaaagcttgaacttgccacttcagcggggagatgagaggcaggtgcactgagctgcactgcccagagctgtgatgctctgtacatcttgtttgtagcacacttgagtttgt

SEQ ID NO: 57917 - DNA, 2309 bp, Homo sapiens
ttccctctggggtcgggaaaggggccaggagctgggcccaacccagatgtggtgcaggcgccctgcctcacctttcagagcccacctgtgggggccgccagctgcctgctctggcaaaggtaaaggataagcagttgttcgtcccttcagaataaatttagagaaaaaaatagtctttccatacatttcagagagagaaaaccgttaggcattttagaaatgaagttgtttggaaaagctggaatcttgctgtgattgcagtcgtgggaggccgggtcgtgggggcagtggggagcgtgagcaaggcaccctgctccctgcacgcaggcgtccccctgccaccttagcagctgcaaccagtgagtgggtcatatcccagagtgacttcctgagggttctttgccttgaccagggctggctttgggtatacagactgtgagatccctgggcagatgccgctggcccccgaggcactgcaggccaagtgtgctgcactgtggatggcagccttcttggctgctgggcctgcccctgtagccaccgtctaccctgcctcatttccaggctccgctccccagccaggccctcccagccgggtctggtctagtccctggagccagctgggggtgtgcctgcctctgggcctctgccggtgcctctgacccccactctcctcagggcctcctgtgccccagctctcctccctgcccagctaagtcaaggaccaggtgaattctcaggggcctttccaagctgctgattttatatcattttccgtaactagccattgcttctactttcctaatttcttttgagtagatgaaatgtatgaaagacctagatctaagattttttttttttttagtttagattcccacgaaagcagagatttctgttttttaaatccctttcaactattagggaaacacctcttccttcatttctgatgaggttgcccaattgatttcatattttcactagacatttcacattttaaaggaagttactattttaccaaaataccgatgtaagccttgaatgccaagttgtttctgttagaactgactatcccaaaaatatgtagcatgaaatgtttggggcttctgtttcactgtggccaggcctctgcacacctaccccaaagtctgaggcagctgagaggccaaagaaagaggctgacaaattcggtttcttagaaagaaatatttaacagggacttaagaacagaggccatgcatgttgtgggtggcgatgagacaagactggatcccagtcttgccattcccccagacccagggcttctgtgggactggcacaccggcttcagagggaaccagtaggaatttgccctgagggcaggatttaccttaagtacctgctcttactcagggacagtaggtagatgaaatctccgaggccttcccagaagtggggttaatcaaaaatcagcatggaggcttagcttccaagatatagctgctgtggcctccacagctttctttgtcaatgttctggacatccgtgastgtgctcagttgtcggttagttggtgtgtttgcagcagtgcaccatgagtgtgctcagttgtaggttagttggtgtgtttgcagcagtgcaccgtgtgttcagttgtaggttagttggtgtgtttgcagcagtgcaccgtgagtgtgttcagttgcaggttagttggtgtgtttgcagcagtgcactgtgagtgtgttcagttgcaggttggtgtgtttgcagcagtgcaccgtgagtgtgttcagttgcaggttggtgtgtttgcagcagtgcaccgtgagtgtgttcagttgcaggttggtgtgtttgcagcagtgcaccgtgagtgtgttcagttgcaggttagttggtgtgtttgcagcagtgcaccgtgagtgtgttcagttgcaggttagttggtgtgtttgcagcagtgcaccgtgagtgtgttcagttgcaggttagttggtgtgtttgcagcagtgcaccgtgagtgtgttcagtggttaattaattggtgtgtttgcagcaacatcatgtgccattttgaaaatgtaagcctcctggtgctaaaattttagcactgcataatttgtaatgcaccacactcatgaagtctatgtaattttagtcaaaaatgtaatagaaggtttctcacataaaggatttactttgtgcttccataaattttcagttttcaccttgaatcttgcttgattctgctgctcctcttttgtttgtgagaaatgaggaacactgtatttagttgttggtttggatgaatgactttgggctctctcttt

SEQ ID NO: 57918 - DNA, 588 bp, Homo sapiens
ctgctcctagcaacagcccctcacccacacctcacagctgytgctgcccagaaacagggcttgcttgagtgagctggcaggggggccggatacagggaagcagagttgtgggacctagctctgagcctgcttctggcctttccccttggatggaggtctttatccttgcagggcagccttcaaaggtgcaaactctgccaagctgccaattcctcaagaaaggggtcttggggcaaccaatggtttaagtaaacccattgtatcacattttgaacatacagaactgctaacacagagacctctaatttcctttaataaacccaaactcttccatttgagtaagcttcatacattaaatagcaacacctactgttaaagcataacaagtctcctttccatttttcacatcataaatgtaagtttgggtcccatcaaggggcagattcctctaagtgccaatgtaaagtgccccctcctctatgtagtcctcctgaatgaccctccatgccacaggtgggagtggtcttttcctcccctgaactctctcatgctcttcccagctatctttcattgtagcaagatcttggt

SEQ ID NO: 57919 - DNA, 552 bp, Homo sapiens
tttcattttccaagtagaaattaacattagttcaggagtaaatraaagaactaagtgtgtagttaaaaatatgttttattgcattaaaaagtcttaagacagccctggtaaatgagtatgaaccacctggatgtcttctatcccaaatatgggaggagattttttgaaaatgcaatttggaaaatcaagcctggcacagtggcccacgcttgtagtcacagctattcaggaagctgagttgagaggatcgcttgcttgagcaccaagagtttgagtccagcctgggaacactgtgagacctcacagacagagacagagaggcagagaaagagatggaaaaagagggaggaagaaagaaaatataataaaaatgcctaaaaggagtagtcaaataacccacttttgtaaaaatcctaacagagaatacccattaacacagaaataataatgttttcattattacactctagttttccagtgtggggataaaactggaaaatgtttatgtcataatgttaagtgaaaaaatcagaatatgaataaatatggtta

SEQ ID NO: 57920 - DNA, 944 bp, Homo sapiens
ccctttattgccacaaaaggacacagggtgctccccattcatacatctttagaagagtgggaaggaagactgawcatttatctgaaaggctgatatggtttggctgtgtccccacccaaaatttcatcttgaattatagctcccatagtccccatgtgtcatgggagggacctggtgggaggtaatgaatcatggggcctgtctttcttgtgctgttctcgtgatagtgattaagtctcacgagatctgatgggtttataaaggggagttcccctgcacatgctctcttgcctggcaccatgtaagatgttactttgcttctcctctgccttccgctatgattgtgaggcctccccagctatggtgaactgtgagtctgttaaacctcttccctttataagttacccagtttcaggtatgtctttattagcagcatgagaacagactaatacaaaggcattgttcaaaccagaagaaactgaggttttgttaagagtaaattttttcttccctaactcagagaaagctataaagattttgaatgtcctcatcacaaagaaatgataaatgtttaaggtgatgcatatgctaatttccttgattttatcattacgcaatttacacatgtattaaaatatgttgtgtcctgtaaatatgcacaattatgtgtcagttgtaaaaagaataaaagtaaaataaaagatgactctcagaatgttacctcaaaatcaaaaccaaaccaaaccaaagcaacagctatattttctttgtgcagctcctgtgtcaaacagcctgaaacagataaggtacaaatgtgacaaaatttgatttgtctccaacaattaccctcaaccacactcagatgaaacagccttctaggtagaactgatagctttcttgtcactttcaattaataaaaagtctaatccaaataacttcattgt

SEQ ID NO: 57921 - DNA, 944 bp, Homo sapiens
ccctttattgccacaaaaggacacagggtgctccccattcatacatctttagaagagtgggaaggaagactgaacatttatctgaaaggctgatatggtttggctgtgtccccacccaaaatttcatcttgaattatagctcccatagtccccatgtgtcatgggagggacctggtgggaggtaatgaatcatggggcctgtctttcttgtgctgttctcgtgatagtgattaagtctcacgagatctgatgggtttataaaggggagttcccctgcacatgctctcttgcctggcaccatgtaagatgttactttgcttctcctctgccttccgctatgattgtgaggcctccccagctatggtgaactgtgagtctgttaaacctcttccctttataagttacccagtttcaggtatgtctttattagcagcatgagaacagactaatacaaaggcattgttcaaaccagaagaaactgaggttttgttaagagtaaattttttcttccctaactcagagaaagctataaagattttgaatgtcctcatcacaaagaaatgataaatgtttaaggtgatgcatatgctaatttccttgattttatcattacgcaatttacacatgtattaaaatatgttgtgtcctgtaaatatgcacaattatgtgtcagttgtaaaaagaataaaagtaaaataaaagatgactctcagaatgttacctcaaaatcaaaaccaaaccaaaccaaagcaacagctatattttctttgtgcagctcctgtgtcaaacagcctgaaacagataargtacaaatgtgacaaaatttgatttgtctccaacaattaccctcaaccacactcagatgaaacagccttctaggtagaactgatagctttcttgtcactttcaattaataaaaagtctaatccaaataacttcattgt

SEQ ID NO: 57922 - DNA, 899 bp, Homo sapiens
aaaacaagatatttattattttttaattttttaatttaaattacatttttttgagacaaggtctcactctgtcacccagtctgagtgcagtggcatcatcatggctccctgcagcctcgatctcctggattcaattgatcctcgcatctcaaccacctgagtagctgggactataggcgcatgccaccgcatttggctaatgtttctatttttttgtagagatgtattctccctatgttgccaggctgatcttgaattcctgggctcaagtgatgctgctgcttcaggctctcaaagtgctgggattacaggcatgagccactgcacctgcccttattttatatatatatacatatatayacacacacacacacacacacacacacacacacacatatacacatatatatgtatatatatgtatttttttttgagacagactctcactcctgtcacccaggctggagtgcaatggtgcgatgttggctcactgcaaccttatattttttaaaatccatttgtttttagattattttctgacataagtgcatgacatgatttggctgtgtccccacccaaatctcatctggaaatgtggctcccataatccccacttgtcatgggagggatctcgtgggaggtaatggaatcctgggggcaggtttttcccaagctgttcttgtgatagtgaataagtctcatgagtctgatggttttataaagggcaattcccctgcactctctcttgcctgccaccatgtaagatgtgcctttgctcttccttcaccttccgccacaattgtgaggcctccccagccgtgtggaactgtgagtccattaaatctctttttctttataaattacccagtctcaggtattttttcataggagtattattc

SEQ ID NO: 57923 - DNA, 899 bp, Homo sapiens
aaaacaagatatttattattttttaattttttaatttaaattacatttttttgagacaaggtctcactctgtcacccagtctgagtgcagtggcatcatcatggctccctgcagcctcgatctcctggattcaattgatcctcgcatctcaaccacctgagtagctgggactataggcgcatgccaccgcatttggctaatgtttctatttttttgtagagatgtattctccctatgttgccaggctgatcttgaattcctgggctcaagtgatgctgctgcttcaggctctcaaagtgctgggattacaggcatgagccactgcacctgcccttattttatatatatatacatatatacayacacacacacacacacacacacacacacacacatatacacatatatatgtatatatatgtatttttttttgagacagactctcactcctgtcacccaggctggagtgcaatggtgcgatgttggctcactgcaaccttatattttttaaaatccatttgtttttagattattttctgacataagtgcatgacatgatttggctgtgtccccacccaaatctcatctggaaatgtggctcccataatccccacttgtcatgggagggatctcgtgggaggtaatggaatcctgggggcaggtttttcccaagctgttcttgtgatagtgaataagtctcatgagtctgatggttttataaagggcaattcccctgcactctctcttgcctgccaccatgtaagatgtgcctttgctcttccttcaccttccgccacaattgtgaggcctccccagccgtgtggaactgtgagtccattaaatctctttttctttataaattacccagtctcaggtattttttcataggagtattattc

SEQ ID NO: 57924 - DNA, 899 bp, Homo sapiens
aaaacaagatatttattattttttaattttttaatttaaattacatttttttgagacaaggtctcactctgtcacccagtctgagtgcagtggcatcatcatggctccctgcagcctcgatctcctggattcaattgatcctcgcatctcaaccacctgagtagctgggactataggcgcatgccaccgcatttggctaatgtttctatttttttgtagagatgtattctccctatgttgccaggctgatcttgaattcctgggctcaagtgatgctgctgcttcaggctctcaaagtgctgggattacaggcatgagccactgcacctgcccttattttatatatatatacatatatacacayacacacacacacacacacacacacacacacatatacacatatatatgtatatatatgtatttttttttgagacagactctcactcctgtcacccaggctggagtgcaatggtgcgatgttggctcactgcaaccttatattttttaaaatccatttgtttttagattattttctgacataagtgcatgacatgatttggctgtgtccccacccaaatctcatctggaaatgtggctcccataatccccacttgtcatgggagggatctcgtgggaggtaatggaatcctgggggcaggtttttcccaagctgttcttgtgatagtgaataagtctcatgagtctgatggttttataaagggcaattcccctgcactctctcttgcctgccaccatgtaagatgtgcctttgctcttccttcaccttccgccacaattgtgaggcctccccagccgtgtggaactgtgagtccattaaatctctttttctttataaattacccagtctcaggtattttttcataggagtattattc

SEQ ID NO: 57925 - DNA, 899 bp, Homo sapiens
aaaacaagatatttattattttttaattttttaatttaaattacatttttttgagacaaggtctcactctgtcacccagtctgagtgcagtggcatcatcatggctccctgcagcctcgatctcctggattcaattgatcctcgcatctcaaccacctgagtagctgggactataggcgcatgccaccgcatttggctaatgtttctatttttttgtagagatgtattctccctatgttgccaggctgatcttgaattcctgggctcaagtgatgctgctgcttcaggctctcaaagtgctgggattacaggcatgagccactgcacctgcccttattttatatatatatacatatatacacacacayacacacacacacacacacacacacacatatacacatatatatgtatatatatgtatttttttttgagacagactctcactcctgtcacccaggctggagtgcaatggtgcgatgttggctcactgcaaccttatattttttaaaatccatttgtttttagattattttctgacataagtgcatgacatgatttggctgtgtccccacccaaatctcatctggaaatgtggctcccataatccccacttgtcatgggagggatctcgtgggaggtaatggaatcctgggggcaggtttttcccaagctgttcttgtgatagtgaataagtctcatgagtctgatggttttataaagggcaattcccctgcactctctcttgcctgccaccatgtaagatgtgcctttgctcttccttcaccttccgccacaattgtgaggcctccccagccgtgtggaactgtgagtccattaaatctctttttctttataaattacccagtctcaggtattttttcataggagtattattc

SEQ ID NO: 57926 - DNA, 899 bp, Homo sapiens
aaaacaagatatttattattttttaattttttaatttaaattacatttttttgagacaaggtctcactctgtcacccagtctgagtgcagtggcatcatcatggctccctgcagcctcgatctcctggattcaattgatcctcgcatctcaaccacctgagtagctgggactataggcgcatgccaccgcatttggctaatgtttctatttttttgtagagatgtattctccctatgttgccaggctgatcttgaattcctgggctcaagtgatgctgctgcttcaggctctcaaagtgctgggattacaggcatgagccactgcacctgcccttattttatatatatatacatatatacacacacacacacacacacacacacacacacacayatatacacatatatatgtatatatatgtatttttttttgagacagactctcactcctgtcacccaggctggagtgcaatggtgcgatgttggctcactgcaaccttatattttttaaaatccatttgtttttagattattttctgacataagtgcatgacatgatttggctgtgtccccacccaaatctcatctggaaatgtggctcccataatccccacttgtcatgggagggatctcgtgggaggtaatggaatcctgggggcaggtttttcccaagctgttcttgtgatagtgaataagtctcatgagtctgatggttttataaagggcaattcccctgcactctctcttgcctgccaccatgtaagatgtgcctttgctcttccttcaccttccgccacaattgtgaggcctccccagccgtgtggaactgtgagtccattaaatctctttttctttataaattacccagtctcaggtattttttcataggagtattattc

SEQ ID NO: 57927 - DNA, 899 bp, Homo sapiens
aaaacaagatatttattattttttaattttttaatttaaattacatttttttgagacaaggtctcactctgtcacccagtctgagtgcagtggcatcatcatggctccctgcagcctcgatctcctggattcaattgatcctcgcatctcaaccacctgagtagctgggactataggcgcatgccaccgcatttggctaatgtttctatttttttgtagagatgtattctccctatgttgccaggctgatcttgaattcctgggctcaagtgatgctgctgcttcaggctctcaaagtgctgggattacaggcatgagccactgcacctgcccttattttatatatatatacatatatacacacacacacacacacacacacacacacacacacatatacacatatatatgtatatatatgtatttttttttgagacagactctcactcctgtcacccaggctggagtgcaatggtgygatgttggctcactgcaaccttatattttttaaaatccatttgtttttagattattttctgacataagtgcatgacatgatttggctgtgtccccacccaaatctcatctggaaatgtggctcccataatccccacttgtcatgggagggatctcgtgggaggtaatggaatcctgggggcaggtttttcccaagctgttcttgtgatagtgaataagtctcatgagtctgatggttttataaagggcaattcccctgcactctctcttgcctgccaccatgtaagatgtgcctttgctcttccttcaccttccgccacaattgtgaggcctccccagccgtgtggaactgtgagtccattaaatctctttttctttataaattacccagtctcaggtattttttcataggagtattattc

SEQ ID NO: 57928 - DNA, 634 bp, Homo sapiens
tcttgattcacaaccactggttaacagtagctaacacctggaacaggaggggccgtctgtgatcaaatgctcttttagagaactgggtcgagtgttagttttttgggttttgttgagcggtggggaaaatatatctaaaacatttaccatttaaaccattttctaaaacataacattaaatttgccatcttaaccatttttaatgtgtacagttcagtaggtgttaagtgtatcacaccaytgtgcaacagatctccagagccttttcattctgcaaaactgtaatgcgttgttttatactcattaaacaccttcctatttccctcttccccagcccctggtaatcaccattatttctgtttctatgaatttgactttagatagcctcatattcatataaatgaaatcacatagtatttgtcttttcatgcatttcaaacatttttaagtgtacaattcattggcattaaattaattcacactgttatacaaccatcaacactattcctctctggaactttttcatccttccaaactaaaactctgtgatcattaagcaataactccccattactctgtcccccaggccccagtaaccactattccactaattttgtctactataggtacctca

SEQ ID NO: 57929 - DNA, 634 bp, Homo sapiens
tcttgattcacaaccactggttaacagtagctaacacctggaacaggaggggccgtctgtgatcaaatgctcttttagagaactgggtcgagtgttagttttttgggttttgttgagcggtggggaaaatatatctaaaacatttaccatttaaaccattttctaaaacataacattaaatttgccatcttaaccatttttaatgtgtacagttcagtaggtgttaagtgtatcacaccattgtgcaacagatctccagagccttttcattctgcaaaactgtaatgcgttgttttatactcattaaacmccttcctatttccctcttccccagcccctggtaatcaccattatttctgtttctatgaatttgactttagatagcctcatattcatataaatgaaatcacatagtatttgtcttttcatgcatttcaaacatttttaagtgtacaattcattggcattaaattaattcacactgttatacaaccatcaacactattcctctctggaactttttcatccttccaaactaaaactctgtgatcattaagcaataactccccattactctgtcccccaggccccagtaaccactattccactaattttgtctactataggtacctca

SEQ ID NO: 57930 - DNA, 627 bp, Homo sapiens
ccttaatatgaattgggggtagtttatgtaaaatttttcctttttacctactttctgatcattatatgaagtagattgggatcagacttaccaatattagctgtggccgggcgcagtggctcatgcctgtaatcccagcactttgggaggccaatgcaggtggatcaccagaggtcaggagtttgagaccagcctggccaacatggtgaaaccccgtctctactaaaaatacaaaaattagctaggcatggtggtgtgtgcctgttgccccagctgcttgggaggctctgaggcaggagaattgcttaaacccgggaggcggaggttgcagtgagttgagctcgtgccactgcactcaagcctgggtgacaagagtgagacgctgactcaaaaaaaaaaaaaaaaaaaaaaaraatgttagctgtttggcttaatagggcaagactgctcttagaaattgaaaggttggggctgggtttggtggctcacgcctgtaatcccagcactttgggagaccgaggcgggcagatcacctaaggtcagagttcgagaccagcctggccaacatggtgaaaccctgtctctaccaaaaatacaaaattagctgggcgtggtggcgcatgcctg

SEQ ID NO: 57931 - DNA, 753 bp, Homo sapiens
tttttgaaagtgattgtactagttttacattcccagcaatagttgtataagatttcccttgttttgcatttttaccaatacttaaartggcctgccttgagttgttgatacttgtgtcatttttgacatctgtcatccagactcaacctcctagggagcttgacccttcccttttttcagttttctctctagcctaggttcagtcagcaagacctatcagatttttcttttatattgcctttgtccttcctccattgccacagctcaaatattagtcatatatggagtaaatatcaggtgatttggatatcaggattatgacagtagtctgccagttggtgcatcttctagtatttctgcttttccaataaatcctgcacagccaagaaaatgcttcatgaaacaccgcaccattgctctgctcaaaagccgtcaacaacccttcattgcccattggatatcagccttcctccccctcttccttttccacctgtacctctcttccttcctcccttcttccgttctttttttttaattaaagtgtaatatatatgaagtgcactatgacagagattaaagtatagagcattaccaacacccagaagcctccagtttgcctcttcctagtcttctcttaagtcttctcttaaggtacccactattctgatttctgtcaccatacataggttttacctgattttgaactttatataaatgttaaaaagctaatttatagcttaaaaagtacaaact

SEQ ID NO: 57932 - DNA, 539 bp, Homo sapiens
tgggtgtggtggtatgagcctataatgccagctactcgggaggctgagacaggagaattgcttgaacccagatgcttgaagcagaggttgcagtgagcagagatcacgccattgtactccagcctgggcaacaagagtgaaactcggtctcaaaaaaaaaaaaaaaaaaatgtaacctataataaaaaaaacgagtaaattaactacatctctggcaaatataatgattttctctttttatttaaccaaataaaccaagtaaaaagagaaaaaaatcattatattaaaaataaccaaaaaaattacattaatagtgacagaacacagtagatattacacaggcatatatgcatgtgttcacaaagtgacatcaaggacatagaaacatgtttgtgatgtaatgttgagggaaacaagcaggtcacagaatgttacaggattttataaagatgtaaaggaattttactaaattatgggcaatcatactatggcatccttttttctgcacctttataactttctctkccttaaaagtattt

SEQ ID NO: 57933 - DNA, 1169 bp, Homo sapiens
tgaccaccctcagcaatcagagaatagggacttgaatattctgggtaasagaatattgcccttatgtaacatgacctgaaacagacgtaaataaagacaaacctttccataagttgttatggattagaaacctttatgtttaggatggggtgaaagtggtgtaaaagtaaacaggtatcttcatttattgtataattgcttatggactctgaaggaatatagtttaaaaaaaaatatggcccttcctaggagctttcaccttatttagagacagaatatagacattcattaatcagcagacaatgtatgtacaaagcagtttatccacgagactccattctaaagcatgagtcacacttagtatgcataggtccttcggtttcttgaatcagcttagttttctgctctcatttcacaagaatcactctcttccctcagaaatactgcattctaggcagatggaagtccttgtcattcctagaataagccatgtctcttctaaacatattctgccttgctcttctttctgtgcccactgaacttctactcatccttcacaaaccaattcaaataacatctgcataaagccttccccaagtatccctagttagacatttcctgcttctgtccttttgtggtgcttcatatcatctctgtttactctttgtagtaacactattttgacctggttctgtgcatgtgtgttctttgaggataaggctgtctcgtgtttcttggtacaatgaaactaatttttaagcagaaaacagcattaaataataagtatatttaaaaggaaaagatttataagataatgccattgtgttcagttctggtgcatctgttttgtgcacatgtgtatgtatttctgttgagctgcttcttaggagtagaactacaggataataagatatgcatatgtcctttttcagtagataatgccagttttcctagtgtatcagtattttttctagttgctccaagtccttgttaatacatgatattatcaatattttagatttttagctattctgaggtgtgtgttctaatttgcatttccctgataaatattcattggtcatttggatatcttcttttgtaaattgcctagtctagtctcgtgaccattttttaatgtgtttttattttgcttattgacttttaagagt

SEQ ID NO: 57934 - DNA, 1056 bp, Homo sapiens
cagtcctattaacttttgattagtattgcattacatgaatataccacatttgaaaaatatgtttttctgcagatacataccctagctgctcatttaatattaggttaaaagagcagctagcttcctacctgagagcagcttcctagaatgagtggagattttattccactcatcttctaggatttagaggaaagtttttcaaactccacactattgacatttcgtgtcagataattttttgttgtgggggagctgtcctgtattttgtaggatgtttagcagtatccctgcttctacacaccaaatgtcagtagcatcttagttgtgacaaccaaaaatgtctccaaacattgccaaatgtcccctggggccaggggaaacaaaatcacctctagttgataatcactgatctagagagtaaagctacagaagactcttctgtccttggattacatgctgctttctctcatgggaggaaaaaaaggaggattttaacaggagaatgccagggctccaggctcgagaaagaaaagtgactatttatcttactcagctcagagagctgtcagagagagacaataacctgagtactcataatcacaagtaagtgtccagatgctgggaggaaggttgagatcaagatgcaatctagaagtgtgtcaaaaattaatgctcttgttttatctgtgtataaaatcagtccttaaaggaaaagctaagaataaatatcttttacatttaattttttgtttgrggaaattttttaaatatataaaagaatataggcgaagacactatatcatacaacagaatgtaattgataatattttatcatattattattttgttaatatgttatcatatttgcataatcctgtttaaaagtaatacaatattaacaattgatttgtctgcagtattttaatctatttttaataattatgtgtgtattttatatatatacacacacaggtatctgagcaatatagaatattacatttacataatttatgtaatactgtatatattttctatagtatactttttcaacatgga

SEQ ID NO: 57935 - DNA, 2065 bp, Homo sapiens
gcataattctatacactgatataatctaaataatctaaacattttctaaataagttcaacactttggcattcacattctagtcaagggtggtttgtgatacatcttattatagccataaccaaaatgaccttcaaatttatttaaaagcatataactgatttaaaagcaagtgaccaataaatataaagaataacttactttctttatattgccatagctgtgatactacaatgatataaaaaagcaaagaaacctgaaattaaatttaccatattaagaaactagatgactatactaaataactaaattcatacttgtcctgaagtagttagaaaaatataattgggaatataggcataataatagaaagcttccatataaaaccacatagtacaagttcaaacttgttttcttgtactattttctccctactcctccaatattttatggcacttaaaggttaaatttttccatcccttgtagaaacgagtgggtctacagagggatgatggcttatgctctacaaatgcacgctgaaaagcaggttttaagatgcaacattctccaggcctaattcagccgcagaaaacatgcctggctgtagcagaagcccggcgcaatgctgtggaagccgcacgctgatccaagaaccatgtcctcaaagacatggtacctgaatatgaagttttcaagaaggttaactacaaataccactcacaggaatgggttatttcaacataagaaacaatagagttaacacccaaaaaaggccacgagaccattccccgccgcccaatagagtgaccttatatagaaattcccccatatgacaaatattgctcttgatttttatccaattaaataatgaaatttaacttttagagatagaagagaatgttagcaactggcctacttccactgaaatgcgctcacatttcatttattttcaatcagctatcaaatatttgactctcacaaactgctgtatgattcaagaggcaaaataaaagattcagccattacagattgcctttaaaatctagccatttctctaaaaagttgtggatttttgtcttgctagtagaagaggaaagttttggtcatacacactatcagggccttagtctgatcttttggatatgcataaccatatcttgacttatgatatttcacctgaaaaacaagacagccacacagtgaagccattgggttgcttgtcctaggcgggaaggaaaaggccagtagctcttttttttttttttttcacgatcacttatcgaaagattaaaaatatgaaccaccaccatctggtttgcctggacatatattaaatgtacaacatccccggagcttcttttatttttaaaatagcctgaataagaacatggtatgtgaaactgaaaataattacgttgtagttgaagagtagggtaaaagagcatcaaaaaggaaaaagaaaaaggccatttgttttcagaaaggatacaaaagtattcgtctgaascagctttaatttttttttttttcagcagaagtacactaaagcaccaagaccatctttaaaggttgagatgggtttaaaatggctattcacacacccatctgctcctctcaaaaattatctcacattcaatttcacaaagagcatttggaagacactggccatgtaacagagaaactgaaagctagagtcattattccattgctttccaaattccaaaaatagcacaaagtcatgtccagaagggcatgtgctccggaccttagtcaaacatctactttcaaagtttccataaagactctgaaaaggagggaatcctgttataaacacagtgtaaataataatatggcagtaccatttaattctattctgctggtgaagaaaaaagaaaaagaaatcagattttcttcaatgactaataatgttgttttattctaaatctaaaaatttggtgctgaataaaaattgcataaatcaccatggactgtatctttgttactattttccattgataattttatttctcattttttttgcattctgcaactaattctcagttatcc

SEQ ID NO: 57936 - DNA, 2065 bp, Homo sapiens
gcataattctatacactgatataatctaaataatctaaacattttctaaataagttcaacactttggcattcacattctagtcaagggtggtttgtgatacatcttattatagccataaccaaaatgaccttcaaatttatttaaaagcatataactgatttaaaagcaagtgaccaataaatataaagaataacttactttctttatattgccatagctgtgatactacaatgatataaaaaagcaaagaaacctgaaattaaatttaccatattaagaaactagatgactatactaaataactaaattcatacttgtcctgaagtagttagaaaaatataattgggaatataggcataataatagaaagcttccatataaaaccacatagtacaagttcaaacttgttttcttgtactattttctccctactcctccaatattttatggcacttaaaggttaaatttttccatcccttgtagaaacgagtgggtctacagagggatgatggcttatgctctacaaatgcacgctgaaaagcaggttttaagatgcaacattctccaggcctaattcagccgcagaaaacatgcctggctgtagcagaagcccggcgcaatgctgtggaagccgcacgctgatccaagaaccatgtcctcaaagacatggtacctgaatatgaagttttcaagaaggttaactacaaataccactcacaggaatgggttatttcaacataagaaacaatagagttaacacccaaaaaaggccacgagaccattccccgccgcccaatagagtgaccttatatagaaattcccccatatgacaaatattgctcttgatttttatccaattaaataatgaaatttaacttttagagatagaagagaatgttagcaactggcctacttccactgaaatgcgctcacatttcatttattttcaatcagctatcaaatatttgactctcacaaactgctgtatgattcaagaggcaaaataaaagattcagccattacagattgcctttaaaatctagccatttctctaaaaagttgtggatttttgtcttgctagtagaagaggaaagttttggtcatacacactatcagggccttagtctgatcttttggatatgcataaccatatcttgacttatgatatttcacctgaaaaacaagacagccacacagtgaagccattgggttgcttgtcctaggcgggaaggaaaaggccagtagctcttttttttttttttttcacgatcacttatcgaaagattaaaaatatgaaccaccaccatctggtttgcctggacatatattaaatgtacaacatccccggagcttcttttatttttaaaatagcctgaataagaacatggtatgtgaaactgaaaataattacgttgtagttgaagagtagggtaaaagagcatcaaaaaggaaaaagaaaaaggccatttgttttcagaaaggatacaaaagtattcgtctgaaccagctttaatttttttttttttcagcagaagtacactaaagcaccaagaccatctttaaaggttgagatgggtttaaaatggctattcacacacccatctgctcctctcaaaaattatctcacattcaatttcacaaagagcatttggaagacactggccatgtaacagagaaactgaaagctagagtcattattccattgctttccaaattccaaaaatagcacaaagtcatgtccagaagggcatgtgctccggaccttagtcaaacatctactttcaaagtttccataaagactctgaaaaggagggaatcctgttataaacacagtgtaaataataatatggcagtaccatttaattctattctgctggtgaagaaaaaagaaaaagaaatcagattttcttcaatgactaataatgttgttttattctaaatctaaaaatttggtgctgaataaaaattgcataaatcaccatggactgtatctttgttactattttccattgataattttatttctcatyttttttgcattctgcaactaattctcagttatcc

SEQ ID NO: 57937 - DNA, 757 bp, Homo sapiens
  misc_feature (1)...(757): n = A,T,C or G
ccgcctccgcctcccaaagtgctaggattacaggcgtgaaccatcgcacctggccagtctgttttttaaaagagaagacagctgggcatggtggctcacacctgttatcccaacactgtgggaggccaaggaacgcagattgcttgaacccaggagtttgagaccagcytgggcaatatagtgaaaccctgtctctataaaaaatacaaaaatttagttgagcatggtgatgtgcacttgtagtctcagctacctgcaggctgaggtgggagaatcacctgagcccagggaggtcgacactgcaatgagctgtgatcatgccactgcactttagcctaggtgactgactgagaccctgtctcaaaaaaaaaaaaaaaaaaaaaaaaaggaaggaacgtgtgtgggtgtgggtgtgggtgtgtgttctttttactgaagcaaaatattaattcaaatattttatataaaaaaaagaattgaccgcaaagggaatttctggctaggatttctgtttttaatcatgactatttcagttctgtaaatatgactattaacagtgttagaagacatattccatatatcagtagacttcggtattcaaagagaaacaagagcctggaaacattaaggcttcaatgttcatgatgtgaccaggatnatctaaattgaggcaatgattaaaatgttttgtcagggagtagtttattcagggaatcctggatgaattgccgagaaatcaatggtgaactattaaatg

SEQ ID NO: 57938 - DNA, 527 bp, Homo sapiens
tgaaatttaatgctcttaatatgatacattcatgatcactttaatagtatttttctaatttttaaattcccagttaaaagcattttgcactcattttaattcattttcttctgttaaaaaggaacaaaatataactgattaaaacttaagattgatattggaataaatatttagactgttagataacttcttttatattcgcatgagcattaactctacacagcaatctagatgcttagagaaccataccaatgcattctaagtaattgagtttttttcctttaatgttttgttaaataatcctggttataatttatttgagtaagttaacagtactagtatattgacattatttgggttgacaagtatttttagataattatttcastgaacatgtttcgggactaatggaataaaattactcatttaaagtaagtttattatcttgtactttgtaaaaagctttaagaatgtcactgttatttaataataggtaaaaggtatatttagttttaattttaataaca

SEQ ID NO: 57939 - DNA, 418 bp, Homo sapiens
tagtgttatttaactagaaacaatgctgatagaaatatatttgtaggaaagggacctaactttttcttatctaccagataagattctatgagataaacatgtatatatatatggacacaaatatatatatatatatatatatgtaaaataaaatcccttctataaatcacttctcataaaacactgtgacttaactactactatacccattttattttttatttatttatttatttattttttatttttttgaggcagagtctygctttttcgcccaggctggagtgcaatggcgcgatctcagcttactgcactctccctccccggttcatgcaattctcctgccccagcctcctgaatagctgggattacaggcacctgttaccacgcctggcaaatttttgtatttttagtagag

SEQ ID NO: 57940 - DNA, 418 bp, Homo sapiens
tagtgttatttaactagaaacaatgctgatagaaatatatttgtaggaaagggacctaactttttcttatctaccagataagattctatgagataaacatgtatatatatatggacacaaatatatatatatatatatatatgtaaaataaaatcccttctataaatcacttctcataaaacactgtgacttaactactactatacccattttattttttatttatttatttatttattttttatttttttgaggcagagtcttgctttttcgcccaggctggagtgcaatggcgygatctcagcttactgcactctccctccccggttcatgcaattctcctgccccagcctcctgaatagctgggattacaggcacctgttaccacgcctggcaaatttttgtatttttagtagag

SEQ ID NO: 57941 - DNA, 589 bp, Homo sapiens
tatttaataacttctttaaactttttttctagctagtttccatcagaaagttttcattgcttcatttttccttccttgccatgcacatatacttcataaacatgtaattctatggcatcaagtaaagtttcctttagtgatacattttaattaaaaaacaaatacttatttgtttatattggtagtagtcactgcatattactcattctgaccctgccttatgttactttaagagtggcataacaagtcaattaaatattactgatcacctattatgtgtgagctgttgggttaggtctgcagtagacacagttatacaatagcaataaatgtgttgagaacgctatgggaccatcttgctttgctttgttgcacagcgatgtaaagaacttttcagtgttagcaaaatgtgcacaactggacaaaargaaaccagacagaggtacatctgtgtaaatctgccaccactattataaatcagtttttttattttgctgtttgtaggtcataggtgaattctcatttatatcttggaaaaaaaagttaagggtttgaaaaagtaattaggaaagcaaaaagtctgtattca

SEQ ID NO: 57942 - DNA, 685 bp, Homo sapiens
actcccacagtgttcgctggcagcagcgaactgagttccagtcagcctgtaatccgaccttccactgcctggagtcataagctttccccatggagatagcaaccgccgccttcaagccacgcccctccctgtctgctgcaaaggtgggcgtccagcccctgcacccgcgggccctgcgcccgaggctcctgcaccggccgtccctgcaccctggcccctgcatccaaggctcccgcacccggggtccctgcactcgagactccagcacccgcagctcctgcacctgrggcccctgcacccaaggttcctgcacccagggcgcctgcacccgtggcccctgcaccccagactcccgcatccgcaactcctgcacctggggcccctgaacccaaggcttttgcacctggggctcctgcatccgcggcacctgcacccaaggctcctgcaccggggttcctgcacccggggcccctgaacccgagactcctgcacccgcagctcctgcaccaggggcccctgcacccgggacgcctgcacccacggcccctgcaccaaaagctcctgcacccgggacccctgcaccaaaggctcccgaaccttgaaacctgctttttactctctcccacctggggttatgtcgtgaaacgcccccattgggagcttctttgaacctgagaccacgcct

SEQ ID NO: 57943 - DNA, 641 bp, Homo sapiens
  misc_feature (1)...(641): n = A,T,C or G
aatactttttatgacaagagtgccaaaaaatatttttaaaatatttcaaaaactcttgtcttggccacccaatgagattgatgcatctctctggattttctccttcctaatgaatgmcactagctatactaaactgagcagatgctgccctttcttagtaaacagactgccagttttagctggacagcagctgtgtacagaatgtgaaggtttaccagctcactccctcaggataattctccatagacttctcattgcacacagaacaaaacgcagagctccctaaatgatcaggccttgcgctttcaaacccccatcttgttatgttctccctcactcattgagatctaatatttctgtctggctttcactcttgtgagtacaacatactcttattgccttagggcctgctgcttgctgcagctgctgtttgagatgttcttccccttgctttctgtctgaccaaggacagtttaacctccagctctcagcatcagtgcccttttgttagacgtttcgctggtgacgcttcattatatannnnnnnnnnnnnnnnnnnnnnnnnnnnnnnnnnnnnnnnnnnnnnnnnnnnnnnnnnnnnnnnnnnnnnnnnnnnnnnnnnnnnnnnnnnnnnnnnnnng

SEQ ID NO: 57944 - DNA, 641 bp, Homo sapiens
  misc_feature (1)...(641): n = A,T,C or G
aatactttttatgacaagagtgccaaaaaatatttttaaaatatttcaaaaactcttgtcttggccacccaatgagattgatgcatctctctggattttctccttcctaatgaatgacactagctatactaaactgagcagatgctgccctttcttagtaaacagactgccagttttagctggacagcagctgtgtacagaatgtgaaggtttaccagctcactccctcaggataattctccatagacttctcawtgcacacagaacaaaacgcagagctccctaaatgatcaggccttgcgctttcaaacccccatcttgttatgttctccctcactcattgagatctaatatttctgtctggctttcactcttgtgagtacaacatactcttattgccttagggcctgctgcttgctgcagctgctgtttgagatgttcttccccttgctttctgtctgaccaaggacagtttaacctccagctctcagcatcagtgcccttttgttagacgtttcgctggtgacgcttcattatatannnnnnnnnnnnnnnnnnnnnnnnnnnnnnnnnnnnnnnnnnnnnnnnnnnnnnnnnnnnnnnnnnnnnnnnnnnnnnnnnnnnnnnnnnnnnnnnnnnng

SEQ ID NO: 57945 - DNA, 628 bp, Homo sapiens
caccatcagcagcttttccaaaggacccaggcaaaatggtcaatattgccttctctcctcacttttacctcacctttcagcctcttggtcccttcctccactcccaccctaagatgcttatagtctatttgtcatcctccartggtttataattcctgtttcactaccttatttagcctgttgccttttacagcattccaaaatgctcatttattctcttttatgactcatccaatactaaccctatttaccattctaaactgaagtagactgcacctctttttctcaagtactaatgtagaatttcagttttatttgtccaatttcaaacactaggaaagtttaagaaataatcttcgtgccttcctgatagtggcaattgaacatttttcttgacataaaacaatatttggtcttaactgatctttgctgtggaccaggcactgttctaggtattttatacttgccagcaaaatctcacagcaatctttgggagtagttacttttattatctcattttacagatgaagaaatgtagaaagatagtctaacagcttgcccaagattatacatctaataagcagctgggtcaggaggcaaacccatccagtttggcctgaggccaggt

SEQ ID NO: 57946 - DNA, 628 bp, Homo sapiens
caccatcagcagcttttccaaaggacccaggcaaaatggtcaatattgccttctctcctcacttttacctcacctttcagcctcttggtcccttcctccactcccaccctaagatgcttatagtctatttgtcatcctccagtggtttataattcctgtttcactaccttatttagcctgttgccttttacagcattccaaaatgctcatttattctcttttrtgactcatccaatactaaccctatttaccattctaaactgaagtagactgcacctctttttctcaagtactaatgtagaatttcagttttatttgtccaatttcaaacactaggaaagtttaagaaataatcttcgtgccttcctgatagtggcaattgaacatttttcttgacataaaacaatatttggtcttaactgatctttgctgtggaccaggcactgttctaggtattttatacttgccagcaaaatctcacagcaatctttgggagtagttacttttattatctcattttacagatgaagaaatgtagaaagatagtctaacagcttgcccaagattatacatctaataagcagctgggtcaggaggcaaacccatccagtttggcctgaggccaggt

SEQ ID NO: 57947 - DNA, 628 bp, Homo sapiens
caccatcagcagcttttccaaaggacccaggcaaaatggtcaatattgccttctctcctcacttttacctcacctttcagcctcttggtcccttcctccactcccaccctaagatgcttatagtctatttgtcatcctccagtggtttataattcctgtttcactaccttatttagcctgttgccttttacagcattccaaaatgctcatttattctcttttatgactcatccaatactaaccctatttaccattctaaactgaagtagactgcacctctttttctcaagtactaatgtagaatttcagttttatttgtccaatttcaaacactaggaaagtttaagaaataatcttcgtgccttcctgatagtggcaattgaacatttttcttgacataaaacaatatttggtcttaactgatctttgctgtggaccaggcactgttctaggtattttatacttgccagcaaaatctcacagcaatctwtgggagtagttacttttattatctcattttacagatgaagaaatgtagaaagatagtctaacagcttgcccaagattatacatctaataagcagctgggtcaggaggcaaacccatccagtttggcctgaggccaggt

SEQ ID NO: 57948 - DNA, 731 bp, Homo sapiens
agatttaggtagattgagttacttgttgagagttgaacccagctgtctgatgacaaagtctattattattttcagaagtctctaaaatatcagtccttcaaaactccatctggtcaatggatcaattgggttagtggtttttaaacttttgaccttagtccacagtaacaaatacattttctttcatgaccatgactcatgactcaggacacacacacactcttataacctctttttttttttttttaagagaaggtcttggtctgtcacccaggctggagtgcaatggcatgatctcagctcacttcaacctctgcttcccaggctcaagcaatcctcccacctgagcctcctgagtagctgggactacaagtatatgccactatgcccagctcatttttgtactttttgtagagatggggtttcatcatgttgcccaggctggtcttgaactactgggctcaagtgatccacctgcsttggcctcctcaaatgctgggattacaggtttgagccatcgtacccagcctgtacactcatatttacatgcccgcatatgaaaagtaaaactgaaacaaaagtttcacaactcaatagttgcacttcctatacgttttctattaaattttcattttattgcaaagaaaaggcttattataaccaccaaatttgtacgtggtaatttgcactttgaaagtcttagaatatttttaatcctttttcaaattatt

SEQ ID NO: 57949 - DNA, 2452 bp, Homo sapiens
actccagcatacttttgttgggacagaagtcaacccgtaatagagataataaattcatatttcttgaatgaatcaaaaaccaaaaagatcctgcagtggacgcagtgctctgggagcctctctgagcacatcaggtccctgaacattgctgctctatcttcctcccatggcctgaagaaaccagtcaggctgccaaaactcgcaccattctgagacctcctgtgtcttgacggaataagagaaatcttttcacctataaggcatcacaccccattccctttccccctaaaaaaacgaggacacttttacaatgccacaatggaggcagaagcttccagaaagaaagcatcacacccattccctttccccctaaaaaagccaggacacttttacaatgccacaatggaggcagaagctttcagaaagagtaaatacatgaatctaagagccactttttgacctatgactcagagtacagaaagaatgcttggtatcctgaaaaaaattcactcagcaggagtaaacactaaacctcatcaattttttaaaggtagcaattacttgtataatacctatcaaccaatgacattaaaaagaaagtagtggaagcttagacttccactactctggctataaaatcttttttgttttgttttttaataactgatttttcaagaatgttatacttataaacacatatacattttatgtcctacctccaagatagctccaaatgagaatgttactagccaagaagctaacatcaacaaaaatgcataaaaactggttaataaagcccacattaagggaacagtagaaagtagctaagaaaatgtaaattcattcaggaaataagcatttgcatgtactgttaaatataatttccaccaggtgcatgaagcacatgagtaattataggccaagaaaaaaaaaagtgataaccttttctccgcatggacgccacctcctttggttatgaggcagtgctttgaagagttaaatgccctctgcaaatgccagggggtggtgttgctgttgcctaaactgttcctcctcacagcctgggctgcatacaaagcaattgcataggagatatcttaccctcccttttctttcatctctgtggaaatacatgtttcatttaagcctgtggtgcttggaacttgttccaargaaccccacgttctaacagcaaaatcaaagaatgcttgtcttttcccagcttgcagggagaacaataagtaaacgagtagaaatttctcactgttatgtgttattctataattttttgttaagtgttattctataattttttcctaagtgtttggaactcactgtctctagcctactaggaagtcctggagatgaccaagcaagccagcatcacaccaccccagggtccccacagtgccacgtgcaggctacccctcactgcctgccaggaggggtaatgccagcttgcatttggttatcagtacccccaccccactctgagggcgatgacagcagggcccctctgggcactagtgcgtgtcccaggtcttggcacctgtgtgctggcagtgaatgtttgctgtaagaatgagcagataaaaatgcaaataaaaaccacaatgagatatcaccttgcactcatgtgaatggtcactatcagaaaacgcacacacacacacagacacatacataaaataaccattggcaaggatgtggagaagctgggactcttgtgcattgctggtaggagagttaaacggtgcagccattgtggaaagcagtatggcggttcctcaaaagattaaatacagaatttccacatgatccagaaattccacttctgggcatatttccaaaagaactgaaagcagggtctcacacagacacttatgcattcatatgcacggcggaattattcacgatagccaacaggtggaagcaacccaagtgttcatcggtggatcaacagagaaacaaaatgtgccacatacatcagtggaatattattcagtctccaaagggaaagaaattctgacacaccacaatacagatgaaccttgaggacattatcttaagtggagtaaaccagtcccagaaggacaaatatggcatgattgcacttacgtgaggtacctagagccgccaaattcatagacacgaagagcagaatggtggttgccaggagtcggagtgaagaatgaggaactattattaaatggggacagggtatcagtctgggatgatgaaaagacttgtggagatggatgatgatggttgcacaacaatgtaaatgtacctaatgccgctgagcggcacacttaaaaatggttaagttgtaaattttatgttaggaatagtttaccaaaattatttaaaaagaagcagatgatgaatgtcaacattgaatgcattgtctcataagcacatggcttctagcagccccatcacctaacaagct

SEQ ID NO: 57950 - DNA, 2452 bp, Homo sapiens
actccagcatacttttgttgggacagaagtcaacccgtaatagagataataaattcatatttcttgaatgaatcaaaaaccaaaaagatcctgcagtggacgcagtgctctgggagcctctctgagcacatcaggtccctgaacattgctgctctatcttcctcccatggcctgaagaaaccagtcaggctgccaaaactcgcaccattctgagacctcctgtgtcttgacggaataagagaaatcttttcacctataaggcatcacaccccattccctttccccctaaaaaaacgaggacacttttacaatgccacaatggaggcagaagcttccagaaagaaagcatcacacccattccctttccccctaaaaaagccaggacacttttacaatgccacaatggaggcagaagctttcagaaagagtaaatacatgaatctaagagccactttttgacctatgactcagagtacagaaagaatgcttggtatcctgaaaaaaattcactcagcaggagtaaacactaaacctcatcaattttttaaaggtagcaattacttgtataatacctatcaaccaatgacattaaaaagaaagtagtggaagcttagacttccactactctggctataaaatcttttttgttttgttttttaataactgatttttcaagaatgttatacttataaacacatatacattttatgtcctacctccaagatagctccaaatgagaatgttactagccaagaagctaacatcaacaaaaatgcataaaaactggttaataaagcccacattaagggaacagtagaaagtagctaagaaaatgtaaattcattcaggaaataagcatttgcatgtactgttaaatataatttccaccaggtgcatgaagcacatgagtaattataggccaagaaaaaaaaaagtgataaccttttctccgcatggacgccacctcctttggttatgaggcagtgctttgaagagttaaatgccctctgcaaatgccagggggtggtgttgctgttgcctaaactgttcctcctcacagcctgggctgcatacaaagcaattgcataggagatatcttaccctcccttttctttcatctctgtggaaatacatgtttcatttaagcctgtggtgcttggaacttgttccaaggaaccccacgttctaacagcaaaatcaaagaatgcttgtcttttcccagcttgcagggagaacaataagtaaacgagtagaaatttctcactgttaygtgttattctataattttttgttaagtgttattctataattttttcctaagtgtttggaactcactgtctctagcctactaggaagtcctggagatgaccaagcaagccagcatcacaccaccccagggtccccacagtgccacgtgcaggctacccctcactgcctgccaggaggggtaatgccagcttgcatttggttatcagtacccccaccccactctgagggcgatgacagcagggcccctctgggcactagtgcgtgtcccaggtcttggcacctgtgtgctggcagtgaatgtttgctgtaagaatgagcagataaaaatgcaaataaaaaccacaatgagatatcaccttgcactcatgtgaatggtcactatcagaaaacgcacacacacacacagacacatacataaaataaccattggcaaggatgtggagaagctgggactcttgtgcattgctggtaggagagttaaacggtgcagccattgtggaaagcagtatggcggttcctcaaaagattaaatacagaatttccacatgatccagaaattccacttctgggcatatttccaaaagaactgaaagcagggtctcacacagacacttatgcattcatatgcacggcggaattattcacgatagccaacaggtggaagcaacccaagtgttcatcggtggatcaacagagaaacaaaatgtgccacatacatcagtggaatattattcagtctccaaagggaaagaaattctgacacaccacaatacagatgaaccttgaggacattatcttaagtggagtaaaccagtcccagaaggacaaatatggcatgattgcacttacgtgaggtacctagagccgccaaattcatagacacgaagagcagaatggtggttgccaggagtcggagtgaagaatgaggaactattattaaatggggacagggtatcagtctgggatgatgaaaagacttgtggagatggatgatgatggttgcacaacaatgtaaatgtacctaatgccgctgagcggcacacttaaaaatggttaagttgtaaattttatgttaggaatagtttaccaaaattatttaaaaagaagcagatgatgaatgtcaacattgaatgcattgtctcataagcacatggcttctagcagccccatcacctaacaagct

SEQ ID NO: 57951 - DNA, 1196 bp, Homo sapiens
tccctcaactctggggccacaaaaggcatccctgtcctcttggtcatagacacaataataaaatgggttttgctgttttagacaaatctggatatagggagggggacatagtgaaaagcaaggaaaaattccaaggccgtttcctcccagaggatgtccactttgacatccaagttggccaggttgaagaaatagcaatccttgaagcatgctgtctgtgacagggakgaactcctccttcacttcttgagtgtttcaagatgtatctttataagtaacaaactaaaatgaagattaatgggtggagggagacatggagccaaatcttaccccaacaggaaccacacggcgggcacgccacagcctggggagtttggtcgggagagttgccgagatggctgtcagagcagcagaggaaagaatccatctccctgggctgggaccgattccttctcatctcctggaggaagacaaggatttcctcaaataaagtgaaagtctcctttggtccaaggtcacggacatccttgtccaactttgcttccgtttacacacaaggaaatgagaacactgaagccgattaactaaagatgaagtagatgtggtccaagtgtaagtttgagccaaaaatgttccttcaaagtccagtccaagaaagctctttctagatttggtgtcagcatttggattttcccccaaagatttagtccatattctcaataaggagaggcttgggattgggaggggtggagaattagagatgtagtgttgagagcacacacaacagagcaagctctggagtcagacaacgttggcttccgatcctggctgtaccgctaatgactgtgtgatcttaggcaagtattttagcctctctgagcctcagtctcctgtcctgcaaaagtaagcttgacatcgtcgttctcacattgttgtgcagattaaatgaaatgacatatgcaaaggtgcataacacacagccctggaatgtcatagaaaacactcgccaaatgttagtttccttccttttcaaattacctatttagaatttctgaatgtattcgtactgagaagtactgttgagaagggtgtcttcaattatactttatagagaatatgaaacatatgggaggaagatattgatcccaagctgccaaaattatttttgtggaaagaaaattcagaatcactccaga

SEQ ID NO: 57952 - DNA, 1089 bp, Homo sapiens
tcttcttagtgaatatacacactcgtgtattatttgactgactccgtggcttgcctgttagtaaaggagatgtttctgaataaaacaaaagcctggtatgtgagagtkagaagggcccatgagtagagttttatctcatgatactatttgcaaagctcagagaggtgaggagctcacactggttcacatggcaattcagtctcagtgaggactggaatctcagcatcctgtccctgcagcagggcctttttaagacactgggcagctgggacccacagcactgggaggagaaatgtccacgcattcctttttcccacccagggtccttatggaacacaagtttggtggtttggtgggaagatcacagacttcaaaaccaaaccaactcaggttcaaatccaattcggtcgtttactgtaaactcttaatactgttgagtttctttatcttacagtgggaatgtaggggttgagagtgagaaacgttcagagccagcaaagtgactggcacataaaaggttctcagtggtagtcaagataactattatctgtctataaactaatgtgtggtgtgtatttgtgtgtgtgtgggtttgtgtgtgtgtctaagtgtcttagtccatttgggctgctttaacaaaatatcatagactgggtggcttataaacaacagaaatttattctcacagctctcaagactgggaagtccaaaatcaaggcagagttggtgtctggtgagggtctactttctctctcacaggcagtgccttcttgctgtgtcctcacatggtgggaggggtgaacgggctcccatgagcctattttataaaggcattaattccattcataagactccaccctcatgacctaatcacctcccaaaggcctcacctcctaataccattaccttgggggttaggatttcaacatatgaattttgagaggacataaacgtttagttcattgcagtatgtacattagatacagttgacatatagagataacctaacatgtatatttaatgtgtgcatatagatagatacatagacagacagatggatggatatattagatagatggatagataggt

SEQ ID NO: 57953 - DNA, 1089 bp, Homo sapiens
tcttcttagtgaatatacacactcgtgtattatttgactgactccgtggcttgcctgttagtaaaggagatgtttctgaataaaacaaaagcctggtatgtgagagttagaagggcccatgagtagagttttatctcatgatactatttgcaaagctcagagaggtgaggagctcacactggttcacatggcaattcagtctcagtgaggactggaatctcagcatcctgtccctgcagcagggcctttttaagacactgggcagctgggacccacagcactgggaggagaaatgtccacgcattcctttttcccacccagggtccttatggaacayaagtttggtggtttggtgggaagatcacagacttcaaaaccaaaccaactcaggttcaaatccaattcggtcgtttactgtaaactcttaatactgttgagtttctttatcttacagtgggaatgtaggggttgagagtgagaaacgttcagagccagcaaagtgactggcacataaaaggttctcagtggtagtcaagataactattatctgtctataaactaatgtgtggtgtgtatttgtgtgtgtgtgggtttgtgtgtgtgtctaagtgtcttagtccatttgggctgctttaacaaaatatcatagactgggtggcttataaacaacagaaatttattctcacagctctcaagactgggaagtccaaaatcaaggcagagttggtgtctggtgagggtctactttctctctcacaggcagtgccttcttgctgtgtcctcacatggtgggaggggtgaacgggctcccatgagcctattttataaaggcattaattccattcataagactccaccctcatgacctaatcacctcccaaaggcctcacctcctaataccattaccttgggggttaggatttcaacatatgaattttgagaggacataaacgtttagttcattgcagtatgtacattagatacagttgacatatagagataacctaacatgtatatttaatgtgtgcatatagatagatacatagacagacagatggatggatatattagatagatggatagataggt

SEQ ID NO: 57954 - DNA, 1039 bp, Homo sapiens
catttacaacttcacacagtgcttgagcattcttgaacgcatatgagcagagacctcattctaggtggacactgccaggaagcagaattgcagctttgtagaacatcctcatctccaactattccagacctgatcatggaacagccgatctcacaacagcctccttgagcctggtggctgaccaaaagtgcccatttatcaacccaagcccttatttttaaaaatataaatgtttaaaaaaatctgtccagccaagcatttcccattgtataggtggaaatttgtttttatcctgacatctctcactattaaattaacagagacattaggatcatttgtttaaccaacagacactgcaccattgtatattatttggaagaatatgaaacatcattttacaatttcaaagtgtcgctattattttgtttttgacatttataacatactactgggtaaagctggatttatttgatgctcatttgttccctaagaaaactcagtatatttaatggtaatccattttatgacacagtttccaggcatacacttggcaaggcgcaggaacctgtactagaactcagtctaaaccttttataaacaccatctttatacttcagaagttcatcagaccaccgtggggctcatgggggtctccatattgaccagggtcctgctcagcaagttggaaagacatttcagatacttgtggcccttcagataagatttatttgctgacatcacggcattggagagaacaatgcgttggtcacttccagctttatcaggacaaagacctttgaagaktcactctcttaccatcttctacaggactgccctgccgctccaatatgttttgctgaatttcctgtagcaattgctccccagcaaccctgcccacaagatttggttctcttgcttcaaggccaagaacctggtcaaggcacaaactttgcgctctgctattgagaaggcacttgggctacagccaattcatggaatttttcattgaggaaggggagagacttcctagagcatatct

SEQ ID NO: 57955 - DNA, 836 bp, Homo sapiens
aaatgctgtcatctggatttgaattatgtttgaacactgactataaatgtgaattgtggtatagatcaaatggattcatttcacatttgctgtatttgcatacttacatgatacctgattgtttttaatttattctatctgattaagaaaaaaatgctgtatgatttgggttctagtaaatgatttagtttgttaatatacatgctatatgaaaaaaatatactgatatcttctatcctaagtgaaagatataaaaagcaaaaggacactgaaacccagtgtaaaccttgagtccctactgaattggatacagcaatgggaatggctgcagcggcatcaagaacatgaatattatttgagtaaggctttacctggaaataatgcagaatgtttgactcatggaggaattcattttggcattaaaaaaaagaaaatatatgatagaacttctacctattaatatttgttttagagtgataaaatagtccacaaattaagaacatatgggcagccgggcatggtygctcatacctgtattcccagcattttgggaggccaaggcaggaggatcacttgagcccaggagtttgagaccagcctgagcaacatggcaagactccacctctacaaaaaatttaaaaattatctgggcatggtggcatgcacctttcgtcctagctaattgagaggctgaggcaggaggattgcttgagcccggcagtttgagactagcctggccatgatggtgagaacctgtctctaataaacaatttagtgattagccaaagtggtggtgcatgcctgtagtcccagttacttgggaggctgaggcaaga

SEQ ID NO: 57956 - DNA, 2136 bp, Homo sapiens
cacttcagcgtccttatgacccatgtgtgacacatacccattgagtactattagatgagacggcataatatactaaaagctcctacaaatggaaaaaaatgataaaccatttaatacaacttatgggaacatatgctgaatacgtgatttgcaggacttacagagaaaacaccaaagcctgacaacagtatgaaaatatgctcaacctcactaatagagaaatgcaaacaaaaccatttcttctgcttgttcttttgccaaatatcatcacctagtgctggagatactggggaaatgggcactcttagatcttcctggggaaatgtaagttcagtatttctggaaaacagtctggtctgatgtattagaactaaaaatatgcctactgtatacagggacagtcattacagccatgtttgtaatgggaaagaactgggaagaacctaaatactcactgattaaagacttgtaaaataatgatacgcccaagtattgagatcctgtgcagttgtgaaaacatcatgacgcattccctttatactgaagcggaaagggtatcaagatgtaatgtcaaaggacaaaagccaaacatggacctctgtgtgtgtccagtgccaagcggcccactcatgtctgaagatgttacaagcttttggaattccagaggatcccacaagagtggaaggagwttgtgcctgtgtccccctcagccaagagctccgtaagggaaggactggcccttgatcaatgtctgaggtgtggatggattcaccccaaaggaggatgcaggtccaggatgctaaattcaaaccagagcaaatctgcttcgggaaactggttctgaatgagaagctcaacatggccatgtgcacacctgctatgtgcacagatagcaaataataagcctgttttccaaaccagccagggaagcagtgaggagaggctgcctcatgtcagccacatggagctacactccttcactccctctcagcaaccctgaaagccaggaccttcttctgatggggggggcaacttatcggacaatacatgaggcctgtgctgggtatgaggggagatattttatagttttctttttccctatgcattttaacacacttttgaatgcaataaatagataatttgggatcttgtcttttaacataacataatgtacatatttttgtgttactgtgttttataaataaaatgggctactatccttaggtgcgtacattgcttacattatttttgtttacaacaaataaaactgtaatgaacacctttgaacaaaagaagctttttgtttgatagaatttcactagggtagaccataggcagcgaattagcgcagtccaaggtgggtttgtttcaagtctcttgacgtatatgcattggactcatgtattcgagtggagacgcccccatgttcaaaagcagcaccatgactgtattgaaagcataaccacaatttgggtcatttctacaagtccaatccagacactgcactggggcaaaggcatagaaagagggtggccaggcaggccactgaggcatggaaaaggtgtggtttctaaaccactcacttccccgcacccgcatccttggggagggccctttgaaatggttcaaggtgaggaggaagggcaggagggttaggtagagagggaaggccactcaagacagctgagactggaaggcataaggaaagattagatatgaggccccagtgtgcaaaaaggaaaaacaataaaagagaagaagaaaaagaatagtgactagaaagagaaactgaggacctagagacaggtagatcctcatgcacttgcagagttctggtaccacaccaggttcatgtctgacacagtttagatgcctttatggcctgtggcttctcaggggcctagggggagggaggttctcttgtttccacacactacatggagggctgtgtgtgatttgtgaattggcagtcataggcatacagaaaaatcattaaactctcagccttaaaaatgactcaggccatgaccccaactcaagcatgctctccctcctggcacatgccagagtgacccttctttgtgctggaatttttatggggcggtcatgtactagcttttcccaagtgcctctcaa

SEQ ID NO: 57957 - DNA, 2136 bp, Homo sapiens
cacttcagcgtccttatgacccatgtgtgacacatacccattgagtactattagatgagacggcataatatactaaaagctcctacaaatggaaaaaaatgataaaccatttaatacaacttatgggaacatatgctgaatacgtgatttgcaggacttacagagaaaacaccaaagcctgacaacagtatgaaaatatgctcaacctcactaatagagaaatgcaaacaaaaccatttcttctgcttgttcttttgccaaatatcatcacctagtgctggagatactggggaaatgggcactcttagatcttcctggggaaatgtaagttcagtatttctggaaaacagtctggtctgatgtattagaactaaaaatatgcctactgtatacagggacagtcattacagccatgtttgtaatgggaaagaactgggaagaacctaaatactcactgattaaagacttgtaaaataatgatacgcccaagtattgagatcctgtgcagttgtgaaaacatcatgacgcattccctttatactgaagcggaaagggtatcaagatgtaatgtcaaaggacaaaagccaaacatggacctctgtgtgtgtccagtgccaagcggcccactcatgtctgaagatgttacaagcttttggaattccagaggatcccacaagagtggaaggagattgtgcctgtgtccccctcagccaagagctccgtaagggaaggactggcccttgatcaatgtctgaggtgtggatggattcaccccaaaggaggatgcaggtccaggatgctaaattcaaaccagagcaaatctgcttcgggaaactggttctgaatgagaagctcaacatggccatgtgcacacctgctatgtgcacagatagcaaataataagcctgttttccaaaccagccagggaagcagtgaggagaggctgcctcatgtcagccacatggagctacactccttcactccctctcagcaaccctgaaagccaggaccttcttctgatggggggggcaacttatcggacaatacatgaggcctgtgctgggtatgaggggagatattttatagttttctttttccctatgcattttaacacacttttgaatgcaataaatagataatttgggatcttgtcttttaacataacataatgtacatatttttgtgttactgtgttttataaataaaatgggctactatccttaggtgcgtacattgcttacattatttttgtttacaacaaataaaactgtaatgaacacctttgaacaaaagaagctttttgtttgatagaatttcactagggtagaccataggcagcgaattagcgcagtccaaggtgggtttgtttcaagtctcttgacgtatatgcattggactcatgtattcgagtggagacgcccccatgttcaaaagcagcaccatgactgtattgaaagcataaccacaatttgggtcatttctacaagtccaatccagacactgcactggggcaaaggcatagaaagagggtggccaggcaggccactgaggcatggaaaaggtgtggtttctaaaccactcacttccccgcacccgcatccttggggagggccctttgaaatggttcaaggtgaggaggaagggcaggagggttaggtagagagggaaggccactcaagacagctgagactggaaggcatraggaaagattagatatgaggccccagtgtgcaaaaaggaaaaacaataaaagagaagaagaaaaagaatagtgactagaaagagaaactgaggacctagagacaggtagatcctcatgcacttgcagagttctggtaccacaccaggttcatgtctgacacagtttagatgcctttatggcctgtggcttctcaggggcctagggggagggaggttctcttgtttccacacactacatggagggctgtgtgtgatttgtgaattggcagtcataggcatacagaaaaatcattaaactctcagccttaaaaatgactcaggccatgaccccaactcaagcatgctctccctcctggcacatgccagagtgacccttctttgtgctggaatttttatggggcggtcatgtactagcttttcccaagtgcctctcaa

SEQ ID NO: 57958 - DNA, 2136 bp, Homo sapiens
cacttcagcgtccttatgacccatgtgtgacacatacccattgagtactattagatgagacggcataatatactaaaagctcctacaaatggaaaaaaatgataaaccatttaatacaacttatgggaacatatgctgaatacgtgatttgcaggacttacagagaaaacaccaaagcctgacaacagtatgaaaatatgctcaacctcactaatagagaaatgcaaacaaaaccatttcttctgcttgttcttttgccaaatatcatcacctagtgctggagatactggggaaatgggcactcttagatcttcctggggaaatgtaagttcagtatttctggaaaacagtctggtctgatgtattagaactaaaaatatgcctactgtatacagggacagtcattacagccatgtttgtaatgggaaagaactgggaagaacctaaatactcactgattaaagacttgtaaaataatgatacgcccaagtattgagatcctgtgcagttgtgaaaacatcatgacgcattccctttatactgaagcggaaagggtatcaagatgtaatgtcaaaggacaaaagccaaacatggacctctgtgtgtgtccagtgccaagcggcccactcatgtctgaagatgttacaagcttttggaattccagaggatcccacaagagtggaaggagattgtgcctgtgtccccctcagccaagagctccgtaagggaaggactggcccttgatcaatgtctgaggtgtggatggattcaccccaaaggaggatgcaggtccaggatgctaaattcaaaccagagcaaatctgcttcgggaaactggttctgaatgagaagctcaacatggccatgtgcacacctgctatgtgcacagatagcaaataataagcctgttttccaaaccagccagggaagcagtgaggagaggctgcctcatgtcagccacatggagctacactccttcactccctctcagcaaccctgaaagccaggaccttcttctgatggggggggcaacttatcggacaatacatgaggcctgtgctgggtatgaggggagatattttatagttttctttttccctatgcattttaacacacttttgaatgcaataaatagataatttgggatcttgtcttttaacataacataatgtacatatttttgtgttactgtgttttataaataaaatgggctactatccttaggtgcgtacattgcttacattatttttgtttacaacaaataaaactgtaatgaacacctttgaacaaaagaagctttttgtttgatagaatttcactagggtagaccataggcagcgaattagcgcagtccaaggtgggtttgtttcaagtctcttgacgtatatgcattggactcatgtattcgagtggagacgcccccatgttcaaaagcagcaccatgactgtattgaaagcataaccacaatttgggtcatttctacaagtccaatccagacactgcactggggcaaaggcatagaaagagggtggccaggcaggccactgaggcatggaaaaggtgtggtttctaaaccactcacttccccgcacccgcatccttggggagggccctttgaaatggttcaaggtgaggaggaagggcaggagggttaggtagagagggaaggccactcaagacagctgagactggaaggcataaggaaagattagmtatgaggccccagtgtgcaaaaaggaaaaacaataaaagagaagaagaaaaagaatagtgactagaaagagaaactgaggacctagagacaggtagatcctcatgcacttgcagagttctggtaccacaccaggttcatgtctgacacagtttagatgcctttatggcctgtggcttctcaggggcctagggggagggaggttctcttgtttccacacactacatggagggctgtgtgtgatttgtgaattggcagtcataggcatacagaaaaatcattaaactctcagccttaaaaatgactcaggccatgaccccaactcaagcatgctctccctcctggcacatgccagagtgacccttctttgtgctggaatttttatggggcggtcatgtactagcttttcccaagtgcctctcaa

SEQ ID NO: 57959 - DNA, 2136 bp, Homo sapiens
cacttcagcgtccttatgacccatgtgtgacacatacccattgagtactattagatgagacggcataatatactaaaagctcctacaaatggaaaaaaatgataaaccatttaatacaacttatgggaacatatgctgaatacgtgatttgcaggacttacagagaaaacaccaaagcctgacaacagtatgaaaatatgctcaacctcactaatagagaaatgcaaacaaaaccatttcttctgcttgttcttttgccaaatatcatcacctagtgctggagatactggggaaatgggcactcttagatcttcctggggaaatgtaagttcagtatttctggaaaacagtctggtctgatgtattagaactaaaaatatgcctactgtatacagggacagtcattacagccatgtttgtaatgggaaagaactgggaagaacctaaatactcactgattaaagacttgtaaaataatgatacgcccaagtattgagatcctgtgcagttgtgaaaacatcatgacgcattccctttatactgaagcggaaagggtatcaagatgtaatgtcaaaggacaaaagccaaacatggacctctgtgtgtgtccagtgccaagcggcccactcatgtctgaagatgttacaagcttttggaattccagaggatcccacaagagtggaaggagattgtgcctgtgtccccctcagccaagagctccgtaagggaaggactggcccttgatcaatgtctgaggtgtggatggattcaccccaaaggaggatgcaggtccaggatgctaaattcaaaccagagcaaatctgcttcgggaaactggttctgaatgagaagctcaacatggccatgtgcacacctgctatgtgcacagatagcaaataataagcctgttttccaaaccagccagggaagcagtgaggagaggctgcctcatgtcagccacatggagctacactccttcactccctctcagcaaccctgaaagccaggaccttcttctgatggggggggcaacttatcggacaatacatgaggcctgtgctgggtatgaggggagatattttatagttttctttttccctatgcattttaacacacttttgaatgcaataaatagataatttgggatcttgtcttttaacataacataatgtacatatttttgtgttactgtgttttataaataaaatgggctactatccttaggtgcgtacattgcttacattatttttgtttacaacaaataaaactgtaatgaacacctttgaacaaaagaagctttttgtttgatagaatttcactagggtagaccataggcagcgaattagcgcagtccaaggtgggtttgtttcaagtctcttgacgtatatgcattggactcatgtattcgagtggagacgcccccatgttcaaaagcagcaccatgactgtattgaaagcataaccacaatttgggtcatttctacaagtccaatccagacactgcactggggcaaaggcatagaaagagggtggccaggcaggccactgaggcatggaaaaggtgtggtttctaaaccactcacttccccgcacccgcatccttggggagggccctttgaaatggttcaaggtgaggaggaagggcaggagggttaggtagagagggaaggccactcaagacagctgagactggaaggcataaggaaagattagatatgaggccccagtgtgcaaaaaggaaaaacaataaaagagaagaagaaaaagaatagtgactagaaagagaaactgaggacctagagacaggtagatcctcatgcacttgcagagttctggtaccacaccaggttcatgtctgacacagtttagatgcctttatggcctgtggcttctcaggggcctagggggagggaggttctcttgtttccacacactacatggagggctgtgtgtgatttgtgaattrgcagtcataggcatacagaaaaatcattaaactctcagccttaaaaatgactcaggccatgaccccaactcaagcatgctctccctcctggcacatgccagagtgacccttctttgtgctggaatttttatggggcggtcatgtactagcttttcccaagtgcctctcaa

SEQ ID NO: 57960 - DNA, 742 bp, Homo sapiens
cccagtgttcccattgagtttttatgctcttcctgttctcttagagatgcccattaggaagcttycagaagggggccattctggatgctgaaagatctacccttgaatgaggtgctgctgtaagtcaggggagtagactacagctcccacagcctcacacaatgcttgggtgctgttggggctcagaaatcaatacctcaaaatatggccctttgacatgctgaactgaagaatcctcaaagtctgtctggctttcccctttctcagctccccaccaacacctcctgggtgttaatcctctgtctctcccaaagcccaggatgaagttgttctctgaagttccctaatctgtctaaagtctggaccttcctaagaagaaaacatgatccctggtcccttccctgggctttcattaactgaactcacatgtcaggaagaaagtctgaagtctgtcaacgcacctgggcagacttttgtcacaaaccatggtctgttctttaggcacaacagtttgtcacaagccattgtatgttcttcaagcccattgaatttccctaaaagtcacttattactctcctaaaattacccaaacttcctaatatggtttggatttgtgtccccacccaaatcacatgtcgaattgtaatcccagtgttggatgagtgccctggtgggaggtgactgaatcacagaggtggacctcccccttgctgttcttgtgatagagttctcaggagttctc

SEQ ID NO: 57961 - DNA, 742 bp, Homo sapiens
cccagtgttcccattgagtttttatgctcttcctgttctcttagagatgcccattaggaagcttccagaagggggccattctggatgctgaaagatctacccttgaatgaggtgctgctgtaagtcaggggagtagactacagctcccacagcctcacacaatgcttgggtgctgttggggctcagaaatcaatacctcaaaatatggccctttgacatgctgaactgaagaatcctcaaagtctgtctggcyttcccctttctcagctccccaccaacacctcctgggtgttaatcctctgtctctcccaaagcccaggatgaagttgttctctgaagttccctaatctgtctaaagtctggaccttcctaagaagaaaacatgatccctggtcccttccctgggctttcattaactgaactcacatgtcaggaagaaagtctgaagtctgtcaacgcacctgggcagacttttgtcacaaaccatggtctgttctttaggcacaacagtttgtcacaagccattgtatgttcttcaagcccattgaatttccctaaaagtcacttattactctcctaaaattacccaaacttcctaatatggtttggatttgtgtccccacccaaatcacatgtcgaattgtaatcccagtgttggatgagtgccctggtgggaggtgactgaatcacagaggtggacctcccccttgctgttcttgtgatagagttctcaggagttctc

SEQ ID NO: 57962 - DNA, 1106 bp, Homo sapiens
tttattgagtacctactatgagctagatactaaattggaggctgcacttgttcactgtaataaagtctagcacccacttgaacttgctatggctcctgcttcaggtcttgctactgagaagcactgtgaatgctggatcctctaccctgcctggttcctggttcccaaggtgctgactccagacccagagttcactgggtctcttggcggcctcagtgccttgtattatcttcttccccacctccaagctccttggtggccccagacaccactagcttggcccacctgcttcctgctgtggacccctagctgggagtctgttttcccctcacccactatgactcctgactccagcaggcagttacttataagaaagaggcatctggcagctgcactggggagaatgacctcatagcactataattaaagtgatcatctgagtggaaatgactattatgaagcatccttctctgttttattatgtagagccattgtaatgggaatacgggatttcctatgttaatgctgatatttctgtgatccaataaatccttcttcacaatcatctcccagaggaaagaaggcattctgtgcagcagctctaggaaacatcaggtccccaatgtcctagacatcctaccctctttggccaggccattaagctgtgaaaaaacacactcagtaacttggataatgtcatagagtggtccttcccacagcagagtcaatgtaaagacctatgggagggcttcaggaatgactcctcagacaggagccctgggaagggcttctccaagagagaaagtgcactccagaggcaagagcactggccaagtcctgacctgataccggatgagctgtgtgatcatgggcacatcacgtctctgagccttggtgttcttcctgtgagatgggccaataacaccaggcacctcataggatggatgtgaagactgcatgatagagtagatagaaggcagttaaagcaacacctggtgctatggtttggatgtggtttgaccctgcaaaagctcatgttgaaatttggttcccaaggtggcagtgatgggaggtgggacctagtgggrgatagttgagtcacaggg

SEQ ID NO: 57963 - DNA, 2676 bp, Homo sapiens
atatatgacattttatatcatctataatataaaatccatatataaatttttatttattaaataacataaatatatataaatatataatataaaatatttggtaacatttatttatatatttgtatagatatataactttatactataaagcattacaatatctaataagaaatatttaatattttccacaaagtaaatcaagtaaatgctaaatgcatctacaatagtgaaggtatagcaatcttcttcagtttattttcttattgtaatactgtggctcctccgtacacttttgttttctagttaatcttcagtttaggtaccaggccaacaggaataaggaaaaacattattggtggtgctataaggaaacagggttgatggtcatttaagaagcagcatcgtcattgtttcattgttccttttaaaagcaatgaaggactaaataatattaataagcaaaagattaaataaagatctttaaaattacacaaacaacaactggtgctaaaaatagtttattacctagtaacaaaaataattactactattttatctcttaataaatatatgtcaggaatgtgttctgtgtttacataagatatttcattaatccatacaatggcaatgtcatgaaattattaattttctcatgtttcaagatatgaaaacaacaatcaagaatctgagacataactgtaaatcctaaggttttttgtttttgtttttctttttctttttgtgagacagaatcttggtctgtcacccaggctggagtgcagtagcataatctgggttcactgcaatctccacctccagggttcaagcaattctcccacctcagcctctggagtggctgggaccacaggcacacaccaccatatctggctaatttttgtatctttagtagagacagggtctcatcatgttgcccaggctggtctcgaactcttgacctcaagggatccaccgcctctgcctcccaaagtgctgggattacaggcatgagccattgcctggcctaaagcctaaggttttaatttttaatcagtttgcatatttattaagtctaagaaatcatagacaaaagttacaacagataaaaatctagctggaaatattgccttttcttcaatgttacacaaactgggcagagtttatataattgcaacttcgtattattaaatatagaaactagacatttctgggctgcaatgtagttgaatcggctgccaattaagaccattgattttgaaccattttaggtttcacttaagcattgcatgtgtgcatgtgtgtacatttaattttcaggcttttaaaaattgttttcctaatcacaatgctctttgagtcctcagcagcgaactctatgcaggttttgttagttccctgacttcaatgttatacttcaattatcagataactttgccaatcataaaatttcaaaaacaaaagtttttaaactttttaagctgaatgaattcaccatgcgtagaaatatactaaaattatttgggatgtaatgtacaatacccagttcatttaattataaactaataatttttatgtttctttcaataggctaggaaatccatgcaaaaaactgtacctctcccatttatttagcatcccttagcactcccatggcaatgccaccaaacaaattaatttgaatctaaattaattttattgaccactcattaggttttgtgctaagtactgagaagttgaagactaacttttgcactcaaagggctttcagactggtagataaaaatgagtaaaaataagagatgtaaagatatgaatatatgcatgaatagaagtcttttgatatgtattattctgagtatctgaactctcatgctaaactgcctgagtttttacttactagtaagtggtctaacgcaacctgtaaaaatctctcaatttttttcacatataaaattaaataataattgtttttgtcactgagttctagaaagttagatattaaattgacagcatcaaaatggagggaacctggatcctgagtcactgaaaagaaaaacctcagaacacctatctttaattttatctgagcaagaaataatcrtctgtgtactaagtcatgcaatttgggggtttatttggtttccttggacccacagtgtgccccagcttaacaatatggaaagtggcatcttgatgttttgtgctgctataataaaattctaaactaggtgaaactggcttggtaactgaggagtagtttgcaacaagctgattgagctcttctattaagttattgcctttttaccccaagactgcctcctttatgttttactcaaaatgtgcctcattcaaaaaataataaaatactgtttacaaaaatcaaggatttggatatcttaaaaataaacaagacattatcccacttcaagaagcatacaagataaagaagatagatatgcaggaaaataattgaaatttagaataattggaatctagagtatttccctatgaagtaatagaataagtgctaagagagtatagagggtgtgccataaactaaatctgcaggtattaaggagtgctctgcagaaagggaagcaattaaataatattttagaggaaaaacaagaatttgacagactaaaatgaccataagcttctgcaaagagagtaaacagc

SEQ ID NO: 57964 - DNA, 979 bp, Homo sapiens
atagtgattcaccgtccagcagagggaagattttcttcaatttcagccatgtaaccacactgtattaccgcacacgggattcttctcagcaatttgccatctgaaataagcatgagggcaacttccataaaaatgatttattttcttttttaaagaaactgctcatcataaaccagcatactatagcatgttggagaggaagcacgggtttcatttccagtaagaatagaatacccacctctgccttattgtatttgtgttaacatttgtagaaaatataggggatatttttatggccttatcaagagctgcagatgaaaagaagaaagtaatccatggacctccagaactygataccattgtgttgaaagttgtcgtcattgttaggtgttagttacaagccctattatgcctattctattcataagaagaaaagactatgtcagaaagtcaggttagttgttgtatattagcttgttctgatggtttaatttaatactgaaaggtttttagtctttcttctaaaattcactgctcagatatgtgttcctgatgctttcaataaaataactaaaaataaaaattggaaaatgagtaaaaaaatctttggaggccaggcgcagtggctcacgcctgtaatcccagcactttgggaggccgaggcgggtggatcacaaggtcgagagatcaagaccatactggccaacatggtgaaaccccgtctctactaaaaaaatgaaaaaaaatacaaaaattagctgggcatggtggtgtgcgcctatagtcccagctacttggaaggctgaggcaggagaatcacttgaacccgcggggtggaggttgcagtaagccaagatcgtgccactgcactccagcctgggaggctcagccagactccgtctaaaaaaatctttggatacatttgaaaaatgtttggtttgacttttgtccttcttaatttgggtatgttcttctgtaa

SEQ ID NO: 57965 - DNA, 1605 bp, Homo sapiens
tatttcaataatcttggattgcatgttgaaataatgttaaatacatattatttaaatgttatatattaaaaataattctacctcctttattggcttttaagaaatattatatttagaaaattcaaaattacatatgtggtttcagtatttttctactggatgataatggcctaaagttaaaatatatactatgtaaaagtttaaagcaaatatctttctaacgagtaggacataaacctaaattactattgataaaacactaattatgtcataggtttttatttttttctggtcaaaatgaaactggcactatctttcttaaaactgcagtctaatactgtctaaggtgcgtacacatagggtttgctgataaaatcttttggtaaaaattaaagaaaatattatcaataccagtaagagtatgcttttattctccactaagaaaaatattttcaataccagataattgcttttataacaaatagcaaatatgtttaatatgttgttctttgaagtcaatttgctactaaaaatatttatttttatagtagagccaactaaatggtccttttttcattgacaagctctcactcacatttgcacttgcctctccttgacctctcctttattacagaacaactgtagtgtaaaatactatatataaaacaatgggttattttaattccccttattatcaagaggacaatgaacagattaaatgaatgactcctttttcaactttcaatttactcagtgtgaggaagttatagtgttatggactgaattgtgttctcccaaatttcgtatgttgaagccttaaccattgatgttgtggtatttggaactaggtcttctgggaagaagttagggtaagatgggatcataagggtggatccctcataatgagatgactgyccttgtgaaaagagacaccagaaggcttactttgtctttgccatgtgaggatatagcacagaagtggttgtctgcaagttaggaagtgggccctcactggaacctaaaaaggctagcatcctgatctcagacttctggcctccagaactgtgagaaaataaatgtctattgtttaagccaccgaatatgtgatttttttttattgcatgctgaacagatggagacatatggtaattgaattcataataaatagcatttatggtgaattcattcatgttaaatactgagaaaactcttgagaattaactggattttagggtaaaagttttgttattttttaaaaattacatgtaattgctcaatgagttgggattatacatattttactgaaaaattcttgaaaaatttttactctttcaagaaagtatgtgagaagaaattaggatttcccgtaacatttgatggttttggttaattgtatacggtttgagtaatcaaaagcagaagtttcataacataattttcttacatattactgtttactgttcatgaaatttttgcttccaagaaagtcctcgacaatttacagattggcctgaaatttatttttatatttatccatttccaggatttgaattatgtttaattaccatcatcttcctacctgattaactaaattttctttttaaa

SEQ ID NO: 57966 - DNA, 1605 bp, Homo sapiens
tatttcaataatcttggattgcatgttgaaataatgttaaatacatattatttaaatgttatatattaaaaataattctacctcctttattggcttttaagaaatattatatttagaaaattcaaaattacatatgtggtttcagtatttttctactggatgataatggcctaaagttaaaatatatactatgtaaaagtttaaagcaaatatctttctaacgagtaggacataaacctaaattactattgataaaacactaattatgtcataggtttttatttttttctggtcaaaatgaaactggcactatctttcttaaaactgcagtctaatactgtctaaggtgcgtacacatagggtttgctgataaaatcttttggtaaaaattaaagaaaatattatcaataccagtaagagtatgcttttattctccactaagaaaaatattttcaataccagataattgcttttataacaaatagcaaatatgtttaatatgttgttctttgaagtcaatttgctactaaaaatatttatttttatagtagagccaactaaatggtccttttttcattgacaagctctcactcacatttgcacttgcctctccttgacctctcctttattacagaacaactgtagtgtaaaatactatatataaaacaatgggttattttaattccccttattatcaagaggacaatgaacagattaaatgaatgactcctttttcaactttcaatttactcagtgtgaggaagttatagtgttatggactgaattgtgttctcccaaatttcgtatgttgaagccttaaccattgatgttgtggtatttggaactaggtcttctgggaagaagttagggtaagatgggatcataagggtggatccctcataatgagatgactgtccttgtgaaaagagacaccagaaggcttactttgtctttgccatgtgaggatatagcacagaagtggttgtctgcaagttaggaagtgggccctcactggaacctaaaaaggctagcatcctgatctcagacttctggcctccagaactgtgagaaaataaatgtctattgtttaagccaccgaatatgtgatttttttttaytgcatgctgaacagatggagacatatggtaattgaattcataataaatagcatttatggtgaattcattcatgttaaatactgagaaaactcttgagaattaactggattttagggtaaaagttttgttattttttaaaaattacatgtaattgctcaatgagttgggattatacatattttactgaaaaattcttgaaaaatttttactctttcaagaaagtatgtgagaagaaattaggatttcccgtaacatttgatggttttggttaattgtatacggtttgagtaatcaaaagcagaagtttcataacataattttcttacatattactgtttactgttcatgaaatttttgcttccaagaaagtcctcgacaatttacagattggcctgaaatttatttttatatttatccatttccaggatttgaattatgtttaattaccatcatcttcctacctgattaactaaattttctttttaaa

SEQ ID NO: 57967 - DNA, 1605 bp, Homo sapiens
tatttcaataatcttggattgcatgttgaaataatgttaaatacatattatttaaatgttatatattaaaaataattctacctcctttattggcttttaagaaatattatatttagaaaattcaaaattacatatgtggtttcagtatttttctactggatgataatggcctaaagttaaaatatatactatgtaaaagtttaaagcaaatatctttctaacgagtaggacataaacctaaattactattgataaaacactaattatgtcataggtttttatttttttctggtcaaaatgaaactggcactatctttcttaaaactgcagtctaatactgtctaaggtgcgtacacatagggtttgctgataaaatcttttggtaaaaattaaagaaaatattatcaataccagtaagagtatgcttttattctccactaagaaaaatattttcaataccagataattgcttttataacaaatagcaaatatgtttaatatgttgttctttgaagtcaatttgctactaaaaatatttatttttatagtagagccaactaaatggtccttttttcattgacaagctctcactcacatttgcacttgcctctccttgacctctcctttattacagaacaactgtagtgtaaaatactatatataaaacaatgggttattttaattccccttattatcaagaggacaatgaacagattaaatgaatgactcctttttcaactttcaatttactcagtgtgaggaagttatagtgttatggactgaattgtgttctcccaaatttcgtatgttgaagccttaaccattgatgttgtggtatttggaactaggtcttctgggaagaagttagggtaagatgggatcataagggtggatccctcataatgagatgactgtccttgtgaaaagagacaccagaaggcttactttgtctttgccatgtgaggatatagcacagaagtggttgtctgcaagttaggaagtgggccctcactggaacctaaaaaggctagcatcctgatctcagacttctggcctccagaactgtgagaaaataaatgtctattgtttaagccaccgaatatgtgatttttttttattgcatgctgaacagatggagacatatggtaattgaattcataataaatagcatttatggtgaattcattcatgttaaatactgagaaaactcttgagaattaactggattttarggtaaaagttttgttattttttaaaaattacatgtaattgctcaatgagttgggattatacatattttactgaaaaattcttgaaaaatttttactctttcaagaaagtatgtgagaagaaattaggatttcccgtaacatttgatggttttggttaattgtatacggtttgagtaatcaaaagcagaagtttcataacataattttcttacatattactgtttactgttcatgaaatttttgcttccaagaaagtcctcgacaatttacagattggcctgaaatttatttttatatttatccatttccaggatttgaattatgtttaattaccatcatcttcctacctgattaactaaattttctttttaaa

SEQ ID NO: 57968 - DNA, 1605 bp, Homo sapiens
tatttcaataatcttggattgcatgttgaaataatgttaaatacatattatttaaatgttatatattaaaaataattctacctcctttattggcttttaagaaatattatatttagaaaattcaaaattacatatgtggtttcagtatttttctactggatgataatggcctaaagttaaaatatatactatgtaaaagtttaaagcaaatatctttctaacgagtaggacataaacctaaattactattgataaaacactaattatgtcataggtttttatttttttctggtcaaaatgaaactggcactatctttcttaaaactgcagtctaatactgtctaaggtgcgtacacatagggtttgctgataaaatcttttggtaaaaattaaagaaaatattatcaataccagtaagagtatgcttttattctccactaagaaaaatattttcaataccagataattgcttttataacaaatagcaaatatgtttaatatgttgttctttgaagtcaatttgctactaaaaatatttatttttatagtagagccaactaaatggtccttttttcattgacaagctctcactcacatttgcacttgcctctccttgacctctcctttattacagaacaactgtagtgtaaaatactatatataaaacaatgggttattttaattccccttattatcaagaggacaatgaacagattaaatgaatgactcctttttcaactttcaatttactcagtgtgaggaagttatagtgttatggactgaattgtgttctcccaaatttcgtatgttgaagccttaaccattgatgttgtggtatttggaactaggtcttctgggaagaagttagggtaagatgggatcataagggtggatccctcataatgagatgactgtccttgtgaaaagagacaccagaaggcttactttgtctttgccatgtgaggatatagcacagaagtggttgtctgcaagttaggaagtgggccctcactggaacctaaaaaggctagcatcctgatctcagacttctggcctccagaactgtgagaaaataaatgtctattgtttaagccaccgaatatgtgatttttttttattgcatgctgaacagatggagacatatggtaattgaattcataataaatagcatttatggtgaattcattcatgttaaatactgagaaaactcttgagaattaactggattttagggtaaaagttttgttattttttaaaaattacatgtaattgctcaatgagttgggattatacatattttactgaaaaattcttgaaaaatttttactctttcaagaaagtrtgtgagaagaaattaggatttcccgtaacatttgatggttttggttaattgtatacggtttgagtaatcaaaagcagaagtttcataacataattttcttacatattactgtttactgttcatgaaatttttgcttccaagaaagtcctcgacaatttacagattggcctgaaatttatttttatatttatccatttccaggatttgaattatgtttaattaccatcatcttcctacctgattaactaaattttctttttaaa

SEQ ID NO: 57969 - DNA, 1575 bp, Homo sapiens
tttcttagggaaaattattgttttatgtttatttatccagtcttgtccaaataaaggcataattaatttgaagaaagcttggaattttaagttgccttgctattgaaagttttttcttattccttaatatttactttctctttatgatagtgacagaaacatttaatttataaaagaaattcttagcaatgctttccaaatggattctgcaaactgtgattcaatagagatgacacctataattacatttgaatattctcttgcatatgttctgacaagattgcattaaatcacactcattgcccctaggtactctttagtgtttttgtttctagcctagattcctacctagaaaaccaatgaattcttcattctacatgaaaccgtattaatagataattctctattatctttcctgtttctgtgttcactrgtctttaagggttgagtgaacccccttgtcattgtaattattacatctcacaaatatgtataagattgaatagagataaaatagccttccatagtctgatgtcaaagatattttttctctactttcattctgaaatcgaactaagatattaattctatttctttttggcaaggaagcctttgtctctaacatcttactgaagcaaaaacccaacttttcagtggatttttaaaaattgtagctccctgatgaaatataaaagtaaaaatgaaatttttttgcactaatgaaattatagtatttctgtcaatctaggatccaagtccataaatattaagttcattctaaagtaatttgtcaatgaggcctagaaagtaaatcataataaacaaaattaaaagaagaaaatactggttttccagatccaaaattctattgctaattctaaatgcagcctctctacattagctaactgaaataagtgcctgcaaatagactttctgtaggacacatcagtttcattagtagtgattagttcatataagtgtacattatttcctaaatatcatgtgaaattagaatgtaagattgaattcagaaatatgttatattattttaatgcttgcaataacagatgatcaatttgaaagatggtcttttcttcaacaaagaactgagtaataatattttgcctgtaatttggtagcttttctttccccaatgataaacgtcttttcacttgaaaaacctattgcctctttctcactatttttccacacagaaaaccatacattaggtcacatggcaacttatagtcagtcaccacttaagttaattacaagaaaatattttactatttagccctgaaattttataatgttaaaaaaattgaaaaaaaagttaaaatggaatccaatgcaaattcttctttgtttttcttctttctgagttttccttgaaaacatttcaaagaattgcaaatctttttgttcatgtatcctctgtgtcatgaaaatatagttttcataacatatttataaccaagaacttttattggttataaatagaagacaaatatattcaattaatgtatcaataatttgtacctattaagatgtattaccttatataacattactatt

SEQ ID NO: 57970 - DNA, 1575 bp, Homo sapiens
tttcttagggaaaattattgttttatgtttatttatccagtcttgtccaaataaaggcataattaatttgaagaaagcttggaattttaagttgccttgctattgaaagttttttcttattccttaatatttactttctctttatgatagtgacagaaacatttaatttataaaagaaattcttagcaatgctttccaaatggattctgcaaactgtgattcaatagagatgacacctataattacatttgaatattctcttgcatatgttctgacaagattgcattaaatcacactcattgcccctaggtactctttagtgtttttgtttctagcctagattcctacctagaaaaccaatgaattcttcattctacatgaaaccgtattaatagataattctctattatctttcctgtttctgtgttcactagtctttaagggttgagtgaayccccttgtcattgtaattattacatctcacaaatatgtataagattgaatagagataaaatagccttccatagtctgatgtcaaagatattttttctctactttcattctgaaatcgaactaagatattaattctatttctttttggcaaggaagcctttgtctctaacatcttactgaagcaaaaacccaacttttcagtggatttttaaaaattgtagctccctgatgaaatataaaagtaaaaatgaaatttttttgcactaatgaaattatagtatttctgtcaatctaggatccaagtccataaatattaagttcattctaaagtaatttgtcaatgaggcctagaaagtaaatcataataaacaaaattaaaagaagaaaatactggttttccagatccaaaattctattgctaattctaaatgcagcctctctacattagctaactgaaataagtgcctgcaaatagactttctgtaggacacatcagtttcattagtagtgattagttcatataagtgtacattatttcctaaatatcatgtgaaattagaatgtaagattgaattcagaaatatgttatattattttaatgcttgcaataacagatgatcaatttgaaagatggtcttttcttcaacaaagaactgagtaataatattttgcctgtaatttggtagcttttctttccccaatgataaacgtcttttcacttgaaaaacctattgcctctttctcactatttttccacacagaaaaccatacattaggtcacatggcaacttatagtcagtcaccacttaagttaattacaagaaaatattttactatttagccctgaaattttataatgttaaaaaaattgaaaaaaaagttaaaatggaatccaatgcaaattcttctttgtttttcttctttctgagttttccttgaaaacatttcaaagaattgcaaatctttttgttcatgtatcctctgtgtcatgaaaatatagttttcataacatatttataaccaagaacttttattggttataaatagaagacaaatatattcaattaatgtatcaataatttgtacctattaagatgtattaccttatataacattactatt

SEQ ID NO: 57971 - DNA, 1575 bp, Homo sapiens
tttcttagggaaaattattgttttatgtttatttatccagtcttgtccaaataaaggcataattaatttgaagaaagcttggaattttaagttgccttgctattgaaagttttttcttattccttaatatttactttctctttatgatagtgacagaaacatttaatttataaaagaaattcttagcaatgctttccaaatggattctgcaaactgtgattcaatagagatgacacctataattacatttgaatattctcttgcatatgttctgacaagattgcattaaatcacactcattgcccctaggtactctttagtgtttttgtttctagcctagattcctacctagaaaaccaatgaattcttcattctacatgaaaccgtattaatagataattctctattatctttcctgtttctgtgttcactagtctttaagggttgagtgaacccccttgtcattgtaattattacatctcacaaatatgtataagattgaatagagataaaatagccttccatagtctgatgtcaaagatattttttctctactttcattctgaaatcgaactaagatattaattctatttctttttggcaaggaagcctttgtctctaacatcttactgaagcaaaaacccaacttttcagtggatttttaaaaattgtagctccctgatgaaatataaaagtaaaamtgaaatttttttgcactaatgaaattatagtatttctgtcaatctaggatccaagtccataaatattaagttcattctaaagtaatttgtcaatgaggcctagaaagtaaatcataataaacaaaattaaaagaagaaaatactggttttccagatccaaaattctattgctaattctaaatgcagcctctctacattagctaactgaaataagtgcctgcaaatagactttctgtaggacacatcagtttcattagtagtgattagttcatataagtgtacattatttcctaaatatcatgtgaaattagaatgtaagattgaattcagaaatatgttatattattttaatgcttgcaataacagatgatcaatttgaaagatggtcttttcttcaacaaagaactgagtaataatattttgcctgtaatttggtagcttttctttccccaatgataaacgtcttttcacttgaaaaacctattgcctctttctcactatttttccacacagaaaaccatacattaggtcacatggcaacttatagtcagtcaccacttaagttaattacaagaaaatattttactatttagccctgaaattttataatgttaaaaaaattgaaaaaaaagttaaaatggaatccaatgcaaattcttctttgtttttcttctttctgagttttccttgaaaacatttcaaagaattgcaaatctttttgttcatgtatcctctgtgtcatgaaaatatagttttcataacatatttataaccaagaacttttattggttataaatagaagacaaatatattcaattaatgtatcaataatttgtacctattaagatgtattaccttatataacattactatt

SEQ ID NO: 57972 - DNA, 519 bp, Homo sapiens
tggtcctagctactagggaggttgacgtgggaggatcacttgagccagggaggtcaaggctgcagtgagccatggttgcaccactgcattccaatctgagcaacagagcaagaccctgtatcaaacaaacaaacaaacaaaaaacatktgtatatgaggagatggagggaaattagattatatctatgtatactcaccttgctactccaatccttcaagaattatcttcagtgtcactgtctccaacaagcctgacctaactaaccctttagctacattccgaccctctgtacccaaaatcagggcgcccatactcccttgtgctgcagttatcacatttgtatttaataataaatttattgattatttaagaatttattttatatgtgtcagtcctctctagtagactagaagctgcagggggttcaggtgctcatttttgtatctccagaccctcgtacagaaacttgcaaaattattcattattaataagtaaggaaaaaataaatacaagattta

SEQ ID NO: 57973 - DNA, 692 bp, Homo sapiens
gctgactgtgtctaggaacataaatgaggaaacctctgcctcccagtccagcccactctctgattttctctatttggaagtactcttcagtggcatagacagactttctctgtatggtggttgtattagtccattctcaagctgctatgaagaaatacccgaggctgggtaattataaagaaaagaggtttaattgactcatagttctgcatggcttgggaggcctcaggagacttacaatcatggtggaaggcacctcttcacagggtggcaggagagagaatgagtgcaagcaggggaaatgccaggcacttataaaaccatcagatcccatgggactcactcattatcacgagaacagcatggggaaactgcccccatgattcaattacctctacctggtcccagccttgacacgtggggattgtggggactacaattcaagatgagatttgggttggtacacagagccaaacgtatcagtggtgaagtagatttttaattagtgtgcttcctgttctcaagcccagtgcaagatttcttctcagagctccagctccaaacagaagaaccctaaagaaagattggtccgkctcaggtaccaggctcttacctgtatcatcagagtggtcaagaaaatgggaatttgtaattaaccaggcctatactgtgcagcttataggaaaggagga

SEQ ID NO: 57974 - DNA, 692 bp, Homo sapiens
gctgactgtgtctaggaacataaatgaggaaacctctgcctcccagtccagcccactctctgattttctctatttggaagtactcttcagtggcatagacagactttctctgtatggtggttgtattagtccattctcaagctgctatgaagaaatacccgaggctgggtaattataaagaaaagaggtttaattgactcatagttctgcatggcttgggaggcctcaggagacttacaatcatggtggaaggcacctcttcacagggtggcaggagagagaatgagtgcaagcaggggaaatgccaggcacttataaaaccatcagatcccatgggactcactcattatcacgagaacagcatggggaaactgcccccatgattcaattacctctacctggtcccagccttgacacgtggggattgtggggactacaattcaagatgagatttgggttggtacacagagccaaacgtatcagtggtgaagtagatttttaattagtgtgcttcctgttctcaagcccagtgcaagatttcttctcagagctccagctccaaacagaagaaccctaaagaaagattggtccgtctcaggtaccaggctcttacctgtatcatcagagtggtcaagaaaatgggaatttrtaattaaccaggcctatactgtgcagcttataggaaaggagga

SEQ ID NO: 57975 - DNA, 1062 bp, Homo sapiens
ttctgaggatccttaatttcttctatttttaagattcaaattgaatgattaatcagtaacagtttatgttttaaataaaagtctttaaaatgttaaatatcagcctttcatttctgatatttggtctttgaagaggaaacataatgcaatagtaattcataatagtggagggttctttcctcacatccttgaaagccaccagtcttattcttcagcctggctcttgagctattgctgtattaattttaaatagggtgtgatagcataagctgatggaagcctgcagagatctcactttgaaatggtgatacattacatgggaaaagattagagaggtgttttatactgcacatcggtgaggcctaataagaaagtagaatagacgtaaaccattgttttcatcatcctttaagacagggatttcaaactcaagaaccaggcagctacctatttaaatgagtcaagtgggccctaatgtaagacaatgtgatgggtaaggattgattctgagggaacaggagcaggcatgccctctctaacagaggccgtcagttctgctgtacctgaaatgtgggcccattgttgctggcgattccacacttacatctaaaatttcctgattttttaagaatgacaataactaatttaaaaaaaaaaaaaaaacctcaatgtaggccaaaaaatacgactctacaggcctcacggcctgtgcttcaccaatatgtgacttctgcttttaaggaatagytggggatacctcagccttaggataaataatcatttttggtaatttagaaaaatgaagcagtgtattagctactgttctcaaatatcctttttttcatttaattcctagtgtgggactacaatactggcagagtgggagcaccattagtttgctgtgaaatcaaattaaaaaactgggaggaaggtaataaactattttaaccacagagcattaatttttaaagtattaaacttgaaaattagtgcttcactttcttgctttagaatgtaaacacccataagtgctcatttttgtcctttgtgatagacgtgttt

SEQ ID NO: 57976 - DNA, 1062 bp, Homo sapiens
ttctgaggatccttaatttcttctatttttaagattcaaattgaatgattaatcagtaacagtttatgttttaaataaaagtctttaaaatgttaaatatcagcctttcatttctgatatttggtctttgaagaggaaacataatgcaatagtaattcataatagtggagggttctttcctcacatccttgaaagccaccagtcttattcttcagcctggctcttgagctattgctgtattaattttaaatagggtgtgatagcataagctgatggaagcctgcagagatctcactttgaaatggtgatacattacatgggaaaagattagagaggtgttttatactgcacatcggtgaggcctaataagaaagtagaatagacgtaaaccattgttttcatcatcctttaagacagggatttcaaactcaagaaccaggcagctacctatttaaatgagtcaagtgggccctaatgtaagacaatgtgatgggtaaggattgattctgagggaacaggagcaggcatgccctctctaacagaggccgtcagttctgctgtacctgaaatgtgggcccattgttgctggcgattccacacttacatctaaaatttcctgattttttaagaatgacaataactaatttaaaaaaaaaaaaaaaacctcaatgtaggccaaaaaatacgactctacaggcctcacggcctgtgcttcaccaatatgtgacttctgcttttaaggaatagctggggatayctcagccttaggataaataatcatttttggtaatttagaaaaatgaagcagtgtattagctactgttctcaaatatcctttttttcatttaattcctagtgtgggactacaatactggcagagtgggagcaccattagtttgctgtgaaatcaaattaaaaaactgggaggaaggtaataaactattttaaccacagagcattaatttttaaagtattaaacttgaaaattagtgcttcactttcttgctttagaatgtaaacacccataagtgctcatttttgtcctttgtgatagacgtgttt

SEQ ID NO: 57977 - DNA, 1283 bp, Homo sapiens
gtaatgctgcatgaattttgcaagctgcagagaggtaggaatattttcatggggctttccaaaaggaaaggaacagggccgccgataacctttggttgagactctcagttactgaagtctctcagcttagacagcagatgtggctgcgatcagtggcctcatcttgagagtagaaagtagaaagagtagaaagttctactcatcttgagagtagaaagagacatgaccaagtcagatggtggaagcactgggtacaaagagagcaagcaggccctgggatgactgcatgtggtgaattagagcacttaccccaggagccgagagggagaactgggtgttgaatttcctgctaatgtgtatatgtgccagctaggctataatttgttcttttttkgggggacagtgtcttactctgtcacccagactaaagtgcagtggcacaaagatggctcactgcagcctcaatctcttgggctcaagcgatcctcccatttcagcctcccgagtagctaggactacaggcacaaaccatcacgcttggctaatttttttaaaactttttgtagagatggggccttgatattttcccaggctgatctcaaactcctgggctcaagctgtcctcccacctcagcctcctaaagtgctgggattacaggcacgagccacctcaccctgcctaggcatcccccacagagaatcaggccactaatattaatgtctttaggtttgaatacatgtacgaattgattttgaattaattttttcacttacgtctcataacaatttattgatgttggtggagaaggtattatgtgtgtgttgttcccattttactgatcagaaaactagtcaaggtcacccagggagaaagcagttgtctaccagtaatagtggctgacacttactgagccctttccatgtggcaagcacagcagcaagcatcttaattatatattaattcatgtaaccctccctatactgctactggcattattatttcccttgttttacagaggaggaaatgtcagcagcatgaggcaagtgacacactggacggtcccatttgaagccctcgtacatgaaataagaggactctgttctgaggagcggactctgctcattgcctttgaaaatcctgcattcacagctgttatttacatttaaatgtggcctctgtgtgatgtcagggacacggtgccctaggctactgaggggaaattagggtgacctggtgacaatttacagcagattgcaccatttctcatacactttataacaag

SEQ ID NO: 57978 - DNA, 1283 bp, Homo sapiens
gtaatgctgcatgaattttgcaagctgcagagaggtaggaatattttcatggggctttccaaaaggaaaggaacagggccgccgataacctttggttgagactctcagttactgaagtctctcagcttagacagcagatgtggctgcgatcagtggcctcatcttgagagtagaaagtagaaagagtagaaagttctactcatcttgagagtagaaagagacatgaccaagtcagatggtggaagcactgggtacaaagagagcaagcaggccctgggatgactgcatgtggtgaattagagcacttaccccaggagccgagagggagaactgggtgttgaatttcctgctaatgtgtatatgtgccagctaggctataatttgttcttttttggggggacagtgtcttactctgtcacccagactaaagtgcagtggcacaaagatggctcactgcagcctcaatctcttgggctcaagcgatcctcccatttcagcctcccgagtagctaggactacaggcacaaaccatcacgcttggctaattttttwaaaactttttgtagagatggggccttgatattttcccaggctgatctcaaactcctgggctcaagctgtcctcccacctcagcctcctaaagtgctgggattacaggcacgagccacctcaccctgcctaggcatcccccacagagaatcaggccactaatattaatgtctttaggtttgaatacatgtacgaattgattttgaattaattttttcacttacgtctcataacaatttattgatgttggtggagaaggtattatgtgtgtgttgttcccattttactgatcagaaaactagtcaaggtcacccagggagaaagcagttgtctaccagtaatagtggctgacacttactgagccctttccatgtggcaagcacagcagcaagcatcttaattatatattaattcatgtaaccctccctatactgctactggcattattatttcccttgttttacagaggaggaaatgtcagcagcatgaggcaagtgacacactggacggtcccatttgaagccctcgtacatgaaataagaggactctgttctgaggagcggactctgctcattgcctttgaaaatcctgcattcacagctgttatttacatttaaatgtggcctctgtgtgatgtcagggacacggtgccctaggctactgaggggaaattagggtgacctggtgacaatttacagcagattgcaccatttctcatacactttataacaag

SEQ ID NO: 57979 - DNA, 1283 bp, Homo sapiens
gtaatgctgcatgaattttgcaagctgcagagaggtaggaatattttcatggggctttccaaaaggaaaggaacagggccgccgataacctttggttgagactctcagttactgaagtctctcagcttagacagcagatgtggctgcgatcagtggcctcatcttgagagtagaaagtagaaagagtagaaagttctactcatcttgagagtagaaagagacatgaccaagtcagatggtggaagcactgggtacaaagagagcaagcaggccctgggatgactgcatgtggtgaattagagcacttaccccaggagccgagagggagaactgggtgttgaatttcctgctaatgtgtatatgtgccagctaggctataatttgttcttttttggggggacagtgtcttactctgtcacccagactaaagtgcagtggcacaaagatggctcactgcagcctcaatctcttgggctcaagcgatcctcccatttcagcctcccgagtagctaggactacaggcacaaaccatcacgcttggctaatttttttaaaactttttgtagagatggggccttgatattttcccaggctgatctcaaactcctgggctcaagctgtcctcccacctcagcctcctaaagtgctgggattacaggcacgagccacctcaccctgcctaggcatcccccacagagaatcaggccactaatattaatgtctttaggtttgaatacatgtacgaattgattttgaattaattttttcacttacgtctcayaacaatttattgatgttggtggagaaggtattatgtgtgtgttgttcccattttactgatcagaaaactagtcaaggtcacccagggagaaagcagttgtctaccagtaatagtggctgacacttactgagccctttccatgtggcaagcacagcagcaagcatcttaattatatattaattcatgtaaccctccctatactgctactggcattattatttcccttgttttacagaggaggaaatgtcagcagcatgaggcaagtgacacactggacggtcccatttgaagccctcgtacatgaaataagaggactctgttctgaggagcggactctgctcattgcctttgaaaatcctgcattcacagctgttatttacatttaaatgtggcctctgtgtgatgtcagggacacggtgccctaggctactgaggggaaattagggtgacctggtgacaatttacagcagattgcaccatttctcatacactttataacaag

SEQ ID NO: 57980 - DNA, 1283 bp, Homo sapiens
gtaatgctgcatgaattttgcaagctgcagagaggtaggaatattttcatggggctttccaaaaggaaaggaacagggccgccgataacctttggttgagactctcagttactgaagtctctcagcttagacagcagatgtggctgcgatcagtggcctcatcttgagagtagaaagtagaaagagtagaaagttctactcatcttgagagtagaaagagacatgaccaagtcagatggtggaagcactgggtacaaagagagcaagcaggccctgggatgactgcatgtggtgaattagagcacttaccccaggagccgagagggagaactgggtgttgaatttcctgctaatgtgtatatgtgccagctaggctataatttgttcttttttggggggacagtgtcttactctgtcacccagactaaagtgcagtggcacaaagatggctcactgcagcctcaatctcttgggctcaagcgatcctcccatttcagcctcccgagtagctaggactacaggcacaaaccatcacgcttggctaatttttttaaaactttttgtagagatggggccttgatattttcccaggctgatctcaaactcctgggctcaagctgtcctcccacctcagcctcctaaagtgctgggattacaggcacgagccacctcaccctgcctaggcatcccccacagagaatcaggccactaatattaatgtctttaggtttgaatacatgtacgaattgattttgaattaattttttcacttacgtctcataacaatttattgatgttggtggagaaggtattatgtgtgtgttgttcccattttacwgatcagaaaactagtcaaggtcacccagggagaaagcagttgtctaccagtaatagtggctgacacttactgagccctttccatgtggcaagcacagcagcaagcatcttaattatatattaattcatgtaaccctccctatactgctactggcattattatttcccttgttttacagaggaggaaatgtcagcagcatgaggcaagtgacacactggacggtcccatttgaagccctcgtacatgaaataagaggactctgttctgaggagcggactctgctcattgcctttgaaaatcctgcattcacagctgttatttacatttaaatgtggcctctgtgtgatgtcagggacacggtgccctaggctactgaggggaaattagggtgacctggtgacaatttacagcagattgcaccatttctcatacactttataacaag

SEQ ID NO: 57981 - DNA, 1283 bp, Homo sapiens
gtaatgctgcatgaattttgcaagctgcagagaggtaggaatattttcatggggctttccaaaaggaaaggaacagggccgccgataacctttggttgagactctcagttactgaagtctctcagcttagacagcagatgtggctgcgatcagtggcctcatcttgagagtagaaagtagaaagagtagaaagttctactcatcttgagagtagaaagagacatgaccaagtcagatggtggaagcactgggtacaaagagagcaagcaggccctgggatgactgcatgtggtgaattagagcacttaccccaggagccgagagggagaactgggtgttgaatttcctgctaatgtgtatatgtgccagctaggctataatttgttcttttttggggggacagtgtcttactctgtcacccagactaaagtgcagtggcacaaagatggctcactgcagcctcaatctcttgggctcaagcgatcctcccatttcagcctcccgagtagctaggactacaggcacaaaccatcacgcttggctaatttttttaaaactttttgtagagatggggccttgatattttcccaggctgatctcaaactcctgggctcaagctgtcctcccacctcagcctcctaaagtgctgggattacaggcacgagccacctcaccctgcctaggcatcccccacagagaatcaggccactaatattaatgtctttaggtttgaatacatgtacgaattgattttgaattaattttttcacttacgtctcataacaatttattgatgttggtggagaaggtattatgtgtgtgttgttcccattttactgatcagaaaactagtcaaggtcacccagggagaaagcagttgtctaccagtaatagtggctgacacttactgagccctttccatgtggcaagcacagcagcaagcatcttaattatatattaattcatgtaaccctccctatactgctactggcattattatttcccttgttttacagaggaggaaatgtcagcagcaygaggcaagtgacacactggacggtcccatttgaagccctcgtacatgaaataagaggactctgttctgaggagcggactctgctcattgcctttgaaaatcctgcattcacagctgttatttacatttaaatgtggcctctgtgtgatgtcagggacacggtgccctaggctactgaggggaaattagggtgacctggtgacaatttacagcagattgcaccatttctcatacactttataacaag

SEQ ID NO: 57982 - DNA, 865 bp, Homo sapiens
atatccctgtcattaagagatgcgtgactatattggataccctattagatacctgtctaaatgtaattttttttttttttaaatgagatggggtttcgctctgttgcccaggctggagtgcagtagcacgatcatagctcactgcatcttcagatctcctgggctcaagtcatcctcccacctcagcctcctgagtaactggtactacaagcgtatgccactatacccagcttatattttttatttctattaaaaaatatttttaagttacttattttagagacaaggtctcgctatgttaccgaggctggccttgaattcctggcctcaagcgatcctcctgcctgagctttcagagttactgggattacaggcatgagccatcatgcctggctctaactcgttttcaatgacagaatatatattctattttgttcctatatcatattttatttaactcattttcctcttgatggggacttgttaaatagtttattgttttacttatgtttgtattttgaggaatagattctttagaagtgacattcatggttcacttgttggttgtgcattttgatggatacgcaaaaagtggggaagttacaccatttgctaagaacttaaataccttttcttcttttytttttttttaatcatcttagcaagtctggaaaagtttgaaattccagtaaaaattcgtttgagtcctgaaccgtggacccctgaaactggtctggtgacagatgccttcaagctgaaacgcaaagagcttaaaacacattaccaggcggacattgagcgaatgtatggaagaaaataattattctcttctggcatcagtttgctacagtgagctcagatcaaa

SEQ ID NO: 57983 - DNA, 2949 bp, Homo sapiens
cccctacccccacccaccccccaaaaaaagaattcaactcaagttagaaaaagagtaataaaataaacatatggaacatacacaaagaaagaaaagaacagaaatatctacacatagtatagtaagtttattaaatacatagtatatatatttctgcattgtaggaaaagctagaaaggtctcccatttcatttgtgatacgcttataaccctgataccaaaacctaatgaagatagaacaaaaagaaaatcattagtagcttaattwatgacattggctgtaaaattattaattaaaataccccagcaaattccttttttttttttttttgctgggtctcactctgtcaccaaggctagagtgcaagtggcactatctatcatggttcactgtaacctccaactccagggctcaagtgatacccctgtctcagcctccagagtagctgggactacaggaacatgctaccatgcctggctaattctttaagtttttgttgagaaaaggtcttatgttgcccaggctggttgcaaactggcctcaagggatcctcccatctggacctcccaaagtgctaggattacaggcatgagccactatgtccagcccaccagcaaattctttttttttttgagacggagtctcgctctgttgcccaggctggagtgcagcggcacgatcttggctgactacaagctctgcctcccgggttcacaccattctcctgcctcagccgcccgagtagctgggactacagatgcccgccaccaaacttggctaattttttgtgtttttagtagagatggggtttcaccatgttagccaggatggtctcgatctcctgacctcgtgatctgcccgcctcggcctcccaaagtgctgggattacaggtgtgagccaccgcgcccagcctgcaaattcttaatatgtaaaagcacttacaaattaagaaaaatatgagcatcataaaagaaaatgagcaaataactcagaaaatccacagaggatatataaatgcctaaaaatcatttatggaaaaatgtcaagcttcacagataatcagttcttttcaaattaactacaaattttttaaaaggtagtaaccagcgctcttgagagtatgtatggtgagacattttcatatgctgtgggtggaagggtaaattgctcttcagaaagtttacgtcaatttgacaaaatataatgagtgttttatacagcctctcatcttttaatccagtaattccaccagtggaaatatttctaaggaaatagctagagcggaagataaagctcaaaaattggaaataatctaaatgtgcaacattagggggcaagaatgcttggcaaattagcagcatgtgccttaaatcattctattgtttgattatagattgtagaagttcactgctgctgttttgaaacagaagtcttcattgcatattcaagccaaattcatgcaatgttccagataaattgctgcagttagttgctgtgagtagatctttaaaaacaatccaagcatctgaaggttaataaaatcaattcattaacaataaagcagggtgctgccatccccactgtctgatgctgattggcacgtgtggatgaaagcctgtcatcaactttaagtgctgtgacactatctgtcttctaattaaactgccatggtggcattgttcaaatacaaaagaaaaagaaaaataatggtcagtgatctaacaggttctttgcacttaaagcagacacttgagctcatgcctcatggtccctggaacacaaatgatcattaaaccctgttattggttgcttaggcacctgactatcaagggtgtcaaaggtgcaaaggagaggtcctcattaagactgccctgccactaacaagtttccacttccatatcaggatcaactgtcagtgcccttaagaagccaagcctcagggttggctgcaagaccttgaccatcttttttgcatgttaggaatgcataggatcctgccagtctcttctggtgaacataaatggtgactatccatcaacaacaagctcatcctagcttttggcctgcccacccaccccaggccgcaccagcatcatctcactggagatggatgaaatggatgagctcagcagaattacacgccccacacaattagctctcagcttaaaccaaagctgtcagaaccgaagcacgagcctttgaaaatgactagctattgataattcaaaatcatttcagggccttggcttcccaagacacacttaagatattgaactaggaataataagccaggtctgctgctgtctcttcaaagctgagatcaatttttgtttgtttgtttctgaagtaaaattcaggctgggcttggtggctcactttgggaggccaaggcaggaggatcacttgaggccaggagtttgagacatgcctgagcaacaaagtgagaccctttctctacaaaagtaaataaatacataaatacaagataaaaaataaaattcacatcacataaaatttaatatttcaacaattttatttgtttgtttgtttttttgttttgagacaggatctcactctgtcacccaggctagtctcaaattcctgggcttaagcaatctgcctgcctcaacttcccagagtgctgggattacaggtgttaaggcaccgagcctggcctgttttttttgtttttctttttataatgatgttttttatttttaattttttttttggagacaaaaaagtctcactctgtcacccaggctggagtgcagtggcatgatcatggctcatggcagcctcaatctcctaggctcaagtgatcctcccacttcagcctcccgagtaactgggactataggcgcatgccaccaacctagctaattttttttttaagagataggttttgctatgttgcccaggctggtctccaactcctaggctcaaa

SEQ ID NO: 57984 - DNA, 675 bp, Homo sapiens
aataaaaatgtggccttctggtctcagagctgacagtctagtgggggaagctgtcatttaacaagcacatgatgtgtgttaaatttgtccttatgatgggtgccttaaaaaagtgcatgacactatgagagtgtgcaatgggatttgacctaatgggagaggccagggaagtattccacgaggaaataccagtacagtggtgagtaaatattccagcctttcatggattccaaaaccctgccttgtatcttgatacttgagtgtggttgccaaaacaatttgaaaataatggtgaaaagaaaacacatcaaaataaagatgtgccggacctcttcaacatggtctggggagttctaaaatttctgccttgctcatttaattaccactcattagcattatggctaatttgttattatatcaaatctggccatattaattacaaattaatttaatcatccaccttctaaaatataatctgcagcgaagttttataaccatgtgtatccataaaattcatttaatagcttatagttrcagaggaggatgttataaggttggtttctgagaaatttctacaatttaaagctgaaaagatgcagagagagagagagagttatataatatagaatattagtattagtgttagatatatgggtaaattttttgaagtataat

SEQ ID NO: 57985 - DNA, 3504 bp, Homo sapiens
tgagctcataacaattactcatccttaaattctagtttgattggaaggcatcagaagtgctgatgccttctgcaaatgcaaagacatttccaaagaccacttgtgttgtttacaagatcattttcttatagtgttaagaaaaaacacttagtaatgtaatctgtttaaaaagatttttgaagaatcgtggtgtgtaatgaaaaaataaaaaataagataaaataaaataaaaagttattttacatgttgggatcattcacatcattttaaatgaacccactgataaggtagtcagtgcctgtctgtgcatcatgctttattcctttactactttctatcaactgctaggcatgatggaataaaatatttcaggccttttttatttcacataaatgttctaaaaaattttagcatgatgcagcagaatatagaattcaaagtgggacaggtgttgtggttcatgcctgtaatcctagcactttgggaggccaaggtggtaggatcgcttgaggccagaagttccagactaccctgggtaacatgccaagacctggtctctaaaaaagaaaaaaaattagcctgatgcagtggcttgcacccgtagtcccagctactcaggacattgaggcgggaggatcacttgagctcaggagttcaagattaccatgagctatgattgtgtcactgcactccagcctggacagcagagtgagattctgtctctaaaaaaaaaaaaaaaaaatagtgaaaggaacctgagcctgggtttagatctgggctccaccattaattgtaagatattgagaaagatagttaatcttcctgagcttcagttccttcatatgtaaaatgtttgtatctcatagggcctttcatgaggattcaacatgacaccaaatataaaagtgcccaccaataattggcactttacaggcaatgagtaaacgttagtgttcttccttccactcccgcacaccatgactgcaaaagtcatggaaaaaaatactttgaagaaaatgcatctaggaaggcagagtttattatgctcaaaagaagtcatctgtcttctatggagatgcactaccatatttagccaaaagtaaagcaggaaaagaaacattttttgcttgaagatttgcagccccatttaggccaaaaaaaaaaatctatgtttatttcttagtgtattattcatcataagtattacctaacattcggaatatgaagggtcagtaatagctactgtgaacaaaatacatgtcgtttgtgatctgaaaagattctcctgtaaggggaccaaagcacctgaaccacagattcttatttacctgctttctataacctgtatttacaagtacagctataaatctaaatttattttatcggaggaactcaaacaattttaggattggaaactagaagttatctaactgtcatatatactttttttgagacagagtcttgctctgttgcccaggctggagtgcggtggtgaatctcagctcactgcaacctccgcctcctgtgttcaagctattctcctgcctcagcctcccaagtagctgagaccataggtgtgcgccaycaagcccagttaatttttgtatttttagtacagacagggtttcaccatattggcgaggccggtctcgaactcctgacctcaagtgatccacccccggcttggcctccccaagtgctgggattacaggcatgagccaccgcacccggcctcatatatacttttcaactaccatttccttcaagaattccttcaaacaatttatatttcatgtctacaatgaaccaggcactgtaaataatggaaacatgacacaggcaatgtcccagtcctcaaagggcttagtgtctatcggggtgaagaaggtctggccataacttaaaaagagctaatagcctaagataaaagtttgaatatgctgctcagtagaagagggggacttctagctgggagaagtggtaggagtaggaaaccaaagcaggttacattgcttaagagacaagttgatgagcacttactggtgcctaattaggaatctagcattgagtgctatagagaatgcagcagtaccttaagtggcaatccttggcctcaatgaatgcataatatgtagtttgaccaaatatcttagcacaaagcagaatttggaaggaagtcaacctatttctattcgttctatagcttctgacatatttacttcaaatgttaattgtttattaacagtaaaactacatgcaaggttttttatttgcttacctgagaaacactgcctttctttttgtatctgattcctgccttttgctgttttgcaaactgaatatctcagctttttcctgcaggtcacatacttccaaatcagattgagacaagtctgtatggttcacacaagtgacaccaagctagcaaaatacaacaggctcaaactatgctggaattgagcctgagggggactgatcagttttattcaaaacagagaatgaactggaatgagaagaagctttaagtagactttgaaaagatgatagaggaagaatggaagaaaaagtcattaggtttttaagaactttccacttttcccatataatataaaatattaatttatctcttccccttttatctttttttggtaaacacttttaaaatcatacattagcaacatcataaaaaaatttagaaatgaaagaaaattgcccataactttacaactccaacacagtaacttgtatcattttggagtatttctttttagcctttatttcatattcatatatgctttaatagtatacaggtagatttgtattatgttcttcatttgtcattatcgtaaatacttgttcctgttgctatagagtctgcatgattattctatttgttggctgcctaatactctgtgacctgtgttttgtgaaccttccctaactccctgcaaagtctttcccaaaacgtgcctaggagtcattggagtgaaggggtgccactcttgtttggggtcctgcccagtcagctaccatatagatcatttaattccccttctccattgctgggtaccacaatgttttcatgcaagcggagtctgcacatgctgctttgaatgaagggttttaatttttttctttggtgtttgcacacattggatttatttcagattactccatttatgtgaataaacaaaaacgagggaagaaaattttttctaagattttttttctatatgaaggaagtcaatttctaatgcattaagatgcagtgtttaccaaaattggggatgggggggtgtttatgtgcatttttgtgagaaatcagatacagggatggctgcctctgccaccatttccctggatactattaacttcccagatgggatgtccattttagtttattctcccaaaccacccaccttgatttcacccactgctgctacaaactaaaggattcctgcttacagtggggaaattggactgggaactaacaaaggccgttgg

SEQ ID NO: 57986 - DNA, 768 bp, Homo sapiens
tgttgatctgtgaccttacccccaaccctgtactctctgaaacatgtgctgtgtccactcagrgttaaatggattaagggcagtgcaagatgtgctttgttaaacagatgcttgaaggcagcatgctcattaagagtcatcaccactccctaatctcaagtacccagggacacaaacgctgcggaaggccgcagggtcctctgcctaggaaaaccagagacctttgttcacttgtttatctgctgaccttccctccactattgtcctatgaccctgccaaatccccctctgtgagaaacacccaagaatgatcaataaaaaaaaaaaaaaaaaaaaaagtccatcagtaatgaaacatcatcttaggtttttttttttttttttaaattgcgacaggctctcactttgtcatccaggttggagtgcagtggtgcaatcatgagtcactgcagcctcgactcccccaggctgaagcaatcctcctgcctcagcctcccaagtagcttgggactgcagttgtatgtcaccatacccagccccaatcttagtttttagaaacaatttttttttttttttggagagactgtcctttagtcataaaaaattacaagacattaaaaacttacaagtgattggaaactactcaaatgtccagaataggaagcctgtggcatgttcatacaaaggaatactatacagcaatataagtaaatgaactgcaattgtgtacatggaaaatatagatgactatatctatatatatacata

SEQ ID NO: 57987 - DNA, 768 bp, Homo sapiens
tgttgatctgtgaccttacccccaaccctgtactctctgaaacatgtgctgtgtccactcagagttaaatggattaagggcrgtgcaagatgtgctttgttaaacagatgcttgaaggcagcatgctcattaagagtcatcaccactccctaatctcaagtacccagggacacaaacgctgcggaaggccgcagggtcctctgcctaggaaaaccagagacctttgttcacttgtttatctgctgaccttccctccactattgtcctatgaccctgccaaatccccctctgtgagaaacacccaagaatgatcaataaaaaaaaaaaaaaaaaaaaaagtccatcagtaatgaaacatcatcttaggtttttttttttttttttaaattgcgacaggctctcactttgtcatccaggttggagtgcagtggtgcaatcatgagtcactgcagcctcgactcccccaggctgaagcaatcctcctgcctcagcctcccaagtagcttgggactgcagttgtatgtcaccatacccagccccaatcttagtttttagaaacaatttttttttttttttggagagactgtcctttagtcataaaaaattacaagacattaaaaacttacaagtgattggaaactactcaaatgtccagaataggaagcctgtggcatgttcatacaaaggaatactatacagcaatataagtaaatgaactgcaattgtgtacatggaaaatatagatgactatatctatatatatacata

SEQ ID NO: 57988 - DNA, 768 bp, Homo sapiens
tgttgatctgtgaccttacccccaaccctgtactctctgaaacatgtgctgtgtccactcagagttaaatggattaagggcagtrcaagatgtgctttgttaaacagatgcttgaaggcagcatgctcattaagagtcatcaccactccctaatctcaagtacccagggacacaaacgctgcggaaggccgcagggtcctctgcctaggaaaaccagagacctttgttcacttgtttatctgctgaccttccctccactattgtcctatgaccctgccaaatccccctctgtgagaaacacccaagaatgatcaataaaaaaaaaaaaaaaaaaaaaagtccatcagtaatgaaacatcatcttaggtttttttttttttttttaaattgcgacaggctctcactttgtcatccaggttggagtgcagtggtgcaatcatgagtcactgcagcctcgactcccccaggctgaagcaatcctcctgcctcagcctcccaagtagcttgggactgcagttgtatgtcaccatacccagccccaatcttagtttttagaaacaatttttttttttttttggagagactgtcctttagtcataaaaaattacaagacattaaaaacttacaagtgattggaaactactcaaatgtccagaataggaagcctgtggcatgttcatacaaaggaatactatacagcaatataagtaaatgaactgcaattgtgtacatggaaaatatagatgactatatctatatatatacata

SEQ ID NO: 57989 - DNA, 768 bp, Homo sapiens
tgttgatctgtgaccttacccccaaccctgtactctctgaaacatgtgctgtgtccactcagagttaaatggattaagggcagtgcaagatgtgctttgttaaacagatgcttgaaggcagcatgctcattaagagtcatcaccactccctaatctcaagtacccagggacacaaacgctgcggaaggccgcagggtcctcygcctaggaaaaccagagacctttgttcacttgtttatctgctgaccttccctccactattgtcctatgaccctgccaaatccccctctgtgagaaacacccaagaatgatcaataaaaaaaaaaaaaaaaaaaaaagtccatcagtaatgaaacatcatcttaggtttttttttttttttttaaattgcgacaggctctcactttgtcatccaggttggagtgcagtggtgcaatcatgagtcactgcagcctcgactcccccaggctgaagcaatcctcctgcctcagcctcccaagtagcttgggactgcagttgtatgtcaccatacccagccccaatcttagtttttagaaacaatttttttttttttttggagagactgtcctttagtcataaaaaattacaagacattaaaaacttacaagtgattggaaactactcaaatgtccagaataggaagcctgtggcatgttcatacaaaggaatactatacagcaatataagtaaatgaactgcaattgtgtacatggaaaatatagatgactatatctatatatatacata

SEQ ID NO: 57990 - DNA, 768 bp, Homo sapiens
tgttgatctgtgaccttacccccaaccctgtactctctgaaacatgtgctgtgtccactcagagttaaatggattaagggcagtgcaagatgtgctttgttaaacagatgcttgaaggcagcatgctcattaagagtcatcaccactccctaatctcaagtacccagggacacaaacgctgcggaaggccgcagggtcctctgcctaggaaaaccagagacctttgttcacttgtttatctgctgaccttccctccactattgtcctatgaccctgccaaatccccctctgtgagaaacacccaagaatgatcaataaaaaaaaaaaaaaaaaaaaaagtccatcagtaatgaaacatcatcttaggtttttttttttttttttaaattgcgacaggctctcactttgtcatccaggttggagtgcagtggtgcaatcatgastcactgcagcctcgactcccccaggctgaagcaatcctcctgcctcagcctcccaagtagcttgggactgcagttgtatgtcaccatacccagccccaatcttagtttttagaaacaatttttttttttttttggagagactgtcctttagtcataaaaaattacaagacattaaaaacttacaagtgattggaaactactcaaatgtccagaataggaagcctgtggcatgttcatacaaaggaatactatacagcaatataagtaaatgaactgcaattgtgtacatggaaaatatagatgactatatctatatatatacata

SEQ ID NO: 57991 - DNA, 3016 bp, Homo sapiens
aaataaaattttttcctttcaaagcagcctatcattcaggaagcaaagcattctaataataattgaggagtctgtctcttgctttgtctctctccagagttcaaccatctgggatttgaaaattagagaaggcagaagggacagcaaagtccgcttggaaactccctggggagaagctggcagggaccaccctgtgcctcccccacgtgttgaatatccttgctgtttagaggctgaaaacaggtctttgaagtttctggctttgcctccagcaaatcggccacagcttcccttatattccaggctggtttgaaaataactcttccagtgcctccacctcccaatccatggaggagacttaaaatttagcaagcttagcccttccctgtcacactcacatcaaaggacaatgctagggacctccaagggaaatacttccgcaccccagaaccctgggagtcacatttccatctaggcagctgcaggggaatggaggaaatgtatcatacgagcagaggcaactctggaatcagcccttcctctactgaggccagggagacgggttgctactcaaaaggaaaatgtaggtgtcccctgcaatttgaacaggctgtggatgtgctttaccatcgtcatgctactctggcttctaatttagggagcagagggtaaggcctctaagagcacaaaatctttgagctaaacggctttgagtgaaaagtacaatcacttaaaaaaaaatacaaccgcttatcaactttattcagctcctatttagacgtgaaaaatgctccagagggaggtttcctgagcaaaggccaggatttactgtgtatttcccacaaacagggctcactggttccttctgtgagaaatgaaacccagcggacccacccagcaggcctcacgggcaaaaaggagtctacaccagattaaaaaaatccacttcaggacttttttactactggagtgggctggagagctgtcaatgggcaggaaaatagcacatctggaatgcggctctgtccccgtgctggctggtataactcaacatgtacgtcagatcttttttttttttttttctttaatggccaagatttatctggcttctattcattttttaagtccagggtgaatatgattgttaacttctatacttttacatttgtgtaaattaaaagccatatttcactactgggcagatggcttgctgcttgcttgccttaaatgtaaaaatggcaaagctaagcactataatccaagacatggattacccaactcacccagaagatactaaaagagaaagatcttgtgatttcttcaccaaagctatatcccctttgtgcctttataaaatctagttctagaaaagttggcgccaagatgctcaaactgcaagtagacttttggattaatttagtcagtcatgttctgactgtggcaacgagaggctattacaggctttttttattattattatttgattttatttttttgtagcaagcaaattggtttgtaaaacagatatagccgttttaactcctaaagagatttggaggaaagtgagtggatccttccggaaacagccacctcttgctttttttggttggggtttgacatccgtttttgagcacaagggaatgtctttttcatggaagtccgtacttgscattttctcttaagttaaaagcaagagcaatataataaacgtttgctaacaaccccccacatacttagatttattggctagttaaatctttaatggttaaagttaaaaaccttttattttaagggcttggggatttgcacagctggaatgttgcattttaatatattcatattggaatggaaaagccaaagtgaccagcacattgacttctttcttggatgtcccaagctgataacaggcatagccttgccccacggcctccctcctcaccccgagccaagtccaaagaggggatgggagaaggggagagcaagcatgctacaggggccattttgggtggctcccttcctactttcactctcctgttcttgatctgccctcgaaacactgagaaatcaaggagtctctacattctgattctgccactcaactgacccatcttggcagggtcacactctgctggtctcacccttctgggaactccctaatttggtcgtctagattagaaaggcggtgtgcagcagcagtggtgaaggtgctagggtcattaacttgatgagggttgataatgtgatgaagggagatgggagagaatggaagactaccaaagcacaatggaaggacatgatttgagataagaggtaggagtgacagaagtgacaaagggtggtactgatgacatctaaccaaatgcttactctgtgccaggcaatttcaagttgctttacatgaattatttcatggattctccaatctagtactatgttgcccttatacaaataaggaaactaaggtgtagagagctaagcaactcgccaagtctagaaagagatagacccaggcaatctgactggacagactataattttgatggaggcttcaaagagatggggatgggaatatgagaggccttgaaaattgagaggcatgagtgttcaatcactgctaaagcagaaccaggaaggatagttccatcactttcaggaaacatgattatgaggaaatgcgcgttctcatgcacatcccacaagtgcacaccgccacttcgtcccagtggttcctcatgcaccttaacacacagaagcatgttctgacaaagatattttatgcactcatctactcacttcacagacacatgcttcagaaacactatggcaccaatgcattcacacagatgcgccaacattcacactcacatcttctggcaccacatgtacacacacatgcacacacacacgtgcacgctgagggggatatgagatgcagttatctcttgatgatcccttgggattctgccatgcctttgtttctcaaatactgactgttgtctgtcctactgacaatgat

SEQ ID NO: 57992 - DNA, 3016 bp, Homo sapiens
aaataaaattttttcctttcaaagcagcctatcattcaggaagcaaagcattctaataataattgaggagtctgtctcttgctttgtctctctccagagttcaaccatctgggatttgaaaattagagaaggcagaagggacagcaaagtccgcttggaaactccctggggagaagctggcagggaccaccctgtgcctcccccacgtgttgaatatccttgctgtttagaggctgaaaacaggtctttgaagtttctggctttgcctccagcaaatcggccacagcttcccttatattccaggctggtttgaaaataactcttccagtgcctccacctcccaatccatggaggagacttaaaatttagcaagcttagcccttccctgtcacactcacatcaaaggacaatgctagggacctccaagggaaatacttccgcaccccagaaccctgggagtcacatttccatctaggcagctgcaggggaatggaggaaatgtatcatacgagcagaggcaactctggaatcagcccttcctctactgaggccagggagacgggttgctactcaaaaggaaaatgtaggtgtcccctgcaatttgaacaggctgtggatgtgctttaccatcgtcatgctactctggcttctaatttagggagcagagggtaaggcctctaagagcacaaaatctttgagctaaacggctttgagtgaaaagtacaatcacttaaaaaaaaatacaaccgcttatcaactttattcagctcctatttagacgtgaaaaatgctccagagggaggtttcctgagcaaaggccaggatttactgtgtatttcccacaaacagggctcactggttccttctgtgagaaatgaaacccagcggacccacccagcaggcctcacgggcaaaaaggagtctacaccagattaaaaaaatccacttcaggacttttttactactggagtgggctggagagctgtcaatgggcaggaaaatagcacatctggaatgcggctctgtccccgtgctggctggtataactcaacatgtacgtcagatcttttttttttttttttctttaatggccaagatttatctggcttctattcattttttaagtccagggtgaatatgattgttaacttctatacttttacatttgtgtaaattaaaagccatatttcactactgggcagatggcttgctgcttgcttgccttaaatgtaaaaatggcaaagctaagcactataatccaagacatggattacccaactcacccagaagatactaaaagagaaagatcttgtgatttcttcaccaaagctatatcccctttgtgcctttataaaatctagttctagaaaagttggcgccaagatgctcaaactgcaagtagacttttggattaatttagtcagtcatgttctgactgtggcaacgagaggctattacaggctttttttattattattatttgattttatttttttgtagcaagcaaattggtttgtaaaacagatatagccgttttaactcctaaagagatttggaggaaagtgagtggatccttccggaaacagccacctcttgctttttttggttggggtttgacatccgtttttgagcacaagggaatgtctttttcatggaagtccgtacttgccattttctcttaagttaaaagcaagagcaatataataaacgtttgctaacaaccccccacatacttagatttattggctagttaaatctttaatggttaaagttaaaaaccttttattttaagggcttggggatttgcacagctggaatgttgcattttaatatattcatattggaatggaaaagccaaagtgaccagcacattgacttctttcttggatgtcccaagctgataacaggcatagccttgccccacggcctccctcctcaccccgagccaagtccaaagaggggatgggagaaggggagagcaagcatgctacaggggccattttgggtggctcccttcctactttcactctcctgttcttgatctgccctcgaaacactgagaaatcaaggagtctctacattctgattctgccactcaactgacccatcttggcagggtcacactctgctggtctcacccttctgggaactccctaatttggtcgtctagattagaaaggcggtgtgcagcagcagtggtgaaggtgctagggtcattaacttgatgagggttgataatgtgatgaagggagatgggagagaatggaagactaccaaagcacaatggaaggacatgatttgagataagaggtaggagtgacagaagtgacaaagggtggtactgatgacatctaaccaaatgcttactctgtgccaggcaatttcaagttgctttacatgaattatttcatggattctccaatctagtactatgttgcccttatacaaataaggaaactaaggtgtagagagctaagcaactcgccaagtctagaaagagatagacccaggcaatctgactggacagactataattttgatggaggcttcaaagagatggggatgggaatatgagaggccttgaaaattgagaggcatgagtgttcaatcactgctaaagcagaaccaggaaggatagttccatcactttcaggaaacatgattatgaggaaatgcgcgttctcatgcacatcccacaagtgcacaccgccacttcgtcccagtggttcctcatgcaccttaacacacagaagcatgttctgacaaagatattttaygcactcatctactcacttcacagacacatgcttcagaaacactatggcaccaatgcattcacacagatgcgccaacattcacactcacatcttctggcaccacatgtacacacacatgcacacacacacgtgcacgctgagggggatatgagatgcagttatctcttgatgatcccttgggattctgccatgcctttgtttctcaaatactgactgttgtctgtcctactgacaatgat

SEQ ID NO: 57993 - DNA, 533 bp, Homo sapiens
tctgagcrtgtcttgatgtggtccttcatggttggacagatatcctggccataaaaaccctgactcaaagcctgacccaggaaggaatggaggactccagagagtagatgcctttcttctagtctggccagacctgctgatgtccatggattcttgcaggccagcatgcccctgagtgaggtcttctaggatgaaggaggtagacctgctgtgggctttcctcattgtactagagaaaccataaggtttggggcagagaaaagacactggagaggacccgaccaggacagtgtatgaatgtatgaacaagcccatctgtgcatgtgtgcatggggtaaacactgtgcttagaaggttgtcatccttgtcctgattaaggactctcctcactgtgtactggaaggcttggggaacttgtgatttagaatgccattttatctggctgcttttccagggaggtttggaaaattagctgagcccagttagattagaaagaggacccccaaagtggtggaatggggactgcagttgtg

SEQ ID NO: 57994 - DNA, 2060 bp, Homo sapiens
cgacatgctgtgctcttgccctcctcacccctccttgtgcgcgtgtacacaccagcttgtgggggctggcaccttaaagaggggagcactcacacactcacactcagcctgactgcaggagggccagtgtcctagaactaggaaagaccttaataccatcctgaccctcccgatatttccatacactgaactaaaacaacattcaggatgcaacttcagggaagagatgcattatccccagaccctcgctgctgcagtttcccacccactccatatcatttccaggrtcaggccagccgagagttaatagaaaatcactggcctcctctctaaggctgctgaccttggcctttgtggagccctggggcctatagaagagaagtgccaacccccacaagcaaagttcagattccaagaggagggtgccctcgagtcccacagacccccaacccaggagaaaagcagtgagcagtcttttcttgtgcccctcagatctgcctgagcctgggccgcctcctccaccacctggcccactcccatctgggctccgtcactctgctcgacttccgcctcggcagtttgtgctggtggatggtgagctcaaagtgacggacctggatgacgcacgtgtggaggagacgccgtgtgcaggcagcaccgactgcatactcgagtttccggccaggaacttcaccctgccctgctcagcccagggctggtgcgagggcatgaacgagaagcggaacctctataatgcctacaggtgacctccacccctgactcgggaactccatcgaaggagaatgggccaggagggcatggcaggaagagagccaacgtggaggccagctgggcagggagactcagccttgaccagagcaagggaaggcttctaccctgtccagaagggaacattcaggcctctgatggagaggctaaaaatagacagctccaaggagaatccgggttagggggtggcagctggaggcttcttaaaatagtgttggactcggagcctagggctggtggaactggcacttttcccttcccacccaggcccttgtgctctgggaaattcctcactgggccccagccatggggctgctccgacaccgggagtcagtcaggggataatgtggggctgggaggtgggcaagtcctgggaagggttgggaagcaggcccctggtttcggttagtatgaagttaggtgtggtgttagcatgtgcccagaaccctcccccgaggctgagtagacttcactgcgttctgcctggttgctaggcctgagggatccggctccctggccaggttagcgttctgccccaggttggaatagaggaaggatgtgtctccaaaggctggattcctgagccactggtttccctctgccacaggtttttcttcacatacctcctgcctcacagtgccccgccttcactgcgtcctctgctggacagcatcgtcaacgccacaggtgagctctccagggcccatctgcttccaggcacctaccccacccccacccgccagcaaaagtggggagaaaaataacccagggcagcaggggttctagaaaccatcacttcctaaggtggcattctgccgcaacctccccgctcccccgccctctgttcactggggcacaggctctggaggcagaggtgggagcagctggctgctgacttcagggaggagtgggagccccaggcatcctgtcttagccacactgcactctgcaggagagctcgcctggggggtggacgagaccctggcccagctggagaaggtgctgcacctgtaccggagcgggcagtatctgcagaactccacggcaagcagcagtaccggtgagtggccccaagctgatccacagggaagcaagaaacaggtgggagggtgaatgaccccgcccaattaggctaagtggctcaccctttctctggggacccttgtctccaaaggccactgtaggggctcacatagaatcatggaggggctgacatggactaatttgaggttccatctctagctgagctagagcaactataattctgcctt

SEQ ID NO: 57995 - DNA, 2060 bp, Homo sapiens
cgacatgctgtgctcttgccctcctcacccctccttgtgcgcgtgtacacaccagcttgtgggggctggcaccttaaagaggggagcactcacacactcacactcagcctgactgcaggagggccagtgtcctagaactaggaaagaccttaataccatcctgaccctcccgatatttccatacactgaactaaaacaacattcaggatgcaacttcagggaagagatgcattatccccagaccctcgctgctgcagtttcccacccactccatatcatttccagggtcaggccagccgagagttaatagaaaatcactggcctcctctctaaggctgctgaccttggcctttgtggagccctggggcctatagaagagaagtgccaacccccacaagcaaagttcagattccaagaggagggtgccctcgagtcccacagacccccaacccaggagaaaagcagtgagcagtcttttcttgtgcccctcagatctgcctgagcctgggccgcctcctccaccacctggcccactcccatctgggctccgtcactctgctcgacttccgcctcggcagtttgtgctggtggatggtgagctcaaagtgacggacctggatgacgcacgtgtggaggagacgccgtgtgcaggcagcaccgactgcatactcgagtttccggccaggaacttcaccctgccctgctcagcccagggctggtgcgagggcatgaacgagaagcggaacctctataatgcctacaggtgacctccacccctgactcgggaactccatcgaaggagaatgggccaggagggcatggcaggaagagagccaacgtggaggccagctgggcagggagactcagccttgaccagagcaagggaaggcttctaccctgtccagaagggaacattcaggcctctgatggagaggctaaaaatagacagctccaaggagaatccgggttagggggtggcagckggaggcttcttaaaatagtgttggactcggagcctagggctggtggaactggcacttttcccttcccacccaggcccttgtgctctgggaaattcctcactgggccccagccatggggctgctccgacaccgggagtcagtcaggggataatgtggggctgggaggtgggcaagtcctgggaagggttgggaagcaggcccctggtttcggttagtatgaagttaggtgtggtgttagcatgtgcccagaaccctcccccgaggctgagtagacttcactgcgttctgcctggttgctaggcctgagggatccggctccctggccaggttagcgttctgccccaggttggaatagaggaaggatgtgtctccaaaggctggattcctgagccactggtttccctctgccacaggtttttcttcacatacctcctgcctcacagtgccccgccttcactgcgtcctctgctggacagcatcgtcaacgccacaggtgagctctccagggcccatctgcttccaggcacctaccccacccccacccgccagcaaaagtggggagaaaaataacccagggcagcaggggttctagaaaccatcacttcctaaggtggcattctgccgcaacctccccgctcccccgccctctgttcactggggcacaggctctggaggcagaggtgggagcagctggctgctgacttcagggaggagtgggagccccaggcatcctgtcttagccacactgcactctgcaggagagctcgcctggggggtggacgagaccctggcccagctggagaaggtgctgcacctgtaccggagcgggcagtatctgcagaactccacggcaagcagcagtaccggtgagtggccccaagctgatccacagggaagcaagaaacaggtgggagggtgaatgaccccgcccaattaggctaagtggctcaccctttctctggggacccttgtctccaaaggccactgtaggggctcacatagaatcatggaggggctgacatggactaatttgaggttccatctctagctgagctagagcaactataattctgcctt

SEQ ID NO: 57996 - DNA, 2472 bp, Homo sapiens
cctaagtcaatactgtccttggcgctccctctccctctccctctccccacgatctcccactccccacggtctcccactccccacggtctccctctccctctctttacagggtctccctctgatgccgagccaaagctggactatactgctgccatctcggctcactgcaacctccctgcctgattctcctgcctcagcctgccgagtgcctgcgattgcaggcgcgcgccgccacgcctgactggttttcgtatttttttggtggagacggggtttcgctgtgttggccgggctggtctccagctcctaaccgcgagtgatccgccagcctcggcctcccgaggtgccgggattgcagacggtgtctggttcactcagtgctcaatggtgcccaggctggagggcagtggcgtgatctcggctcgctacaacctccacctcccagacgcctgccttggcctcccaaagtgcccagagtgcagcctctacccggccgccaccccgtctaggaagtgaggagcatctctgcccggctgcccatcgtctgagatgtggggagcgcctttgccccgccgccccgtctgggatgtgaggagcgtctctgcccggccgcgaccccgtccgggaggtgaggggcgcctctgcccggccgcccctactgggaagtgaggagcccctctgcccggccaccaccccgtctgggaggtgtgcccaacagctcattgagaacgggccatgatgacaatggtggttttgtggaatagaaaggggggaaaggtggggaaaagattgagaaatcggatggttgccgtgtctgtgtggaaaggagtagacatgggagacttttcattttgttctgtactaagaaaaattattctgccttgggatcctgttgatctgtgaccttacaccccaaccctgtgctctctgaaacatgtgctgtgtccactcagggttaaatggattaagggcagtgcaagacgtgctttgttaaacagatgcttgaaggcagcatgctggttaagagtcatcaccactccctaatctcaagtacccagggacacaaacactgcggaaggcctcagggtcctctgcctaggaaaaccagagacctttgttcacttgtttatckgctgaccttccctccactattgtcctatgaccctgccaaatccccctctgtgagaaacacccaagaatgatcaataaaaataaataaataaattttaaaaagcttgtatctcaacatataaaaatatacttttttatagaatggaaaaaaaaaatactgtccttggcatatggtatgtgcttaaaatatctgccaaaggaatgttaaatgatgcagcatttagagacatattatatggggaaaaaaaactatatgcagaagtagaataagttattttgtaagcaattatttgatttgtaattagaagttgggtctttcttttaattgattatcttagaaggttgtcagaaaataaaactgttaatacatcttactgtggccttaaccatttgaccctcatctccttttttctcagagaatgcggcagagaaaaagaggagaaactgaagaagggactaaataaggcaaggctggatcagaaaagattgactctgaggactaagagaaactgaagctgggacccagcagggtgctattgacctccaagtcctttctccacattcccccatctgcccaacttccacagctcaggggtcttttctcctagggttgaaatatgaatggctctaaaatttcccagtgaaaaccatccatgaagttgtgtgtgggaaatgaaatgccagcccgtgggtgtcagcaactgtgaagaaagcgtggcatccacgctcacctgggcttcctttggtttgcctcattaatcagctccccaggtcatcggcacgtctcgcctcaggctcacaggtctggtttttgtataatacacatttcccccagtttttatttcatctgtttttttcaagcagcctttccattatttctgaacatttgagttaaaaaaatgtaaattacagacgcctgcggattgacgtaatgtgaaaagaaggcggctgtttccccttcctccaaacaggggacatggcttttcaaactaataaaccccttaaacctcatgaagcccatttcgacctttttaaatggctactttcagaaggggaagggaaaaagcagcagcgggagaaagtgttggggcccgtgtcatggcgggagagggaatgatcccagctcgtgcagatggagtctgtcccttccctcagtcggaggtcgtagccaccaagagactggccatgctgaaccttggaggggaaagcccacagcatggggacaggcctctgaagtcctggtcggaggagagactgagcagatgcaagagagaggaattttgtggtacggggggttctggaaaaggtgagagcagagggatcaagagggaaataggaggg

SEQ ID NO: 57997 - DNA, 715 bp, Homo sapiens
gcaccatccaggtgccccttcccctaatcattgagggtgtggggtgggagtgtgttttttgctggggaggggattgcaggctagtttagggctcacaaagaggccagagagggagcagtagtctctcccatcattggttcctccctccccaccctggtaggccagaccgtggaaaatcccagcccagggaaggccaagccttgtgcttgagatcagacccccaggcctggtgtgggagcccaaggcggattctccgagactgacttcattcctcctggccacacacccaggggtctgaggctgggcgctggcagcctgtgagtgtgtgtgggcgtggacgtgtcctcacaacaccaagcacatgtgagcaccacccacctccctccatgggtgggtggtttccaagcgcctgtcctgagcccagtttcttcctcgggtacctgtgccctcttccttcctaccctgggcactgagactgcccaaggcttcctgcagtaccattctctccaactctgaaacatgaaactgaaaagaaactagaggaaacagaggcccagagagggtcacatactttgcctggctctcatagcaaatccttgaagagaggcctggagggtggccagccacttcccaggcccagctgggtctcctgcactgtgtmggctccctcgatgtgaccactcctgctattaccaaccaggccctcctctcctgg

SEQ ID NO: 57998 - DNA, 1028 bp, Homo sapiens
acagtgaattaagggagggggtaaaagcacatttcaggtgatgatgaattaaatacctaggagctcacattagagagcaggcctagagacgtggggagagagccagaggaccgctgcttttgtgtatgtagctttaagacacaggttttaaaaattgttataggagtcccaaactttagaaaatatatattttaaaaccccaacaaattaggtcccccctatgcatttctcacccaacttctgggccctttccagacccctggtgcccccagagtacacccagcaccaccactgcaaattcctactccccagcttggagggggtggggtgatattcccaaggtgatcccggctcccacctaacccatcctccccagctctgcagcttatatccagctttgcagtgaggaaagttgcagaatactggtctgctacattactactttccaagtgtatcagggcatttaggaacccctcccttgagcttcacctgtgtcctagggattcagtgagagactgtttgtgyaagaaggagcgagaggcagcagggcatagtcatggggtggagcagtgagtcccccaggcctggttgtggagtacctggggtgaggactttgcttaaaaactgccagagtgggtcagcagtgcgcctgccctggggcccctgctttaggatccaaagtggaaaagataggtgttttcacccactcttgtgacagattactggctccggtgccttggtggcagcagcaacaggagggggccaaggtgagggggcagcctgtggcagaagtggcagtggtgacggcggaggaagggaggcctgtggggaatggctgatccaggggaggggccgtggcactggtgagtgtgcatctgagaaaatgaaacggaggtgctggccaagaggctggagctaggcagaagggcagcagaggccacaggctggccgagtttatggtccagttcactcataacatgtgcagtattcctggggtctttgaggctttgcaagagctggggttttgt

SEQ ID NO: 57999 - DNA, 1028 bp, Homo sapiens
acagtgaattaagggagggggtaaaagcacatttcaggtgatgatgaattaaatacctaggagctcacattagagagcaggcctagagacgtggggagagagccagaggaccgctgcttttgtgtatgtagctttaagacacaggttttaaaaattgttataggagtcccaaactttagaaaatatatattttaaaaccccaacaaattaggtcccccctatgcatttctcacccaacttctgggccctttccagacccctggtgcccccagagtacacccagcaccaccactgcaaattcctactccccagcttggagggggtggggtgatattcccaaggtgatcccggctcccacctaacccatcctccccagctctgcagcttatatccagctttgcagtgaggaaagttgcagaatactggtctgctacattactactttccaagtgtatcagggcatttaggaacccctcccttgagcttcacctgtgtcctagggattcagtgagagactgtttgtgcaagaaggagcgagaggcagcagggcatagtcatggggtggagcagtgagtcccccaggcctggttgtggagtacctggggtgaggactttgcttaaaaactgccagagtgggtcagcagtgcgcctgccctggggcccctgctttaggatccaaagtggaaaagataggtgttytcacccactcttgtgacagattactggctccggtgccttggtggcagcagcaacaggagggggccaaggtgagggggcagcctgtggcagaagtggcagtggtgacggcggaggaagggaggcctgtggggaatggctgatccaggggaggggccgtggcactggtgagtgtgcatctgagaaaatgaaacggaggtgctggccaagaggctggagctaggcagaagggcagcagaggccacaggctggccgagtttatggtccagttcactcataacatgtgcagtattcctggggtctttgaggctttgcaagagctggggttttgt

SEQ ID NO: 58000 - DNA, 681 bp, Homo sapiens
atcctgtctttatttgatatttggatattttgttcattacagatagttttgcattaatttttattttaaaaactattgtgttaaatattayttatctccgttactgagtttttttggcaccccctaaaattttgcaccccgaggaaaaaaaaaaaaaacacctcactggcctcattcccctcaccctagtcctggccctggcggagagccccagctgtggacaggactccttctggcttttcagggggtgaacatacgtcctcctcttgggaaggcccaagccctctgcacatgaggacacagtggaaaggcagcttccacacatgctgttagcagacagggctactgtgacaagggctgactggtgggtgtggccagtgctggacggccatcagccattctctgctgtcctagaatccccctccctgctaccctctccatacaggcagcttttgggccaaggttttctactcagtccccaatacttatgcagtccaactctgccttgcctctttcaagctgtcgtcagtttcctctacccataattctctgctccccattgaggttgctgagcctggcccaccaagtaagggctgactgagccctccagtgcctcagagtataggtgctagtgccccagcctcctcctcagcctctgtcagcagagggatgatgctttgt

SEQ ID NO: 58001 - DNA, 681 bp, Homo sapiens
atcctgtctttatttgatatttggatattttgttcattacagatagttttgcattaatttttattttaaaaactattgtgttaaatattacttatctccgttactgagtttttttggcaccccctaaaattttgcaccccgaggaaaaaaaaaaaaaacacctcactggcctcattcccctcaccctagtcctggccctggcggagagccccagctgtggacaggactccytctggcttttcagggggtgaacatacgtcctcctcttgggaaggcccaagccctctgcacatgaggacacagtggaaaggcagcttccacacatgctgttagcagacagggctactgtgacaagggctgactggtgggtgtggccagtgctggacggccatcagccattctctgctgtcctagaatccccctccctgctaccctctccatacaggcagcttttgggccaaggttttctactcagtccccaatacttatgcagtccaactctgccttgcctctttcaagctgtcgtcagtttcctctacccataattctctgctccccattgaggttgctgagcctggcccaccaagtaagggctgactgagccctccagtgcctcagagtataggtgctagtgccccagcctcctcctcagcctctgtcagcagagggatgatgctttgt

SEQ ID NO: 58002 - DNA, 681 bp, Homo sapiens
atcctgtctttatttgatatttggatattttgttcattacagatagttttgcattaatttttattttaaaaactattgtgttaaatattacttatctccgttactgagtttttttggcaccccctaaaattttgcaccccgaggaaaaaaaaaaaaaacacctcactggcctcattcccctcaccctagtcctggccctggcggagagccccagctgtggacaggactccttctggcttttcagggggtgaacatacgtcctcctcttgggaaggcccaagccctctgcacatgaggacacagtggaaaggcagcttccacayatgctgttagcagacagggctactgtgacaagggctgactggtgggtgtggccagtgctggacggccatcagccattctctgctgtcctagaatccccctccctgctaccctctccatacaggcagcttttgggccaaggttttctactcagtccccaatacttatgcagtccaactctgccttgcctctttcaagctgtcgtcagtttcctctacccataattctctgctccccattgaggttgctgagcctggcccaccaagtaagggctgactgagccctccagtgcctcagagtataggtgctagtgccccagcctcctcctcagcctctgtcagcagagggatgatgctttgt

SEQ ID NO: 58003 - DNA, 681 bp, Homo sapiens
atcctgtctttatttgatatttggatattttgttcattacagatagttttgcattaatttttattttaaaaactattgtgttaaatattacttatctccgttactgagtttttttggcaccccctaaaattttgcaccccgaggaaaaaaaaaaaaaacacctcactggcctcattcccctcaccctagtcctggccctggcggagagccccagctgtggacaggactccttctggcttttcagggggtgaacatacgtcctcctcttgggaaggcccaagccctctgcacatgaggacacagtggaaaggcagcttccacacatgctgttagcagacagggctactgtgacaagggctgactggtgggtgtggccagtgctggacggccatcagccattctctgctgtcctagaatccccctccctgctaccctctccatacaggcagcttttgggccaaggttttctactcagtccccaatacttatgcagtccaactctgccttgcctctttcaagctgtcgtcagtttcctctacccataattctctgctccccattgaggttgctgwgcctggcccaccaagtaagggctgactgagccctccagtgcctcagagtataggtgctagtgccccagcctcctcctcagcctctgtcagcagagggatgatgctttgt

SEQ ID NO: 58004 - DNA, 1147 bp, Homo sapiens
acttaaaagccatctgtcctggaagaaaagtgaaggaccacagaaataatgtatgcaaaatatcctggtaaactaaagagtgatttttatatgccagttgttattactcttattattattattaccgtcctgggaaagaaaggacctttactttcagtctggaacatggatgaagatgaagccctcccagacctctcccatccacatctgactcagataatccctgagtgtgttctacacaatgtagtagtccgtgattctggtcccctggctattggctgctgttttatgtatagcccaggtatcagctgaggcctctctctcccaccccaccaccccagatgttggtaagcttgacccaagttgccagtgctcagcctgcaggagtccagagtctcccccaatttgcacaagtttctaccactggttgctgtatgttcccgtggtctttgctcctgcacccatccacgctctctccatgctgcttggcactgcccagggcatgaagcttgggctctcctggaagttctgcaaaagacacatgcaccccaagcatttcctgcatttagaaacattcctggaaatgtgtggcatctgggacagaggccatggcagacacacagtctctcatgacctcacttcctcgctcttgccctttacttctctttcttctgagaaacaagctcattcttcccccttgttctgcagagaacaatttatccagtacttggggcacttggaatctcagcttcattccttccaaacactaagagaataaaagtgacatagctaggaaagagctatcaactcaacctgattataagcaccctgaggtcagggayggggtcttaaatactactggagccccactgtaactagcctagagctctgctaaataaataccacaattatagtcagttctcattactgatggtagttatgttctctaaagtcattgcacacactgaattagcaaatactgaacctttgttcctaggggaaataaagtgttaggttctgcaagcctctggttacaaaattttcaccaactgatcaatatataactttttaaaatgtgtgtttcagtttaaagacaccttatttaatatggattgttgatccattaacattgaactcaaggccaaca

SEQ ID NO: 58005 - DNA, 1147 bp, Homo sapiens
acttaaaagccatctgtcctggaagaaaagtgaaggaccacagaaataatgtatgcaaaatatcctggtaaactaaagagtgatttttatatgccagttgttattactcttattattattattaccgtcctgggaaagaaaggacctttactttcagtctggaacatggatgaagatgaagccctcccagacctctcccatccacatctgactcagataatccctgagtgtgttctacacaatgtagtagtccgtgattctggtcccctggctattggctgctgttttatgtatagcccaggtatcagctgaggcctctctctcccaccccaccaccccagatgttggtaagcttgacccaagttgccagtgctcagcctgcaggagtccagagtctcccccaatttgcacaagtttctaccactggttgctgtatgttcccgtggtctttgctcctgcacccatccacgctctctccatgctgcttggcactgcccagggcatgaagcttgggctctcctggaagttctgcaaaagacacatgcaccccaagcatttcctgcatttagaaacattcctggaaatgtgtggcatctgggacagaggccatggcagacacacagtctctcatgacctcacttcctcgctcttgccctttacttctctttcttctgagaaacaagctcattcttcccccttgttctgcagagaacaatttatccagtacttggggcacttggaatctcagcttcattccttccaaacactaagagaataaaagtgacatagctaggaaagagctatcaactcaacctgattataagcaccctgaggtcagggacggggtcttaaatactactggagccccactgtaactagcctagagctctgctaaataaataccacaattatagtcagttctcattactgatggtagttatgttytctaaagtcattgcacacactgaattagcaaatactgaacctttgttcctaggggaaataaagtgttaggttctgcaagcctctggttacaaaattttcaccaactgatcaatatataactttttaaaatgtgtgtttcagtttaaagacaccttatttaatatggattgttgatccattaacattgaactcaaggccaaca

SEQ ID NO: 58006 - DNA, 1302 bp, Homo sapiens
taaagacagacacctgagtgcccacccatcgagactctggttcagctgatctgggtgaggactcyggcaccagctttgtttatttcagccactttaatggccaaacagcaccaagaacactgcccaagttagcaggactagagctcctccctggagacagaagaggccctggtaggctttccctctttgggtcctactattgagccctcccaaattccataatagcaccaagggcagggggatattaagtagtattgtgattctcaggcctcaattcatgctttcttctaatctagattacctcttcccacaatatctctcttccgcaaagacctcctccatgaggtcttcctcaatccccccatcctgccaaatcagcctttccaccgcagtcatcaagtatatgtctatgtagcccttagtgctttctgtcttgccctatagttagctgttaatgcatctgcattcctctttagactgtaaattctttaagaggggagttgtgtcttattcatctttttctccttacaccaaagtcttgcatagtcctttaaacataataggggttcagatctttcgttggggaaacaatagtggcacacatgaaacaggtagagaaccatacacaaatctattttggagaaagcaaaatagccttaggtataggcaaaacagccctagcctaggaatcagaaaggggggatcctgatcccagctccgtagattttgggaaacctgcaacatcgctgggcctcaatttctgtatctatagaagcaggtggttggactcactgtctctaggctgcttccccagcttccacattctgtttctctcattccaagcccctaattgcctctaggcattcagagaagcagccctggctccaccttacttgaagaatcagcacatgaacaaaatcagggctttctgctttttcattctgggacatgactggaaaagtggagtggaggtttcccttcccttctaaaaatatgtgcgcatacactggcacactcacatgcatcacgacttcctttgtctatcataaacgtctaccctcatggtttataaaatccaggaagtcggccaggtgcagtggctcatgcctgtaatcccaacactttgggaggccaaggcaggtggatcacctgaggtcaggagtttgagacctgcctggccaacatggtgaaacctcatctcaactaaaaatacaaaaattagcctggtgtgatggcaggcacctgtaatcctagctactcaggaggctgaggcacgagaatcacttgaacccaggagacgga

SEQ ID NO: 58007 - DNA, 2397 bp, Homo sapiens
ttgcaatgcattgcttcagcataatttcccaactctgcagccacacaaagccgtttctgtccctatctgtgagtttaataatttctatttcctacaccttgcattcataatgcatcctcccaacatgggcttgggctgggcattggcctcgggcctcaggcatgtcagccttctccagggcctcaggctggaaaaccatttattagacaatttagtctctttggagggcagcaacagaaggcaaactgcctgacctccttgaaatgttcctcttgtacctaccttacccttcacagcccttttcccccatttcattatttattccagctactatgcggtacatgttgtcctggaggctgtaagacctggtttgttatcatcaatagcacagcactggtgagatgagatatatatacagacagacagttgggattcaatatgagaagtgtacttgaccatgactctgtgagggttgtcaccatgtctatttaggtttactcttgttctctctagcactagacacataataagtgctcaatcatatctgatgaatattaagtgaaaaaataaaggaataccaagacctataaatataatgaaaagagattggtttggtttggtttggtttggtttgggttggtttggtttggtagggagggaagcagtggggaggtacatgtcacaggaaccctaaaagtgaggatagctgctgaactgacactagaaaaatacagaagtaaaatttcacagaaagaggcagaggttgaaagaagaaacttcccaccagaggactgagcccctgccaaggccagaagagcattgagagtttgggatccctgaggccgccagagcctaggtttagtggtagcagagcaagctagaaaaggaggtcagccccagtgatccaagacctcactcatataccaggccaggaacagggaaggggtcagacaaatcccaggcatgagtcccagccccatcactgatcagtcatgtgactttggtggagagagctaaccttgctgagccacggtttccttctctgtaacataagtgcccaccttccagcctcgttgtgagggttacaagcaatggccatgcacagaagcacaaggcacagcgcccagcttagctgattccctgggcctcaggtggaagtcggagcctgccttgaacagggattctgaaaattctgatgcaggtatatattaatctgcattctccagagaagcagaaccagtaggatatatataaatatacaaaaagggatttagtatgagggattggcttatgcaattatggaggctgagatgtcccacaatctaccatctgtaagcaaaagtcccaggaaatccagtgacagagttccagtccaagcccaaaggcctgaacccagaggagccaatggtacaagtccttgcctgagtctgaagatccaagaaccaggagtggcaatgcctgagggcaggagaaaatggatgtcccagctcaagcagagagagagaatctgtccttcctctgcctttttgttctaattggtccctcaacagattggatgacccccatccacacttggagagagatcttcttactcagtctatggattccaatgcttacacctactagaaaggcactcatagacacacccagaaataatgttttatcagctatctgggcatcccttagctcagtcaagttgacacatgaaattaagcatctaaggtatctctgagactgggtagaaaaccatgtgagggtcatggacagactctcatcttccctctcctttctggttttagaaaacaccagcatgatctgccaccccactcctatccctccaggaagagccagtccagccaaaggaaaggtagcaggcacgaagtgctgtgagcaaaccaagtgccagccgacaccagtcagaggatagtgagatgagggatcccaaaatggctcccagggtgcgtgtaacccaggcacttttcctagcaggcagcccayacttcctttctcagctggctcttcctcacacacattttctctccttcagacagtgaggaagggggaatctctcttcctcttctcctccaccagccatattattgtctctttgcatcccccagactacctctctcagtgctgaacccacagtaaaatttgaagggttagacctgaaataaacccttatctctaccctaattgtacagatgagaagatgaggctcagaaagatcatgagacctgcagggtttgacactgagttagtggtggaggcagtgggcgcttagtaggcacaagctggttgattgtttctgcctatgttagtcaggaagcatctagctgtgagtaacaaagtgtccaacccaaaagggcttaggcaatgagaacacttatcatctga

SEQ ID NO: 58008 - DNA, 527 bp, Homo sapiens
attggctcaaactggaaaggagtaatatttcctgacaaaaattcacttatttttgtcagtcactctattcacagagaaagtcaactgcatgaacactatagacatgattttttctacatgtattcaaataaatgaatgaacactacttttcaacaaaatgataagactatcattgccattgtattagatcatttgattaataaatgtttcctctataacagattcagatatattcctacatttttactggttttctttaaaaccaaaactttggttttctattgtaaatatacttactggtccttattgctgctgttgttcacattaaaaagtgcaatggcaccaggcaggtactgctccctgggaaatgaaaaacatgcagtgaaatcacartagtcaccatctgtataatgtccatggtaggcaaatggtctgaaaaaacaaattcttctccatttctactcattactaaagactatgtagatgatagatatttcaaaaacatattatgaagcataaagcataaa

SEQ ID NO: 58009 - DNA, 1179 bp, Homo sapiens
atgcatatcagtcaatgttcataccaagaattagcttaagtgaaccaacctcaatgccagtaactcccaacaagaaacctaagactgttagggaaagtaagatgaggagaaaagctaaataaaaacaatgggaaggctggaggtagtcaatgggaagaaaaataagaaaaaggaaaaaaaagtaaagaaagagtaattatgtaaaacaggtggaaaccccagctccaacaccaataccacaccacaccccttctgcaatctcaagtccggtatctgaagttttcacaacttctttatttcctactaaggatatttgtgcttttctcttctagcacctctctccagtgctctatctcctaaaagtaggaccaaaagggatggagcattttagagaataacagccaaccctctcacatgtacttgcttcaggaccctgamagaaggatcagagagaaacaagaaatcagaaaggactgggtttcttaagggacagaccccagtgggtctcagggaaaatgaagcaagagtgtttacaacttggaacgccatggccataaataatcatcgggcagtggcaatatttcccaagagacggcatgggtaaggaacagaagtaattcctcctgagatcccacattgtgtgtagatagcagaggcatttgccgagcttgctccgaaacaacagtttacaaacccatttatgcctagtgtttgattattggaacgctaagcatgtgggagttatttctatcctactgctcaaggtcatcaccatgatctgattgcaaaaattcaaaacactgcaaccttaagcataaatggttaaaaacaagcaccaagggatggatcatactgctcacctctgtgatggtcctccctttctgagtgacttataactaaaggaaccccttgcatgagggttttcattctctgattcttcagatgtagaggcactgtcatcatcctcagaaaaggagctacagtccaataggaggcagagagagaagagttaatgttttcaaccactgcagagaggcaacattcctcactagggggacaattgcctcacctcttttccttccctctcaaactaacacacataacaatttttagttagcataaagttagaactatacaaaatacatagaattatataaaatatgtgcataattcagtaaa

SEQ ID NO: 58010 - DNA, 1179 bp, Homo sapiens
atgcatatcagtcaatgttcataccaagaattagcttaagtgaaccaacctcaatgccagtaactcccaacaagaaacctaagactgttagggaaagtaagatgaggagaaaagctaaataaaaacaatgggaaggctggaggtagtcaatgggaagaaaaataagaaaaaggaaaaaaaagtaaagaaagagtaattatgtaaaacaggtggaaaccccagctccaacaccaataccacaccacaccccttctgcaatctcaagtccggtatctgaagttttcacaacttctttatttcctactaaggatatttgtgcttttctcttctagcacctctctccagtgctctatctcctaaaagtaggaccaaaagggatggagcattttagagaataacagccaaccctctcacatgtacttgcttcaggaccctgaaagaaggatcagagagaaacaagaaatcagaaaggactgggtttcttaagggacagaccccagtgggtctcagggaaaatgaagcaagagtgtttacaacttggaacgccatggccataaataatcatcgggcagtggcartatttcccaagagacggcatgggtaaggaacagaagtaattcctcctgagatcccacattgtgtgtagatagcagaggcatttgccgagcttgctccgaaacaacagtttacaaacccatttatgcctagtgtttgattattggaacgctaagcatgtgggagttatttctatcctactgctcaaggtcatcaccatgatctgattgcaaaaattcaaaacactgcaaccttaagcataaatggttaaaaacaagcaccaagggatggatcatactgctcacctctgtgatggtcctccctttctgagtgacttataactaaaggaaccccttgcatgagggttttcattctctgattcttcagatgtagaggcactgtcatcatcctcagaaaaggagctacagtccaataggaggcagagagagaagagttaatgttttcaaccactgcagagaggcaacattcctcactagggggacaattgcctcacctcttttccttccctctcaaactaacacacataacaatttttagttagcataaagttagaactatacaaaatacatagaattatataaaatatgtgcataattcagtaaa

SEQ ID NO: 58011 - DNA, 1179 bp, Homo sapiens
atgcatatcagtcaatgttcataccaagaattagcttaagtgaaccaacctcaatgccagtaactcccaacaagaaacctaagactgttagggaaagtaagatgaggagaaaagctaaataaaaacaatgggaaggctggaggtagtcaatgggaagaaaaataagaaaaaggaaaaaaaagtaaagaaagagtaattatgtaaaacaggtggaaaccccagctccaacaccaataccacaccacaccccttctgcaatctcaagtccggtatctgaagttttcacaacttctttatttcctactaaggatatttgtgcttttctcttctagcacctctctccagtgctctatctcctaaaagtaggaccaaaagggatggagcattttagagaataacagccaaccctctcacatgtacttgcttcaggaccctgaaagaaggatcagagagaaacaagaaatcagaaaggactgggtttcttaagggacagaccccagtgggtctcagggaaaatgaagcaagagtgtttacaacttggaacgccatggccataaataatcatcgggcagtggcaatatttcccaagagacggcatgggtaaggaacagaagtaattcctcctgagatcccacatygtgtgtagatagcagaggcatttgccgagcttgctccgaaacaacagtttacaaacccatttatgcctagtgtttgattattggaacgctaagcatgtgggagttatttctatcctactgctcaaggtcatcaccatgatctgattgcaaaaattcaaaacactgcaaccttaagcataaatggttaaaaacaagcaccaagggatggatcatactgctcacctctgtgatggtcctccctttctgagtgacttataactaaaggaaccccttgcatgagggttttcattctctgattcttcagatgtagaggcactgtcatcatcctcagaaaaggagctacagtccaataggaggcagagagagaagagttaatgttttcaaccactgcagagaggcaacattcctcactagggggacaattgcctcacctcttttccttccctctcaaactaacacacataacaatttttagttagcataaagttagaactatacaaaatacatagaattatataaaatatgtgcataattcagtaaa

SEQ ID NO: 58012 - DNA, 1179 bp, Homo sapiens
atgcatatcagtcaatgttcataccaagaattagcttaagtgaaccaacctcaatgccagtaactcccaacaagaaacctaagactgttagggaaagtaagatgaggagaaaagctaaataaaaacaatgggaaggctggaggtagtcaatgggaagaaaaataagaaaaaggaaaaaaaagtaaagaaagagtaattatgtaaaacaggtggaaaccccagctccaacaccaataccacaccacaccccttctgcaatctcaagtccggtatctgaagttttcacaacttctttatttcctactaaggatatttgtgcttttctcttctagcacctctctccagtgctctatctcctaaaagtaggaccaaaagggatggagcattttagagaataacagccaaccctctcacatgtacttgcttcaggaccctgaaagaaggatcagagagaaacaagaaatcagaaaggactgggtttcttaagggacagaccccagtgggtctcagggaaaatgaagcaagagtgtttacaacttggaacgccatggccataaataatcatcgggcagtggcaatatttcccaagagacggcatgggtaaggaacagaagtaattcctcctgagatcccacattgtgtgtagatagcagaggcatttgccgagcttgctccgaaacaacagtttacaaacccatttatgcctagtgtttgattattggaacgctaagcatgtgggagttatttctatcctactgctcaaggtcatcaccatgatctgattgcaaaaattcaaaacactgcaaccttaagcataaatggttaaaaacaagcaccaagggatggatcatactgctcacctctgtgatggtcctccctttctgagtgacttataactaaaggaaccccttgcatgagggttttcattctctgattcttcagatgtagaggcactgtcatcatcctcagaaaaggagctacagtccaataggaggcagagagagawgagttaatgttttcaaccactgcagagaggcaacattcctcactagggggacaattgcctcacctcttttccttccctctcaaactaacacacataacaatttttagttagcataaagttagaactatacaaaatacatagaattatataaaatatgtgcataattcagtaaa

SEQ ID NO: 58013 - DNA, 653 bp, Homo sapiens
cctgcatgctccattttccatccttcgtatttccttttcaaatatctggtacaatcacattgggcatggttacaaaagactgctgtgtattgataatattgttcttcatggatagtttcatatctgaggagaaagaagtcttattagtggaaaggctatttttatatatttacatatataatcaaaagtttcaccctatgtattagtctgtcctcatgctgctaataaagacatacctgagactgggtaatttataaaggaaagaggtttaatggacttgtagctccacatggctagggggagcctcacaatcatggcagaaagcaaaggagaagcaaagrcacatcttacatggcagcaggcaagagagcttgtgcagcagaactcccctttataaaaccatcagatctcatgagacttattcactatcatgagactagcatgggaaaaactcactcccatgattccactgcctcccactgagttcctcccatgacacatagggattatgggagccgcactttaagatgaagtttgggtgggtacacagccaaaccatatcaaccctaccatttttctaagactatataataccatctgtttgcagttttacataggaattattctttaatagaatgcaggcatggcctgtt

SEQ ID NO: 58014 - DNA, 1044 bp, Homo sapiens
ttataaaaagttattaaaccatttttttttgtcacagtcaaaacattcattagcttgtttctattattaggtgcccaataggtttgttgtgtgagattgtgctaaaaattggtcctcagatcctgggacttgagaggttagaggaggttcctggggcttgcgaggttagaggagatgtctgcatagactcacgtgtgggcttggctgaccaggcaggttttccatagaatgctttmcaggacaccaagaatttcaataggatgaactattttggggttatttgggtgtggaaacacatcaacctcaaaaccccaagattctataaggcattttttaagggggaggggactctttccagaaagttcctttcagggtaggcttacaggaccaacgatgaaagcctctgttaaccttcctgtgggttaaaaagacacaccaagaattgctctattaaccttatcaagcacatatccaggtacagagacactttcttaaaagatgcaaaattcattccatcagaaaccttcctcataatgctgcagaaatcacaatagcaacagcatagaaggcaggcatcagtgcttccgcatcttgcattccacaaccagctgtggtttccttttggaagggtcacattctccaccatagcttcatgtggatttcagcagttgctagttctattgactggccagcccctctgttgacctcccccactgttgggggcagacaggaagttagaggagaagctgagtggcccaggagcttcagagagtcactttcaaaagcctgtactttcaaatctccatactgttaatgaggtactcctttccttatttttcctcttttccgcacttgtagcctctttcaacacaaagacttgtggtcttagggtttctgagtgtccccactgctggggtaataagagctctctgaggagcaggagagccgcaacactgaattgttgctgagcgtatctgagggggaaaggtttgtttgacctgctacttctacctaataagttattcaacaagtatggattcatgc

SEQ ID NO: 58015 - DNA, 1044 bp, Homo sapiens
ttataaaaagttattaaaccatttttttttgtcacagtcaaaacattcattagcttgtttctattattaggtgcccaataggtttgttgtgtgagattgtgctaaaaattggtcctcagatcctgggacttgagaggttagaggaggttcctggggcttgcgaggttagaggagatgtctgcatagactcacgtgtgggcttggctgaccaggcaggttttccatagaatgctttccaggacaccaagaatttcaataggatgaactattttggggttatttgggtgtggaaacacatcaacctcaaaaccycaagattctataaggcattttttaagggggaggggactctttccagaaagttcctttcagggtaggcttacaggaccaacgatgaaagcctctgttaaccttcctgtgggttaaaaagacacaccaagaattgctctattaaccttatcaagcacatatccaggtacagagacactttcttaaaagatgcaaaattcattccatcagaaaccttcctcataatgctgcagaaatcacaatagcaacagcatagaaggcaggcatcagtgcttccgcatcttgcattccacaaccagctgtggtttccttttggaagggtcacattctccaccatagcttcatgtggatttcagcagttgctagttctattgactggccagcccctctgttgacctcccccactgttgggggcagacaggaagttagaggagaagctgagtggcccaggagcttcagagagtcactttcaaaagcctgtactttcaaatctccatactgttaatgaggtactcctttccttatttttcctcttttccgcacttgtagcctctttcaacacaaagacttgtggtcttagggtttctgagtgtccccactgctggggtaataagagctctctgaggagcaggagagccgcaacactgaattgttgctgagcgtatctgagggggaaaggtttgtttgacctgctacttctacctaataagttattcaacaagtatggattcatgc

SEQ ID NO: 58016 - DNA, 1044 bp, Homo sapiens
ttataaaaagttattaaaccatttttttttgtcacagtcaaaacattcattagcttgtttctattattaggtgcccaataggtttgttgtgtgagattgtgctaaaaattggtcctcagatcctgggacttgagaggttagaggaggttcctggggcttgcgaggttagaggagatgtctgcatagactcacgtgtgggcttggctgaccaggcaggttttccatagaatgctttccaggacaccaagaatttcaataggatgaactattttggggttatttgggtgtggaaacacatcaacctcaaaaccccaagattctataaggcattttttaagggggaggggactctttccagaaagttcctttcagggtaggcttacaggaccaacgatgaaagcctctgttaaccttcctgtgggttaaaaagacacaccaagaattgctctattaaccttatcaagcacatatccaggtayagagacactttcttaaaagatgcaaaattcattccatcagaaaccttcctcataatgctgcagaaatcacaatagcaacagcatagaaggcaggcatcagtgcttccgcatcttgcattccacaaccagctgtggtttccttttggaagggtcacattctccaccatagcttcatgtggatttcagcagttgctagttctattgactggccagcccctctgttgacctcccccactgttgggggcagacaggaagttagaggagaagctgagtggcccaggagcttcagagagtcactttcaaaagcctgtactttcaaatctccatactgttaatgaggtactcctttccttatttttcctcttttccgcacttgtagcctctttcaacacaaagacttgtggtcttagggtttctgagtgtccccactgctggggtaataagagctctctgaggagcaggagagccgcaacactgaattgttgctgagcgtatctgagggggaaaggtttgtttgacctgctacttctacctaataagttattcaacaagtatggattcatgc

SEQ ID NO: 58017 - DNA, 730 bp, Homo sapiens
gctattgtatttcattttttagatgtgctcgctggagttacttgctaatgatatgcctcagtttctaaacagagatgatatattaaatcactttgtaggtgatttttaacacatgttcctgctacaatactgtggtagtttgaccatagaattctttcctaagctttacttaggaatctgtaataatrcaattttttagacattggaactttttaatgttttgtatctattaggatacagttagggaacatgtatcaccctcctcctctctgtttactctatacctttggaatgtataaaataaaaccaaagctaggcactgtttttccctaaaacattctgttgtgcagaatatgcacttataggaacaagaatgttaattatgttaattatgtaatcattgtactagacgagtagatggaagttctaatctaagtatacagaaattcacttacaactcccttttatgacataaacttagtggcgattttgaattcactcacaaaggatgttctccgtggtttaggtgaaagccattcagcagccctgggtaaagagagcaataaataacctgttctggagtctcggataagatgcctgggtcacagaggtgagaactgattctgctggtgcaactaacttgcactttgttagatgcttctgtctcctggtcccctccctccactgggctgcctttattagtacttgactcaagcctgattcagaaagg

SEQ ID NO: 58018 - DNA, 661 bp, Homo sapiens
tgaagaatctaggctgtttctgctctcccatatttctcagtgttgatcccctaaattgctttggtccctctaaaatcagtggaacatcacactaaacaactggaagaaaaacatgaaaacaaagcaccaaggagaaaatagttacttaatttactttctgactctacagagaaatattgtgcgttggctytttgagcagaacttacattcaagagtaaaaggtaactgtgcaagatttggactcaatatagatattttttccacaactcagtttcattaaactggaataagctgccccaggatattcagaatcaacatattcaagaatataaatatgttaagtgcttactctatcggacacttgggcttgtagtcttgtatttattcctgacaaccatctagtaagttgagcagtatctctatgtgccagtacagccagggaaactcaaaattgttaagagattcaattagtttcactgagtaagtggcaaaaccagaattctggggggtcttgagacactgtttcttttccctgctccacaaataatttcataatataattcagtgtcaacatggtaaacgtgaggcttatatggcaggaaaaaactgtcagcgctaactgaataaaaataagggaaaaacagcagcagctcaggaacgt

SEQ ID NO: 58019 - DNA, 566 bp, Homo sapiens
ttgtcatgaacagttctggactaaaccagtaaaaaataaaataataaaataatttgtagtgaaacaaatgaaaaaatgttcaaagagtcccaagggaactatgaatccttctttgaattcatctggcctcttgtggacwtaggccttagaaagctagagtggacatcagaataaagggtagtcattagtagaaactcaaaatcaaagagttaggccctatgtgctatgtacaacttgaagacaatgaccatgtttattttgtttattagtaaatattcagaatctaatataagtcttagaaaatgatgtttttgcataaataaatgaatgaattaacaaatgaaaccaaagaaaaaaaacaaagaatcagacaggtaggaaaatttttagaaaggtagctctagataacgtttgtccctaatgaactgtattcatccttattgtttccaagttcacccaacttgttctgaaacattccaaagtctgagaggacgtgactaacctagatcatctttgcaacattttagcaggtggctgggttaattatttgaaatcttgccttcctc

SEQ ID NO: 58020 - DNA, 601 bp, Homo sapiens
taaaatatacaatgtgtagtcacttatcaagcaggacagtgagttactgtttatttattatgcaaaacgtgtgcttggataaggtatacaaattaagtagcttgtagaggagcatgttaccaattctgcaagaagcttaaaagcaagtcactttaaatacacattgcaatttcagataaagtctacattcatagacccacaaatgagaaacaaatattgaaggcctatgaccagagaatgaagcaatagaaatgtcctctttytttttcctaatggtcttttaatttcactttacaatcacaaacacgatagccctgctttcactaaataatctttagaatagaatagagaggatattttaaaatttgtgattcagttaaggttcgattagggaagcagaggccgtgtattatgagatagagactttatatcaggaattagacttcatacaattgatggtgaagctggggaggtaaaattatagaaaggatcagaaaagagtcccagccagccctggcatggatgagccagtcatgcttttcagaatgcagctgccggattgtaaccatgatgagcaggtatagaagtggatgtgcggatc

SEQ ID NO: 58021 - DNA, 1306 bp, Homo sapiens
acctcagaaaatacaaaaagagtctaacctggaacccctacccacccctcacacacattcaaaattaaaattcctaacctggagtccaaatatctttatgatctggcctctttctctctccacgggcttctccataaccactctatcttcttgcctgcacagcaatattcttccaacccttcagtttctgcaggccccttgtggcacagcaccacaagtcaaggctctctaaattgtgcagggagcaaataagaaggctttgatttatattgtaaatctaaaattaagaaaagaatatattaagaattctacaagaattgacaaggagcaataaaccctactgaaagaaggatggaaattccacaatcttgtctaactactgggggccgctcatgtatccatttttgagctattatgacatacagtcatataagcatcacagtatgtcatcgatatggtgacattaattaaacaaagacaataaacagtagaccctttataggacttttaatgagatggtaggcaatgatgtcaaactttaaactgtgtgacatttgtttggttatctcatgacagattatttggaagtctttggagtgtccatgaccacaaagctgaggcccaggctcagaagtagcagctgtgcaaactgtgatgtctagtacatacaagaggcagcagtgggaccatcatcagatgaactctgtgtttactggacatcattcacagaagccgaggtacaaactcaaaccctccccaaaatactgcaatccagtcaaggctgtgttgataaattatatgtatttgacataccagagcagctttgatcgtcaactggaagccctggttctatacaaatgtcccacactggctggcattttctgtgttgagacgtagttattactagtatgctacttaagattagattatctggctgagagcagtggttcacccctgtaatcccagcaccttgggaggccgaggcaagatcacctgtggtcaggagtttgagaccagcctgaccagcatggtgaaaccttgtctctgctaacagtacaaaaattatctgggcatggtggcgcatgcctgtaatcccagctacttgagaggctgaggcaggaggatcgcttgaacccaggaggtggaggttgcagtagctgagattgcaccactgcacaccagcckgggcggacgtcatctcaaaaaaaaatcagattatctatctttgtatctctgtatccatctatttctatactgatatgaacagatagttagatagatgtagatatgtatatcttgatagata

SEQ ID NO: 58022 - DNA, 1734 bp, Homo sapiens
  misc_feature (1)...(1734): n = A,T,C or G
aagtgcccattttaaaaaattaaaaaaaaaatcagaatcaaaaccaggaaccttgtcttgaacaaagtaagaccccaatccatatccgttgaattgcagttgaatacatatatctgttgttttaaaggtattatactttccacaaataaaattatttttaggtaaaatttacaaaaaggaatgatggacaggaacaaagcagacatgtttggtcttttagatccaacagaccagtttgaggagagaaatagtgaaaagatcaaaacggtccaagagatgagatcgcagagatccttgagcccatttttaaagattttggattttattcttaaatgcaatgaacaaaacagtgcctcatttcaagcagaggaataacatggtatgactcatattttcagaagaccctcctggctatgaaggaagaatggacaataaaagaccatgtagaaggttttgaatggaaagcaggcataggatattaccaggttggacctgaatagtagcggtgaagactgaaatggcataacagtattagcagtagaatttctagaactcagtggatttcaaatatacagaatgcagaggagtaaggtctctatgatgattccaaaccttccattgctgtaatttaaaaaacaacccaattagcactcaagtcacataggtcaagtgatttttcttgatgagacgatcagtgactaataatatctattgcattccgtagccgtagctcagctgagtacaacagggaaaggcttctattccttgctggccatgaccaaaaagctactgcgatctcagtaaaatgaacaaattgaaaatttattcacttgagaactccacagctccatcagaagaatgctgatctgattttctgagctgtcaatatgtttcattaactatcaaacagttgagttttcaagacatcttcattaaggtaagtcaaggtgctaatacaccagaacgcagattgtaaggatttcttgcaagtccnnnnnnnnnnnnnnnnnnnnnnnnnnnnnnnnnnnnnnnnnnnnnnnnnnnnnnnnnnnnnnnnnnnnnnnnnnnnnnnnnnnnnnnnnnnnnnnnnnnnaaaaatagagtaattttggccattggttttggcacgtgtacctgaattttcatttctattcattagtgctccagacccctgttctgagtcagtgagaggggaagatgcaggactcccacatataacctgtgtgcagtcctcagttggtgagggagtaattaagatggacttgaagttcaacacaacttgactatattttagacagccttttattttttttacctggccctagcctcctaatckcctctttcttaaagcatttagttcagaaaattttcaattataaatttgttatctgctccctttgagatgtaaatcttccaacctacttccagttgtactatccagtaacatctttcttaaggagtggaagtcatctctttgaaatgtaatcatgcaaggagagagcacaccctatcttctggtatctgcaggagggcaggagcctaactttgatgagtgccaattagcaaacacagatagcctaatcacacagaccagcctccttcctcacttcctctgctaccgctccactagttcacaccaaatggcaatggaccaattctggagtgaaataaaggaagtaaactcaagtgagacggatgatcttcccattccaacttggaggacaaatagatgat

SEQ ID NO: 58023 - DNA, 851 bp, Homo sapiens
ctaaaaatgtaattcccagacctcaaagccaaagatactgaaacccaaagttagcacatctggagtggactcaccactggtgcatttcaacaaatgcccaggtggttctgaggtcattaatatatgttttatccctggtaaaatgctgatcttttgagtggaattctatactttccattgccacataccagtagctgtgaggctttgaacaaattaattatacattttgtgcttcagtatcctcaagtataaaaatagtcccaaatggttgcggtcagtattaaaagagaaaacattcatgtttacattgttaaagaggaaaataaagagctaaaaacaaagctgaactgatgtatttttcaatccagtgcttgagggtcacttgaaaatgagttttatcaagtctctgcagccaaaagcagaggactaaatatagaagcaaaaaagggagtgatttccaaattgagaatgattctacgagtgaagttcataaagcttccctgggactttctattactctgagccacaaaagtgcaggcattctttaccaaggggtgcaagaaggactctttcatcatattgtggggctcagcaacttgtggagtcactttcagatgtgcatttttggtatggtgattttttatcatggcactctttatkcaaactcctattgaatacttactttgtgttaggcctggagctgggtaccaggagttccatagaaacagctgagcccctgcactcatgagctcacagtgtgtgttgtggtttgaatatggtttgtttggccctatcaaattcgattatgttgaaatcagccccttgccgcccagtgttggaggtaggatccg

SEQ ID NO: 58024 - DNA, 642 bp, Homo sapiens
cagcccaactccacagccttcattcaagccttgttcctttcctgagctgtaaagcctggctctcacctactgttgttgttgttttttgttttgttttgttttcartcctagtatttacatcaagcagtttcagaattagtaactcatatctctgtgagaaacaaatgtgcatactagagttcagtgtttcctacaattaattcctttcatctttagccatacagtatcaaatcaaaatattgctttccaaagttactttatgtctttacgttctgggtggtaagcaattcatttgcaacatagttatgttcatttgttactgttcgtattttgttttgggttccccttgctttcaggttggtgttcctcatttgttttgggaaatgtgaaaggcagtgtggttgtaagagtctgagctacagaactggagcccagaccttctctcctcctccctgctcacctgcccccgccccttacctgtctccttcctacctaccccgtcacagttgaccatcctgctggttgctttagcacgaaggagcagaaacgtgtgctttcttctatcctccactgtcttatattaatgtgaaccattttaactttagtttggaatgaaggaatttggtcatgttttgtaatcaa

SEQ ID NO: 58025 - DNA, 642 bp, Homo sapiens
cagcccaactccacagccttcattcaagccttgttcctttcctgagctgtaaagcctggctctcacctactgttgttgttgttttttgttttgttttgttttcagtcctagtatttacatcaagcagtttcagaattagtaactcatatctctgtgagaaacaaatgtgcatactagagttcagtgtttcctacaattaattcctttcatctttagccatacagtatcaaatcaaaataytgctttccaaagttactttatgtctttacgttctgggtggtaagcaattcatttgcaacatagttatgttcatttgttactgttcgtattttgttttgggttccccttgctttcaggttggtgttcctcatttgttttgggaaatgtgaaaggcagtgtggttgtaagagtctgagctacagaactggagcccagaccttctctcctcctccctgctcacctgcccccgccccttacctgtctccttcctacctaccccgtcacagttgaccatcctgctggttgctttagcacgaaggagcagaaacgtgtgctttcttctatcctccactgtcttatattaatgtgaaccattttaactttagtttggaatgaaggaatttggtcatgttttgtaatcaa

SEQ ID NO: 58026 - DNA, 704 bp, Homo sapiens
tttaagaaagtaagactcaattttatcagatctgttgaaatctccgaggggcactcaaaattcgatcatgacctaaccatcagatcctgtcatgtggtgccaggccccactagtggactgcggactgaggtcaggtaaggccttggggccacctgtgtcctccgtgccggccacctgggccacacaccccacagtgtgtctcagtgatggacactgtcatttytcatatgtgtcataaagcacaagaaggcagggccttgctcaaagacagctggtcttgtcaagcctgtggttctgggtatgagttctaagagcttcagttaaaaccagagccagatagaaacttgaggatgccctggaggcagccggcctcgtgaccttcttcatttccgtatctggctttctcaggaaacacgacagagagagggtggagggcacccaggcactcagaaccgcgttcctgacaccaatgtgcctcccgtgaaggcttctggggatttccagggtgcctccgcttacatgctagttaactgccatccacgaaggagttatgactccagggattgcaattcaaaatttctgtaatttgtatttgaaaccttccaagagggaccttcaagccagatgggcaagaaactctagtgcctggctgggcaccctggctcacacctggaatcccaacattttgagaggccaaggtggga

SEQ ID NO: 58027 - DNA, 704 bp, Homo sapiens
tttaagaaagtaagactcaattttatcagatctgttgaaatctccgaggggcactcaaaattcgatcatgacctaaccatcagatcctgtcatgtggtgccaggccccactagtggactgcggactgaggtcaggtaaggccttggggccacctgtgtcctccgtgccggccacctgggccacacaccccacagtgtgtctcagtgatggacactgtcatttttcatatgtgtcataaagcacaagaaggcagggccttgctcaaagacagctggtcttgtcaagcctgtggttctgggtatgagttctaagagcttcagttaaaaccagagccagatagaaacttgaggatgccctggaggcagccggcctcgtgacctycttcatttccgtatctggctttctcaggaaacacgacagagagagggtggagggcacccaggcactcagaaccgcgttcctgacaccaatgtgcctcccgtgaaggcttctggggatttccagggtgcctccgcttacatgctagttaactgccatccacgaaggagttatgactccagggattgcaattcaaaatttctgtaatttgtatttgaaaccttccaagagggaccttcaagccagatgggcaagaaactctagtgcctggctgggcaccctggctcacacctggaatcccaacattttgagaggccaaggtggga

SEQ ID NO: 58028 - DNA, 704 bp, Homo sapiens
tttaagaaagtaagactcaattttatcagatctgttgaaatctccgaggggcactcaaaattcgatcatgacctaaccatcagatcctgtcatgtggtgccaggccccactagtggactgcggactgaggtcaggtaaggccttggggccacctgtgtcctccgtgccggccacctgggccacacaccccacagtgtgtctcagtgatggacactgtcatttttcatatgtgtcataaagcacaagaaggcagggccttgctcaaagacagctggtcttgtcaagcctgtggttctgggtatgagttctaagagcttcagttaaaaccagagccagatagaaacttgaggatgccctggaggcagccggcctcgtgaccttsttcatttccgtatctggctttctcaggaaacacgacagagagagggtggagggcacccaggcactcagaaccgcgttcctgacaccaatgtgcctcccgtgaaggcttctggggatttccagggtgcctccgcttacatgctagttaactgccatccacgaaggagttatgactccagggattgcaattcaaaatttctgtaatttgtatttgaaaccttccaagagggaccttcaagccagatgggcaagaaactctagtgcctggctgggcaccctggctcacacctggaatcccaacattttgagaggccaaggtggga

SEQ ID NO: 58029 - DNA, 704 bp, Homo sapiens
tttaagaaagtaagactcaattttatcagatctgttgaaatctccgaggggcactcaaaattcgatcatgacctaaccatcagatcctgtcatgtggtgccaggccccactagtggactgcggactgaggtcaggtaaggccttggggccacctgtgtcctccgtgccggccacctgggccacacaccccacagtgtgtctcagtgatggacactgtcatttttcatatgtgtcataaagcacaagaaggcagggccttgctcaaagacagctggtcttgtcaagcctgtggttctgggtatgagttctaagagcttcagttaaaaccagagccagatagaaacttgaggatgccctggaggcagccggcctcgtgaccttcttcatttccgtatctggctttctcaggaaacacgacagagagagggtggagggcacccaggcactcagaaccgcgttcctgacaccaatgtgcctcccgtgaaggcttctggggatttccagggtgcctccgcttacatgctagttaactgccatccaygaaggagttatgactccagggattgcaattcaaaatttctgtaatttgtatttgaaaccttccaagagggaccttcaagccagatgggcaagaaactctagtgcctggctgggcaccctggctcacacctggaatcccaacattttgagaggccaaggtggga

SEQ ID NO: 58030 - DNA, 632 bp, Homo sapiens
gttctattactacactagggtgtaagcctttccggggttactggcacagccacaygacagagctggaggctctaaaacagtcccctctgaaggcgcgggaaccagtgctctctgctgataaaagagcagagccatctagatccaggagacggaaatggaaaaccccagttgggtgaggaaaagcacctaccgatttccaagaaattggaagtcacatgaagaaaaattgtccagtaacaatagcaaagtccttttcacagggcttaagagtgcaacctcagcactttgcatattgatggcagagaggagaaaaaaacccacatgctgtaaaacacgggtgttggacggaaacaccactacaggagtctgagaaagggaggcagccagagaaacaaggccaggtgcaggggctcagacccgaaatcccagcacaagaaacagggctgggcgccggggcttacacccgaaatcccagcacaagaaacagggccgggcaaggggactcacacccaaaatcccagcgtgagaaacagggccaggcgtggaggctcatagctgaaatcccatcgtgagaaacagggccagtgtggaggctcacacccgaaatcccagcacaagaagggcgtaaaggc

SEQ ID NO: 58031 - DNA, 632 bp, Homo sapiens
gttctattactacactagggtgtaagcctttccggggttactggcacagccacatgacagagctggaggctctaaaacagtcccctctgaaggcgcgggaaccagtgctctctgctgataaaagagcagagccatctagatccaggagacggaaatggaaaaccccagttgggtgaggaaaagcacctaccgatttccaagaaattggaagtcacatgaagaaaaattgtccagtaacaatagcaaagtccttttcacagggcttaagagtgcaacctcagcactttgcatattgatggcagagaggagaaaaaaacccacatgctgtaaaacacrggtgttggacggaaacaccactacaggagtctgagaaagggaggcagccagagaaacaaggccaggtgcaggggctcagacccgaaatcccagcacaagaaacagggctgggcgccggggcttacacccgaaatcccagcacaagaaacagggccgggcaaggggactcacacccaaaatcccagcgtgagaaacagggccaggcgtggaggctcatagctgaaatcccatcgtgagaaacagggccagtgtggaggctcacacccgaaatcccagcacaagaagggcgtaaaggc

SEQ ID NO: 58032 - DNA, 551 bp, Homo sapiens
aacttctctaggtgcaggtccagatgaattgaaatactttttctttgttttagagctcgagcgtttgatggcattgagcaatgaaataaagaaccccagtaagtaagcctccagcccttcccctctgcttgcagctgctggctggagggccgtgttcattaatgcatgagctcttggaagaacagctttggggaaaggatggcctgatttcctgatcccagcttacaggattgaaacctattgatttaaaacaaatattagcttatattatagcttgttgaaacttgcattgcgtacacagtgattagaattttgggtttagtatagctgttgctaatccragtgagatccaagatttcatttcctatcaagtgaaatcttctgttattgaattgcattaaatatagaaagaatccaggcatctttacttatcgaacacatttgcaaagctaactgagaactcatgtggcatgaggctttagaggcaacaacaggccagctcaagttttattttatatttttagcttccataatctaatactccagggttt

SEQ ID NO: 58033 - DNA, 674 bp, Homo sapiens
caattgtctcgtttgatcaaaataataaaaactgttaaacaccactatttaccaacaaagtctcaaagttacataaatatgacattctctgaagtgactaaagttcctagaactgagaacagctaaaaaggtcatggatgttgctgtattttagcacatattttgaaaagagaaatgtatcccctacagcatatatatatttttgagacggagtcttgctctgtccccccaggctggagtacagtggcacgatcttggctcactgcaaactccgcctcccagattaggtgactctcctgcctcagcctatcgagtagctgggactacaggcrcccgccaccatgccaggctgatttttgtattttcagtagagacggggtttcaccttgttggccaggatggtctcaatctcttgacctcatgatccagccaccttggcctccaaaagtgctgcgattacaggcatgagccattgcgccagcctacagcatatattttaacatgagtacaggtatttggcaacaacaatgttttctatttttaatttgcgttttattagtgtattatcatttctccctctcacactgtcatttccaagacaagcagccaaccgagaggcttcaaagaaactcaagttctctgttcaggaatttagtccccttttccccttcaat

SEQ ID NO: 58034 - DNA, 803 bp, Homo sapiens
tgcatggaggagttgaactccacattggtatttttagaagttggatgcgggaaatagccagtgccacctgaagctgtggaaacaaacaggagcttggactttgcaggcatacctctttttaaagtgaagacattttcaggaacccctggatttttaagggtatgtcagtgttaatttttaactatgtaattggtattttaaatatctttttagtttgtacgatgctgctgtgcgtgtcccatttttaaacctgtggagctctcttaaaaggaaaaggtcaggctttccaggtgcccgctgcaccagacgtgggctgtctccttgcaatcaccgcaagaatggagaatttttaaaactgccagatttttagtttcttgttttgttctgattgattttattttagcaaatttacccctttgtccctgtaaaatttgcttagtcaaatgacagattttgtgtttcacatccgggaagtcgttgtcttatccaggcaggtcctggagtgttcttctatttctccatccacagctttgtgataaagtcactgtcagtttctatcataaattattcataatcatggtgcttaacaaaagatgccaagttctcaatggatgcccactctatgtaccataacagaaaaaaagttgtgttttcttgtastaagtgttgttctgattagtcttagtgttaaatcttggttagcacttggctttgacttccacaaatacaatgctctgaatcaaataagtgccaggggagcgggcttcccctctcccccagcaaacaccacctcaccgcccttc

SEQ ID NO: 58035 - DNA, 1431 bp, Homo sapiens
  misc_feature (1)...(1431): n = A,T,C or G
acttaaaagactaaaatccagaaaccccaggaaaaaagaataggaccggcgcaggcattctccaaatctgtacccttctagagtcaccagcttatatgtacttaaaaagtgctaaaccccctcgtcatgtttactgagaaacagagcgatcctgcgcaggggagaggaacgctttcctctgaacaaaaaccaaaggcgaggattcaagtccagagtaaaagccttcaatactgggagacaaaacaaagtcgtccaaaccagacctgccttaagaaaaaaaagaaaaaagaaagaaagaaaagaaaaagaaagaaagaaacaaagaaggaaagacaagaaagaaagacaagaaaaaaagcgggggggagggggtgggaatctcggcctggagagtcagcagaaaacactgttcccctyccgtaagcaacaaaccgtttatcaaaaacgccttccccatcccccaccgtcccttagccattcctacaaactctttgctccattatcttacacttgagcagaaaatcgttagaaatatttggaaacgaaataatctgtcaccttcttacgaaaaaagctgaaaatagtgcataaactgatttaacctggggatgtctctctctctctttttcttttctaaggactgagcatagagggggagatgggaagttgttctcggatacataaaacagtaaggtaagaactggataaaggaccatcaattatacattctatagggattttatatgccccttcttacatcttttctaaatagtaaactttattatcctaaatcaatgtctagcttacaagcacatccctccctgtgaatgaagaatttgtattttgtgctaagatgcaatgaaatgtgcaaattgttcactgaaagaaaaaaaatcagagcacaattaaaaccaccaaacatctttcccaacaagggaatttaggcttactcaattcattctagagcggattttaagatgataaaaatgagaggcacttgcataaaatttaaagcaattaacattgcttaggggagatttggtctaggattaaaatgaactaacctgcagtgaattattaagcctctattcttaaaaaattcggtaaaatgtcacatccactgacactgtttgcaagaacacaggatcttcctacaacgtggtggtgggagcagattttccaacagagtagggaaagcgggaggcaaagattctgtcccctcccaactcaaaagaaaactgtccccattcttttccgttaaggattcaaggaagaaactaggggttaggttgttcatatggagatactatttatattaaaaggattcttggcgtgtgtgcagggaaaaaagagcatggattttaaagtggagcacattgnggagctccaaaatgggagtctgactccccgcgttctgaccacaaaattcag

SEQ ID NO: 58036 - DNA, 1009 bp, Homo sapiens
tgcataagtctaaagtttgcatttggaacagaagaaatccataagatgtgtggtttaaaaaaaatccaaaattacctttaacaacagtgcctggtacagttccagctgaatactagcttaaatgacactggcatctttctccatatgagatttaatttccttttatatgctagcagtgtctagtgtcatttcttataaacggacttgtcagaatttagctctgaacatggtgagaggcattctgacatgtaccatgggaaatgaaaaaagtatgccaactcttagcagtrtatcaatactagaagagcttattctctgctggcaattggtctaaagttaattaggtgtttaattcttatccatttacttgtgagaatgaccttttcatttcctgaaacaaagaagaaagtatttgttgaaatttatgaaattaagaaataaaaatgcaaaatacagcaggagctattataaaattatgcccatcagtgtcacctaaacatgacataacaagaattatacacaacctagtatatttcgtcttcaagatgtccacccttaacaagccacttccttacattccaccaaaagataaacacaatgggagcaggaaataattttgttgcttttttattcactacttaatcccagtaatgagaagagtagtcaactctatataataaggtttaggtaattactgaatgaatgaacgaacatgatcacaattagaatgatcaaaattcagtgtgaaagtggccctaattgagtaacaatgaaatgctaaaaaaacctaagcatctttaatacatatcatcattaaaataatcataaacatattttaatcctatcttttcttctccattccccctacttttttagaggttcattatttgtcaccccaggaatgtcaccccaggaatgttacaatgctctttctgtactctcatgattcatactataactccaattatgtattacaactccatattacaactacaattatatttttaaa

SEQ ID NO: 58037 - DNA, 637 bp, Homo sapiens
tttctagatgttccctcatgctccttttctgtcagtatttgcccccagaagtcaatgctattctgacttacataccataggctagctttatctattcttgaaaagattccgtttatatgaatataaatcttttgatgaaaggaaattattaattttaaataatgctgctgtgaacattgttatatgtatatcttttgatacacatgtatatgtatatctgtgggtatgtgcctaggagtgaaattattgtgttaaagggtatgtgtagtttcagctttagtgaatagcacaaaatggttgttattaccaaacatattttcctaggaacattcatgttataatgaaagttcattagaagatattaatcacttgatagatacttgctatgtataaaacatttggaaatttattccataccattcttgttaaaatatgatattcctgttcattgtttctrtggatatttaagccttgtttgaactcaatcagctgagatttttttttcttatataagatttcattagactgctcttcactagttaactggggtataaactgagcctgtaaagatgagctaaattctattttactttttcatgacatgcaggttttgcatctggattgaacaaagatggaa

SEQ ID NO: 58038 - DNA, 1002 bp, Homo sapiens
attagaaataattaatttatgtgaaaaacagaatgaatatatttctcagtgtactattattttaaaaatcctgtgggaagaaaaatgcttttgtggagaaaacagtatctggtttgtatcaacatatcactgctgtcacttgggcaaaatcacatttgctgatgtaagaaaatgcaagagccaaatgcaagtctacaaaaagaaacaaaattaacaggaagggtggtggaccccttggttgtccatgctgtcttcttctgccttcattctgagtcaattgattgacaggccttcttatgacttctaacttttcttcctctcaactctgaaggcccttcttcatttagaaatgctcctctgtggaactgcattctccctctgcaactgtaacatctgtacttcccagctatcagccacacttctgctggacagctccttgctttccacactttttgatttaatgattaactttcctttttctcctaaagatgccattagtttagaattcctcaccccctaggccttctgctatctcccaccctaaataattcctatcatttgattcccctctttcaattttcatagagcagagagttactggtcaaagtcacaaaactggtctgatctgcctgattatgaagtcacacaatctacctctcctaygctagaacctcactatttcctgcagtctttttatctgttccttgttgacattgtgtcacatttttcatagtaggtatctaaaactttagaaaatttttcctgtcttctccatcttacctttccctactcccagccttgaaccatcctggtagatcttcacagttggcctcatctcttcatgctgatcaaagttcctgaagcttcctatttttattctttaaaattttattgtaacatactcattacttgcttgatctctccttttctagatagaaacagttccttctgctttccaaaaccaacgttaccttcaatgctcttgattctagctcttttaac

SEQ ID NO: 58039 - DNA, 863 bp, Homo sapiens
catgtatgtctgccaatttatgttccgtgtccactgtttgaatcacacccacaaagtgtaatcttcagtgtcccatttaactttccctaaagtggcttaaaactttgcaaacaatctacagtccttctagagttttacactctcttttcttaatcttttataacccatatctggtttgttggtgattttttaaaacttgctttgatcgtgtctttctaaggcattcattttagtttcaatagaaacaactctttctctttgggcattcatattttattggcagatgtaatatttacttaaataacataattataatacaagtataaatgaggtaaatgaatgtaatgggattttggtgagcacagagctcttgctgtgggggtaaaagtgcaagaccatcctggggtagcccgcagcctaagcctgtggcttgggaggaggcccagtcagcatgactacccacggcatgaggcgcaaggccaatctgagtagttgttaaagcagaaggttaagagggcttctaatgtacttaaaattaattcctattttatggcattggtatatcagcaggataacaaaacagaaattgctcaaaattcaaacataagtggcttaagacttgagctaaagctttggtaaacctgggattttttgtgaagccacagactatctcaatctcctcctcattccaaatgaagattaaatgatcaggcatgagcctcgtgtcactcaaagttttattgctttcttttgcccagtgccacmaagcagagataaaagatgtcacctgggtgaggttaaaatggcattcaaaaccaagagaccaggtgttgattactagttctggtgtgcctatggaagga

SEQ ID NO: 58040 - DNA, 874 bp, Homo sapiens
aaaaagcacctccaagttagggcccaacagagaagcctaacgttaatctggagatcataaatgcacrcaggtcaacatacatttaataatattttattatgatactttgaataaggctgaatcagaaatacaaggcggtatttgcaaactgtcaaaaatgttaagctttctttgagtgctagaagggaaatgcactagccttactactagtgtgtgttttactttgggacttttaggtaagtagtgtaaaggactttctaggcttaaagaattaaagaacgcgtgattatagcatcctcattcttagacggcttggaaaatgaatgatcttagcttggtttgaaaactatagaatagaatatatttttagcataataaatctttcaatcctttcaaaaaacagatccatagaaagagcaaacagatggaagcccatgtgctgttttgtaacatgtccagggttttcaaattggataaacactgaaaccctgcagcggcaaatctgtcctttctcagacaaaatcctatgagattaggagagctgctgtaataaaatgtgcacattaaaaaaaatccaggtacccctgccaacttctctgctagggccatatgatgaatggcctcatagcatgaacattaacccattttttattaatggaaatatgtataagtacttatgggatgcttattactttaacaatccaagcactcaggacattagatgaaacagaatcatattgaaattccataaaaactaagctattttctcataggcgctcagcccattacttaacaatatactatagtaatttaagaccatgtttacaatttgattattatttttttgattattaatacttaagctgggtcctca

SEQ ID NO: 58041 - DNA, 3624 bp, Homo sapiens
gatccagcatctgtccgatgcccatctagacactggatttttcaaaagcatatctgtcaacatgtagccagagatagcaaaaaatcagtggttctgatacttcggtgcttgttgtaattgccttggggaggagggggagttaaaaaaaaaggagactcaggattccctggaaattcagatttcttaggtgtcagttgggcctaggaatctgcaccttagtgaaatacccaagtggtgcgggtgagctatgtgcactgctccagagtcttcaggttctaccctcgagctaacatacatcattagtgagaaaaactctagagagaagccctttctcagttactacctgatatcagttcctcagctttaggatagaaatgacccaagaacagtttgtttaaaagcatttctttttctgttttttttttttttttactttgcaaagttctcgttgaagataacttaattcaaagaaaggatttttctgcctatatacatacatatgccttattttgccattaaaatgaaaaattcacttattgtatgtatgtatgtttatgagtatttgcacactatatatatatatatatatatatttgttaatatgatttactttttgctttgttctgttttttccttagctactaggaaacaaagtcagcttttcagtgctcaaatggagaaacagaaacatcaaattattgagctttaggcttcttggaacagatcggcatacacagaataataagagctaacatttactgaacactttctataggcaagctccctgatatattattatttcattgaatcctctgaaatccctatgaatggatatgaataatgtatatcctcactttacatatgaagaaatcaagggatgcatcccttatcagatagagtaaggcccaaggtggtgtgaagacattgtgtacccaggacacaatgttgagcacctaaactgtgccaagcagtacaggacttcagtgattcaaccacatatttgagtaatggagatgttaagcgtggaggagaactcagatgggatggattctaagtgaaattccattaaaaattattttcttctcagttttgctttcagcaatattaaggcaatttgtctaaacatgtcagcagatcccttttagattgctgatatgcttatactggaataggtacagatgtcgtatcattcatgcctggaaaatgttaaagctatagcctcaaatccacagcacatcccccatcgatcacagaacactggcagaaagtcacattggctgcgaagcaggtggtaacttgaaatgggtttctaatgtaaattcggtgacatggttgcatgtttgtttagagcaggagggtggcgctactcagattgaactcattggcaggtagtayaatgtatttcataaagaacttacagaaatacaagtatctctaaaccccaaaagtaatgccagtttaaaacaaatttttgttttagacttctaacataaatctaactgctagtgatcttatttatagactagactctatactatactatagagtctataggctattgattaagatatacaagttatctgtgccttatgaaggggatatacttttgcaagtagctctctcctgagacttgtacaggctgtcagcagtggagatattagaatatgacttcctttttttgtaacagtattttattctaaaatcaatgccgtaactttcatagctaatggattttgttggtatgcattcatttgctgcagagaaaatcattgcttagatcaggttgctccaaataggattgactaaagcaagcaagatggtattcttgtcaaagccacctcatattccaattgacatattgtattctagtgctgacagctgaaggctagagttttgattaatccattttcctctcattataaacacaatctctcctccctgaaggttccagcaatcactctagcaagtgttggaccttgacagaacaatgcttatcctttggcaaccacagtgtgtacaagagagaaagagctgggttttttccccaaatctccttaggcattgttggaaggggctcatttgtgaatgcatgtgtttcaagctcaaggctgtattttgtttttctctcacatggaaggactagaagagagagggagcaggtgtgcaggtaacccatagcatgacagacgcctgctgcagagtatttcaaagtccacagtgaggcagcacccaatgcagggcccccaggatggatgcagggtagagagtggggcagcatctcctccgagtacacctctgttctggactatgtaagtcagatattgcagactgaccttgctccctaaacccataggctaaactatcaaggacaattggaagcttaccctctgggctgctgctgttgatagtcataatggtttttgagaatctgaggttgtacaatagtcaaaagcatcccaagttacccagtgaccacttgctattcagtcaccaaatacagctgggaagaagggaaagaggaggtgatggtgcttcatgcagcagggaggtgatgagctctgtttctcaaacctgattaagatacgtgatccaacatatggtctgacagtagaaataatttgggaaattactgttctccccaagtccaggactttggtaccatgatgatgtggaccccacttgaggccaagatcatgcagctcaaagtaaagtactgccaacaccaagtcaatcttagtaggtaaatatgaggctgtacttagtatatgctgctaactgaggcctgtgagctccatacctgtcatatactgtgagttactgatctgatttaccttcatacaatagtttttaaatttcattttgtatcaaaataagctggagggcttagtgaaacataggatcccatctcatgtgtttctgatttagtaggtctgggatggggcctgagtgcctaggtgatgctgttgctgctggtccagggagcaaatttgggaatgatggtttgaggtgttgggcaagaaaatgttttacctgccccatttgaaaaatgggggacttcagtactggcctacatgatttcagttgtttgaatgtctatgcatgaatgggaaagagaaatatttattaagacactcttatgtgccagaaacctcatacattacctcactgaatgctcacagcagcctgataggtagttattattgtcctcacttccaagttaagagaatggaagctcagagaggtcagttaacttgcttaagtccatgaaagtagcaagtgctgaggctgaggttcaccttggttgatctggctccaaatctgtagactttccatgacatctgggcttgtccttacaacaacttgtctcctttttgtaagaaggatcttttaaagccccaaagaaggacaaagtaaggctaagtaaaagcatgcatctcggttgactatgtggaccactgatttatttgttttaggaagaggctgtccaaactctagacactacacccccaatcacactgagtttccttgcttctgccagtgacactggttaccttacctgaattctggtggctttgtcccgaccttgactctgatctcatctcattcagctatccagtcagcact

SEQ ID NO: 58042 - DNA, 3624 bp, Homo sapiens
gatccagcatctgtccgatgcccatctagacactggatttttcaaaagcatatctgtcaacatgtagccagagatagcaaaaaatcagtggttctgatacttcggtgcttgttgtaattgccttggggaggagggggagttaaaaaaaaaggagactcaggattccctggaaattcagatttcttaggtgtcagttgggcctaggaatctgcaccttagtgaaatacccaagtggtgcgggtgagctatgtgcactgctccagagtcttcaggttctaccctcgagctaacatacatcattagtgagaaaaactctagagagaagccctttctcagttactacctgatatcagttcctcagctttaggatagaaatgacccaagaacagtttgtttaaaagcatttctttttctgttttttttttttttttactttgcaaagttctcgttgaagataacttaattcaaagaaaggatttttctgcctatatacatacatatgccttattttgccattaaaatgaaaaattcacttattgtatgtatgtatgtttatgagtatttgcacactatatatatatatatatatatatttgttaatatgatttactttttgctttgttctgttttttccttagctactaggaaacaaagtcagcttttcagtgctcaaatggagaaacagaaacatcaaattattgagctttaggcttcttggaacagatcggcatacacagaataataagagctaacatttactgaacactttctataggcaagctccctgatatattattatttcattgaatcctctgaaatccctatgaatggatatgaataatgtatatcctcactttacatatgaagaaatcaagggatgcatcccttatcagatagagtaaggcccaaggtggtgtgaagacattgtgtacccaggacacaatgttgagcacctaaactgtgccaagcagtacaggacttcagtgattcaaccacatatttgagtaatggagatgttaagcgtggaggagaactcagatgggatggattctaagtgaaattccattaaaaattattttcttctcagttttgctttcagcaatattaaggcaatttgtctaaacatgtcagcagatcccttttagattgctgatatgcttatactggaataggtacagatgtcgtatcattcatgcctggaaaatgttaaagctatagcctcaaatccacagcacatcccccatcgatcacagaacactggcagaaagtcacattggctgcgaagcaggtggtaacttgaaatgggtttctaatgtaaattcggtgacatggttgcatgtttgtttagagcaggagggtggcgctactcagattgaactcattggcaggtagtacaatgtatttcataaagaacttacagaaatacaagtatctctaaaycccaaaagtaatgccagtttaaaacaaatttttgttttagacttctaacataaatctaactgctagtgatcttatttatagactagactctatactatactatagagtctataggctattgattaagatatacaagttatctgtgccttatgaaggggatatacttttgcaagtagctctctcctgagacttgtacaggctgtcagcagtggagatattagaatatgacttcctttttttgtaacagtattttattctaaaatcaatgccgtaactttcatagctaatggattttgttggtatgcattcatttgctgcagagaaaatcattgcttagatcaggttgctccaaataggattgactaaagcaagcaagatggtattcttgtcaaagccacctcatattccaattgacatattgtattctagtgctgacagctgaaggctagagttttgattaatccattttcctctcattataaacacaatctctcctccctgaaggttccagcaatcactctagcaagtgttggaccttgacagaacaatgcttatcctttggcaaccacagtgtgtacaagagagaaagagctgggttttttccccaaatctccttaggcattgttggaaggggctcatttgtgaatgcatgtgtttcaagctcaaggctgtattttgtttttctctcacatggaaggactagaagagagagggagcaggtgtgcaggtaacccatagcatgacagacgcctgctgcagagtatttcaaagtccacagtgaggcagcacccaatgcagggcccccaggatggatgcagggtagagagtggggcagcatctcctccgagtacacctctgttctggactatgtaagtcagatattgcagactgaccttgctccctaaacccataggctaaactatcaaggacaattggaagcttaccctctgggctgctgctgttgatagtcataatggtttttgagaatctgaggttgtacaatagtcaaaagcatcccaagttacccagtgaccacttgctattcagtcaccaaatacagctgggaagaagggaaagaggaggtgatggtgcttcatgcagcagggaggtgatgagctctgtttctcaaacctgattaagatacgtgatccaacatatggtctgacagtagaaataatttgggaaattactgttctccccaagtccaggactttggtaccatgatgatgtggaccccacttgaggccaagatcatgcagctcaaagtaaagtactgccaacaccaagtcaatcttagtaggtaaatatgaggctgtacttagtatatgctgctaactgaggcctgtgagctccatacctgtcatatactgtgagttactgatctgatttaccttcatacaatagtttttaaatttcattttgtatcaaaataagctggagggcttagtgaaacataggatcccatctcatgtgtttctgatttagtaggtctgggatggggcctgagtgcctaggtgatgctgttgctgctggtccagggagcaaatttgggaatgatggtttgaggtgttgggcaagaaaatgttttacctgccccatttgaaaaatgggggacttcagtactggcctacatgatttcagttgtttgaatgtctatgcatgaatgggaaagagaaatatttattaagacactcttatgtgccagaaacctcatacattacctcactgaatgctcacagcagcctgataggtagttattattgtcctcacttccaagttaagagaatggaagctcagagaggtcagttaacttgcttaagtccatgaaagtagcaagtgctgaggctgaggttcaccttggttgatctggctccaaatctgtagactttccatgacatctgggcttgtccttacaacaacttgtctcctttttgtaagaaggatcttttaaagccccaaagaaggacaaagtaaggctaagtaaaagcatgcatctcggttgactatgtggaccactgatttatttgttttaggaagaggctgtccaaactctagacactacacccccaatcacactgagtttccttgcttctgccagtgacactggttaccttacctgaattctggtggctttgtcccgaccttgactctgatctcatctcattcagctatccagtcagcact

SEQ ID NO: 58043 - DNA, 1340 bp, Homo sapiens
tagctcatgtgattatggaggctgagaaatcccacgacgtgccatctacaagttggactagactctaagctccttgaacaaggcagactaggaaagctggtggtgtacttccagtatgagcccgaaggcctgagaactagaggagccaatggtgtaactcccagtctgagtgcagtagatgatcagaagagatgtcccagctccagcagtgagggagaaaagaaggacaaattccttcctctgcatattgttctattcagaccctcaataggttaaatgatgcccactctcattaaagaggaccatctactttacggagtaagtactaatctcctccagaaacacctcaccaatacacccagaaataatgttaaactagacatctgggtacctctgatccagtcaaggtgacacatgaaattaactatcatagcttctatggtaatagctacagagttttatgatcatctttcatggtggctttattttacagccattttcacacttgtctatttaactaaccatgtttcccttaaacctattcttcccccatttattatttttcctggcaaatgataccacctggccatccaagcctgaaagtggggagttcacccagacctcaccattcacttctatcacaccaatatgcactgggctacccaatcatttgaatcctgaatatttcttgcatccatctccttcttcatgtttctcccaggtacaccacaggcctcgctctgtctaaagaagacacttaaagttgttggatgaaatgttttctccttcttccctcctggcctccattagctttcaaacttcttgagggtgggcaatatgtctttttttcattttgtgtgtgtatgggcatatgtgtatatgtgttcatgtgtgtacatgtgcatgtaggtgggggctcagatggcaatccaaagagtkccaggcacataataagcctcacatgggtattcatttaattaagtactaaaatgtctaagtggaaacattactaagctagtttttcaatgctgaatttggaattctgaagtcaaagacgattgcacaatatatatttttaggggaaccaagaagtcctgaggcatctccttatgacttgccttggtgccaggtctttaccttagcatagttagtttgctgaatgaaggcagggtttccagaaggttcctgttaagaagacgcagtatagggaagaggctaaacttttgggttctgttgtcaatagacttgagttcaaatttcagctctatcacttttagctatgaaattatcagtatgtctgtaatcttttagtgtcttcatctataacattgtaatgaaat

SEQ ID NO: 58044 - DNA, 981 bp, Homo sapiens
ctggaaaggaggtccggcaagcaaacgatgagagctgaggcagtttagtttctctctctctacagaagtggttcatttcagaagaatgcatatatatatatatatatatatatatatatacatacatatatatatacatatatatacatatatacatatatatatacacacatatatatatatatatatatatatatatatgaagacaaagaaagcaagccaaatatgccagtccaccttctagaaaacttacaatgctcccacgagcagaagagagagccgacttccctaagtgttagttcagttttgaaaatttgctagattgaatttgactttcacttggccctaacactacaactcttcttgttcttttaaattgttagtaatcaatgtgctggctccatgcctagaactgttacaaataatgatagaaatatctttcattagacagaaaaggaaataaaatatgtgcatttaccacaaataccctktttgaggtacaatcaagatatgaaaatttcaaaatatctggcatttcttgcctatattttaattttggaataatctggtgggggagaaaaattattcttttgctgcaaacaaaataataattttcttttttaaacatatttttttaaatggagaaggggagtgattgattttctagagatgtaaagagaactaaaccttaaaacaattttgtggaagtaaatgtgatatctccaaggttaggaaaataaaaaataaaaagtagcatgtctttggtgttaaagctctcaaaactaaaccatttctctgaataaaaaatattattatcagaatgacaacctgtgacttctagtaatgggaagggaaattaatatatttacttattgtgtgttaggtattatgctagatccgtccatttacattatctcaggaaattgctttaatttctcacaactgccgtatctggtagaattaccagaattagcaagaaaa

SEQ ID NO: 58045 - DNA, 691 bp, Homo sapiens
tcaattggtctacagacacaaagatcgtagtttatttaactgatgacatttggtaatgacagcaatttgcttcttgggagcaatttgcttcttgggagyttattgggaaacaataattatggaatcatatggttgctcttactgggcagcattttataaatctactttcaaaggaatcaagatgtctcacacatgtccatttctaaacagtgtacgattcatgggagcgagtgacatgaaatgaaattcttcccagctttcaaagctcagtgaatgcagaaaatatggcagattggcttcagaaaaaaatatatttcttatagcaccctactacagctacctagctttaaattgttaagaagtttgatttttttttttttatggcgagggcaaggttttaatgcagacctgttaatggaatgagtaatttcaggaaaactaatagttttgttctagcatcacaaataaaagaaattaggccccagtctagtcaccgaatgtaaaataaagacagatttcataagtagcaatgcaaaacataagccagactcacgatcagaagaagtttttttttaattccaaagttcttagcacaaaaagggagacaacccaaatgtccactaactggtgaatggataaaatgcgatatattctataatggaatgctatcgggtaataaaaaggaatgaaa

SEQ ID NO: 58046 - DNA, 840 bp, Homo sapiens
ccttgtctaaaaaataaataaatttaaaaaatgagtaaattaagcttcctcctttctttataaaattatggtaattacactctaaagtagttaattcatttattcaatatttattcaattatttattaagtaccttgctaggcactgaaatgcaaagtaaaatgagccctggtctctgcccttaagaaacttatggtgcagtggggagacagacaaacactaagaattacagaaaaacatggtgaatactatcatgaaggcaggtgtagggtattgttgggggagatattttttcaacccagccaacccaaggaggttaagcaggaattagctagatgatagcccaagaagaataggcattccagtggaaaaacccacagggagggatgaaacagcttgatgcacttgggaacgttgaataggtcctgggggctacagcaatgcatgcaaactcagagaacaataagaaatcagttcagaaagctaaggagctcaaaagggctctcggattttttaacctgaaagttacaggaccatgaaggatttcaagtaggtacaygacaatcacatgggtattttacaaagatcattttcatattagtgtggaggacagattccaggatatgctttatgtaggagctgcaaatacagcggtgctctcagtgaacgctcagggccctgcctctcaggtttccaggctttggttctatctccagcaaagaggttctatctccagtaaagaggagattcggcctctggtctttccacactttgtctcacagactctggcctgaactgtgctccatagcccaaacttctccagctgccccatgtaggatc

SEQ ID NO: 58047 - DNA, 2322 bp, Homo sapiens
tatgccatgtgtgcactgtgcatgtgtgcatatgtatgccatgtgtgcatgtgcacagtgcacatgtacgtgccatgtgtgcacatatgtgcatgtgtccctctgtgtgtcaacacccatgtctgtacctgctgctctctttggagagaaatacctacgtgctcacctttggccttcatggagtgactcactggccccggtgggtgctgtctcatggatgggcttgagttctgaagggcgccgtccaggcaggagcaggtggagaagccatagctactcacttccaaaacttccttgactgctcagggttcaggcctccccatgtaaagagggccctccggcggggcttccttgtgtccacaccagcctgggtctcaggaagaccttgaggggcaggaccaaacaggtgagggggacagacccttagtccatccctcagggttgctggagccccagaagctcctgcctagacccccatccaaaagtcagaccagcagaagtcaagcagaccaaacttagactaatgcgtgggtgactgatggccttttaataatccagacgcatctgcattttcagaccaggatctcatttaacacaaacagctctttaattggttgcattccaggggcttaacaaagtgggaactgcagcatgttgggggagggaggagtcagcccatgctgcggggcggctggccccccattggcccccacgggacaccccagatgcccctaccatggcctactgtccacgccaagccctccacggtggtggccaacacacgggggctcctgagggctgcctgtggcagggcactcagaaatgggggtgaccgaggctcctgcgggggtgcgcaggcctccctgggcacagatgctgcctgggctgtgagggagaagctgtctgctggtggctctgtcctctccaggaggccctggagtgagggcagcagttgaggctgcataagagcacttcacacccagggctccgttcagccaggtcatagggcccccccggctcctggatccactgggaccgcccagcagagggaaccgcagccgtgcatatggagcgggagaggccgcagggctgcagcccgagctcagatcgaggaaggctccatccctcctgtcctcatcacagggtgacatggttcgggtgagcccccgtcctgggactttggctaacaaaacaaagacaggctttgcacgactgggggaccctgggcagcacaagagcagcacccccaagatggggaggaatgaagctgggcgtgagacgctcggcccttgagggcgggtctggaagccgggttccccatgtggcatccacgcagctgcagctgcctgggatcacggcacacgygactctcatgtgtcgttgctgaggagcaattccctattacctctgtcttctcctcaacttctgactctgctgttgccttcttgcggcatctacatcatttcctccagcagaactcacttgccccaggcagcgactccaggcgcctgtctcaggctgcaggcacggggacccgtggctgccacacacagcttgagggcaggaggcccctgccccgaccgtctacagtggcacatccagctgcagcagtgagaagcctgtgaggccgcagctcacccctgtgctggtaccgccacacgcgctcacgtacacacgtgctcatgtacacacatgcatgttacaggcctgcgtgggtggactcaggtgtgtgggcgtccatcctgaatcgggacagaaaagtcatttgtagaccatgcatgacctcaaaatctttccaaattaaatcttcaaaaatcggaaacaaaacaaaaccaacatctaacctgctcctcagcaacgctacgtgccccagcgtggacagttcccaggcccacgtgcttagtcctgcagatcagacacgattccaataaaatcagcaggaggtagaacactttatagccattttctagacacacactgtctgatggaaatctaatgggaaccacatatgctattttaaggtttctaatgtccacattaaaaaaagaataaaaaataggtgtcttttttttttttttttaaagacagaatctcactctgtccccaggctggagtgcagtggcacgatcccggttcactgcaagctccgcctcccgggttcacgccattctcctgcctcagcctcccgagtagctgggactacaggcacccgccaccatgcccgcctagttttttgtatttttagtagagacagggtttcatcttgttagccaggatggtctcaaactcctgacctcatgatccgcccatctcagcctccca

SEQ ID NO: 58048 - DNA, 685 bp, Homo sapiens
tgagcccccatcacaaggcagccctccccgtagagagggaggatggcagaccccctcctccccaacctgaggcccctctccagagctccctgggaaggcaccggcgtctcaggtccctctcagygcgaggcagcctgggaaggcgccggcgtctcaggtccctctcagtggggagcagcctgggaaggcgacggcgtctcaggtccctctcagcgtggggcagtcccagctccacgcgaagcccccgctccctgcactcaaatttgcctctgggtttccctgagggggccgggaagaattggaaggtgttgggtctgaattcagtcagagctggaaaccaaaagagaagcaaaaagtgataaaagaagaagaaagacaggtgcccgctagggtgaagtcagtggggagggccgggctgactcatgaagaattcagggagggctctggttgagtcatgattggggccctcaaaattctgtgttcagttttgttgaaaccactcctaatgatcatcttgagagaaatgaaaaagtcaagaattgggctgatggccagatggtgtttctgaaataaagatcacatctctcaagtgtcaaactacaccgccagacgacaaaccgtgggatgactaattcctgtctctcttccagggcccctgccgtggctacaagcgcatgccagcggg

SEQ ID NO: 58049 - DNA, 718 bp, Homo sapiens
ctgtggtcctgcttgctgtccctataggcaatggcagaaaaaggctatgagacgggccaccatgcgccgggcctgaagctccgcggcaccggcctgtacaaggcagcacaccacatcattaaggtgaggtgggtccttctggtggaggaacagcctcagggtcagctcagcctgccccaggggctctagcctgagcttggtcctctgccgctccacctccgagtcagcatactccatagcaccttcccttctgtgacgatttatggagggcgtgttctgtcattcagggcgctgggggacactatggctgagctgttatagcgactcccaagagcttacagcctagccaaggggacatccatgtggaaatgcgtcaactacaggtccaagctgygacaggaggaagaaggggtgtgacagcgagccaggggttaaaatcttcaatgaatcagtagaagtaactggggttgatcaaggacagcagtaagaggagttagaagtggtcatcagagtgtggacttcaaagaacctgggaattttgaaggaggaaggaaaactagtttggaagcagcgataatgagcaggcagactccaccttactcccagctcagaggtatgtggagtgtgatggaacaaatggcctctgcttgaaggagctgcagcggaggtgctcttagggccagcaggcatcagtcacacaagagagtaaaggggccat

SEQ ID NO: 58050 - DNA, 570 bp, Homo sapiens
cctccagccaccctttccttaaggaggagtcccccasaatgacagaggttcatgtggactcaggagacagcggacacattatttagcccaggggagtgagcagaggcccagagatggtgtggggctggctggaggcagagctgaacccaggctcactcctgaggggtgtccagcaggaccctcaggctgggtctcccaggccgggggctggtctgccttgatgccggccccttctggcccttgtcccacagtctcttggaggtcctgcttagctctgacactctggggagggatgaagagaattctgaaggtggggccccctggcagaggcatgagggcagtagttcagtgcctggagggggtctggccagggctgccctgagcgccgcattctgctcacacagcctggatgccagaatgtccaccgagccgcgaaggaagtgctggcaggacaacagagtggcatggaatgcgctgggcatcctgggcaccggggtaggctctgcagacgtggtggtggtggcctgactaggggcagtagggacagctctcaggcacgtgtgcctacct

SEQ ID NO: 58051 - DNA, 1452 bp, Homo sapiens
tgttgattaaatcattaagtacatgaaacagttcagtaacctgcaaagcagaacactgactaaatgacaaatgaaacgacaaaaacaagaagagatctaagtaagaactgccgacagtcagagcgtgcatcctgtcttgtcttgcttttagtttcctgtgtgtacatctcctcttcctaggcagaccaggacaggctttatgctcttatttacttcccagagtgaggcgtacagaaagtgtgtaataaacattccttgcttaattcctactagcctgagccatgctctggaaggggctgaaggacacagtcaccagtgccctccagggtattatgactttcatgggccttagacactgccttcacaggccccttctcccataccattttttaaaagtatattttacaagtgtattggcatcaagacaaatgaaatccaggctggatttgttgttatatatttattattacaattattattattgctttaaagaaaattgaaattgaaacattttgtaggccccctgaaatatcatgggccctaggccctggacttgctgtacctaatggataagtcagccctgggcctgtacctcgggcatgactgctattcagtaaacaggcactgcttctaggagcaacctggctcagggaaagacacattggctttggagccgtgaagacctggatttgatcccagctccagcacttacccactagaccactgtaaagcaatcactaaggcttcttgagctcagtgtcctccctgctaaaacacagggctgccctgaggattggaaataatgtatgatgcttaataaacgcccattactactggttgatttgtccccaaaatggaaggggtgcactggaggtgggccaggtacatggttggcattgagaacactgaccacagccaggagtcccagccccttcagagggagaggcggaaggtagtggtgggaggtgcattcgcttgrcattctcttagtgtaagtctggagcagataaggaaagattaaaatccagaatcaagtctctgctcagcgggtctcagctttggctgtgtattagagtcacctgggagttttaaaaaaccgctaaagcccaatccccaccccaaaccaatttaatcagaatatttggtgtggggcccaagtgtgttggttatttttgcttttttagctccctgaggtgattctagtatggggcagggcccaagatctccatggctatacctgtggatggaaggggtcagctggggagtgatctgtcttgtctagcaaacaacttctcacctcaacaacttctaagactgtgaattcttgctggctgcctgggtggattgaaagtgggaaaacatcagttgtagaggcccttacaggaccctgtacccaacaaagtgttcttttcaaagcagcttcccaattgagttcaggtgcatccagcctgg

SEQ ID NO: 58052 - DNA, 742 bp, Homo sapiens
tcccttgaacccaggagatggaggttgcagtgagccaaggtcgtgccactgtactccagcctgggcaacagagcaagactctgtctcaaaaaattaataaataaaaataataaaatgtaatccttatgaaatgattttaatgtaattagaataactataatcacactttaagcctgcaatatcacatatattattgcttcggcccacaaggtttctcaacctcagcactattgacatttgggataattctttgttgtggggctgtcctgggcactggagggtggttagcagcatctctagcccctacccactagaggtcaacagcacccctgcagttgtgacaaccacagacattgtcaagtgtcccctgagggatgaaactgcccccasttgagaaccactggtttaggatggggctgaataaggtatttaattttaaaagttgagtcaatttaataacattattaagtaaataataaagcagagagtacagagatagggtcaaaattatcaatgtggtttgcagatgcctggagtttgggatgtttgctctgcaactatgcgaggatatccaaatacccaaggggctgagacgaagccattaactaagatgaaggcattatctggcctccaccaccagccccatccatttttttcatcttctcgcctactgggtccctatttgactctgctatggacaaactatcttgtgttcatccactcacaggcctacctggaatgc

SEQ ID NO: 58053 - DNA, 1371 bp, Homo sapiens
ctgttcacaaacagcacgcggaactggtcacatcctccctaggcacaccaaagcacagtcctctctcctcacgttgcatttcaacctggttttgacaccatgctttaagtagggaggcagtttattaagaagctccagagttccagtctccagggttccactggaaccctggatccgttagagaactggtcctgcaaacagccagtcaaagattagtgacctaactttaggagaaggcaccactattcccagacctgggctgccaaggtgctaagtgcaaagttcccagactcactctgtgctaaccaaacaggatgtacgctgacgctcagaacacagagcacccgtgtcttgtccccatctgcctagtcacctctctcctgaggacatgcacatagatgccaatggtctgctctttgtccaacacagtgccttttggctacttcccaggccaaggctacctcaaaatctgtgccagcgttatggggagggaagattagagctggaaaatcacattatatttgccactattcctagtggaggaaaactcaaatacctaaatgtgaagcccctggattacctacacagaatgctcttttaagaacacgctaatcaactaggagctgcgctggctggagagcaatgttatagagcggagagagtgaggaggctgcacctggctcccgatatcacagccattgcagtacaatgagctccatagagatagcactggggcaagtgagagccaratgggcactgggcaattctgtgccttgctgaggaaaaataactaaacatgggcaaaggagaccctaagaagccaagagagaaaatgccatcatatgcattttttgtgcaaacttgtagggaggcacataagaacaaacatccagatgcttcagtcaactcctcagagttttctaagaagtgctcagagaggtggaagaccatgcctactaaacagaaaggaaaattcgaagatatggcaaaggcagacagggcccatacgaaagagaaacgaaaacctgtatctttcctaaaggggagacaaaaaagacgttcaggctgggtgtggtggctcacgcctgtaatctcagcactttgggaggctgaggcgggtagatcacctaaggtcaggagttcgaggccagcctggccaagacagtgaaagcccgtctctactgaaaaaaaaaaaaaaattgccaggcatggtggcgggcgtctgtaatcccagctactcgggaggctgaggcaaaagaatcgcttgaacctgggaggcagaggttgcagtgagctgagattgcgccattgcactccagcctgggcaacaaaagggaaactccatctcaaaagaaaaaaaaaaaagttaaa

SEQ ID NO: 58054 - DNA, 1067 bp, Homo sapiens
tctgacagaaacttcaaatgctgaggagtagctgctgatgggcattttgttcactggaaaggacttgctgcaacttgctgagatgtgaggactcaatctcaggcaacatatcctaaacatctagtgtgtgccaagtcctgtgctaatttggtagagaagtacaagggagaatcaaaggaaataacagtgaagtctgagtttaatcactagctataaaatagtttgatttacagccaaggaacttaggtaccataaggaagaactggtcacccactggtttaaggcaaagatgagcatcagtcaactttattttttcaactctctttttaaaacaccagctgtccgtgcctatgtgagcttcatctgctcaaagacgtacgtgtgtgtgtgtgtgtgtgtgtgtgtgtgtgtgtgtktgtgtgtacgtatgtatatggggggtgggagggagatccagacccttgtggtctttcccactgaccaattctcttagtaagccagatgtcgattataaataggctcagaagataaggacaggctggcctctatattttgttgtggcccagcttgtttgttagtaacaaacatttattaaccgctggccacggcacaacattggccacaataccataaggattagtaaagaagtagaagagactgtttctactttcagggagttaagggtaaaacatgcccagatgcttcaactcaagaatagctttaaaaaatacagacagaaagacatgcaaattagcgtagtaaaaatggaatattctgtaaaacatgaagaaagcaatgaaattttactataggatttaatggagagatgtaccatgtttttggatgggacacatcagtattgtaaaggtgtcaattatctcctaggtaatatatatttgtcgtgtttccaatcaaaaatctaaaatttttatagaactaaacaagctaatcctataattaatctggaaaataaaatgctgaaatctgccaagaaaattttgaaaaataacaaaggcagcctgcgctatcaactatcaaagtatctcataaagctatattaattaaag

SEQ ID NO: 58055 - DNA, 1067 bp, Homo sapiens
tctgacagaaacttcaaatgctgaggagtagctgctgatgggcattttgttcactggaaaggacttgctgcaacttgctgagatgtgaggactcaatctcaggcaacatatcctaaacatctagtgtgtgccaagtcctgtgctaatttggtagagaagtacaagggagaatcaaaggaaataacagtgaagtctgagtttaatcactagctataaaatagtttgatttacagccaaggaacttaggtaccataaggaagaactggtcacccactggtttaaggcaaagatgagcatcagtcaactttattttttcaactctctttttaaaacaccagctgtccgtgcctatgtgagcttcatctgctcaaagacgtacgtgtgtgtgtgtgtgtgtgtgtgtgtgtgtgtgtgtgkgtgtgtacgtatgtatatggggggtgggagggagatccagacccttgtggtctttcccactgaccaattctcttagtaagccagatgtcgattataaataggctcagaagataaggacaggctggcctctatattttgttgtggcccagcttgtttgttagtaacaaacatttattaaccgctggccacggcacaacattggccacaataccataaggattagtaaagaagtagaagagactgtttctactttcagggagttaagggtaaaacatgcccagatgcttcaactcaagaatagctttaaaaaatacagacagaaagacatgcaaattagcgtagtaaaaatggaatattctgtaaaacatgaagaaagcaatgaaattttactataggatttaatggagagatgtaccatgtttttggatgggacacatcagtattgtaaaggtgtcaattatctcctaggtaatatatatttgtcgtgtttccaatcaaaaatctaaaatttttatagaactaaacaagctaatcctataattaatctggaaaataaaatgctgaaatctgccaagaaaattttgaaaaataacaaaggcagcctgcgctatcaactatcaaagtatctcataaagctatattaattaaag

SEQ ID NO: 58056 - DNA, 1067 bp, Homo sapiens
tctgacagaaacttcaaatgctgaggagtagctgctgatgggcattttgttcactggaaaggacttgctgcaacttgctgagatgtgaggactcaatctcaggcaacatatcctaaacatctagtgtgtgccaagtcctgtgctaatttggtagagaagtacaagggagaatcaaaggaaataacagtgaagtctgagtttaatcactagctataaaatagtttgatttacagccaaggaacttaggtaccataaggaagaactggtcacccactggtttaaggcaaagatgagcatcagtcaactttattttttcaactctctttttaaaacaccagctgtccgtgcctatgtgagcttcatctgctcaaagacgtacgtgtgtgtgtgtgtgtgtgtgtgtgtgtgtgtgtgtgtktgtgtacgtatgtatatggggggtgggagggagatccagacccttgtggtctttcccactgaccaattctcttagtaagccagatgtcgattataaataggctcagaagataaggacaggctggcctctatattttgttgtggcccagcttgtttgttagtaacaaacatttattaaccgctggccacggcacaacattggccacaataccataaggattagtaaagaagtagaagagactgtttctactttcagggagttaagggtaaaacatgcccagatgcttcaactcaagaatagctttaaaaaatacagacagaaagacatgcaaattagcgtagtaaaaatggaatattctgtaaaacatgaagaaagcaatgaaattttactataggatttaatggagagatgtaccatgtttttggatgggacacatcagtattgtaaaggtgtcaattatctcctaggtaatatatatttgtcgtgtttccaatcaaaaatctaaaatttttatagaactaaacaagctaatcctataattaatctggaaaataaaatgctgaaatctgccaagaaaattttgaaaaataacaaaggcagcctgcgctatcaactatcaaagtatctcataaagctatattaattaaag

SEQ ID NO: 58057 - DNA, 805 bp, Homo sapiens
tcccaccccagcctctcaaagtactaagattagaaatgtgagccactgcatctagcctacatttttttaagcacacggaatgcttacaacaaattttccatatacaataccatgaaggcagcttaaataaaatacatctcacagattacgttatctgactaaaaaatataygtcaatgacaaaatgataaccaaaaatctcatatatctggaaacaaaacattattttataattcttgggttaaaaaaccataggggaaattatgtaattctgagagttgaatgatgattaatataagtcaaatcctgagtggcatgcttaaagcaatacttacttagagagttaaatattatatagctttccttacatttaccagagaacaaaatagatttaaataaatgggtaaatatttagctcaagaagttggagaaagagtaataaagcaggcataaagaaataagaaggaatttaaaaattaaaaatttaatgaaatagaaaacaaagaaaattcataaaaccaaaagtttgttctttgaaaatatgtatcagtacatagacttatggtaggactagttaatatagaaaaagaaaatatacaaataaataaatgagacagctgcagacaccatagatacagaaaaagtaatcaccacatgccaattatgaaaggacagaatatttaataagttgcattgggaagactgattactcatataaagaaaaatacaattgcatatctccctaatacaatatatgaagctggaaatccaatggattctatatctaaatttgaaaatggaaaata

SEQ ID NO: 58058 - DNA, 741 bp, Homo sapiens
ccagcaggtgtgtgcagggtggagggtgtttggggctgtggaacaccagccgttcccacatctctgctctgtgtcttctgcaggtgacggaagtaccgcctcctcccgtytgacgcccctcaggggaccctgcatcgctccagccgccgcggccatgtctgggccaggcaacaaacgcgccgccggcgacgggggctcagggcccccggaaaagaagctgagtcgtgaggagaagaccaccacgactcttatcgagcccattcgtcttggaggcatctcttccacggttcgtgggctcttgccttaaccctcagaacttcccagagccctccctctgttctctggccaaactgtgcggaatcttacacccacttccccaagtttagcaaggtccgcgttacaggaccttgaaagaaaggttagaaagaagctcagaacacgacgcctgtcttccctttacagataggaaaacaggtttccagggggcgtgtgacttgtcaaagactaaggatttacaaggggacaggcagaaacaacgtgagcctcctcacaacaaagacactttcgctgtgtgttgtctgagcctccttagattctgttagcggttagtgtgggaatacctccatctcccatgcattgcagatgctctgctcctctttctctctctgtgattggtttgtgggccctgcttgacgctctcgtcggcccctttgtttcctttggtaggaggagatggacctg

SEQ ID NO: 58059 - DNA, 665 bp, Homo sapiens
ctcctatattataatttggatagagattttccttgtaattacagcaaagtttacactatactcaaaaccatgtaaaaattatctctgacatgaaacatgaagctgttgaaatattgggatgactaagactttcacccagagaaaacaaagtgatagaatattttcattgaattttgaatcctacccctgataaaggcaaaccatcacttactccctcttattagtcacagctatttttgttacaaatgacaacacagctcaatcttacctcagcacaaaaataacttattgactcaaaggatggcactatcttcaggcatggctggctccaggaattcaaagagctgtaagaactctttatctttctatccgtatttcaatttggactcactctcagatagatgtggtccaatacagcagcaagtttcccaggcaactgtcaacttacatgttccttggagactgacatgcaagaaaaataaaagtatgtgttttgccaaatrgcttcagtgcaagacccagcccagattcttattaacccagtttggatcgtatactgatttatggactaattacttgtctatgaatggagaactctgactggtcagatatgtatgtgcacactattgccaatgggccttggaaatgtgttcagtcacaccaga

SEQ ID NO: 58060 - DNA, 548 bp, Homo sapiens
actggattataagtattagctgttccagtgactcctaccaaaataattataactctattttctaaaacccaaaacaaaacaaaaataaattcttcctacttgatgctacaactcctcctgtgagggacattttctattcttcttcatagaaaaatcttcaaagcatcttttacaatttaatttgtatctccattgtctcaccttctatttatttttctaccaaaattatgatattttagctactacagttgctctgaataatcaactatcctttgtgtataacaaggagtctgtgtcttctactaacattcataaaatgatggtagtctaaattgtttttttgtaagtaggttaaaatctcagacccttcacagctcttgacagttatcggtatttatgtagtagtctacggactaagcaatgctttttgtttcccatatctatctccagttaactcttgtcatatcattatgacattktttgcattgtatagaccaaatcatattaaaaggaaattccgtagtactgtgtaaatatctaccgctctt

SEQ ID NO: 58061 - DNA, 717 bp, Homo sapiens
tgtgtttgtgtttttttaagctagtataacctttaccacatagactatatattccatattacaagtaagttagctacatattaatatgtccagtcttgcactattcatagcactgtattctcaaactggtgtctctcaatgacaaaaaacaatcactaaaaatggaaattagctggctgggtgtggtggctcatgcttgtaatcccagcacttttgtgagcccgaagtgggcggatcatgagatcaagagatcgagaccatcctggccaacatggtgaaaccctgtctctacaaaaatacaaaaattagctcggygtggtggtgcccgcctgcagtcccggatacttgggagactgaggcaggagaatcactttaactcgggaggtggaagttacagtgagctaatatcacaccattgcactctagcctgagcgacagtgtgagactctgtctcaaaataaaaaaaaaatttaaaaaaaaggaaattagctaagccacaaattggaaaccaatgaatttatctcaaataaaatccttaaaatccataaagctctatagatgatggatgttggagggcttttctgacaaagccaaatgtggtcgtgatgcaagatatttcctggaccccttcacaggacttgcaacaggggtgcctcatttactcaacccaccccgtgcaaacccttgcgggagggagcacacaggtgagcgagtgcg

SEQ ID NO: 58062 - DNA, 717 bp, Homo sapiens
tgtgtttgtgtttttttaagctagtataacctttaccacatagactatatattccatattacaagtaagttagctacatattaatatgtccagtcttgcactattcatagcactgtattctcaaactggtgtctctcaatgacaaaaaacaatcactaaaaatggaaattagctggctgggtgtggtggctcatgcttgtaatcccagcacttttgtgagcccgaagtgggcggatcatgagatcaagagatcgagaccatcctggccaacatggtgaaaccctgtctctacaaaaatacaaaaattagctcggcgtggtggtgcscgcctgcagtcccggatacttgggagactgaggcaggagaatcactttaactcgggaggtggaagttacagtgagctaatatcacaccattgcactctagcctgagcgacagtgtgagactctgtctcaaaataaaaaaaaaatttaaaaaaaaggaaattagctaagccacaaattggaaaccaatgaatttatctcaaataaaatccttaaaatccataaagctctatagatgatggatgttggagggcttttctgacaaagccaaatgtggtcgtgatgcaagatatttcctggaccccttcacaggacttgcaacaggggtgcctcatttactcaacccaccccgtgcaaacccttgcgggagggagcacacaggtgagcgagtgcg

SEQ ID NO: 58063 - DNA, 702 bp, Homo sapiens
ttatgggagtttccaaggttcccattacyatgcagtgctctaaagtgcatttttagacaagtttgatttgtgaataagtcattattattactatgtgtaacatcagaaaaaattaaagtgaatttttaactttttagaggttacacatagaattattactcagtgaattatttagagaacattttgtgtgttgcagcactttaccaaaaagtgtaacctattaacccattcagaagaaatattaggattcgtttggatttgccaaaacagtgggcgacctcacatttcttttttatccacctccctcctgctcatttaaaaaatatataatatgaatttgtcatctttcttggtatgtatctatgtgtaacgtgtatgtgtatgagggggcacttgtggtgaagccagctgtgccactgaaggaagttcaggttttagccccatgcttctctggaaaatcagaaagttaatactcacttgagtctttttgttgcttttccagcatacaaaattgattggaaatatgtggccaatttacatgatctttgcgcagcatgccattcatccctatagaggccatatgaatccattacgaaccgaattgggcttactggcagttatacccttttgcctactgttatcccttgtacctctagcaagtaaaggaaacgatagtgagaaggaagtcaaaagttgttttat

SEQ ID NO: 58064 - DNA, 702 bp, Homo sapiens
ttatgggagtttccaaggttcccattactatgcagtgctctaaagtgcatttttagacaagtttgatttgtgaataagtcaktattattactatgtgtaacatcagaaaaaattaaagtgaatttttaactttttagaggttacacatagaattattactcagtgaattatttagagaacattttgtgtgttgcagcactttaccaaaaagtgtaacctattaacccattcagaagaaatattaggattcgtttggatttgccaaaacagtgggcgacctcacatttcttttttatccacctccctcctgctcatttaaaaaatatataatatgaatttgtcatctttcttggtatgtatctatgtgtaacgtgtatgtgtatgagggggcacttgtggtgaagccagctgtgccactgaaggaagttcaggttttagccccatgcttctctggaaaatcagaaagttaatactcacttgagtctttttgttgcttttccagcatacaaaattgattggaaatatgtggccaatttacatgatctttgcgcagcatgccattcatccctatagaggccatatgaatccattacgaaccgaattgggcttactggcagttatacccttttgcctactgttatcccttgtacctctagcaagtaaaggaaacgatagtgagaaggaagtcaaaagttgttttat

SEQ ID NO: 58065 - DNA, 702 bp, Homo sapiens
ttatgggagtttccaaggttcccattactatgcagtgctctaaagtgcatttttagacaagtttgatttgtgaataagtcattattattactatgtgtaacatcagaaamaattaaagtgaatttttaactttttagaggttacacatagaattattactcagtgaattatttagagaacattttgtgtgttgcagcactttaccaaaaagtgtaacctattaacccattcagaagaaatattaggattcgtttggatttgccaaaacagtgggcgacctcacatttcttttttatccacctccctcctgctcatttaaaaaatatataatatgaatttgtcatctttcttggtatgtatctatgtgtaacgtgtatgtgtatgagggggcacttgtggtgaagccagctgtgccactgaaggaagttcaggttttagccccatgcttctctggaaaatcagaaagttaatactcacttgagtctttttgttgcttttccagcatacaaaattgattggaaatatgtggccaatttacatgatctttgcgcagcatgccattcatccctatagaggccatatgaatccattacgaaccgaattgggcttactggcagttatacccttttgcctactgttatcccttgtacctctagcaagtaaaggaaacgatagtgagaaggaagtcaaaagttgttttat

SEQ ID NO: 58066 - DNA, 677 bp, Homo sapiens
tgcaaatgatttgcattgtgatgcaataagaatgagaaaagctacatgaaaagtaaactcacraaatcaaattatgtgaaaaaatttagattaactgtatttaactttaacatcattttctgatttttaatgtaaatctttatttagtttcattatttcaaataagaaatcacaatacttcatgaattgtttcaaacaatgatgaaagagaagcaatagttttggtgaaaaccttcaaggtcaatgaaattgccacagcatggtagtcactaagttgtatgagagttattagaaagaagagactgagggtataagagttttagtaaacatattataaagaataaatatttagcaatttatatcagactaaaattaaagcaaaatattttacaaaattaaatttaaaaaggaaagactgatgtgagcacatttgattaacaagaatatatttcggctttgttagtaaccccagtggcctagaggttagtaactccaagctaccaagtaccagtattgtggaataatattaaatgcccacattttgatcaataatactatttttatttaaagtctccagacctactttgagaatgctgctttaatgaatgaatacataaaatatatcttaaaccttgctctacagatagaatattatatttaatctaatctaatattat

SEQ ID NO: 58067 - DNA, 949 bp, Homo sapiens
ttttttcaagccaggcatttatataactttccttggcattgataaakggaatattagtcaagaataatgcatttcttcttatgtcccttgattatataatccataataatccaattatgtattcaagggatacaagaagaaatcaaatcaaatgaaaagtacctcataatgtaaataaaactatatgtatattctgaaattgtactcttgaaattacatctaatgttaaatattctgtgagtttttaaacttgctgtgtgtgaacgtgtatgcagttaaataagcatacagccaaatatagccaattgaagtcactgactcagatagtacaattccttgagttgtagaaaattacaatattaagatattttgaatgaggtgtgctcttttataattatgaaagcgaacaataatagatgaagaaaattctgtaattaatcaagatttgagaaattagctttgaatacaagtcacagaaacattcttcattaataattcaataagattttccttaatagtttactaaaattttatatgtatattcatacctcttatgcagatgacattctactaggagatatggagaattttaacacataaaatactattttgtggtgacaagagattgacaatttaacatagaagagaatatgttcataatgttcattttttttttctaagaggatttttccttctgcaaagaaaggcactcaaactgatccttaaagaattagaaaaatttagagaagagaaattgaatcagaaaggaaggagaaaagagggaatagtaggagcaaggatatcctggttagaaaggtgtcaatgaaaccaacacagctttccatggcagagggacgtcagggaaattggaacactgggcatcaagggaaagtcatagaacattcttgggagccccaaattgttagatcatttgtctgaatataggatt

SEQ ID NO: 58068 - DNA, 949 bp, Homo sapiens
ttttttcaagccaggcatttatataactttccttggcattgataaatggaatattaktcaagaataatgcatttcttcttatgtcccttgattatataatccataataatccaattatgtattcaagggatacaagaagaaatcaaatcaaatgaaaagtacctcataatgtaaataaaactatatgtatattctgaaattgtactcttgaaattacatctaatgttaaatattctgtgagtttttaaacttgctgtgtgtgaacgtgtatgcagttaaataagcatacagccaaatatagccaattgaagtcactgactcagatagtacaattccttgagttgtagaaaattacaatattaagatattttgaatgaggtgtgctcttttataattatgaaagcgaacaataatagatgaagaaaattctgtaattaatcaagatttgagaaattagctttgaatacaagtcacagaaacattcttcattaataattcaataagattttccttaatagtttactaaaattttatatgtatattcatacctcttatgcagatgacattctactaggagatatggagaattttaacacataaaatactattttgtggtgacaagagattgacaatttaacatagaagagaatatgttcataatgttcattttttttttctaagaggatttttccttctgcaaagaaaggcactcaaactgatccttaaagaattagaaaaatttagagaagagaaattgaatcagaaaggaaggagaaaagagggaatagtaggagcaaggatatcctggttagaaaggtgtcaatgaaaccaacacagctttccatggcagagggacgtcagggaaattggaacactgggcatcaagggaaagtcatagaacattcttgggagccccaaattgttagatcatttgtctgaatataggatt

SEQ ID NO: 58069 - DNA, 949 bp, Homo sapiens
ttttttcaagccaggcatttatataactttccttggcattgataaatggaatattagtcaagaataatgcatttcttcttatgtcccttgattatataatccataataatccaattatgtattcaagggatacaagaagaaatcaaatcaaatgaaaagtacctcataatgtaaataaaactatatgtatattctgaaattgtactcttgaaattacatctaatgttaaatattctgtgagtttttaaacttgctgtgtgtgaacgtgtatgcagttaaataagcatacagccaaatatagccaattgaagtcactgactcagatagtacaattccttgagttgtagaaaattacaatattaagatattttgaatgaggtgtgctcttttataattatgaaagcraacaataatagatgaagaaaattctgtaattaatcaagatttgagaaattagctttgaatacaagtcacagaaacattcttcattaataattcaataagattttccttaatagtttactaaaattttatatgtatattcatacctcttatgcagatgacattctactaggagatatggagaattttaacacataaaatactattttgtggtgacaagagattgacaatttaacatagaagagaatatgttcataatgttcattttttttttctaagaggatttttccttctgcaaagaaaggcactcaaactgatccttaaagaattagaaaaatttagagaagagaaattgaatcagaaaggaaggagaaaagagggaatagtaggagcaaggatatcctggttagaaaggtgtcaatgaaaccaacacagctttccatggcagagggacgtcagggaaattggaacactgggcatcaagggaaagtcatagaacattcttgggagccccaaattgttagatcatttgtctgaatataggatt

SEQ ID NO: 58070 - DNA, 949 bp, Homo sapiens
ttttttcaagccaggcatttatataactttccttggcattgataaatggaatattagtcaagaataatgcatttcttcttatgtcccttgattatataatccataataatccaattatgtattcaagggatacaagaagaaatcaaatcaaatgaaaagtacctcataatgtaaataaaactatatgtatattctgaaattgtactcttgaaattacatctaatgttaaatattctgtgagtttttaaacttgctgtgtgtgaacgtgtatgcagttaaataagcatacagccaaatatagccaattgaagtcactgactcagatagtacaattccttgagttgtagaaaattacaatattaagatattttgaatgaggtgtgctcttttataattatgaaagcgaacaataatagatgargaaaattctgtaattaatcaagatttgagaaattagctttgaatacaagtcacagaaacattcttcattaataattcaataagattttccttaatagtttactaaaattttatatgtatattcatacctcttatgcagatgacattctactaggagatatggagaattttaacacataaaatactattttgtggtgacaagagattgacaatttaacatagaagagaatatgttcataatgttcattttttttttctaagaggatttttccttctgcaaagaaaggcactcaaactgatccttaaagaattagaaaaatttagagaagagaaattgaatcagaaaggaaggagaaaagagggaatagtaggagcaaggatatcctggttagaaaggtgtcaatgaaaccaacacagctttccatggcagagggacgtcagggaaattggaacactgggcatcaagggaaagtcatagaacattcttgggagccccaaattgttagatcatttgtctgaatataggatt

SEQ ID NO: 58071 - DNA, 1342 bp, Homo sapiens
  misc_feature (1)...(1342): n = A,T,C or G
acaatcatcatgaaagtacggtattgtcttagtaaagcataacagagaattgagtaacagatgtaattgaacaagttttaagaaagcctgcaaggaaatttgataaagaaataaaaacatcttcattaaattgtgctggaaaaagtagatatttgtgttgagaagatgagaagagtgaacaaaagaaacataatgactatctcacaaaatacacaagcattaatttgaaatgaatcagagacctaaatttaaaactaaaataataaatgcgtcagaaaaaaagatagggtaatgtatttcaatctgtaataggcaaagacttctttgtgcatatgcagaaagcatgaatcataaataaaaaactgnnnnnnnnnnnnnnnnnnnnnnnnnnnnnnnnnnnnnnnnnnnnnnnnnnnnnnnnnnnnnnnnnnnnnnnnnnnnnnnnnnnnnnnnnnnnnnnnnnnnttatattgtgtatataagccaaattaatagttcacttttagtctcaaacatacagcaggcctggctttcttttctgagttgcaatttaaagccaaaaattttctttaattgctggaatttcttgcagtaattggactacacttttcatcttgattctacctagaaatgatctgtcactgtatctatgtactgtgaacactgtaataaaagaatttatgtaaaccgccrtacagcaatttttacatttaaataatttataaaaatgccagtggctcttatttcaccgtgtagtttgcagcactacagaataattgcaactcacagaaagataatgagcaatgggagcatttaagatacttttagattagcataattaacacaattttattcaaagtctagttagaattttagaacattccttaactaactttacagtagtgttctcatcattcagtgtagattaacataatcctgatattttaccttagtaagtgtaagatacagttgtgcaggaattacaaaagcactcacttccttattgttcctacaaagaaaataaactagttaatttgaaacaagtaaaacacattcatttttgtaaccttagcaactagctttatttgtaatagtgaaagtatgtattgagatcattaaggtcatgcaaaaatttgcaatggatcccaaatattctgtaatgtaaaaagatttcctcaattttgagtttctttaatgtggtgtgtaaataattgagcctagatattttgcacatttggttaaaacacacaaacacagagacagggggagagagagagacagagagagagagagagagagagagagagagagagagacatacttcggagatattgcaggtttg

SEQ ID NO: 58072 - DNA, 1342 bp, Homo sapiens
  misc_feature (1)...(1342): n = A,T,C or G
acaatcatcatgaaagtacggtattgtcttagtaaagcataacagagaattgagtaacagatgtaattgaacaagttttaagaaagcctgcaaggaaatttgataaagaaataaaaacatcttcattaaattgtgctggaaaaagtagatatttgtgttgagaagatgagaagagtgaacaaaagaaacataatgactatctcacaaaatacacaagcattaatttgaaatgaatcagagacctaaatttaaaactaaaataataaatgcgtcagaaaaaaagatagggtaatgtatttcaatctgtaataggcaaagacttctttgtgcatatgcagaaagcatgaatcataaataaaaaactgnnnnnnnnnnnnnnnnnnnnnnnnnnnnnnnnnnnnnnnnnnnnnnnnnnnnnnnnnnnnnnnnnnnnnnnnnnnnnnnnnnnnnnnnnnnnnnnnnnnnttatattgtgtatataagccaaattaatagttcacttttagtctcaaacatacagcaggcctggctttcttttctgagttgcaatttaaagccaaaaattttctttaattgctggaatttcttgcagtaattggactacacttttcatcttgattctacctagaaatgatctgtcactgtatctatgtactgtgaacactgtaataaaagaatttatgtaaaccgccatacagcaatttttacatttaaataatttataaaaatgccagtggctcttatttcacmgtgtagtttgcagcactacagaataattgcaactcacagaaagataatgagcaatgggagcatttaagatacttttagattagcataattaacacaattttattcaaagtctagttagaattttagaacattccttaactaactttacagtagtgttctcatcattcagtgtagattaacataatcctgatattttaccttagtaagtgtaagatacagttgtgcaggaattacaaaagcactcacttccttattgttcctacaaagaaaataaactagttaatttgaaacaagtaaaacacattcatttttgtaaccttagcaactagctttatttgtaatagtgaaagtatgtattgagatcattaaggtcatgcaaaaatttgcaatggatcccaaatattctgtaatgtaaaaagatttcctcaattttgagtttctttaatgtggtgtgtaaataattgagcctagatattttgcacatttggttaaaacacacaaacacagagacagggggagagagagagacagagagagagagagagagagagagagagagagagagacatacttcggagatattgcaggtttg

SEQ ID NO: 58073 - DNA, 1342 bp, Homo sapiens
  misc_feature (1)...(1342): n = A,T,C or G
acaatcatcatgaaagtacggtattgtcttagtaaagcataacagagaattgagtaacagatgtaattgaacaagttttaagaaagcctgcaaggaaatttgataaagaaataaaaacatcttcattaaattgtgctggaaaaagtagatatttgtgttgagaagatgagaagagtgaacaaaagaaacataatgactatctcacaaaatacacaagcattaatttgaaatgaatcagagacctaaatttaaaactaaaataataaatgcgtcagaaaaaaagatagggtaatgtatttcaatctgtaataggcaaagacttctttgtgcatatgcagaaagcatgaatcataaataaaaaactgnnnnnnnnnnnnnnnnnnnnnnnnnnnnnnnnnnnnnnnnnnnnnnnnnnnnnnnnnnnnnnnnnnnnnnnnnnnnnnnnnnnnnnnnnnnnnnnnnnnnttatattgtgtatataagccaaattaatagttcacttttagtctcaaacatacagcaggcctggctttcttttctgagttgcaatttaaagccaaaaattttctttaattgctggaatttcttgcagtaattggactacacttttcatcttgattctacctagaaatgatctgtcactgtatctatgtactgtgaacactgtaataaaagaatttatgtaaaccgccatacagcaatttttacatttaaataatttataaaaatgccagtggctcttatttcaccgtgtagtttgcagcactacagaataattgcaactcacagaaagataatgagcaatgggagcatttaagatayttttagattagcataattaacacaattttattcaaagtctagttagaattttagaacattccttaactaactttacagtagtgttctcatcattcagtgtagattaacataatcctgatattttaccttagtaagtgtaagatacagttgtgcaggaattacaaaagcactcacttccttattgttcctacaaagaaaataaactagttaatttgaaacaagtaaaacacattcatttttgtaaccttagcaactagctttatttgtaatagtgaaagtatgtattgagatcattaaggtcatgcaaaaatttgcaatggatcccaaatattctgtaatgtaaaaagatttcctcaattttgagtttctttaatgtggtgtgtaaataattgagcctagatattttgcacatttggttaaaacacacaaacacagagacagggggagagagagagacagagagagagagagagagagagagagagagagagagacatacttcggagatattgcaggtttg

SEQ ID NO: 58074 - DNA, 1342 bp, Homo sapiens
  misc_feature (1)...(1342): n = A,T,C or G
acaatcatcatgaaagtacggtattgtcttagtaaagcataacagagaattgagtaacagatgtaattgaacaagttttaagaaagcctgcaaggaaatttgataaagaaataaaaacatcttcattaaattgtgctggaaaaagtagatatttgtgttgagaagatgagaagagtgaacaaaagaaacataatgactatctcacaaaatacacaagcattaatttgaaatgaatcagagacctaaatttaaaactaaaataataaatgcgtcagaaaaaaagatagggtaatgtatttcaatctgtaataggcaaagacttctttgtgcatatgcagaaagcatgaatcataaataaaaaactgnnnnnnnnnnnnnnnnnnnnnnnnnnnnnnnnnnnnnnnnnnnnnnnnnnnnnnnnnnnnnnnnnnnnnnnnnnnnnnnnnnnnnnnnnnnnnnnnnnnnttatattgtgtatataagccaaattaatagttcacttttagtctcaaacatacagcaggcctggctttcttttctgagttgcaatttaaagccaaaaattttctttaattgctggaatttcttgcagtaattggactacacttttcatcttgattctacctagaaatgatctgtcactgtatctatgtactgtgaacactgtaataaaagaatttatgtaaaccgccatacagcaatttttacatttaaataatttataaaaatgccagtggctcttatttcaccgtgtagtttgcagcactacagaataattgcaactcacagaaagataatgagcaatgggagcatttaagatacttttagattagcataattaacacaattttattcaaagtctagttagaattttagaacattccttaactaactttacagtagtgttctcatcattcagtgtagattaacataatcctgatattttaccttagtaagtgtaagayacagttgtgcaggaattacaaaagcactcacttccttattgttcctacaaagaaaataaactagttaatttgaaacaagtaaaacacattcatttttgtaaccttagcaactagctttatttgtaatagtgaaagtatgtattgagatcattaaggtcatgcaaaaatttgcaatggatcccaaatattctgtaatgtaaaaagatttcctcaattttgagtttctttaatgtggtgtgtaaataattgagcctagatattttgcacatttggttaaaacacacaaacacagagacagggggagagagagagacagagagagagagagagagagagagagagagagagagacatacttcggagatattgcaggtttg

SEQ ID NO: 58075 - DNA, 1342 bp, Homo sapiens
  misc_feature (1)...(1342): n = A,T,C or G
acaatcatcatgaaagtacggtattgtcttagtaaagcataacagagaattgagtaacagatgtaattgaacaagttttaagaaagcctgcaaggaaatttgataaagaaataaaaacatcttcattaaattgtgctggaaaaagtagatatttgtgttgagaagatgagaagagtgaacaaaagaaacataatgactatctcacaaaatacacaagcattaatttgaaatgaatcagagacctaaatttaaaactaaaataataaatgcgtcagaaaaaaagatagggtaatgtatttcaatctgtaataggcaaagacttctttgtgcatatgcagaaagcatgaatcataaataaaaaactgnnnnnnnnnnnnnnnnnnnnnnnnnnnnnnnnnnnnnnnnnnnnnnnnnnnnnnnnnnnnnnnnnnnnnnnnnnnnnnnnnnnnnnnnnnnnnnnnnnnnttatattgtgtatataagccaaattaatagttcacttttagtctcaaacatacagcaggcctggctttcttttctgagttgcaatttaaagccaaaaattttctttaattgctggaatttcttgcagtaattggactacacttttcatcttgattctacctagaaatgatctgtcactgtatctatgtactgtgaacactgtaataaaagaatttatgtaaaccgccatacagcaatttttacatttaaataatttataaaaatgccagtggctcttatttcaccgtgtagtttgcagcactacagaataattgcaactcacagaaagataatgagcaatgggagcatttaagatacttttagattagcataattaacacaattttattcaaagtctagttagaattttagaacattccttaactaactttacagtagtgttctcatcattcagtgtagattaacataatcctgatattttaccttagtaagtgtaagatacagttgtkcaggaattacaaaagcactcacttccttattgttcctacaaagaaaataaactagttaatttgaaacaagtaaaacacattcatttttgtaaccttagcaactagctttatttgtaatagtgaaagtatgtattgagatcattaaggtcatgcaaaaatttgcaatggatcccaaatattctgtaatgtaaaaagatttcctcaattttgagtttctttaatgtggtgtgtaaataattgagcctagatattttgcacatttggttaaaacacacaaacacagagacagggggagagagagagacagagagagagagagagagagagagagagagagagagacatacttcggagatattgcaggtttg

SEQ ID NO: 58076 - DNA, 1213 bp, Homo sapiens
tgaaaggggagagaatgtttgaatttctcatttaaaatgtcatttttgttgcaacattttacaaatactcaatacaaactttatttaagctgctgtcagttgataatactcatcatctatttccactccattttaagatcactcatgtattactaagaaggcaacactaaagctcatattttaaggatgtgcatgtagccaggtaactagaaacaattcagactctactttcttgaagtagtggcataaaattcaaatgcagaagagaagaggtgacgtttcagtatcagtgataactcacaggtgatctttagcaaatatagagtagcagcaggcatagtctatgcctccttacctagtcacaaacttcatgagtgtgggtggctctgtgatgacatcagtgacaacagtagttttctggccagggtcatggcagcaatggtatgtcattgtagacaatgacagtgacttccatccctccaactccgccagtggtttgacaagcatgtaatttcctatgttaaatgtatttctgcatttagtatgattttggttgtagatttgttgcatatagctttaactatattgagttctgttcttccaatacctactttgttgagggttttcatcatgaagccatgctgaattttattaaatgctttttctgcatctactgagatgatcatttggttttatttttaattttgttcatatggtgaatcatgcttattgatttgcatatgttgtatatccttgcatctytgaaataaaagccacttgatcatggtatattatctttttgatgtactgttggattcagtttgctagtattttgttgaaaatgtttgtatttatgttcatcagaaatattggcctgtagtttttttcattgttgttgtgtccttgcctggctttgttatcagggcaatagtggctccatagagtgagttagggaagatttactccttttcgatgtgtgtgtgtgtgtgtgtgtgtgtgtgtgtgtttaacagtttttagaggatggtgctagttcttctttgacacctggtataatttggctgtgaatctgtaaggtcctcgtttttttgttgttgttgatgttggaaaattttttattactgattcaatctcacagttgattgttggcctgttcaaaatttccttttcttccaggttcaatcttgggagtttgtatgtttccaggaatgca

SEQ ID NO: 58077 - DNA, 1213 bp, Homo sapiens
tgaaaggggagagaatgtttgaatttctcatttaaaatgtcatttttgttgcaacattttacaaatactcaatacaaactttatttaagctgctgtcagttgataatactcatcatctatttccactccattttaagatcactcatgtattactaagaaggcaacactaaagctcatattttaaggatgtgcatgtagccaggtaactagaaacaattcagactctactttcttgaagtagtggcataaaattcaaatgcagaagagaagaggtgacgtttcagtatcagtgataactcacaggtgatctttagcaaatatagagtagcagcaggcatagtctatgcctccttacctagtcacaaacttcatgagtgtgggtggctctgtgatgacatcagtgacaacagtagttttctggccagggtcatggcagcaatggtatgtcattgtagacaatgacagtgacttccatccctccaactccgccagtggtttgacaagcatgtaatttcctatgttaaatgtatttctgcatttagtatgattttggttgtagatttgttgcatatagctttaactatattgagttctgttcttccaatacctactttgttgagggttttcatcatgaagccatgctgaattttattaaatgctttttctgcatctactgagatgatcatttggttttatttttaattttgttcatatggtgaatcatgcttattgatttgcatatgttgtatatccttgcatctctgaaataaaagccacttgatcatggtatattatctttttgatgtactgttggattcagtttgctagtattttgttgaaaatgtttgtatttatgttcatcagaaatattggcctgtagtttttttcattgttgttgtgtccttgcctggctttgttatcagggcaatagtggctccatagagtgagttagggaagatttactccttttcgatgtgtgtgtgtgtgtgtgtgtgtgtgtgtgtgtttaacagtttttagaggatggtgctagttcttctttgacacctggtataatttggctgtgaatctgtaaggtcctcgtttttttgttgttgttkatgttggaaaattttttattactgattcaatctcacagttgattgttggcctgttcaaaatttccttttcttccaggttcaatcttgggagtttgtatgtttccaggaatgca

SEQ ID NO: 58078 - DNA, 1027 bp, Homo sapiens
gtatatctacagtgtataatttttgaaggtcacaaaactaatctgcaaaatctcactttcttaattcattccagtcctaaaataaatttgtattttgagctgttattacccttggaactggaaacaatagtgccaatagatgacacttttggcaattgagtaataattcaatcatttcaaaaatgaaatttttcaatttcaggaggctaccttttcccattctttttcccagtgtgacaactaagttcttgggagaacgtttatacctgaaggttatagctaaggtgtgcccttagacgggttgtagaaaactcasgtgttcttctgtgcccctctgggcttaggaggggctcagggactctgttgggccttagctgcctgcacacctggaagccatgtttattttctgctgcaggttcttctcttttaatttgctgcttcctttgcttcaccctaggagtgaaacagatgttttctctgctttcagaaggagcaagggaaacaaggtggaatgtggaagtctgagacagcagtacagttctagggatgtttggcaaggctgatggggagtcctctcatcaaagtcactcatctcagaaatgggcctgtctggtatcccttccacactcaggcatagttgaggagcagcctgtggacagggtactctctgcaggaacccagtgatgaatttctaagcacagcagcaggggctgttggtcacttatgagataaataacaagatccaaaatattttcaaagcattgcatcatccagattgagaggtcaggattttttgggaaagccatttatagctaaggcatggtaactagatggaaatagagtacacttggttgctggaaattcttcattggttcatttggtcagtcattcccattttccaggctccatctgactttattcctacactcaagaagtttacactttaatggggatacagatattcattattagcaaatgtataattacaaatatatttatatatgtacatacatacatatacatatgc

SEQ ID NO: 58079 - DNA, 1027 bp, Homo sapiens
gtatatctacagtgtataatttttgaaggtcacaaaactaatctgcaaaatctcactttcttaattcattccagtcctaaaataaatttgtattttgagctgttattacccttggaactggaaacaatagtgccaatagatgacacttttggcaattgagtaataattcaatcatttcaaaaatgaaatttttcaatttcaggaggctaccttttcccattctttttcccagtgtgacaactaagttcttgggagaacgtttatacctgaaggttatagctaaggtgtgcccttagacgggttgtagaaaactcaggtgttcttctgtgcccctctgggcttaggaggggctcagggactctgttgggccttagctgcctgcacacctggaagccatgtttattttctgctgcaggttcttctcttttaatttgctgcttcctttgcttcaccctaggagtgaaacagatgttttctctgcttwcagaaggagcaagggaaacaaggtggaatgtggaagtctgagacagcagtacagttctagggatgtttggcaaggctgatggggagtcctctcatcaaagtcactcatctcagaaatgggcctgtctggtatcccttccacactcaggcatagttgaggagcagcctgtggacagggtactctctgcaggaacccagtgatgaatttctaagcacagcagcaggggctgttggtcacttatgagataaataacaagatccaaaatattttcaaagcattgcatcatccagattgagaggtcaggattttttgggaaagccatttatagctaaggcatggtaactagatggaaatagagtacacttggttgctggaaattcttcattggttcatttggtcagtcattcccattttccaggctccatctgactttattcctacactcaagaagtttacactttaatggggatacagatattcattattagcaaatgtataattacaaatatatttatatatgtacatacatacatatacatatgc

SEQ ID NO: 58080 - DNA, 1027 bp, Homo sapiens
gtatatctacagtgtataatttttgaaggtcacaaaactaatctgcaaaatctcactttcttaattcattccagtcctaaaataaatttgtattttgagctgttattacccttggaactggaaacaatagtgccaatagatgacacttttggcaattgagtaataattcaatcatttcaaaaatgaaatttttcaatttcaggaggctaccttttcccattctttttcccagtgtgacaactaagttcttgggagaacgtttatacctgaaggttatagctaaggtgtgcccttagacgggttgtagaaaactcaggtgttcttctgtgcccctctgggcttaggaggggctcagggactctgttgggccttagctgcctgcacacctggaagccatgtttattttctgctgcaggttcttctcttttaatttgctgcttcctttgcttcaccctaggagtgaaacagatgttttctctgctttcagaaggagcaagggaaacaaggtkgaatgtggaagtctgagacagcagtacagttctagggatgtttggcaaggctgatggggagtcctctcatcaaagtcactcatctcagaaatgggcctgtctggtatcccttccacactcaggcatagttgaggagcagcctgtggacagggtactctctgcaggaacccagtgatgaatttctaagcacagcagcaggggctgttggtcacttatgagataaataacaagatccaaaatattttcaaagcattgcatcatccagattgagaggtcaggattttttgggaaagccatttatagctaaggcatggtaactagatggaaatagagtacacttggttgctggaaattcttcattggttcatttggtcagtcattcccattttccaggctccatctgactttattcctacactcaagaagtttacactttaatggggatacagatattcattattagcaaatgtataattacaaatatatttatatatgtacatacatacatatacatatgc

SEQ ID NO: 58081 - DNA, 1303 bp, Homo sapiens
gttattttcaacacttgggtggataaaatcacttgagagatgtagggaaaggaaatagtaaagtaatggagacagtatgaattaaacgtacttgtctatacttagtagatcatatgacagaagagataaatcaactaataactgtactctctaccaaaactaaatatggagtgcgtttttctttttcacatctaggtagggtatataattccaaaaaataaagcccctccaacctgtacagtggaatccagtcaatgcggtaaaaactttcatggccaggtcatcagttcatggcccttggaaatttctttgaatagggacaaggccttgggcatgtgtgtgtgtgtgtgtgtgtgcttatgtgagtgtgtgtgtgtgtgtgtgtgtgtgtgtgtatgtctgtgtcttgggtggtagtagcagacataataatcatctttgcttcttaaggtcttttatgacaagaggtattctcctgtcttttaatgtccaaaaagatgaataagttgaggctagaagtgaccatatttggctcaatataaaccaaatattaactttgaataatcaagatgtttgcgacaatcttgactggcaatatgtggtgttacttgtcacaacaggtgttcaaacatacatggaattattgcttggctaggatactgttgaggagattaaaatatatcaaaggaatggttgttttagaacatctctgggatcccttctaacctccaggttaccaaatttttaaaatatcttcttccaaatgtctagtttaaatattaaatggtggagttctgtcctatttttcttctatgataaaaataacattttatatttctccatataagaatgtgctctactgcatataaaagtaatgcagttatttgatttataaatcaaaactgcttttcaactctgtgtgtttttatctcttttatagacatagttatcacaaagataaggatgactttttttttaaagacattgcatttatattgtccatgtgtatttaattttattcacttaactaataatgaagacatatttctctttcaaccaattttgttttctaacattcttctgccaaacactgaattttgcatgtattatatcattcagaacaaatttccttgtatttcacattcagaacaatatgttttacagatgaggaaattgatgtgtggcaaaataaactgattactaatagttgcaaagttaataagtgaaggaccagagtatttaacaaagtcagaaatacacyaaagctcttcttctaaacaactataatctatttaaaataaac

SEQ ID NO: 58082 - DNA, 661 bp, Homo sapiens
aaatatatattatttgctatataccatgttcttcagtgagtactgaaattacaattgtcaattgtcaagtgcccctttccctaccctcaaaaccattacattctaagagaatgaggtgtgcagatatgacactgtgatttaattactttaggtgtaagggtctgtgggaacataggaggaatatagtcacatttcccatggaaaatacctcattccatgtatgtctacatggaatttttatatagtgtataaaagctttataaaaagtgcagcttaaataaattgtgacagttacacatgattatgtcaggtagtcaggaaaagtagttccatagaggactccacatttcaaggaatgcaatcaaaacaatgcctgtttcatatgaataaatacacactattcaaattattagatatatgtggaatgtaggtatttgagtaatgawaaatatatatgtatgtaaatgttcaactttcccttatgtaattttaatattatttaatttataaaaaggaaagtataatgtgtcatcaaaaactaagtagtattatgtgttcacatataagtatatggatatttaaagtataaatatatatacaaagtatattaaagtataagtattcatataagtgcatggatatttaaataggcaaattcaaa

SEQ ID NO: 58083 - DNA, 1785 bp, Homo sapiens
acaactagagattctgattgtgtaggctgggatggaatccsggaatgtattcatttaaggagccccagagttgtcctgctgtccaatatgggcaaatctagtccaaacatcttgttttttacaggagaaactagagaccacagagactaagtgaattattaaagagtcacttaagtctcttttgaaataaaaataattttttttattattcagcaatctctatcacatgcctactatgtgctataatctatattaggcaatgatagtataaagataaataagacaaacagtttgtcctcaattatctagtcaaggcaaataatcatcaaattattaaatgagttaatgcatattaaaagcacttgcaaactataaaatgttagttttatattacgtgtaattattgcttcttacatttaaaacctggaattttatgtgaagtaaatacttctgcattttttttcttctcaggaaatagtggtaaatgttttgatatatgatggagcaactcaaggattccacatcattaatttgggaagactgaaaaataacttccgtgttattttagctgaaccaaccaaccagaaacccccacggccctagctcaactgacccatgcatatatacccatgtactctcatgtatatctacacaatcatcaatatgagaaaagggcaaagtaagagcctctggacttttccagattgttctgctgcccctttgcagaagatataagatgacaacaattattttgggggtattgagattctgaacatctatttcatttccaacaacaagtcaatgtctttgctgagtgctattctctcgatggcctcacttctactaacccttgtgtctgctgtgatgcagacacccctctgcaaacccaacagtgaaaacatatggcactgtgggtattgagctggacaggacttaattccttttccattcccttagctagcaccggtgcatttactccctgatagagtgctctagaagattagcaacggcattcattttccgctaactgcacacaaacactgtgagccgactcgggcttactgatgcctcagacaattctgttttccaagtttgcttttcattcttctatgtcttttcttgtgccatttgacccagtatttcaactccgtagaaaactaactttgggattcttttcgtttatattcagattctcttgtctcccattttgggcagaatcttactaataaatgcttaaacagcaactccacaattatgagtgggttttcattaccagactaaacaccaactaactagttatataagtagtccttgactggcttaataaaaatgtattttactgttaagaacaaataatagaagggaaaatctttgtgacagagccttaatgccaatgagaaagggttaaggatattatatttttgagtgcatcagtaactttttgagaacagcatcctaaaggatgatgatcaccttttctacaaattatcgttccgtcctattttctggaaaaaaatcctgagatgggtggatcataagtctcacttcaaatggcctctgatgtgattgtttttaagaaagaacacagatgtgtatataggcttgatgtccccgaaggagaattactcataggtttataatgttagttatcctacagttggccttactcatttctttattctcatctatatccaggatgaattaaatgaaattaccctagactagaatgtgctggagactttagtctcaagaaaaggaatcccttcgtggcacttcaatcatgca

SEQ ID NO: 58084 - DNA, 1785 bp, Homo sapiens
acaactagagattctgattgtgtaggctgggatggaatcccggaatgtattcatttaaggagccccagagttgtcctgctgtccaatatgggcaaatctagtccaaacatcttgttttttacaggagaaactagagaccacagagactaagtgaattattaaagagtcacttaagtctcttttgaaataaaaataattttttttattattcagcaatctctatcacatgcctactatgtgctataatctatattaggcaatgatagtataaagataaataagacaaacagtttgtcctcaattatctagtcaaggcaaataatcatcaaattattaaatgagttaatgcatattaaaagcacttgcaaaytataaaatgttagttttatattacgtgtaattattgcttcttacatttaaaacctggaattttatgtgaagtaaatacttctgcattttttttcttctcaggaaatagtggtaaatgttttgatatatgatggagcaactcaaggattccacatcattaatttgggaagactgaaaaataacttccgtgttattttagctgaaccaaccaaccagaaacccccacggccctagctcaactgacccatgcatatatacccatgtactctcatgtatatctacacaatcatcaatatgagaaaagggcaaagtaagagcctctggacttttccagattgttctgctgcccctttgcagaagatataagatgacaacaattattttgggggtattgagattctgaacatctatttcatttccaacaacaagtcaatgtctttgctgagtgctattctctcgatggcctcacttctactaacccttgtgtctgctgtgatgcagacacccctctgcaaacccaacagtgaaaacatatggcactgtgggtattgagctggacaggacttaattccttttccattcccttagctagcaccggtgcatttactccctgatagagtgctctagaagattagcaacggcattcattttccgctaactgcacacaaacactgtgagccgactcgggcttactgatgcctcagacaattctgttttccaagtttgcttttcattcttctatgtcttttcttgtgccatttgacccagtatttcaactccgtagaaaactaactttgggattcttttcgtttatattcagattctcttgtctcccattttgggcagaatcttactaataaatgcttaaacagcaactccacaattatgagtgggttttcattaccagactaaacaccaactaactagttatataagtagtccttgactggcttaataaaaatgtattttactgttaagaacaaataatagaagggaaaatctttgtgacagagccttaatgccaatgagaaagggttaaggatattatatttttgagtgcatcagtaactttttgagaacagcatcctaaaggatgatgatcaccttttctacaaattatcgttccgtcctattttctggaaaaaaatcctgagatgggtggatcataagtctcacttcaaatggcctctgatgtgattgtttttaagaaagaacacagatgtgtatataggcttgatgtccccgaaggagaattactcataggtttataatgttagttatcctacagttggccttactcatttctttattctcatctatatccaggatgaattaaatgaaattaccctagactagaatgtgctggagactttagtctcaagaaaaggaatcccttcgtggcacttcaatcatgca

SEQ ID NO: 58085 - DNA, 1205 bp, Homo sapiens
tgcatactacttagcacaaattttgttgtacatctcacagtttttaaactcttaaatctaaaaagcagtgttttcattagattcattcctttatagatcttaatcctgatgtctgattttactttacatgttatttttcttattaaatatacttgccctgttttatatacttttcacttgtttgctttttagaacattggataccaaatctgactcattagctgaaaatctgtagacgttttgcctcaacctgacaaactttgatttaaaatagctagggaggggtccaattttgatacttagaaaggtttaaaaaattctaatatagacagaataccttatcacacattcctcactcttctgttaaaattttcttaaagataattctctgaataaggcatttccatgtatactccagtgtctaccatgcagcagtacccagatcatagcctttgatgtcctcgtataggaagttgtaggacaagctggcatttctaaacctctgcgacagcaaggtcacccatctatcacaagcaactgtgcacagggcttctctgggcctagagaacattggacactcaagaaactaccaaggaaagtggagatgttagtcagagggcacaaagttcaagtagacagaaggactaagttctagtgatctactgtacagcatggtgactgtaagaatgttaacgtgagtgtactgtatatttcaaaattgctaaaagagtggattttaaatgttctcattacaaagtagtaagtgtgagacctgataactatatcaattagcctgatttaatcattccacaatgtatatatgtatcaaaacatcacgttgcaccccataaatatgtacagttatttttgtcaattaaaaataacaaacatttaaaaagaaaaacagactcaaaacgtgctgctgggaaggacttcaaagactttctatttccrggcagctagtttaatggctaaaaattttcccggaattttctgtgtgtaggaaagtgactaattgtttaggaagtgacaatggatctgatgtttgtccatgaaaaagaaaaatgatcagatcgatatgcttcattaaggaacttttcttcttgaaatcacaatgttgagctcaaactctgttttcatatgagtctagctcaaattttcaaaaacaccccacaaatataaataaggctgactctgtgccaaga

SEQ ID NO: 58086 - DNA, 683 bp, Homo sapiens
tcctcctattttttaccatcctttttaaggtgaaatggaaaataccactaaaaacctctttctgacatttccactacaagaactttatatagaaaaattcagtcattcattttgttacataaatatttattaaaatatgtagtttatgccaattatttgcacacatgtatttaggacattgctttttcccaactttatgtttctatgatgaagtacaatgatgtagaatagattgttactttcataaatagccattttatcctttttcctcaatttgagtaatgtgcccatcttaaaaactacattgcctagcatacattgtacataggttgaacgtgcaattagactgtagccaataagataaacctagtggaaagtattggagtttccagggaagtttcttgtatagagagaaggaactcagcagataacaggcttttgctctttggctcaaacaatcttgctaccaacattttataagcatagtgaagatcaytccacctttctgagtagaaagtatcagatgcctggaccccaaatgtttctgacttcagcttcttatatcagacttcagcttcttaaatctggacttatcacataacagaaaaataaactgaaatctttcttaagccattcttttggggggtttctgttatgaacatctaaagctattctttaactga

SEQ ID NO: 58087 - DNA, 1718 bp, Homo sapiens
ttaaatttaaattgaatttttaaggttttagtatcaggaatcacaactgacatcctaagctatattagaagagaactgatgtttctaaagtttcatgccagaggctttacatcaggattttatttaatctcccaacaacgttatgagacagatataatcagccacaactgataaagaaggaaaccaagagtccataagaatcgaagagaagcactggtgagttcacctggtggcaacattaggatttgaacccaggtctgagacccaagcacaatgccttccaagsactatgagtcattcaaggcccctggggttgaaaatagtaaactgttgccgggcacagtggctcaagcctgtaatcccagcactttgggaggccgaggcgggcagatcacgaggtcaggagatcgagaccatcctggctaacagggtgaaaccccatctctactaaaaatacaaaaaaattagccgggcgtgttggcgggtgcctgtagtcccagctacttgggaggctgaggcaggagaatggcgtgaacccgggagacagagcttgcagtgagccgagatcgcgccactgcactccagcctgggcgacagagtgagactccgtctcaaaggaaaaaaaaaaaaaagaaaatagtaaactgttttccctctaacaagtaggaaattacagacaacatagactcacaagggataagtaaacaaagagaagttttaatgcccctcccaaacaccgttagacccttaactccatccaccatagcccaaggaaaaacaaaaaaacaaaaaaaaacggttacagctctctcttaatgatgaagaagaggggtcatggctccactgagtgcaggtccacccaagaaagctggtcagccttatccaacagggcaaggacagcaatttccgaaacaagttcccaaacacgcgacacaatggcttggaccagaatgcatagaccatagtacatccagctgccccagggagtgagccaccaggtttttctcctttatagagtcctctgtatctggagactttatccgaagcattcagccaagcattcagaaattgagctccccatgtccaaataccccaccaagcctgtccaaggacattgctaaatgtcagtcaccctcttactaagcaaacatagcattggtacctacaggtttcaacaaacttactggacagtttcgttatcaaaaaggaataatatcatattttaaaatgacattttcttgaaagtctcagcctccaaaaagtgtcttatcaacacgactcgcttaattcaaattctatccattcttcagggcatgctcagacctggcctcttcgtgggacttttccaaaaggttccggtctgcctatgctctcctctctctcaattgctcccagagtttgagttgctgtctttagtaaactgcctcatgcagatttattcccaagcatgcttctaaactcctggaaactggtcattatcacgcagactttttttaattccccatagcacctaacacatcttggacatagtaagaatagggctgattctggcagactgcttcagcagggcctcctgggatggcaacacctaggtggagtgaccacagtccagaactgatgtgcagaaatgtcatctggagtaacagtctcttccaaataagtgcatgttaaccagactcactaggggctgacttccacatgagactgccaaattatta

SEQ ID NO: 58088 - DNA, 1718 bp, Homo sapiens
ttaaatttaaattgaatttttaaggttttagtatcaggaatcacaactgacatcctaagctatattagaagagaactgatgtttctaaagtttcatgccagaggctttacatcaggattttatttaatctcccaacaacgttatgagacagatataatcagccacaactgataaagaaggaaaccaagagtccataagaatcgaagagaagcactggtgagttcacctggtggcaacattaggatttgaacccaggtctgagacccaagcacaatgccttccaagcactatgagtcattcaaggcccctggggttgaaaatagtaaactgttgccgggcacagtggctcaagcctgtaatcccagcactttgggaggccgaggcgggcwgatcacgaggtcaggagatcgagaccatcctggctaacagggtgaaaccccatctctactaaaaatacaaaaaaattagccgggcgtgttggcgggtgcctgtagtcccagctacttgggaggctgaggcaggagaatggcgtgaacccgggagacagagcttgcagtgagccgagatcgcgccactgcactccagcctgggcgacagagtgagactccgtctcaaaggaaaaaaaaaaaaaagaaaatagtaaactgttttccctctaacaagtaggaaattacagacaacatagactcacaagggataagtaaacaaagagaagttttaatgcccctcccaaacaccgttagacccttaactccatccaccatagcccaaggaaaaacaaaaaaacaaaaaaaaacggttacagctctctcttaatgatgaagaagaggggtcatggctccactgagtgcaggtccacccaagaaagctggtcagccttatccaacagggcaaggacagcaatttccgaaacaagttcccaaacacgcgacacaatggcttggaccagaatgcatagaccatagtacatccagctgccccagggagtgagccaccaggtttttctcctttatagagtcctctgtatctggagactttatccgaagcattcagccaagcattcagaaattgagctccccatgtccaaataccccaccaagcctgtccaaggacattgctaaatgtcagtcaccctcttactaagcaaacatagcattggtacctacaggtttcaacaaacttactggacagtttcgttatcaaaaaggaataatatcatattttaaaatgacattttcttgaaagtctcagcctccaaaaagtgtcttatcaacacgactcgcttaattcaaattctatccattcttcagggcatgctcagacctggcctcttcgtgggacttttccaaaaggttccggtctgcctatgctctcctctctctcaattgctcccagagtttgagttgctgtctttagtaaactgcctcatgcagatttattcccaagcatgcttctaaactcctggaaactggtcattatcacgcagactttttttaattccccatagcacctaacacatcttggacatagtaagaatagggctgattctggcagactgcttcagcagggcctcctgggatggcaacacctaggtggagtgaccacagtccagaactgatgtgcagaaatgtcatctggagtaacagtctcttccaaataagtgcatgttaaccagactcactaggggctgacttccacatgagactgccaaattatta

SEQ ID NO: 58089 - DNA, 717 bp, Homo sapiens
caattaccagaaagtgctttgtaagcaataaaacattgtaccaatgaggttatcattagtagtttgattagctgatcactgttgctaatcatgatacmtcaaacaaactttgctataatggcttaaataccacctacatgactcaataattctgtacagtggatgaaaatcatggcttcgcttgtggattagggaggcagtggtgctagagtgaaaatcagagtgtgcgtccagcagactggggttcccctctcactcctttacttactggctgtgtgtccttgggcaagtttcagaacctctctgatttctgatttccttatctaaaaattgcaggttctcatttctacctctaagtgttgcaataatcacataatatttttaacaccaatcattttacaaattcctggaccttagtagaagcccagtaattattactcctgtacttctcagattcattttattctacaaatagtttggatgttcaaataacatttttgagtaattcctatgtgtctgttggatgaagaatcaagtttaggcagacagcagagtttgcagagagaagggtagtctgctgcctaactgagaatgacaactcctaaatctggccatatgtgaaaataatagtctaaatgctacatgtataatgcttaacacttacttcttcaagaattgatgagacttcagcttctctcctgaaaagatcctttctat

SEQ ID NO: 58090 - DNA, 698 bp, Homo sapiens
aaagaggtgtaagcctcacaccacagactgcagagatagtaatacctgttgtgagaagctgtctggtatccaactgccaaagcctgtctcaggatatcattcaccagctgttctgtagcctacaatggaagatgctgttattcttcaaatggccatctgcttgctggcaagaagggacacatttaaccccatcccttaccccaaatgtttgaaaccactgcaactagggattaaaaagtccttaagaaaaaattaaaggcctcaataatagaccataatgataaaggccatgattctgagaaattatgaattggagtgattttcattaatcagacattattctatttatttatttattttgagatggagtctcactctckcgcccaggctggagcgcagtggcgcgatcttggctcagtgcaacctccgcctcccgggttcaagcgattctcctgcctcagcctcccaagtagctgggattaccaggtgagcgccaccaagcccagctaattttttatttttagtagagatggggtttcaccatgttggccaggctggtctccaactcctgattgcaaatgatccacccgcctcggcctcccaaagtgctgagattacaggcatgagccaccgcgcccagccctagacattgtatttaaggaaagcagttgttacggaggtatccctattcttggaga

SEQ ID NO: 58091 - DNA, 698 bp, Homo sapiens
aaagaggtgtaagcctcacaccacagactgcagagatagtaatacctgttgtgagaagctgtctggtatccaactgccaaagcctgtctcaggatatcattcaccagctgttctgtagcctacaatggaagatgctgttattcttcaaatggccatctgcttgctggcaagaagggacacatttaaccccatcccttaccccaaatgtttgaaaccactgcaactagggattaaaaagtccttaagaaaaaattaaaggcctcaataatagaccataatgataaaggccatgattctgagaaattatgaattggagtgattttcattaatcagacattattctatttatttatttattttgagatggagtctcactctcgcgcccaggctggagcgcagtggcgcgatcttggctcagtgcaacctccgcctcccrggttcaagcgattctcctgcctcagcctcccaagtagctgggattaccaggtgagcgccaccaagcccagctaattttttatttttagtagagatggggtttcaccatgttggccaggctggtctccaactcctgattgcaaatgatccacccgcctcggcctcccaaagtgctgagattacaggcatgagccaccgcgcccagccctagacattgtatttaaggaaagcagttgttacggaggtatccctattcttggaga

SEQ ID NO: 58092 - DNA, 698 bp, Homo sapiens
aaagaggtgtaagcctcacaccacagactgcagagatagtaatacctgttgtgagaagctgtctggtatccaactgccaaagcctgtctcaggatatcattcaccagctgttctgtagcctacaatggaagatgctgttattcttcaaatggccatctgcttgctggcaagaagggacacatttaaccccatcccttaccccaaatgtttgaaaccactgcaactagggattaaaaagtccttaagaaaaaattaaaggcctcaataatagaccataatgataaaggccatgattctgagaaattatgaattggagtgattttcattaatcagacattattctatttatttatttattttgagatggagtctcactctcgcgcccaggctggagcgcagtggcgcgatcttggctcagtgcaacctccgcctcccgggttcaagcgattctcctgcctcagcctcccaagtagctgggattaccaggtgagcgccaccaagcccagctaattttttatttttagtagagatggggtttcaccatgttggccaggctggtctccaactcctgattgcaaatgatccrcccgcctcggcctcccaaagtgctgagattacaggcatgagccaccgcgcccagccctagacattgtatttaaggaaagcagttgttacggaggtatccctattcttggaga

SEQ ID NO: 58093 - DNA, 1281 bp, Homo sapiens
tgtctacccaatttaaataggcttatacaggaaggaaatcagtctatgtacaagatttcttgcacaatagatcttgaattatttgttccttgctaagggtaaatctctcaaataaacatttttcccctactatccatatctcatttaataaacacatatttataaaactacttaagatatcttactgtggtatataatatttgtccagaatttggacaagaactttaaattgttcctggtcatatatgtgactataggatataagcgtaggcattactttgagatagtggccaggagtttaatagctgtctgcttagtgggaaagatatgcaactaaatgctcacgcttttcattagttactcttggcccctcctttgctaaacttcctttctcattttaatgtatgctgttctgcttctgcaccaacagaggactctatttgtcgtttggttaaattcyaattctcctgaagcctcctgttggtaacattaatttcaaattcagttagtggatttcctttcttaatggccaactccaattgtgacatgttgtttatttaatctatctgtcaacatagaatgttcaatgataaatcactgggacgtttctagcttatgcactgtcatgtcatattccaactggttggtttcgaaacagcaggatattgttttcttcttcatttcttgggtgtgtattataaactttccagacagttctgtcctggccacttactgatttgtgtccactaaaatgatttgaatttccacattttgataatttgactgtcacattagtttttaaggtttttaacagttgggtccaggtgctcattccattttcaccattaatttcacctttgttgaaagcattgctgcattttttttgttgttgttgtttctttgttgtagcaataaataacttcaggaccaggtgacaatgaattcacttggggccaaagtcaggcctggttacaagctctgtggggagacgtgcatttatacatggctggttaaatttttactttaaagtttattttcaatgtcttattatttatcaatgtatatctttagagcttataattaataaagtttacattacatgtaatacgtatacaatatgtcccagtatttctttccatactctatatcctagtggcatcaaaatgacttcaatggtttttaagactttttactttgagttactttcagaaataagttatttatttaatttaaaagatcaaatgaattctaatgtactacaaataaagctatgatagatgc

SEQ ID NO: 58094 - DNA, 1281 bp, Homo sapiens
tgtctacccaatttaaataggcttatacaggaaggaaatcagtctatgtacaagatttcttgcacaatagatcttgaattatttgttccttgctaagggtaaatctctcaaataaacatttttcccctactatccatatctcatttaataaacacatatttataaaactacttaagatatcttactgtggtatataatatttgtccagaatttggacaagaactttaaattgttcctggtcatatatgtgactataggatataagcgtaggcattactttgagatagtggccaggagtttaatagctgtctgcttagtgggaaagatatgcaactaaatgctcacgcttttcattagttactcttggcccctcctttgctaaacttcctttctcattttaatgtatgctgttctgcttctgcaccaacagaggactctatttgtcgtttggttaaattctaattctcctgaagcctcctgttggtaacattaatttcaaattcagttagtggatttcctttcttaatggccaactccaattgtgacatgttgtttatttaatctatctgtcaacatagaatgttcaatgataaatcactgggacgtttctagcttatgcactgtcatgtcatattccaactggttggtttcgaaacagcaggatattgttttcttcttcatttcttgggtgtgtattataaactttccagacagttctgtcctggccacttactgatttgtgtccactaaaatgatttgaatttccacattttgataatttgactgtcacattagtttttaaggtttttaacagttgggtccaggtgctcattccattttcaccattaatttcacctttgttgaaagcattgctgcattttttttgttgttgttgtttctttgttgtagcaataaataacttcaggaccaggtgacaatgaattcacttggggccaaagtcaggcctggttacaagctctgtggggagacgtgcatttatacatggctggttaaatttttactttaaagtttattttcaatgtcttattatttatcaatgtatatctttagagcttataattaataaagtttacattacatgtaatacrtatacaatatgtcccagtatttctttccatactctatatcctagtggcatcaaaatgacttcaatggtttttaagactttttactttgagttactttcagaaataagttatttatttaatttaaaagatcaaatgaattctaatgtactacaaataaagctatgatagatgc

SEQ ID NO: 58095 - DNA, 1281 bp, Homo sapiens
tgtctacccaatttaaataggcttatacaggaaggaaatcagtctatgtacaagatttcttgcacaatagatcttgaattatttgttccttgctaagggtaaatctctcaaataaacatttttcccctactatccatatctcatttaataaacacatatttataaaactacttaagatatcttactgtggtatataatatttgtccagaatttggacaagaactttaaattgttcctggtcatatatgtgactataggatataagcgtaggcattactttgagatagtggccaggagtttaatagctgtctgcttagtgggaaagatatgcaactaaatgctcacgcttttcattagttactcttggcccctcctttgctaaacttcctttctcattttaatgtatgctgttctgcttctgcaccaacagaggactctatttgtcgtttggttaaattctaattctcctgaagcctcctgttggtaacattaatttcaaattcagttagtggatttcctttcttaatggccaactccaattgtgacatgttgtttatttaatctatctgtcaacatagaatgttcaatgataaatcactgggacgtttctagcttatgcactgtcatgtcatattccaactggttggtttcgaaacagcaggatattgttttcttcttcatttcttgggtgtgtattataaactttccagacagttctgtcctggccacttactgatttgtgtccactaaaatgatttgaatttccacattttgataatttgactgtcacattagtttttaaggtttttaacagttgggtccaggtgctcattccattttcaccattaatttcacctttgttgaaagcattgctgcattttttttgttgttgttgtttctttgttgtagcaataaataacttcaggaccaggtgacaatgaattcacttggggccaaagtcaggcctggttacaagctctgtggggagacgtgcatttatacatggctggttaaatttttactttaaagtttattttcaatgtcttattatttatcaatgtatatctttagagcttataattaataaagtttacattacatgtaatacgtatacaatatgtcccaktatttctttccatactctatatcctagtggcatcaaaatgacttcaatggtttttaagactttttactttgagttactttcagaaataagttatttatttaatttaaaagatcaaatgaattctaatgtactacaaataaagctatgatagatgc

SEQ ID NO: 58096 - DNA, 1281 bp, Homo sapiens
tgtctacccaatttaaataggcttatacaggaaggaaatcagtctatgtacaagatttcttgcacaatagatcttgaattatttgttccttgctaagggtaaatctctcaaataaacatttttcccctactatccatatctcatttaataaacacatatttataaaactacttaagatatcttactgtggtatataatatttgtccagaatttggacaagaactttaaattgttcctggtcatatatgtgactataggatataagcgtaggcattactttgagatagtggccaggagtttaatagctgtctgcttagtgggaaagatatgcaactaaatgctcacgcttttcattagttactcttggcccctcctttgctaaacttcctttctcattttaatgtatgctgttctgcttctgcaccaacagaggactctatttgtcgtttggttaaattctaattctcctgaagcctcctgttggtaacattaatttcaaattcagttagtggatttcctttcttaatggccaactccaattgtgacatgttgtttatttaatctatctgtcaacatagaatgttcaatgataaatcactgggacgtttctagcttatgcactgtcatgtcatattccaactggttggtttcgaaacagcaggatattgttttcttcttcatttcttgggtgtgtattataaactttccagacagttctgtcctggccacttactgatttgtgtccactaaaatgatttgaatttccacattttgataatttgactgtcacattagtttttaaggtttttaacagttgggtccaggtgctcattccattttcaccattaatttcacctttgttgaaagcattgctgcattttttttgttgttgttgtttctttgttgtagcaataaataacttcaggaccaggtgacaatgaattcacttggggccaaagtcaggcctggttacaagctctgtggggagacgtgcatttatacatggctggttaaatttttactttaaagtttattttcaatgtcttattatttatcaatgtatatctttagagcttataattaataaagtttacattacatgtaatacgtatacaatatgtcccagtwtttctttccatactctatatcctagtggcatcaaaatgacttcaatggtttttaagactttttactttgagttactttcagaaataagttatttatttaatttaaaagatcaaatgaattctaatgtactacaaataaagctatgatagatgc

SEQ ID NO: 58097 - DNA, 718 bp, Homo sapiens
ctgagttagaatcagttaaaaatgatcttggtgggaccaggtgcagtggctcacacctgtaaccccagcactttgggaggtggaggctagtgaatcatttgagatcaggagttcgagaccagcctgaccaacatgttaaaaccccttctatactcgggaggctggggtacggagaatcacttaaaccctggagatggaggttgccgtcagctgagattgtgccatgggattccatcctggcaacagagcaagactcgaaaaaaaaaatgatcttgatcaaaattactagataacataagccaggtaggcacatttgtgctgagtaaaccctacatatgaagcacagtaacattattacaataaatttagagctgcgggacattgtctccaactccttgttggagaagtcattcagcagaaaagtaggggtccctacttgtagtagaaacccctgaragccagttcaatttgctgtgattgaaagatgaaataaagcaagcacagaactgaagataaaattgtttctgctgttaaaaacattccttcaatttttggagataatacccatctcatcctgaggacaatgactattgctaaaatgaattggaatgtgagatgaagagagagtttcagattaaacagaaggagactcaaggtgtgaaaatcacccagtattattgtctctaaaatagagtaacgatatacttgtcattggatt

SEQ ID NO: 58098 - DNA, 560 bp, Homo sapiens
atatctaagaataaaattagctgggtgtggtggcatgcacctgtaatcctagttacttggaagagaggctgaggtgggaggattgcttgagcctaggcgttggaggctacaacgagctaggattacaccactgcactccagtctcggcaacagtaagactccatatgtgacaacaaccaacctatcctgtgttttgagtgtaaattaccatagcctttgtaacagaaattaggcagcaactcttatcattcaaaatgcataagaaatttggctaagcaattgtacttctagattatttatttatttatttattattgggacagagtctcactctgtcccccagactggagtgcagtgacaggatctcagctcactgcaacctctgcctcgtgggttcaggcaattgtcctacctcagcctcctgagtagctggggctacacgtgcacatcaccatacccagctaatttttgtattttttgtagaaayggggttttgccatgttggccaggctggtctcaaaacttccgacctcaggtgatccacccacctcgacctccca

SEQ ID NO: 58099 - DNA, 517 bp, Homo sapiens
agagagagagaaggagagagaaacagagacaaagagagccataaatcctgaatttgttgttgtcaatggtgtttgatagcatcactttgtaactcaataggatrtatctgcacaaagctaaaattaatttatttttgccatacaaggcaagtgtatcttgttgacgtctatagagaaaataaatcaccctctaaagaactgtttataaataaataattgatatctgaaaattcagaaaaagtaccactatcattttacttaccatattgcattgaaattatatgtttatgcttctcttgcttctacctctctgtgaattcaaggttagaaaaggagaaatttttatcttagcattcccaggaccaatcacaatgtctaatacttagagcgtgcaatgttggttgaactgaaataaatctgatataaaaacaaataatgctttagggaagtgatttttcatttgagattattttctcagaaaaattaatatgaccaggttgtcatcctatgcaaacat

SEQ ID NO: 58100 - DNA, 517 bp, Homo sapiens
agagagagagaaggagagagaaacagagacaaagagagccataaatcctgaatttgttgttgtcaatggtgtttgatagcatcactttgtaactcaataggatgtatctgcacaaagctaaaattaatttatttttgccatacaaggcaagtgtatcttgttgacgtctatagagaaaataaatcaccctctaaagaactgtttataaataaataattgatatctgaaaattcagaaaaagtaccactatcattttacttmccatattgcattgaaattatatgtttatgcttctcttgcttctacctctctgtgaattcaaggttagaaaaggagaaatttttatcttagcattcccaggaccaatcacaatgtctaatacttagagcgtgcaatgttggttgaactgaaataaatctgatataaaaacaaataatgctttagggaagtgatttttcatttgagattattttctcagaaaaattaatatgaccaggttgtcatcctatgcaaacat

SEQ ID NO: 58101 - DNA, 517 bp, Homo sapiens
agagagagagaaggagagagaaacagagacaaagagagccataaatcctgaatttgttgttgtcaatggtgtttgatagcatcactttgtaactcaataggatgtatctgcacaaagctaaaattaatttatttttgccatacaaggcaagtgtatcttgttgacgtctatagagaaaataaatcaccctctaaagaactgtttataaataaataattgatatctgaaaattcagaaaaagtaccactatcattttacttaccatattgcattgaaattatatgtttatgcttctcttgcttctacctctctgtgaattcaaggttagaaaaggagaaatttttatcttagcattcccaggaccaatcacaatrtctaatacttagagcgtgcaatgttggttgaactgaaataaatctgatataaaaacaaataatgctttagggaagtgatttttcatttgagattattttctcagaaaaattaatatgaccaggttgtcatcctatgcaaacat

SEQ ID NO: 58102 - DNA, 2288 bp, Homo sapiens
atacttgggaatgcactcaaccacttycttcttcctgctttggccaaaacataaggggcctgtttgccggaacctgcccgttacctgtatacttgacatagttctcacagccccatctagcagagccagtcttccaatgatgactcttgtgtcttgcacttcaagagcaacaattccagtgtgacgctggggcctgtaatgccttataaggcacgtcttttacccactgagaacctagcactgaacttctctggggagcatgatttcagggggaaatcatctgctttaaggcaattctggattttcttcatgtgtgaaatggggataacactagtacagcaaaattatattccatagcattagttgatgtgatgctatataggcactgtcctacccaggctctgcaactaaagggaaagacatcctgatgtagtaacaaacagttaactttgagaacaaatgtgctgcattcttaatcttttaaggtcaaatgacactttctaggtgtgagacaggaaaaatttgaaatggggatgcccatagagagagcaggtatgtccttgtactccacagaaaatggaagacttcaaagctggaggagaaggaagagagttttgagagaagaaataagaatacactctggaggagcccaagtccctgcctctcccctctgggccaagcccatgctgggcagagaggatctgagagtggaggggacttgttgctcatgctagagtcctgagatcagccagcagccttgcagagatgacagtgaaaggtaatgggcctggatggaggagccccaggagtctgtgtgggcctaactggagagcagaaggtcactgagaatgagcacccatgagccagcctggaggtaaccatagcacaaggcaagtgaacctgagagccgaggctggcaatgcttgcccagacagatcagacaaaagtctctgcaaatgaactcagggtgtcagcagcaacacaagagcaaaagtggggccaagtcaacaaaggaaaatttccctgctcccagaataagcagcgtgcccagactgagatgggacaagagacaaagaggagcatctgcagcagattgctacattggtgagacaaccacaggccagacacctgctaccccaaggccacttgattctgaagattcccttgaataaaatgcatgagcatgaggggcagagaccttgaaatggttacattttgaactataaataaccaaggaattaatatgttgggctaaaagtcttggaacattgctagactacacattcttctagaatcaaaaataagaatttgcaaactgaattcaatgtttgagaaatttttagtttcatttctcctcatctgagtcttattgtactatgaaactcacagtcattgtacttgcttcacagttcttattgtgattaaatgaggctccttctgtaaggtccttaaccctgggcttggagcatagtaaggactcacaaatgttaataacccccacctgcctttgtctatgcctttcagagttaatacctgtgggctagagcaaggacagtgaaagaatgcaggaagtaaacactcactctcaaccttggagctgcgcttaatcccctggtagccctaaggctggtgaagcctcccagacactgacaccccactcttgtatctcttctctgtacagtcaggcaagcttggcctctcactctgacacccacagggagtccctttgttaatcacaccctttgtctcacttggcccaaaacaccagcatttaagatcactaaatcaccctctctctttctttatcccatgtcaaaatgaaactgcattcactctgctatgaatattaaataaataatgccattactcagacattgcatgttcaattcagcttgcctaaagagagataatgcagaaagaccccaacaaggagacaaagatctttagattgagtccagaaagacaattcaaaacctctatggccagattgtgacagccttctcaagaagtttcttctaccatcagtaggactctaatttcgtagccatgtaacaggctgattccctcattttataggcgttcagctgagtctgcaatgtgaggtatcaatttcttccttcaagaaaaagatgagctactacgcaacagaagatgagatttttgcgaaaaagttagaagaattttatagcctgtttgtgtcttccataccacccattgacagcagggcctccataaatgcttattaaaattaatattgtttgagcaagtcaaaggagaagaaaatactt

SEQ ID NO: 58103 - DNA, 792 bp, Homo sapiens
gcattgttgaatataaggctcaggggagcttccaggataaatactaaattgtgagtttatattgcatgagccaatcaggaagtcctgtgtccgctgatggtcaaaagaaaatggaaatgacttcctctgggacccctggcaggaatgcaaaggctaggtttgctgaatgaacctcacaattgtggcatccagcrggagacgctggaactgaattccagtgtgcttcatccccagctcagctcctaatcactgaccagcacctccaatttgcctgcagacctggggcagcatctgttaccataggctgggccgaaaggtcactgtggcctcagctttcaaagggtttgttgaatataaatgcagttgtttaatgtaatgcagttactactgtaacttggaaataggttaggacttggaaaaatattgcatcagatgtattcagctataagtaacagaaattttaactaacagattcaaataaatgctagcatttattatttggtaacaagaagacaagagaaaggcgatctcagagttggcttcacagcctaatgatgctatatttcctatctttctatgctcctgtcctcctcttgttggtttttggtccttatgcctgcagtgtcacagttgcaagacggctgtccctggtagcaccacctcctccctttgtctcttcatcctaggggtgggagcagcttccttcgagtgctgacttctgggttgcctcatgcaccatttgtcttctcagctcttctatcacctgcttaatcaatttcttacactaaattc

SEQ ID NO: 58104 - DNA, 792 bp, Homo sapiens
gcattgttgaatataaggctcaggggagcttccaggataaatactaaattgtgagtttatattgcatgagccaatcaggaagtcctgtgtccgctgatggtcaaaagaaaatggaaatgacttcctctgggacccctggcaggaatgcaaaggctaggtttgctgaatgaacctcacaattgtggcatccagcgggagacgctggaactgaattccagtgtgcttcatccccagctcagctcctaatcactgaccagcacctccaatttgcctgcagacctggggcagcatctgttaccataggctgggccgaaaggtcactgtggcctcagctttcaaagggtttgttgaatataaatgcagytgtttaatgtaatgcagttactactgtaacttggaaataggttaggacttggaaaaatattgcatcagatgtattcagctataagtaacagaaattttaactaacagattcaaataaatgctagcatttattatttggtaacaagaagacaagagaaaggcgatctcagagttggcttcacagcctaatgatgctatatttcctatctttctatgctcctgtcctcctcttgttggtttttggtccttatgcctgcagtgtcacagttgcaagacggctgtccctggtagcaccacctcctccctttgtctcttcatcctaggggtgggagcagcttccttcgagtgctgacttctgggttgcctcatgcaccatttgtcttctcagctcttctatcacctgcttaatcaatttcttacactaaattc

SEQ ID NO: 58105 - DNA, 700 bp, Homo sapiens
tctcataaatttcttcagctgtatcttccagatcactaactctctattcaattgtctctaatctactgttttatttactacattttcaacaatgttgttttcatttctaaaatttttaagttactcatttttgtatgtttgtctatttctgactgtttctcattccttgtacatttttagctccatattttcattatctctttaaaataggactattttaatattaatagcgtgtttattataaatccagtattccaagcttttgaaggtacaaatctgtttgtcattctgttggctcttgcctattccatatgtgtttggtaatttctattgtgagctcattttgaactgattttatttaagaatcttgtcagaggtttttttttttcataaacgattgatatatgtctgctgtcagccatggaggtctagaaatctggattcattttagttcccttcaaagtccccctggttaaagttgaagtcttggactcaggtctctgaccttgccttccacacagggattaatctctttatcayagcattgacattttccctcaagaaaactctgccttttacatgtgaatttcagtttgctgaacttttttttttttttggccacatttggccatggaaatttctcttactttctagggagcccaggaatgcattaagaattctgtttgttgtaattagtgca

SEQ ID NO: 58106 - DNA, 980 bp, Homo sapiens
ccctaaaattttagtatgaaaaataaagtttgcccactttgataagcatgacttaaaaaaaaataatgctgtattattcctgtataactcatcatgttccccttttggctttgactgccagaaagctcagagctatatttattgccaaaccacagcaatgaacagtggcctaattttgcagaaaaattctgtcccagagcacttgagtgtttaccctcaactaaatggtcctgtgatgtgcatggcttatgttatgagttgtcacaaatccaatytggaaataggcaaggattaaataataaacaaacaaacacataagtaatttggactaagcggtcttggtctttggcaatagaaaatgctcacacctagaatttggtttgtagcaaatgtctgttaggcacattgcctaaatctagtgtactactcgggggtgagtctgcccctcggtacagccatggacacttggatctttctgttactggggttcacacccatattcacccatcccatgatgctggctccttagaaggtggtctgtatggcagctcagtaaggatatcaggttgaaagggtgtgaaagagcaaggatcaagcaaactagcaatttgttcagtttcccatggatcttagcctttaatgtagttgatagaagaagatcttgctgaaatggacaaggaaatagacaatttttacacaaattgacaattcttaggcaatggtgtgtgtgtgtgtgtgtgtgtgtgtgcgcgtgtgtttattataacatccaacagtagattaaaaaatattaggtgagttaagatacttccttacctttctagaaggtcaaatattttttcttattattaatactacttggatcattttataagttaaacttgaatagaatacagaatgtggaagaaagggaactaatgttttttgaatgactgtgatgtaaatgatttgcctacattatttcactgaagggacatggc

SEQ ID NO: 58107 - DNA, 980 bp, Homo sapiens
ccctaaaattttagtatgaaaaataaagtttgcccactttgataagcatgacttaaaaaaaaataatgctgtattattcctgtataactcatcatgttccccttttggctttgactgccagaaagctcagagctatatttattgccaaaccacagcaatgaacagtggcctaattttgcagaaaaattctgtcccagagcacttgagtgtttaccctcaactaaatggtcctgtgatgtgcatggcttatgttatgagttgtcacaaatccaatctggaaataggcaaggattaaataataaacaaacaaacacataagtaatttggactaagcggtcttggtctttggcaatagaaaatgctcacacctagaatttggtttgtagcaaatgtctgttaggcacattgcctaaatctagtgtactactcgggggtgagtctgcccctcggtacagccatggacacttggatctttctgttactggggttcacacccatattcacccatcccatgatgctggctccttagaaggtggtctgtatggcagctcagtaaggatatcaggttgaaagggtgtgaaagagcaaggatcaagcaaactagcaatttgttcrgtttcccatggatcttagcctttaatgtagttgatagaagaagatcttgctgaaatggacaaggaaatagacaatttttacacaaattgacaattcttaggcaatggtgtgtgtgtgtgtgtgtgtgtgtgtgcgcgtgtgtttattataacatccaacagtagattaaaaaatattaggtgagttaagatacttccttacctttctagaaggtcaaatattttttcttattattaatactacttggatcattttataagttaaacttgaatagaatacagaatgtggaagaaagggaactaatgttttttgaatgactgtgatgtaaatgatttgcctacattatttcactgaagggacatggc

SEQ ID NO: 58108 - DNA, 2433 bp, Homo sapiens
ataaaagtattgcaaactaaaatacgtaggattgagaacattattcagtgatgtttcatgatcggccattacacagtggaatgcattagatcatcaggacaaacacaaaaccctagaatcaaaccagtattcattcaagcaggctttgtcactgccagtgctgcacttgtctgaaataacacttagtttcataaccagcttgaagatttcaagagcttacttgttttatgttatgttattctcaataaacattttcattatgttagtgtatattgagattcctttaaaaaactttctgaattcggtagttttatatattctactgtaatggtacaacagtaatcagaacttctcagaaaaatttcttttaccacatttcccccatctccaatttatgaggaaaaagaaaagaggactaattaaactgatttactatttaacctgaccaaattcattgctcaacttttcctttcacttttgggtcatcttttgggtaagatataaaagtaaatattttacaatttagaaggtgaagaggcacagatgcttttcttgagtatttcagtaagatttttaatgtaataaatggaggacatagcactcaactttatactatatgtaaacagtgatattaaaactcttaatttttgttctacaggtggttataagtttacttgatttaactaacaaagaaaataaaaagctacaacaaacagttaaaactcattgtcattaggcagatgtctttgaattcaatttctgatctatggcagagtggactatggaaaggcatgcaatagaaagcttgaaacttagagtagaacattgattctttgggacatgataagaaattggagagtgtaaaagaggctttataaatcagagaaatcaatgaaaatgaaagacaaaaatatatgacatttggataatgtcattcaattggagaatagactatcagataatttttataaaggcatggctataaataaatcaatagctgatgaaaattatgtttgcttaacttgttcctttgtaatggatagttaaaatatactgactgtagattgtcaatgtttatattaaactccagaaaattcttattttacaacgattaagttttttgagctttcttttgatgagatttataaagctcccctctgtaaagcctctgtgttgaagctactgcacgcccttgagaatataggcaaaatgccaaaaattataaattattacagtgtaagagtgtatttctctttgtatccaaggaagaaagttatatttcatataaagaccatgcatgcataaaacagctctgaatgagagctttagctctgacttatttctgtggtttggggtcaattttgtttttgttccaatctgtttaggtccttcaaagttaccctacaaagatccctgagaaagtgctcttgtatatgtgtatttatgatgattttcaaaaattagtttatctgcaaaaaaattatatacatatatatggagaaagactgtactatagatatgtgctagaagctcttagtctccactctctagattaatcccctatttgttctgtaaaacatactgtctaatgtcctctacacactaaatgctgacgcttagtaagttgctctccagtgtgcccaggtaacttctgcttccaccacatgaattttatgcttaacaagagccatgcttgttccaaaatttgtttttgtctactttaaattgatatttgtaattgcataatttgtatagattaaatgtggatatgaaagaaagttgatgtttttcaaaaaactaagttaaatatgcagaaagacttgataaaattaagttgcttagaaaatattactaaattagtagtgagaaggacaattgtaaaatgttgcaaaaatgtatatccaaatacagacagattcttatatttgccaatgtctttaatctcaaaactaaagcaatagaaatactagaaattctggttgatatatttgtggtgtactttgtgaaagaaaggcaactcagaactgtaatattcaaagaaaaaacattgtctttattaaaagattggaaaattaatatataatttataagtgaaaattaaatacccgagatatttgtgtcattttatagaatgattctttgctttagatgacttttccattaattagctggttccgatcctgtgttggataaaagcacctaggctctgagtgtctattatttctctacttcaatttttgaaaaatattgaaaaattttcaaatttaattttttcatccgattcttattacgtcttcttgtacccgcttcatattactaacattctactttatctctttaaggatactaattatgcccattttaaattcttggtccatatgttccagtaattttgcttcatgtttatgttctatgttcagyttttggtctgtt

SEQ ID NO: 58109 - DNA, 610 bp, Homo sapiens
tagtgctcatggtctttaaaaagtggataaaaagtagttctcacatttcatggaaagcccccaatccatgagcacatttcccaaaatgaaacatttttatcaactgcaagttgtgtgtaggtggagatttgtttttcaattgtcaagatactgttaattacccagtcctttatctccttttggtggagatgtctctgtgctaggaaacccttcttgctctccttcctgtttctcttttactactggccctgaaacaacaaattctcaagtttcatgacagctttccaaagaatccatcaatcaaataagcaacacaactcgacactgacaattccagacctactaagagcattaattaagacttaaaaataaacatgagttttaaaagggtgttattcattattttcccatttataacgtcccttaccttctgtccttcagtgcatacaaattattatcttccttgaagcccagttcaagccgtacctcaccatgataccttccatgtatattccactctaggcctcactgatttttaactgaaatactataatgcatagttcacamttaaaaaaaaaaaaaaacacagcactttacataagagcttaca

SEQ ID NO: 58110 - DNA, 532 bp, Homo sapiens
tgactgggtggtaagtatgtcattaggagtgttttgcttatgactatataaatttcttcaccaaaagaagactttctgatgatatactatgcatcagacaccacgcagggtgctaaggttaggaagataagtgagacttctagaaactcattcattcaacaaatatctcctaagggctagaagcttaggtttcagcagtgaacagaataggtatgttctctttcgtgttggaccttatagtatatctgggaaaacagacattgaataaatatcacaaatgcaagtgagtgtttcagagacatgcagctgctacatcaaaacaaaacagaacaaaacaaacaaacaaaaactgaccagtgggattaagtgtaaataggcayacaaatgcacaaatatgcttttataaaatagtgaagcagtgacagagacacacacaagatataaagacacaatgaagaacaattgagcccaaagctggaaagggtgagagtgtgaaggaaaaaggttgatcagagaagttttcccgaaggag

SEQ ID NO: 58111 - DNA, 987 bp, Homo sapiens
aatatttacgttctaatttaccacttctgctgctctccactccttcttgcagatccaagtttctgtttcctgttaatataaagaataccctttagcaatttttatagtacagatatactggctatgaattctgtgagctttcattgatctgaaaatgtctttgttttcctctcatttctgaaggctatttccactggatataaaattttgttgttaacagtattttctttttaaaatatcaaatatttcagatttctggttctgaggatatagcagaggtgacgtgggattgaaagtgtattagtctgttctcacactgctaatagagacatacccaagacgggtaatttacaraggaaagaggtttaatggactcataggtctgtatggctggggaggcctcacaatcatggtggaaggcaaacgagtagcaaaggcacgtcttacatggatgatggcaggcaaagagagagtgagaaccaagtgaaaggggtttccccttataaaaccatcagatcttgtgagacttattcactaccaggagaacagtatgaggaaaccacacccatgattcaagtatctcccaccgggtccctcccacaacacataggaattacgggatctatatttcaagatgagatttgggtggggacacagccaaaccatatcgggagggttctttctggaagcactgcccaaggcaggtctggtggggctctgagtagggcacagtgggatatgatatttactttcacgacaagaaagtcctgttgctagaattgggtccaaatgaagtactagagaagcaaaaacaacaattgttcagctccatttcccctaagtctgcaggcttctcagtagttgatgcctcaggccacatctgcaacatgagttacagggcatttcgggaaatgcaggcgtgggacgcctgctcagaggcctcagtgatgcttgataaggagaatttagatgacatgggctataaat

SEQ ID NO: 58112 - DNA, 987 bp, Homo sapiens
aatatttacgttctaatttaccacttctgctgctctccactccttcttgcagatccaagtttctgtttcctgttaatataaagaataccctttagcaatttttatagtacagatatactggctatgaattctgtgagctttcattgatctgaaaatgtctttgttttcctctcatttctgaaggctatttccactggatataaaattttgttgttaacagtattttctttttaaaatatcaaatatttcagatttctggttctgaggatatagcagaggtgacgtgggattgaaagtgtattagtctgttctcacactgctaatagagacatacccaagacgggtaatttacaaaggaaagaggtttaatggactcataggtctgtatggctggggaggcctcacaatcatggtggaaggcaaasgagtagcaaaggcacgtcttacatggatgatggcaggcaaagagagagtgagaaccaagtgaaaggggtttccccttataaaaccatcagatcttgtgagacttattcactaccaggagaacagtatgaggaaaccacacccatgattcaagtatctcccaccgggtccctcccacaacacataggaattacgggatctatatttcaagatgagatttgggtggggacacagccaaaccatatcgggagggttctttctggaagcactgcccaaggcaggtctggtggggctctgagtagggcacagtgggatatgatatttactttcacgacaagaaagtcctgttgctagaattgggtccaaatgaagtactagagaagcaaaaacaacaattgttcagctccatttcccctaagtctgcaggcttctcagtagttgatgcctcaggccacatctgcaacatgagttacagggcatttcgggaaatgcaggcgtgggacgcctgctcagaggcctcagtgatgcttgataaggagaatttagatgacatgggctataaat

SEQ ID NO: 58113 - DNA, 727 bp, Homo sapiens
aatctttttttagaagttactattagggaaaagcaaatcccacccaaaagcaakcaaaccaaacagaacccatgtctaagtattagaattgggttcaatacttctcaaactaggtttacctgtaccacactttgattaatataggaatttccttctctttcatcttgtaaaacaccaatgttgttgtataattaagtgaataacaaagtgatagaaaaaaatctttagacagttcttttgttaagtaaaagcttcaggcttatttctgccaataaatttgacaatgtaaataaagattattggcacaatccaaattgatcaaaatgtgcaagaagtttgggggaggaagttgaagataagtcttcccttagcttttgttttaaagcacaaaacttttgtttataaacccagccccaatttttcgaataaataatggagctaaatggcatatatttatcaacatctctagtgacatttactgatcatttattttttaaataactaagattgcttttctagaatggttaaaaaaactgtgttaaagttgtttttcaaaaatcattttgagaaactgtgctttgaatacagcaataataggcaaacagacttgaagttactaaaaagctaaactaaagcatttgctcttgagatcatctcattagattccatgttattcaagatagccatcaatgttgagccaacttcaactatgtaattcctgagaaaa

SEQ ID NO: 58114 - DNA, 787 bp, Homo sapiens
cctgttctagtatactgcacacatttttttaacatttggtataattgccactaactcacttacctaacaaactataacctatgttacgctttccccaattgtggaaatgctgtagaaggtaagtactgccacattttagaggaagagcaagctcccactgaagggaagtcctgcagaaggtgcttgacacatgctggtggaakgagtgatggcgtgaatgggtgagtcctactttgtgattatgtcagaaagcaacaacagcctctcatgcttatgtcagagcacaacacaagctatttggtttccttatgtgaggcctccatgttatcaaatccagaaacaactttgaaaatgtcactcttagcatgatttcaatagcataaataccaaaatatcagcaaagtctacccagtgatggacaaggtaaagatcatgtgcatttcctcaacaaaagctgctggttgggttacttactctcacaggatctgacgtaaatgtctatccatgaggtacatagatatttgagatatcttcctttttttttttttggtctttgatgtttcttaattccttaatatacatgaagaagtgaaataccattgaggaagtagttcagtgttgacttcaattaggataggattgttaaacttcattgcttgtgtttgtagtgtttaaaactcgtaagtggtataacagtacactgcagtattttggtaattttcacagtaatatgccactctcatccctgttcctgtatgacctgtggtggttaatagcatcattatgg

SEQ ID NO: 58115 - DNA, 787 bp, Homo sapiens
cctgttctagtatactgcacacatttttttaacatttggtataattgccactaactcacttacctaacaaactataacctatgttacgctttccccaattgtggaaatgctgtagaaggtaagtactgccacattttagaggaagagcaagctcccactgaagggaagtcctgcagaaggtgcttgacacatgctggtggaaggagtgatggcgtgaatgggtgagtcctactttgtgattatgtcagaaagcaacaacagcctctcatgcttatgtcagagcacaacacaagctatttggtttccttatgtgaggcctccatgttatcaaatccagaaacaactttgaaaatgtcactcttagcatgatttcaatagcataaataccaaaatatcagcaaagtctacccagtgatggacaaggtaaagatcatgtgcatttcctcaacaaaagctgctggttgggttacttactctcacaggatctgacrtaaatgtctatccatgaggtacatagatatttgagatatcttcctttttttttttttggtctttgatgtttcttaattccttaatatacatgaagaagtgaaataccattgaggaagtagttcagtgttgacttcaattaggataggattgttaaacttcattgcttgtgtttgtagtgtttaaaactcgtaagtggtataacagtacactgcagtattttggtaattttcacagtaatatgccactctcatccctgttcctgtatgacctgtggtggttaatagcatcattatgg

SEQ ID NO: 58116 - DNA, 2508 bp, Homo sapiens
cagtgatattagagatgtagcgatggtgcaaaattgctggagaaaataacctgaagacaactggaatattacttgcttctcacagatatcaaattcacatttacccaccaagtaatttcagatcagatgtcttttttctgcatttcctttgcttttctacaagccacaaaagacagctgtcatcatgagcttcatcaaacctgaaacaagtcactaaaaatttggcatcattgacatcaacagtaactggtaggctactcaagatggaaaatactttcttaaaatttaactttattttgagacataaggtagtggaattcttgaattgtaaaatgctaacaaacagaatttattaaaaacccaaggttaattaaaacaaccctagtcatgagccatttctaagttttacagggctgttttgaatagtttaaaagtagagactggtgctaastcaaagtactcggtccatttggatccctatgaacgtccaagacaaccacaaaaatgctgagaagagtccacagctttgcattcagagcctccatgactgtgcccattgtttgtgaatgtgggtggaaactagagcccaaacctcagagaataaaacctgcctgatacaaaaagtaccatgagtagattctggaatggccgtgacccaaacaaattggagaggattgaggagactccaggatacatataaagttcagggatggatgttaggtagctttattcgttagggcttgatgaattggcatcgtgtgggtggggcaggatgtaaagtcttcagttcaaatgaaatgaggaatttatctgtgatcctgccatcaagtaactgcacatcatcttggctcactctgaatctctctgtggttctgtttccttacgggtaaaatgcggggaaagggattgtcactgcctctcccagaattaatgaggtgatattcacaaagagcattgtactcttaggaaagaatgctctgtggcaggatattatagggcagtaacatcaagcttgtttaaaacgtgtgcctgctgttaccacgtgggtgctatggctcagcagtcttgtatatcaaatataaaccaatgcatatggaactgtttaaggataacagatgatgagctgaataaatgaaatagtttattttatactaaaggtagttcatgcttaaaaaatgccttgtggctgctatttcatcttcaatacagtaaagacatacttgagcaatcccatttagataatcactggccattgatggcagaaattagaaatgcagaaaaagattgggtcagtgagtctgtttcctgggagacagcagggaggaagcaatttcagcaacgatgctgggatactcatgctgtgtgttaagccaccttcacaaacttgcctccgtgactgtggctgtgatacatgcccagacagaactcgggattggctacccctggactcactcttcacagctgcctagaatcttttataccaggaccacgtcagaaacctctgggatccataagtaaatagcaaggctctgcactcaagagtggcacctgcagattttccactttgcttttgcaagttattcagacacagcatttccattcatcaggaaaataagccaactgcctcctaaagagcatcttttcctatatttaggggttctggggtccacttgctgaaatcagataacttcactaccttaacttaaattctccagtggattcccattacacttaggacaaagatctcatctctttaccacagctcacttctaacctcttggactagcgatgccccttgtttgccatgctctaggtgtagtttcagactcagttctaccccaagccttggctcttgctggtcttgctggctaaagtgctctgccccaaatctccaagtgctggtaacctcatgtgcacctccaatgtcacttactcgagtccttccctgatcatctgatctaaagtcctcttccctacctactcttcatatatcatcttattttattgtgtttttgcactcacactaactgtaattatcttgcatatttttccttggttattatttcctcctcatgaaagtggagagcttgactgtcttcatacttttggggctcttgtgtctggaagagcacctggaacatagtagattctaagtatgatttcagtggatgaactaacggataataattcacaatttggacttccaaattctgtctgggatttttaatactagtagctgtgactaattctacatagtgatatgtttgctgggaggaagtctttcatctaatgtgcagtaaaagtagtctagaattattccattctttatgacttagctttaagggcaagtgaaattctagaattgcaaaatgctaacaaacagaatttattaaaaacccaaggttgattaatacaaccctagccatgagccatttctaagttttacagggatgttttgaatagtttaaaagtagagactggtgctaagtcaaagtacccggtccattt

SEQ ID NO: 58117 - DNA, 674 bp, Homo sapiens
aagcagcatctgtcaccttacatatgcaaataaggagtaaaatttaaatgccacaagaattcagaggagttaggagcaaataaccaattacagaagacagactgaggcagagaggcccaaagcaacttcttgcccatgaggttcacctctggcaggtggtgtcccacccactgcagtagaaagggacaagaggtagctctttatgacacccccaaggcatccatgccttctcccacactgcaatctgtcttttgcggatgcccatctgggcatgcctgagcaggcaagaatactatttatgtctttaaagtaggtttaactgtattttatttttatttatttataygtttttagagacagggtttgtttcactctgtagtccaggctggaggcagttgcttgatcatagcttactgcatgggctcctggtctcaagcaatttcccccatctcagccttctgagtagctgggactacaggcttatgccaccatgcctggctaacttttgtactttttttttttagagacagggtcttgctttgttgcccacattggtctcaaattcctgggttcaagcaatcctcctgcctcagcttcccaaggtgctgggattacaggcgtgagccaccactccctgcttttctgtattttaaaaggaagatttatttgcttat

SEQ ID NO: 58118 - DNA, 707 bp, Homo sapiens
tttttttctaaagacctctaattttggtagcagcagaaatattactatttaaatagtaaaatatttcaatagtattcatactgcagagagaattatgttgctttgctgaaaacccaaatgatggttttaatagcaaggaaacttgccagtagttacttttcaatgacayttatttcattataaaaacagtagaatttgttgtcatcctttgttgtcattttgtttgctttttgctatccccattcatcctccagttcaggttttgtccatcattgttgactgtaatggtacatatggctgatctggcagacagcagtgatctcatttgtaacgcattattgtaaaacccatttagcagattagtttgagattacgttagctgaatgaagacattgctgtgtcctttatgaagaaagccatacatttaagacatgttagaatcaattctgctctgaataagacaggattagctcactgcatctttctgtgaaggagtttctggtggagtgtggcatttttaaaagtgtaccttcactcctaatgcagcactacctctaagcaactaagcaatttttcatttatctcaacattttaaaggtattttctttttatccctctacttattattattattattattattaagatctggccagatgcagtggctcacgcctgtagtcccagcactttgggagtctggtgcgggt

SEQ ID NO: 58119 - DNA, 707 bp, Homo sapiens
tttttttctaaagacctctaattttggtagcagcagaaatattactatttaaatagtaaaatatttcaatagtattcatactgcagagagaattatgttgctttgctgaaaacccaaatgatggttttaatagcaaggaaacttgccagtagttacttttcaatgacacttatttcattataaaaacagtagaatttgttgtcatcctttgttgtcattttgtttgctttttgctwtccccattcatcctccagttcaggttttgtccatcattgttgactgtaatggtacatatggctgatctggcagacagcagtgatctcatttgtaacgcattattgtaaaacccatttagcagattagtttgagattacgttagctgaatgaagacattgctgtgtcctttatgaagaaagccatacatttaagacatgttagaatcaattctgctctgaataagacaggattagctcactgcatctttctgtgaaggagtttctggtggagtgtggcatttttaaaagtgtaccttcactcctaatgcagcactacctctaagcaactaagcaatttttcatttatctcaacattttaaaggtattttctttttatccctctacttattattattattattattattaagatctggccagatgcagtggctcacgcctgtagtcccagcactttgggagtctggtgcgggt

SEQ ID NO: 58120 - DNA, 2141 bp, Homo sapiens
tttccataggttccctaaatttgggctgggtttggagtgaggaattgaagtcaggttgagcggtcagcctatgtgaagggaaggcaggtttaagaagtaccaagtggttccaggggtttctggactggggactgattattcttttaaaagaggctgctgaaatgtccaaataaataagacagatcgaacacatctatgcagcctcgacgctcttctaaaaccccaccaaaatgccagcaaagacataaaaagtcttcaaatcactcagataacaagaataacaatagaggagactacagcaaatgaaagataacattttaggagctgtaaggctaatggatggggcttagttagcatattggaaaatgtagaaccctaagcttacatgaagggataaacggctacgtgttggttcagcagaaccccagaaagacttgggaattggaggtactgggtacctctgaagaagggtgatgggtcagggcagaagatgaacytttgggcatttttgcttttcacagtttttttttctttcatcatcttcagaaaccacaagccctctaaaaatgtgtgtgtgtgtgtgtgtgtgtgtgtgtgtgtgtgtgtgtagcatatatatttatattaattttattttgctctcgtggcagcaacaacaggatcaatgaaaggagcacagtgaagcagtactgaccatggggggtcatgcagacgctctgagaattgagcatctattgctgggaccactgtattcagaggcaggaggcagatgcaacacggtccactcacaatgcacaacctgtggcttggttgacttacaaaagcagtacaacaaacacagctatttagcacagtctgagaggtcacagctcccacctgatctggaggctgctcccactctgataattttaagacagtactttcagcaggaagtgggaagcctatgcatgccatgtgacctcaaggctacagataagtattaaattggatgactgattctcatatttttctgattattattgtttttagagacagaatctaactgtcacccagggtggagtgcagtggtgctatcatagctcactgtaacctcgaactcctggactcaagcaatcttcctgcctcggcctcccaagtagctgggactacaggtacaagccactaattttttcatatttttagagatggggtcttgttatattgtccaggcaggtctcagactccagggctccagtgatcctgcttccttggcctcccaaagtgctagaattacaggtgtgagtcaccatgcctggccatgaatctcatatttttataaagcagccatgtgttctagattttgctgaacatcacaatttccaatactctaatgctcataaagagacggctcatggtcaaactaaaggtataatttttaagttttttaagttggaacaaaatggtcaataggaggtaagaacttaaaaggaaagggtttgtttgcaagtgctcccacaagaaaactcggaagcgatgaacaagagtcaccacttcacttgcatgagaaagttcctcatggtacccctaagtcaagccctcactaagagcgcggctgctggcactgtggtcccactttgaggagcagcctcccagagctcgcccaggcccctgcagcttccatgctcttctcatgagaccaaacgactgcccagacacttagtaaattccttgtatctttggtttatatgaaaggaaagaaaaaacagcttctgcacatttcatcttactataaatacccaagtgaagaaaaaaggtaaccatgaaggctcatcccactcaatttattcctgttggcattctttcagtggacaaaaggaggggaaaaaaaaccctgcccttgagtaggaatgcaacatgtaaaaacctgtgctgaatcatgaacatgattattgtatgagaagattcaaactgaattgtaaaaacctcattttatagctgcttaaaaaccctgagaatagttgtacatggatctcagcaaacgtacaaaagaacacgcgttatcaaggcagagatctgcacacttgctagggaagacaagggtgatgcgggggcagaagatcctggcttggacaaggcaaggttccaaggatgaaaatatccct

SEQ ID NO: 58121 - DNA, 2141 bp, Homo sapiens
tttccataggttccctaaatttgggctgggtttggagtgaggaattgaagtcaggttgagcggtcagcctatgtgaagggaaggcaggtttaagaagtaccaagtggttccaggggtttctggactggggactgattattcttttaaaagaggctgctgaaatgtccaaataaataagacagatcgaacacatctatgcagcctcgacgctcttctaaaaccccaccaaaatgccagcaaagacataaaaagtcttcaaatcactcagataacaagaataacaatagaggagactacagcaaatgaaagataacattttaggagctgtaaggctaatggatggggcttagttagcatattggaaaatgtagaaccctaagcttacatgaagggataaacggctacgtgttggttcagcagaaccccagaaagacttgggaattggaggtactgggtacctctgaagaagggtgatgggtcagggcagaagatgaacttttgggcatttttgcttttcacagtttttttttctttcrtcatcttcagaaaccacaagccctctaaaaatgtgtgtgtgtgtgtgtgtgtgtgtgtgtgtgtgtgtgtgtagcatatatatttatattaattttattttgctctcgtggcagcaacaacaggatcaatgaaaggagcacagtgaagcagtactgaccatggggggtcatgcagacgctctgagaattgagcatctattgctgggaccactgtattcagaggcaggaggcagatgcaacacggtccactcacaatgcacaacctgtggcttggttgacttacaaaagcagtacaacaaacacagctatttagcacagtctgagaggtcacagctcccacctgatctggaggctgctcccactctgataattttaagacagtactttcagcaggaagtgggaagcctatgcatgccatgtgacctcaaggctacagataagtattaaattggatgactgattctcatatttttctgattattattgtttttagagacagaatctaactgtcacccagggtggagtgcagtggtgctatcatagctcactgtaacctcgaactcctggactcaagcaatcttcctgcctcggcctcccaagtagctgggactacaggtacaagccactaattttttcatatttttagagatggggtcttgttatattgtccaggcaggtctcagactccagggctccagtgatcctgcttccttggcctcccaaagtgctagaattacaggtgtgagtcaccatgcctggccatgaatctcatatttttataaagcagccatgtgttctagattttgctgaacatcacaatttccaatactctaatgctcataaagagacggctcatggtcaaactaaaggtataatttttaagttttttaagttggaacaaaatggtcaataggaggtaagaacttaaaaggaaagggtttgtttgcaagtgctcccacaagaaaactcggaagcgatgaacaagagtcaccacttcacttgcatgagaaagttcctcatggtacccctaagtcaagccctcactaagagcgcggctgctggcactgtggtcccactttgaggagcagcctcccagagctcgcccaggcccctgcagcttccatgctcttctcatgagaccaaacgactgcccagacacttagtaaattccttgtatctttggtttatatgaaaggaaagaaaaaacagcttctgcacatttcatcttactataaatacccaagtgaagaaaaaaggtaaccatgaaggctcatcccactcaatttattcctgttggcattctttcagtggacaaaaggaggggaaaaaaaaccctgcccttgagtaggaatgcaacatgtaaaaacctgtgctgaatcatgaacatgattattgtatgagaagattcaaactgaattgtaaaaacctcattttatagctgcttaaaaaccctgagaatagttgtacatggatctcagcaaacgtacaaaagaacacgcgttatcaaggcagagatctgcacacttgctagggaagacaagggtgatgcgggggcagaagatcctggcttggacaaggcaaggttccaaggatgaaaatatccct

SEQ ID NO: 58122 - DNA, 513 bp, Homo sapiens
tagtggggctgctcaaaacagactttcggaaagatactaccatcataaattcatccggtgagaattaacaactatatgcatgactactgcgttaggttgagcttgagaagagtgcaagtgtttttcccttactttttactgaagacacttgcaatctagatgggaagataagatgtacacacataagcaggtaagtagtttacagagccaaggatcccartgcaagagatattatgaaactgtattcactacagaaaagaactgcttgtgttacacattgaaggtcaggaaaaatgtgtaagaaagaggggaagagcattcaaggtcgggggcgtggagtcctgaaaccctggtgcttagtgcacagtgaggccacctgtctggctggcataaaagggacagtatcaggcaaaaatttaggttgtggatgaagtaaggaagtcatcaaagagcttgggttctatccagaagatgataatttttcaaacaatatttctcagaattctatgagtc

SEQ ID NO: 58123 - DNA, 513 bp, Homo sapiens
tagtggggctgctcaaaacagactttcggaaagatactaccatcataaattcatccggtgagaattaacaactatatgcatgactactgcgttaggttgagcttgagaagagtgcaagtgtttttcccttactttttactgaagacacttgcaatctagatgggaagataagatgtacacacataagcaggtaagtagtttacagagccaaggatcccagtgcaagagatattatgaaactgtattcactacagaaaagaamtgcttgtgttacacattgaaggtcaggaaaaatgtgtaagaaagaggggaagagcattcaaggtcgggggcgtggagtcctgaaaccctggtgcttagtgcacagtgaggccacctgtctggctggcataaaagggacagtatcaggcaaaaatttaggttgtggatgaagtaaggaagtcatcaaagagcttgggttctatccagaagatgataatttttcaaacaatatttctcagaattctatgagtc

SEQ ID NO: 58124 - DNA, 587 bp, Homo sapiens
aacaggagcaaagcccaatatttttggtcaccaggggagcaacaaacacaggtacttatgactagctgtgtgtcctgaggtgagctactttacctctctgagccttaatgtaacatggggctaattactaccatcttgatagactgttgtgctgatgtacaactgacacactatacctgtgcaacattactgctaccacaatataaatattcctggcttacacctgtatcttttaaggagaatattctgtagtggattttcttttaacaggtcattaacttcttgaggtacttcaaactaaagtgcaaagaccaatgacaacaccagaccaacyataaacactgatcagccagctctgaagccttaactcagtgggaagctatgatccagttaacaaaagttgggtttgtaaatcactgttcaaaaatacgtatctgtataacgaccagtttgcaagttgaaaagcattcatatgcaaaaactcagagggatgatgatattaatttttagtctcagaatttccctaccaagccatataaagtgctgtagaagaaatgagtgagaaaacataaaggatgctttcaaaa

SEQ ID NO: 58125 - DNA, 503 bp, Homo sapiens
aatcagatcgtgcctcccagcatcacctcatctcaaaatccaatcagatcggacctcattatcctatgctcataaaatgcaacccaggccccagctttgggagatagatttgagcatatcttcctgtctccttgtcagtcaattcacaattaaccttgcttgctataaaaacctagtgctttggtgtttggctttctgttgtgaacaggcaaatggacccagtttggttcggtgacagggcttagcctggagaagccacaggcatctcacacgtggagctggtgtgaggactaagrggtaattgccctaagctgacaatccccagtggctggtcagtgaaggcagagctcagagttaacgaggtcatggccatggtttcatgagggtgaccagggagctttgttttgccctacagccatgggcggcacccccaaccccggttaccttcagcaaagcctggcctgctgtgttaagcaaatctgaaaaacctgaataaaagcatg

SEQ ID NO: 58126 - DNA, 1104 bp, Homo sapiens
tttaagctgccgtcataaactctcccttgcatccacagaaagctagttgttccttttccatgggacgcaaaacactgaattagtccagttgtggcactgttcccacatgctcattgtggctggaagaaaaagacaatcttgctgttatggattgaatgctgtatccatccccccatatttgtatgttgaagtcctactccccggtttgatggtattaggaggtggtgtctttggaaggtagttaggtcatgagggtgaagccctcatcaatgtcattagtgttcttaatagaagagagaggagagtttgctttctctctttaggccacataaggatacaaggagaagatagccttctgcaaatcatagctggccctcatcagacactgaacctgctaatgacttaatcttggacttcgcagcctccagtactgtgaaaaataaattgctatttaagccacccaatctgtggcattctgttacagcagcctgaactgacacatacatcctgaatcgtatccctttcaatttcagtctgcatgtttcacataggtcctgtgcactatcctgggatcttatattcacccaggccattttctacttaagtcagtcacttctgggatttgtccttcctttccagatactctattgagaagcatgctttgtttataataacattttttgaagaaatgaaaattataaaactcttctcaaaacttaacgaatatatctgattcttgacccacataaaccaatgtataaacaaggtgaaatatgtccaacaatagaaacaataaaacaaatataaaaatgaccttttttgttccagccactgctacattttcctgctgtctgttagcataaaacttagagttgtccattcaatttggtgtcactytttacatttcttcctctttaaactcactcaagccaggtgccagcagacatcaccctaggaaactcatttttgttaagctgggcgatgaactccatgttgctgaatctgtggtcagttcacagagctcctcttactaggactttggcatcgtttcacattcttgaaatataggctctgatttctgcatgccacagtgccttgttttcc

SEQ ID NO: 58127 - DNA, 730 bp, Homo sapiens
caaagtgctagcttcctgctttccctattaaggctagaaattccttcggcttgaccctacagttgtctctctaaactgagtgtgtattctatcctgtctcaattttcctggatcactggattctttcctgaatgacattctgcacattatggcaacaagagaggtattttaaaatcctttggatctgaagactcactttctgtttgaagtttaaactcaaaacagattccccattgcatggcatcatggtaccctcctaccaaacactgtaggagatatcctggaatgtcagatcagtgtaattgatcaaggatgagggtcatgtgggttgagaatgactatttgttttaagatgagttattccagaagtaagtcctgagacaagggtttcagtgacagagaacttagaaatgtctagtagaaaagtgaagagtaagacagggagatgatagccatcaatacagagtatttagcaggttactgctttagaaaacacagtctcaatcactctgaaaacctctgggagatagcataaaattttctcagtgtggtttccactgaaggaaaaggaggctggagtatttacacagcaaatccccattcttgatggggatttcttcaggaagctatttcttcaggagtcgtctccttgccattctactttaaacactaagtatgttgttatgaccccccmaaaaatctggaaaacagttgcaggggtttgccatag

SEQ ID NO: 58128 - DNA, 637 bp, Homo sapiens
gccatgtattttacttgtattttgaaatattgtgttggttttttatataagtgcctggaagggtgaagtttttttctgctttgttccttgtatatccacagcacctagaacattgcctggtacatgttcagcactctataaacatgtttggaatgawtggatgtgttttttggcttccttccagtctcctactctcagtttgtgctcctatagcaccacctctcttgtgacttttgatatattctggatttactatagtgtgttgtctgcccccaccccagactgcaaagtccttgatcagaaacaattcctcatattccttctactgtccagtggcatactctatataggaagtgctcaataaacagtctaatgaatatgttaacatcagcagtcatcggtcatatagccactctgtttccatttctttcccacacacagcaaatttgtagaccctggggtcatggttccactttatgaatgaagtagagacctttctgacccaagcgccatttacccatcgcttccttttatcttctgcaggtttattcacatcctctctacctttccctcttttcactttctcttagagttatgtcatacgtttcactacttttctcttttccaccatcacatc

SEQ ID NO: 58129 - DNA, 1164 bp, Homo sapiens
ctgaatgttttgttttcagacaagggtttaaggaagtttaatcctgagggaaagtgctaatgagggagatgataaagattcaggtgaagggtaactggcagagtggtgtccctttgaagactgtgtgaagggaatggggtccagggcacaggtagggacatcagcttcccaccagacaggaataacatttccaaccagaatgggacgcagaaagcagcaccagaagcagaggaagcattctcattttgatgccttctattctaggtgaagtaagagacaggctcattgaatgagaatgagagttgtgggatagggaggaaggtagagtatgtgaaacccccatgtaggaattagaagaatcttgaccttcccaggacccaagggggcaaaggcggtgaggggaaagggtctgagacagctctagtggatacccaacagaggagcaacaccaggtggataaggggtttgtttggtaagaggtgaaccctctcatgttcagagcactgcagggtgcccagcatctcagctcctgccgggaggaatctgggactgatgagcaagctgaatggcagttgaaagatccaatatccacagggattatggggaagctcagggagcatggacgcccaaggagtaggtcagaatagcaccaactacagggataagtagacattttcctcttatggcagtacatatgtaaggaatagacagttgaaagaataaagagaaagggatattagagaacaggttattttaaaaaagatttattttgaaaggggatgatcagttgatttagtatgaaatggagagctgagctagcagagatatactgataacttctggtcagtacaagatgcctctctccttgagtgatgaccaacctttgctgcttagcctgccccacgacccatctgttaggttctctggattctcactgcaatcaggagcctcatccaggagctttcttttttttttttycccaaggacctttgatgtttgattcttatgctattatagttctcaatattaataattcagagtcaattgtttttaataacctaactataaataattagtgaagagaattaaaggaatggatatactcattgatattttcataatccttatcctgccctgtggcattgtctgttactgataaaactt

SEQ ID NO: 58130 - DNA, 855 bp, Homo sapiens
aacaccttgaaggagaggggaggggcatcctggcaggtgggaggagggctgccattgcaggggaccgagaggcgaggagtgagcaaagcactgcagacagacactgcccactgcacagggagccgcccgggtgcctgaaagcatcgccttggcatctgcacatctgtatttccagcagcaactcttgttagcctgggcaaagaagcaaatgccactttccaacactggacaaattagatgggtgggagctgagatacaatcagtcaatcaatcagccagcagccctgaccccctcacacctaatgacaaagaaagtccttccatgaggttgggcgcggtggcttaagcctataatcccagcactttcggaggctgaggcgggtggatcacgaggtcagaagtttgagaccagcctgatcaatatggtgaaaccttgtctctactaaaacaaaacacaaaaattagccgggtgtggtggygcacgcctgtgatcccagctactcaggaggctgaggcaggagaatcacttgaacccgggaggcagaggttgcagtgagctgagatcgtgccactgcactccagcctgggtgacagagccagactccatatcaaaaaagaaaaagaaaagaaaaagaaagtccttccgtgaacagccgctgcgctctctgaacgctcggtggagaggagtctgggagggcactgacattacatttccagctgctgtggtgaagggaagggaaacgatgatgaaatatagttcagtaggaaaaacatcttttctgcccacttctcacaagacgaatgacagagaagatgaagttggaattctttccatttgcttttgcctcatggatc

SEQ ID NO: 58131 - DNA, 542 bp, Homo sapiens
atgtagctcggggcactgtcaggcctttgtgcccagccaggcgtggaggtgtttgaaaagagagccatcaacacctttccatcggggacttgcgatttttctcttttggttgagtcaactttgaagtttagtagttccttcccacgcttggtggccacaatgtcacgaggctcagcctggtgtcgtggggctgctaaagattccgtagaggctggaaaggtgcctgtcaggggcaccaggaattacrtacaagtctaaggaagctccaggcttaggaaatagtgggataaaccttcctttattatcgcatgggataatcacatttgtgaaatgtagatgtctcaaatttatacaaattgaattctgaaaaacatcagaaaagtttattacaaagcctttttttttgagacaggctcttactctgtcacccaggctggaatgcagtggtacaatcacagctcactgtagcgttgaactcctgggctcacgcgatcctcctgcctcagtctgctgagtaggcgggactagaggtgcacaccacc

SEQ ID NO: 58132 - DNA, 542 bp, Homo sapiens
atgtagctcggggcactgtcaggcctttgtgcccagccaggcgtggaggtgtttgaaaagagagccatcaacacctttccatcggggacttgcgatttttctcttttggttgagtcaactttgaagtttagtagttccttcccacgcttggtggccacaatgtcacgaggctcagcctggtgtcgtggggctgctaaagattccgtagaggctggaaaggtgcctgtcaggggcaccaggaattacgtacaagtctaaggaagctccaggcttaggaaatagtgggataaaccttcctttattatcgcatgggataatcacatttgtgaaatgtagatgtctcaaatttatacaaattgaattctgaaaaacatcagaaaagtttattacaaagcctttttttttgagacaggctcttactctgtcacccaggctggaatgcagtggtacaatcacagctcactgtagcgttgaactcctgggctcamgcgatcctcctgcctcagtctgctgagtaggcgggactagaggtgcacaccacc

SEQ ID NO: 58133 - DNA, 727 bp, Homo sapiens
tgatattgttactcatgctatggttgaaagaatccatattccgggaattattctcctgctgcacttacgagaagccattcctgggctcaaggctctgtgactgttttgagcctgatgttgttctgygtctgtgcctgacaggctgtgtgatgcagtaagaagccctttgtgcttggttacaccgactgtactagcagcactgttgtagttgctaaatagcactaggactttgggtctctaggttaattctctggttttgtccttggagctgatttaagtccatcggctcatttagcaattgtcaggttcttttggaaaatatttctagactcagccattggaaataggttaataaaaagtccccagcctgtaatcccagcactttgggaggccgagacaggcagatcacgaggtcaggagatcgagaccatcctggctgacatggtgaaaccccatctctactaaaaatacaaaaaattagccgggcgtggtggcgggcacctgtagtcccagctatttgggaggctgaggcaggagaatagcgtgaacccgggaagcggagcttgcagtgagcccagatcgcgccactgcactccagcctgggtgacagagcgagactccgaagtccccgaacatggagtactagagttctctagagtacagaataacttagcatgtgcttctcacttagcacattgtgcagtgtttataatggttttaaagaagt

SEQ ID NO: 58134 - DNA, 727 bp, Homo sapiens
tgatattgttactcatgctatggttgaaagaatccatattccgggaattattctcctgctgcacttacgagaagccattcctgggctcaaggctctgtgactgttttgagcctgatgttgttctgcgtctgtgcctgacaggctgtgtgatgcagtaagaagccctttgtgcttggttacaccgactgtactagcagcactgttgtagttgctaaatagcactaggactttgggtctctaggttaattctctggttttgtccttggagctgatttaagtccatcggctcatttagcaattgtcaggttcttttggaaratatttctagactcagccattggaaataggttaataaaaagtccccagcctgtaatcccagcactttgggaggccgagacaggcagatcacgaggtcaggagatcgagaccatcctggctgacatggtgaaaccccatctctactaaaaatacaaaaaattagccgggcgtggtggcgggcacctgtagtcccagctatttgggaggctgaggcaggagaatagcgtgaacccgggaagcggagcttgcagtgagcccagatcgcgccactgcactccagcctgggtgacagagcgagactccgaagtccccgaacatggagtactagagttctctagagtacagaataacttagcatgtgcttctcacttagcacattgtgcagtgtttataatggttttaaagaagt

SEQ ID NO: 58135 - DNA, 568 bp, Homo sapiens
gatcccccacggagtaaacaaagcacagctagactagaattgcctcagtgccctggactggggctaccacggcctgagtgggaccctcagggtcaggtcctcagcttctgtgctcatggctgggaactaactggtgcacggtggagtggccgtagcgttgatgccaaggaagtttcttcagtgggaacaaagaccagggaactcataaagcctctgggctctttatctcaagtggaaaagggctaacatttctgactgagtactggcagccagttgctttacataagttatctttatttgatccatcaggatattgctgtctacattttactgatgaggaagctggagccccgagagcttaactcccttatctgarctcacacagctaggaaggggctggcatctgtccaacctctaagccaaccagcccatgacacagcagtatctgaatttctggctaattcatgaatctctattgtattgcaagaaaggaaaaacaagatccccttatcagaggcaagggaatgatatatgagttttatcgggtggtttataggctctttatcat

SEQ ID NO: 58136 - DNA, 539 bp, Homo sapiens
ttgttttgttttgttgattaaaggtagaacagcaatggtatctccacataggaaacaccaagcctttgtgaccacatgagccgcagcrtcttcatcatggatgaggaagggaaccagttctggaattcgggctcagggtaggtgcatcttaacggaagaagaattagtcaattctgtttccgtggtttactcttcctgtctcctgcagatgaattcattagtttaattaatgagagccctttgccttcctctgcagtgttgcccatggaaatagtggatgatcatggctccctattatgaaatgtggagagcattatttgattaggagcagaacccttttcccccccagaaaatagcctctaggtaagggactggacgctcacacacgatgaagtgtctggtgttcttctctctcattaggtagcatgcccttctcttcctgcctttgcaacagctctaggtaggacccacactgtacaagtgcctcattcgtgacttctgcttcccttgcaggaaggcataaatgttggctgactgtc

SEQ ID NO: 58137 - DNA, 539 bp, Homo sapiens
ttgttttgttttgttgattaaaggtagaacagcaatggtatctccacataggaaacaccaagcctttgtgaccacatgagccgcagcgtcttcatcatggatgaggaagggaaccagttctggaattckggctcagggtaggtgcatcttaacggaagaagaattagtcaattctgtttccgtggtttactcttcctgtctcctgcagatgaattcattagtttaattaatgagagccctttgccttcctctgcagtgttgcccatggaaatagtggatgatcatggctccctattatgaaatgtggagagcattatttgattaggagcagaacccttttcccccccagaaaatagcctctaggtaagggactggacgctcacacacgatgaagtgtctggtgttcttctctctcattaggtagcatgcccttctcttcctgcctttgcaacagctctaggtaggacccacactgtacaagtgcctcattcgtgacttctgcttcccttgcaggaaggcataaatgttggctgactgtc

SEQ ID NO: 58138 - DNA, 2384 bp, Homo sapiens
atcctcattgttacgcaatgcgtgactgtagttgaagagataaagtttttctttgtgcaagtattccagctaatgaaagtagaaatatttaaagtaaaataccattttttgtaatctctaataaaaggtggattttggtattsattattatggctgttaacactacataaacatgaaagagcaaaacaccatataagccatactttgtcaataaactgcatccatgtctgatgcagaaatgtaataaatggtaccagcaagttgcaatttgttaaatccatactttaagatactctactggaaagatgtcacagttttttcaagaagtaaattgcaaagaagtaatacgaggcaatgtgacacatcaaccatttgcaagagatggaatacatttgctttcttattgatataataagcagaaaacaatttatgaaaccatcatagaaatttgaaaaaatagaatatttgactatgatattgagaaactatttaggatattctaggcctgatgatgatatagagtttatttagtgtttatttttttaaaagcattctcctgtttctaagacacagactaaaattgttacaggaatatggtatgatgttggtagctggttcaaaataatctagagtgaaaaaggaagaaagtataggaatatatgtgaaacaatttgaatttatcatacagcattctctttattgtatgttttcaaaatttggcataataaaagtttttaaagtttacaagtttctatttaatccctactgtagtcatattaagggaaaaaacatataatgaaatagcaacaaaatattccataacatatatcaacttgacacaaaccttaggattacttgctttaatgtggaattttaatcatattgtgtttaattttaaatattaatttcttagtgttctgcttagattgaaaaattttttagcactattcattttaagagttgctttattgctagataatggcccataaaataagcataacttgtttaatttacttttcatcgcctacttaccatttaagttttttctacttttcagtgttataaataatactgaaataaatactttttgcatgtaatttttttttaaccaagctcatttattttagggcacatgggtcttttataaatccatctctttggaataattcccaaaatttaaataactgaatataaggtctcatcattctaaatattactgatacatgaagacaaatcactctctgtagatatgaaaaatgcatttggtaacaaaaaattgaactttctgtaacaatcacctaaacagggagtgttctgtttatcttacataatgaaaagttcagggctagtagcatggcaccatgcatggtgtcatcagtaacaagtcccttctatcccttctgccatctctaatgctaccaatggtcatgattggttgctgaagcaccatatctgagggccagactggaataggatggaaggggcaaaactttctttcaaagcattatctttctatgcagataggcggctaattcctaaaagacttccaacttctcaacagtcagaattgtgttgcaaagtcatgcctgactagaaggtatgtaggaaaatatgagtttcattttctaatctgcataaaaaaagataaggtagatgaaaatggaccccgagtgagccaattcatagtataagagcctgggttcaggaatcccaaagtgcaaatgacaaccagtctttggtacaatcagtcacattccacttaataattacatataaaatgctatcttgtttttcagctgtatccattaagctgtcaattagaataattttttatctttattaattttattatttattttctaaattacctatacatgtgttttgtcattacctaactaggtaatttttaaaacatttatatcaacaactttatgggtggcagatgttactgtacttaagaggactgagaggtcagaatctgaaattaagttatctggttttgtgttattgctcaacctcttagcaatcatgcaaacttggaattctcctgggcatatagcaagagttctgtacattttagtttattgttattttcattgtttttgaaataagaagcaatcactagaaaactgaatttttagaaaaaaatgttgagaatttctcgaaataatgttttctactcatcctccatggaaagagctttagctctggatatattttcctactttttggcattcgcaagtttttcataatatactccattatacagtgaactgatgagctcagaaaataccgggtaaactcttcagttttaaagtgttaataatagacatgaagtatcatcattctgctatagaatagtttgatttttaaccaaaaccact

SEQ ID NO: 58139 - DNA, 1011 bp, Homo sapiens
tgcatggggataaattttttctcttgatatactttttctctcatagtctacatttgttatgtatttgtaaaaactgttaggttactatacattaaactagtagtatagaattacttttcctggttgtgtatgaactatattagttttatcaagcatttttttaaatacttcaaaagatttttttcaagataattttttagtgagaacagtacagacgactcactttctatttttatgttgaaatgtgttttcttttactgtgactttgaaacatacttaacctaaatatattcttaaacttaagatttggattcatctatctgtgggatatctacctcctgcatattaatgagtaatgtgttggtgataaatagaaaaaaaaaatcactagatgatttcagtagacattactattgtcaaaaaaaagaaaagaaatatacgataggggaggagctttacccctttatattttagatttttctggttcctgagaaggagtgagggaacctgcatttgagttaaacatgtgccaggcattttacttacattttaaagtcattatttcaaagaagtactatgtgatacatacaaatatatatatatgtatagatagatagatagataatgcctcaagttttatttgtcacttaatgtgctatcttcaaaatgctaatagaagttttaggatggactattgaactgtgttactaagtgaagtctactatacatagtaaatactacgcagtcatacctttataaacgacaaaatctgaccaggctagatctgaatctgttaatttctgagacggtgtgtctgaagtgctcttgcccaaatatctagatagttatgaycagaatgttttttggcttcaattgttagatatttttattcctgaactcagtgatcaagaccatctagtttagggttgtgtgaagacgggaatgaagttattttgtcagtgtgggccctgagtgttcagcaaaactctgtagtgacgagactagtacagc

SEQ ID NO: 58140 - DNA, 1182 bp, Homo sapiens
caacactcatcattcttttttttttccttattgattgaaatcaatcagcttttctttggtttgttttggtttttgagacacagtgttgctcggtcatctaggctggagtacagtggtacaatcatagctcaccacagcctcaactttctgagcccaagcaatcctcccacctcagcctccagagtagctgggactacaggcatatgccaccactttttttcttattgttttttgtttgtttggttggtttttgtttgtcgttggtgttttttgagacagagtatcactttttcacccaggctggaattcagtggtgcaagcttggctcactgcagccctgacatcctggtctcaagccatcttcctccctcatcccccaagtaggtgggacaacaggcccacaccaccacacccacaccaccacacccagctaattttctgtagagacagtgtttcgccatgggcctaggctggtctcgaatcccaagctcaagcaatctgcctgccttggcctcccaaagtgctgggattacaggcatgagccactctgcccagccaccacttgttttttaataacagccatcccactgggtgtgaaatgggatctcaccgtggttctgatttgcacttccctaatgactaatgacatcaagcatctttgcatgcacttgctggcttttgtgtatcttctttggagaaatatctattcaagtactggaatctactcataccaaggctgcatattagtaattagctaaaggcataatttcaggatgctttgtaaatgaaaaggatatgatcatgctattatttaaaattctagctgggcgtggtggctcatgcctataaccccagcactttgggaggctgaggcagatggctcacctgaggtcaggagttcragaccagcctgggcaacatggtgaaaccccatctctactaaaaatacaaaaattagctgggtgtggtggtgtacgcctgtagtcccagctacttgggaggctgaggcaggaaaatcacttgaacctgggagggggaggttgcagtcagccaagattgtgccactgcactcccgcctgggcgacagagcaaaactccatctcaaaataaaataaataaaataaaataaaattctgtttaaactattttcgggaaagtaccctgtagcaggaaggagagaaa

SEQ ID NO: 58141 - DNA, 1182 bp, Homo sapiens
caacactcatcattcttttttttttccttattgattgaaatcaatcagcttttctttggtttgttttggtttttgagacacagtgttgctcggtcatctaggctggagtacagtggtacaatcatagctcaccacagcctcaactttctgagcccaagcaatcctcccacctcagcctccagagtagctgggactacaggcatatgccaccactttttttcttattgttttttgtttgtttggttggtttttgtttgtcgttggtgttttttgagacagagtatcactttttcacccaggctggaattcagtggtgcaagcttggctcactgcagccctgacatcctggtctcaagccatcttcctccctcatcccccaagtaggtgggacaacaggcccacaccaccacacccacaccaccacacccagctaattttctgtagagacagtgtttcgccatgggcctaggctggtctcgaatcccaagctcaagcaatctgcctgccttggcctcccaaagtgctgggattacaggcatgagccactctgcccagccaccacttgttttttaataacagccatcccactgggtgtgaaatgggatctcaccgtggttctgatttgcacttccctaatgactaatgacatcaagcatctttgcatgcacttgctggcttttgtgtatcttctttggagaaatatctattcaagtactggaatctactcataccaaggctgcatattagtaattagctaaaggcataatttcaggatgctttgtaaatgaaaaggatatgatcatgctattatttaaaattctagctgggcgtggtggctcatgcctataaccccagcactttgggaggctgaggcagatggctcacctgaggtcaggagttcgagaccagcctgggcaacatggtgaaaccccatctctactaaawatacaaaaattagctgggtgtggtggtgtacgcctgtagtcccagctacttgggaggctgaggcaggaaaatcacttgaacctgggagggggaggttgcagtcagccaagattgtgccactgcactcccgcctgggcgacagagcaaaactccatctcaaaataaaataaataaaataaaataaaattctgtttaaactattttcgggaaagtaccctgtagcaggaaggagagaaa

SEQ ID NO: 58142 - DNA, 1182 bp, Homo sapiens
caacactcatcattcttttttttttccttattgattgaaatcaatcagcttttctttggtttgttttggtttttgagacacagtgttgctcggtcatctaggctggagtacagtggtacaatcatagctcaccacagcctcaactttctgagcccaagcaatcctcccacctcagcctccagagtagctgggactacaggcatatgccaccactttttttcttattgttttttgtttgtttggttggtttttgtttgtcgttggtgttttttgagacagagtatcactttttcacccaggctggaattcagtggtgcaagcttggctcactgcagccctgacatcctggtctcaagccatcttcctccctcatcccccaagtaggtgggacaacaggcccacaccaccacacccacaccaccacacccagctaattttctgtagagacagtgtttcgccatgggcctaggctggtctcgaatcccaagctcaagcaatctgcctgccttggcctcccaaagtgctgggattacaggcatgagccactctgcccagccaccacttgttttttaataacagccatcccactgggtgtgaaatgggatctcaccgtggttctgatttgcacttccctaatgactaatgacatcaagcatctttgcatgcacttgctggcttttgtgtatcttctttggagaaatatctattcaagtactggaatctactcataccaaggctgcatattagtaattagctaaaggcataatttcaggatgctttgtaaatgaaaaggatatgatcatgctattatttaaaattctagctgggcgtggtggctcatgcctataaccccagcactttgggaggctgaggcagatggctcacctgaggtcaggagttcgagaccagcctgggcaacatggtgaaaccccatctctactaaaaatacaaaaattagctgggtgtggtggtgtacgcctgtagtcccagctacttgggaggctgaggcaggaaaatcacttgaacctgggagggggaggttgcagtsagccaagattgtgccactgcactcccgcctgggcgacagagcaaaactccatctcaaaataaaataaataaaataaaataaaattctgtttaaactattttcgggaaagtaccctgtagcaggaaggagagaaa

SEQ ID NO: 58143 - DNA, 685 bp, Homo sapiens
gaatggaattatatttaaccattaaaggaaatgggagatgggtttctagtcatatttttaccactaattagggtattatctgagcaaatttattagcataaatagcaccaagtgctgtaaaaaaaatctcagaagcttaacatggtaatcaaagattacttttttgtccgtatcacagtcaagtattggtcaggaagaaagttccacttatgtggtcatttagagaccttgactccttccatactgtggctccaccatcttcaatatatgtctttaaaattatcctggtaagagagaagaacaaagattaccctggcatcatccccctgctagacaagaggaagaatactagtcacatagccccatccatgtacgaaggcctgagaaatgtactgttaagctgcgtgtccaggaggagaaaagagctctgatgagctcctagccagcctctgccagaggcarttgttcaacctctggacctgtttcctatcatgacaacaaggggatagatgaggaagtcctgagcatccttgacccagcaagtggtttgaaggtcaaatgctagccctaggacaggagctgttgtttgtttgtttgttttgagacaagatctggctcccttgcccaggctggagtgcagtggtactatctcggctgactgcaacttctacctcccaggctcaag

SEQ ID NO: 58144 - DNA, 685 bp, Homo sapiens
gaatggaattatatttaaccattaaaggaaatgggagatgggtttctagtcatatttttaccactaattagggtattatctgagcaaatttattagcataaatagcaccaagtgctgtaaaaaaaatctcagaagcttaacatggtaatcaaagattacttttttgtccgtatcacagtcaagtattggtcaggaagaaagttccacttatgtggtcatttagagaccttgactccttccatactgtggctccaccatcttcaatatatgtctttaaaattatcctggtaagagagaagaacaaagattaccctggcatcatccccctgctagacaagaggaagaatactagtcacatagccccatccatgtacgaaggcctgagaaatgtactgttaagctgcgtgtccaggaggagaaaagagctctgatgagctcctagccagcctctgccagaggcagttgttcaacctctggacctgtttcctatcatgacaacaaggggatagatgaggaagtcctgagcatccttracccagcaagtggtttgaaggtcaaatgctagccctaggacaggagctgttgtttgtttgtttgttttgagacaagatctggctcccttgcccaggctggagtgcagtggtactatctcggctgactgcaacttctacctcccaggctcaag

SEQ ID NO: 58145 - DNA, 685 bp, Homo sapiens
gaatggaattatatttaaccattaaaggaaatgggagatgggtttctagtcatatttttaccactaattagggtattatctgagcaaatttattagcataaatagcaccaagtgctgtaaaaaaaatctcagaagcttaacatggtaatcaaagattacttttttgtccgtatcacagtcaagtattggtcaggaagaaagttccacttatgtggtcatttagagaccttgactccttccatactgtggctccaccatcttcaatatatgtctttaaaattatcctggtaagagagaagaacaaagattaccctggcatcatccccctgctagacaagaggaagaatactagtcacatagccccatccatgtacgaaggcctgagaaatgtactgttaagctgcgtgtccaggaggagaaaagagctctgatgagctcctagccagcctctgccagaggcagttgttcaacctctggacctgtttcctatcatgacaacaaggggatagatgaggaagtcctgagcatccttgacccagcaagtggtttgaaggtcaaatgctagccctaggacaggagctgttgtttgtttgtttgttttgagacaagrtctggctcccttgcccaggctggagtgcagtggtactatctcggctgactgcaacttctacctcccaggctcaag

SEQ ID NO: 58146 - DNA, 685 bp, Homo sapiens
gaatggaattatatttaaccattaaaggaaatgggagatgggtttctagtcatatttttaccactaattagggtattatctgagcaaatttattagcataaatagcaccaagtgctgtaaaaaaaatctcagaagcttaacatggtaatcaaagattacttttttgtccgtatcacagtcaagtattggtcaggaagaaagttccacttatgtggtcatttagagaccttgactccttccatactgtggctccaccatcttcaatatatgtctttaaaattatcctggtaagagagaagaacaaagattaccctggcatcatccccctgctagacaagaggaagaatactagtcacatagccccatccatgtacgaaggcctgagaaatgtactgttaagctgcgtgtccaggaggagaaaagagctctgatgagctcctagccagcctctgccagaggcagttgttcaacctctggacctgtttcctatcatgacaacaaggggatagatgaggaagtcctgagcatccttgacccagcaagtggtttgaaggtcaaatgctagccctaggacaggagctgttgtttgtttgtttgttttgagacaagatctggctccmttgcccaggctggagtgcagtggtactatctcggctgactgcaacttctacctcccaggctcaag

SEQ ID NO: 58147 - DNA, 685 bp, Homo sapiens
gaatggaattatatttaaccattaaaggaaatgggagatgggtttctagtcatatttttaccactaattagggtattatctgagcaaatttattagcataaatagcaccaagtgctgtaaaaaaaatctcagaagcttaacatggtaatcaaagattacttttttgtccgtatcacagtcaagtattggtcaggaagaaagttccacttatgtggtcatttagagaccttgactccttccatactgtggctccaccatcttcaatatatgtctttaaaattatcctggtaagagagaagaacaaagattaccctggcatcatccccctgctagacaagaggaagaatactagtcacatagccccatccatgtacgaaggcctgagaaatgtactgttaagctgcgtgtccaggaggagaaaagagctctgatgagctcctagccagcctctgccagaggcagttgttcaacctctggacctgtttcctatcatgacaacaaggggatagatgaggaagtcctgagcatccttgacccagcaagtggtttgaaggtcaaatgctagccctaggacaggagctgttgtttgtttgtttgttttgagacaagatctggctcccttgcccaggctrgagtgcagtggtactatctcggctgactgcaacttctacctcccaggctcaag

SEQ ID NO: 58148 - DNA, 676 bp, Homo sapiens
acttttattttcttctagcttgccgctgggtgtgctagtcccattaattaaatggtgcttccttttaccctgaaacaaatgaagcttggtcgtaccttcttgcttatcctgaggccattttgtrgttttctgtcccaacccatggggtgttgtcaatgtgtgaacagtggcagggttgtctcatcttgcatgagtatttatcctcccttaaaaatgtcaacattaattctacccaccaagaccacaccaaaacccccaaaactttattgggaatctaatgaaatggcattcgacttaaagataaatttcaggaaaattaacatttttaaattgaaagttcttatccagaaaaatgtgtctgttttgtgtctttaaataagattttatcatttttttccatagggattgtattagtcaggctctgacctggaaactggaaatctctctagatctttcaagcagagggaatttaatgcaaggaactgattgtaggggttaatctgtatggtggtgaggatacttctaccccagggctgggcctggagggtcagtgtggagcatgctctaatcatattaagacttcagccccatctgggaccatggagaaaggggctttcaggtgggagcccacaaccaccgaggagacccagctgcagctggaggtcccactggaaca

SEQ ID NO: 58149 - DNA, 676 bp, Homo sapiens
acttttattttcttctagcttgccgctgggtgtgctagtcccattaattaaatggtgcttccttttaccctgaaacaaatgaagcttggtcgtaccttcttgcttatcctgaggccattttgtggttttctgtcccaacccatggkgtgttgtcaatgtgtgaacagtggcagggttgtctcatcttgcatgagtatttatcctcccttaaaaatgtcaacattaattctacccaccaagaccacaccaaaacccccaaaactttattgggaatctaatgaaatggcattcgacttaaagataaatttcaggaaaattaacatttttaaattgaaagttcttatccagaaaaatgtgtctgttttgtgtctttaaataagattttatcatttttttccatagggattgtattagtcaggctctgacctggaaactggaaatctctctagatctttcaagcagagggaatttaatgcaaggaactgattgtaggggttaatctgtatggtggtgaggatacttctaccccagggctgggcctggagggtcagtgtggagcatgctctaatcatattaagacttcagccccatctgggaccatggagaaaggggctttcaggtgggagcccacaaccaccgaggagacccagctgcagctggaggtcccactggaaca

SEQ ID NO: 58150 - DNA, 547 bp, Homo sapiens
tgaagctgcctcattcttctttgcctctcccaattttcctgaaagaaccacttgggagggatgagaaacagaccaacctcaagaaccattagacagcaccatggggagagtgagaacgttgggccttgtgtttggtggtgttccacattgagagcggattgaaactgctgtcaacagcctgtgtcaatgagctagaagggagggggctcaaatctcagaagggagaatgctgaagcacatctggcatttccttcagtttgggaaacgagggaaatttcagaaaagaacacataggcagatgtctgagttacaaaggacaaattccaatcatcaacttacatggatgctttacctcttttaatactttttttcattctaaaaataatacatgtgtgtttggaaatcacaygaacataaaaaaagtacctaaagacaaccattattaacaactttaagtatgtatgtgtgcatacactttatacaatacataaagtgtgtatatacatatggtatacacacatataatattacatatattttatttatt

SEQ ID NO: 58151 - DNA, 822 bp, Homo sapiens
gggttttgattgggagtcagccgtgtgggtgtggttgactgaccatgtagctgaccttagtctccaggccctccataagttgagctgctactgtgtggcccaacgtcccccaagccacatatcaattggcatacacgatcttggtggcccaaggcccccagataaacaaaggcaccttatcttatcaggcaggatattccaggcttagaggttaccacccaggagttgagcaaccaccaaacatttctctggacaaagttaatttttttttttttgagaaaaagtctcattgtgtcacccatgctagagtgtagtggcatgatcagagctcactgcaacctccgtctcccaggttcaagcaattctccagcttcagcctcccaaggagctgggactacaggtgcctgccaccacgcccagctaattttttgtatttttagtagagacgaagttttgccatgttggccaggctggtcttraactcctgacctcaagtgatccacctgcctcggcctcccaaagtgctggaactgcaggcctgagccaccgcacttggccagtgaatcctttaccgcataattgtgatcatacattttatgttaaaaaagctttatcatttgtcccatttatgttttctcaaaggtcactctggctattatgtggaaaacggaagcaagagtggaatcgggaacaccagggaggaggtgctgcagttatctgggagacgactgatgataatattatccttgaggctgtcagccattgctatgtgccagacactgtgacaagcgctatacatgaaatatcacatttaagcatgca

SEQ ID NO: 58152 - DNA, 822 bp, Homo sapiens
gggttttgattgggagtcagccgtgtgggtgtggttgactgaccatgtagctgaccttagtctccaggccctccataagttgagctgctactgtgtggcccaacgtcccccaagccacatatcaattggcatacacgatcttggtggcccaaggcccccagataaacaaaggcaccttatcttatcaggcaggatattccaggcttagaggttaccacccaggagttgagcaaccaccaaacatttctctggacaaagttaatttttttttttttgagaaaaagtctcattgtgtcacccatgctagagtgtagtggcatgatcagagctcactgcaacctccgtctcccaggttcaagcaattctccagcttcagcctcccaaggagctgggactacaggtgcctgccaccacgcccagctaattttttgtatttttagtagagacgaagttttgccatgttggccaggctggtcttgaactcctgacctcaagtgatccacctgcctcggcctcccaaagtgctggaactgcaggcctgagccaccgcacttggccagtgaatcctttaccgcataattgtgatcatacattttatgttaaaaaagctttatcatttgtcccatttatgttttctcaaaggtcactctggctattatgtggaaaacggaagcaagagtggaatcgggaacaccagggaggaggtgctgcagttatctgggagacgactgatgataatattwtccttgaggctgtcagccattgctatgtgccagacactgtgacaagcgctatacatgaaatatcacatttaagcatgca

SEQ ID NO: 58153 - DNA, 822 bp, Homo sapiens
gggttttgattgggagtcagccgtgtgggtgtggttgactgaccatgtagctgaccttagtctccaggccctccataagttgagctgctactgtgtggcccaacgtcccccaagccacatatcaattggcatacacgatcttggtggcccaaggcccccagataaacaaaggcaccttatcttatcaggcaggatattccaggcttagaggttaccacccaggagttgagcaaccaccaaacatttctctggacaaagttaatttttttttttttgagaaaaagtctcattgtgtcacccatgctagagtgtagtggcatgatcagagctcactgcaacctccgtctcccaggttcaagcaattctccagcttcagcctcccaaggagctgggactacaggtgcctgccaccacgcccagctaattttttgtatttttagtagagacgaagttttgccatgttggccaggctggtcttgaactcctgacctcaagtgatccacctgcctcggcctcccaaagtgctggaactgcaggcctgagccaccgcacttggccagtgaatcctttaccgcataattgtgatcatacattttatgttaaaaaagctttatcatttgtcccatttatgttttctcaaaggtcactctggctattatgtggaaaacggaagcaagagtggaatcgggaacaccagggaggaggtgctgcagttatctgggagacgactgatgataatattatccttgaggctgtcagccattgctatgtgccagasactgtgacaagcgctatacatgaaatatcacatttaagcatgca

SEQ ID NO: 58154 - DNA, 1052 bp, Homo sapiens
agcttttagagcgggggaggataaagaagaaagaaagaaaatgaaagacttaagaagaggcagcaaaggtttcaccaatcattatatcattgagagggctcaaactacagatgaagttagaatacagatgattgtagaaagggtatttaaaattattaactgatcaaatatttgtagttgtcattaaaaaaaaaatacaacttagcaattcagttcagaaagaagaatatccccaggaacatacacatctgtttaatattacaagccaactgtcaacatcctaagtgaagttttaatttaatattttttctttcttgatgttttacctttaatcaatgcctcatgagagtatcaactttctataagaaactgttaaatataaagaaatgttattgtagcatgtttataaaatcatagttcgagaactttttatttttccaaagcctgaccacaacttaattatctgcaggacattccaggctcacaattgcaagctccagttcccaagcaattttaaacaatatctactgtacaggacagagggtacacaaaagaccgcaacatggttatatttccaaaagtcagcattaggccctttagacatggtttttattttcattaaacaatatttgtttcctcactaatcattaaatggttttcatcactattgcctgctttcctttcacatgtcagttgttagcatcagtgtttgtgttcataataaatataaaagtaatccaccccatcatttaaaaatgaacacacacgacgtctggttcaatgagtgttaagagacttagcaatatactcacaccctgaatactgatctattttaatctagacacttaaaaaaacgtaatggagtaatagactatacagccctctcctttaaatcagatttaagcttcgtgcctgcttatgttattgtgggcacacagatctaatcagtggttcaagacatttacttgggaaaatgaaagaagaagacagtaagttcatatcccygaccataatggggaggagttgagaatattgccaattcctttagatgc

SEQ ID NO: 58155 - DNA, 676 bp, Homo sapiens
atgaaaatgttctgaattggtgggaatggttattacacaacatggtgaatatacttcgaactactgacttgtatactttaaaatgataaattttatgttgtgcgaatgacattgcaataaaatttactctaaaaacaaatgtggtaaattaaaataaagtgtgattagggcaatggcaggttactcaggggagggaataactaaagtgtagggccagcaggagggcagggagggcttcctggagggagtgagacctaggttgaattttgcaggatgagtaggagtttatcaggcaatgagaacagcccaagcaaagacacggctgatctgttcagagaatgagaagctgctcatcttggcggggggagagtgggtatgccaggagcaccaggagtgaagctgggcaggggactgtcaccctgctgagaccagagatacatcatccagccccaggcctattctcttgctctgtgcttttccacacttgtgatttttattcaattattygtgtaactctgcaatcagggggtctgcctgctagactgtcagctctaggagggtggctgctgggtctgtctgttcaccatcctggcccagcagctaacttagtgcaggccaagagggagccttaggagcttatgctctcccaggctcccccattataccccacagccct

SEQ ID NO: 58156 - DNA, 497 bp, Homo sapiens
tggttagtttattagtactggtgagaacccaataagttggatgctatcatctccgtcttttggaattggaatagaaatagaatcaaggttaaatgacttgcccagggtgtcacaggtcgtaaatgtggatgtgtgttggaaccatggtcaggaccgtaagatggaaggcagtttctacacctagggattctcagtctagttgggagatggacgcctgtgcacctgacatgacaacattgtaagtgccgcggaaactcggggcagagacctgccctggggaggcaggagtggtttcctttaaggtgagatcttgagggataaagaattcaccaggctaagtgggtaagaaatggccttctacatatttgaacsttgcgtctagagctttaggcacaactgcgaaatgatcagaagttgggccagaggtggatcacgttgattagacttattagttggaagggttggttagggctgaatttcgaaggggtggtcctttg

SEQ ID NO: 58157 - DNA, 1990 bp, Homo sapiens
acctgccccatgagccctcctgctgccgtggagagtcattcacatcctggctatccttgcctcctgccaccttgcacacttaggtgtccccaactgtgatcccatgcatcttactgacttccactgcctacagcaggggccagaggtacaggcactcacagggccagcgctggggtccaggaatgccctgatagggtatggaaaccctgacccccatggtcacctgctgttcagcggcagcctcatgtggccaggcagcaaggcacccagtgmgggcagcacgattttttttttttttttttggagatggagtcttgctctgttgcccaggctggagtgcaagtggcatgatctcggctcaccacaacctccgcctcccgagttcaagcaattctcttgcctcagcctcctgagtagctgggattacaggtgtgcaccaccatgcccggctgatttttgtatttttagtagagttggggtttcactaggttggccaggctggtcttaaactcttgacctcatgatccgcctgccttggcctcccaaagtgctgggattataggtgtgagccatcgcgcccagccagcttgatttttaaaaaagaaacttcacgtggaatttggagtgaaatctcctagtttttaaattaaataaaaagacttttaagcattgtgtgggctgaatgaacggatctgccagtgaccttcccccgattcccagtgtgtgaagcccctggcccccagtgcaagccctttgtaacctccctcatctctgcacgttcacatgcgttggggagccagaggaggcaccggcctgccctccaccactgcctggaggggaaagtagagctggcaaaaattacaggaagccagctctgtccatggtgacatatgaggcacggatttattggttctgcaaccagggaatcatagcagtcctaaactctaagtggaaaataaatatgcatccttccctgccatcagccggccgttgttgagccacaccaacgcctgttctgctcgcccacctgggcttctcagctgtcaagcccccaggcccccaggcattcaggcacttctctcaagctccctgggctcagggcgcacccactttcctgaagccctgcagctgtgctaagacctgctcctctcctagaacagaaaataggtggtgctttgttgggcctatacagtgttgtaaaaatcaagaaaggtcacctaaaaatctgaatttggggtctctcttatagagcactataagatctaacacaaccaattccattccccattgttctgtgcccccttcttctgtaatcacctcatcttcccccatcttggctgcgcacaccccaccccattgtcctggaccactagcttcgagatgttctgaaagttggatttgtaacacagcccagtaaacagacacaaacgtgcaacaactctcctgacaccatattcagcttcaccatgtgtgacatactctgagattttccaatccattccattttgttctgttctatttttttttttttttagatggagtcttgctctgttgctcaggctggagtgtagtggcacaatttcagttcactgcaacctccgcctcccaagtttgagtgattctcctacctcagcctcccaagtagcacactaccatgcccagctaattttttttttttttttttgagatggagccttgctctaatgcccaggctggaatgcagtggcacaatctcggctcactgcaatctccgcctcccaggttcaagcaattggctgggattacaggcacgcgccaccatgcctggctaatttttctatttttagtagagacggggttttgccatgttggccaggctggtctcaaactcgtgaccacaggtgatctgcccgcctcggcctcccaaagtgctgggattacaggcatgagccaccgcaccctgtctgttctattctattccattccattctgttcccttccattttggatc

SEQ ID NO: 58158 - DNA, 1129 bp, Homo sapiens
aattaataaatccttccttttttttctacttattctactattttgtatgaagaatgttgaaagtatttaattttgtaatcagtttrttgattttagcatggcccagtaagatgttggctgaagaattaacatcctcagtagtggatatagtgagttcctccagcccctgttctttttttgcacgattttgagagcatctttgtattatttacagttacatcatattaaaaggaaacataaactcatgttgtacaagttaaatatagctataagtataaaaatagcaaagagtgagtaacagaactgtagcatcatgctagccaagagtgagatacacaatgaatgtgcgtgtacatacttgtttgctcttagatctgttctcctcctttccaattgaagggaccaatccttcatgtatgttgcctgccaactccggttacactgggtagtttggccagtggaaggtacagattaagagattggttggaactggggagctagggtgttcctatctcactgtatgtgaagtagcatacagacacattaatttggacaaactgataactgtgcaattttgccttaactattcttatgaatggtcttatgtcaccatttagacattttatagctctcagaaaaaaatacctggaagtttttcatgtaaataattcctatgtttcctttttattccaaaggcttttttgaaaaatttcctttgagaggcccagtagtgcaatcataactcattgtagcctggaactcctgggtccaagtgatcctcccaccttagcctcctgagtagctgggactaaaggcgcatacgagaacgcccacttccaaagatttttatgcttagtcacaggagtgcatggaattttcctccattacatcatactctattcattttagggaatctattgacttcatttattttgttgtagttattcttattagactctaattcaatttaattttataattaaacattataatttaattttatattttgctgattattattctaagtatttcaaatgaagagagaaaatgtttataaataataaaaaaattttctctcctttacaatggtattttcctcattagtttatatgaaatattgcaattgtaa

SEQ ID NO: 58159 - DNA, 1129 bp, Homo sapiens
aattaataaatccttccttttttttctacttattctactattttgtatgaagaatgttgaaagtatttaattttgtaatcagtttgttgattttagcatggcccagtaagatgttggctgaagaattaacatcctcagtagtggatatagtgagttcctccagcccctgttctttttttgcacgattttgagagcatctttgtattatttacagttacatcatattaaaaggaaacataaactcatgttgtacaagttaaatatagctataagtataaaaatagcaaagagtgagtaacagaactgtagcatcatgctagccaagagtgagatacacaatgaatgtgcgtgtacatacttgtttgctcttagatctgttctcctcctttccaattgaagggaccaatccttcatgtatgttgcctgccaactccggttacactgggtagtttggccagtggaaggtacagattaagagattggttggaactggggagctagggtgttcctatctcactgtatgtgaagtagcatacagacacattaatttggacaaactgataactgtgcaattttgccttaactattcttatgaatggtcttatgtcaccatttagacattttatagctctcagaaaaaaatacctggaagtttttcatgtaaataattcctatgtttcctttttattccaaaggcttttttgaaaaatttcctttgagaggcccagtagtgcaatcataactcattgtagcctggaactcctgggtccaagtgatcctcccaccttagcctcctgagtagctgggactaaaggcrcatacgagaacgcccacttccaaagatttttatgcttagtcacaggagtgcatggaattttcctccattacatcatactctattcattttagggaatctattgacttcatttattttgttgtagttattcttattagactctaattcaatttaattttataattaaacattataatttaattttatattttgctgattattattctaagtatttcaaatgaagagagaaaatgtttataaataataaaaaaattttctctcctttacaatggtattttcctcattagtttatatgaaatattgcaattgtaa

SEQ ID NO: 58160 - DNA, 729 bp, Homo sapiens
caggctggttgggcatgggatgccaaggagaaatggagctctgggaaagacctagtgtagtttagccgtgagagaatcaacagatccatcactcagcaaattgcccaagccaaaaactcaggtctgcttatcaaataaaaaccattatttataattatacatgacattgaaaagaatcacagaaaaggaagagcgatttaatcatctgtaagaaatatatttgcctgtagattctttttggaagaaaagagaaaattgatagtacaaatgagtggagagatagtaattgcacctagtgagaaaacctacgctacagataaccaagaactcactcaggggctgaagccagatgacctgggctcaaatggggcttcaccatttattagctgttttaaccttagacaagtcacctcacttcctgaatctcagttttgtcatgtraaactgggataaccgtaagtcctactttgtaagcttatcataattaaacaaattataattatggagcacattagagcaatggctggcgttttcatcaaaatcaaaggtagaaaaacgcaacacatttcaaaagcagccacatctagtttatggaagctttgggttgatgggtgcatgcagcaaaccaccatggcacttgtacacctatgtgacaaacctgcacattctgcacatgtatcccagaactcaaagtaaaattaaacaaacgaacaaacaaacaatgccact

SEQ ID NO: 58161 - DNA, 729 bp, Homo sapiens
caggctggttgggcatgggatgccaaggagaaatggagctctgggaaagacctagtgtagtttagccgtgagagaatcaacagatccatcactcagcaaattgcccaagccaaaaactcaggtctgcttatcaaataaaaaccattatttataattatacatgacattgaaaagaatcacagaaaaggaagagcgatttaatcatctgtaagaaatatatttgcctgtagattctttttggaagaaaagagaaaattgatagtacaaatgagtggagagatagtaattgcacctagtgagaaaacctacgctacagataaccaagaactcactcaggggctgaagccagatgacctgggctcaaatggggcttcaccatttattagctgttttaaccttagacaagtcacctcacttcctgaatctcagttttgtcatgtaaaactgggataaccgtaagtcctactttgtaagcttatcataattaaacaaattataattatggagcacattagagcaatggctggcgttttcatcaaaatcaaaggtagaaaaacgcaacacatttcaaaagcagccacatstagtttatggaagctttgggttgatgggtgcatgcagcaaaccaccatggcacttgtacacctatgtgacaaacctgcacattctgcacatgtatcccagaactcaaagtaaaattaaacaaacgaacaaacaaacaatgccact

SEQ ID NO: 58162 - DNA, 729 bp, Homo sapiens
caggctggttgggcatgggatgccaaggagaaatggagctctgggaaagacctagtgtagtttagccgtgagagaatcaacagatccatcactcagcaaattgcccaagccaaaaactcaggtctgcttatcaaataaaaaccattatttataattatacatgacattgaaaagaatcacagaaaaggaagagcgatttaatcatctgtaagaaatatatttgcctgtagattctttttggaagaaaagagaaaattgatagtacaaatgagtggagagatagtaattgcacctagtgagaaaacctacgctacagataaccaagaactcactcaggggctgaagccagatgacctgggctcaaatggggcttcaccatttattagctgttttaaccttagacaagtcacctcacttcctgaatctcagttttgtcatgtaaaactgggataaccgtaagtcctactttgtaagcttatcataattaaacaaattataattatggagcacattagagcaatggctggcgttttcatcaaaatcaaaggtagaaaaacgcaacacatttcaaaagcagccacatctagtttatggaagctttgggttgatgggtgcatgcagcaaaccaccatggcacttgtacacctatgtgacaaacctgcacattctgcacatgtatcccagaactcaaagtaaaattaaacaaacraacaaacaaacaatgccact

SEQ ID NO: 58163 - DNA, 1393 bp, Homo sapiens
tcagcctcccaaagtgctgggattacaggcatgagccaccacgcccgccctcatgttgggttttgatgcttttactggtcacagcattttgtggttcaaccaggaggcataatgcatttttaaattttgttcctgaataattttgcatggtgtgtgttgataagctaatttcagtctgccccgttgccttctctggccattgagctggggatgtggagaatgaggagtgttctatggatggtgagacgggtcccgagcaacatcaccctcagtccggtcctgcctttgaaacaaacagtgtccatggagggggcggaggaggctgagcaggaagaacggaatggccagcctggcttcctcctggtcctggctctgccgccagcacctgctggtctggcytcagttttctcagcaggagaatgggtgcatctgataaagtcacattgcttctggcacagacttcagcaaaggcagccggcaggatgggagatggtgtacacacacatgtgagagagtgtgtgcccatcgtcacggcagccactccccacaggctgtgtcacatagacctcaggaggtggcttctgacaaaaactgaagatcggaggctcttctgtccctgctgcatgcctgtacatggtggccttttgccttcagtgttttccccttgctccatgaagtggatcctgaacccttgtgagccgtcgagaatgagaggttctttttagttcctttatggaggtaaaatacaggtaacataaagttaacgtttttttttttttccccgagagagagtttcactcttgttgcccaggctggagtgcattggatggtcttggctcactgcaacctctgcctcctgggttcaagtgattttcctgcctcagcctcccgagtagctgggattacaggtgcatgtcaccatgcctggctaatttttgtatttttagtagagacagggtttcaccatgttggccaggctggtctcaaattcctgacctcaggtgatccacctgcctcggcctcccaaagtgctgggattacaggtgtgagccaccgtgcccgtcctgtgcaagagtttttatagagcttaatctccggtaccttccggagctcagctagtggggccagaagttcccaccttcttagacacctgtgttcctggtgaccagtcccagtctgagactggggccccccaccctaagtcacctcattagcataagctccagtggggtcaaaagggactcacttctgctactcaggaaattctaagggtattaggatctctgtgctgggaactggggacaaagcccagtgtatttcttatcccacagaggatgattcgtgttgtagcgtggatcagtgcctccttcctttttatggctggagatactcc

SEQ ID NO: 58164 - DNA, 650 bp, Homo sapiens
tgctcaggctggagtacagtggcatgatcttggttcactgcagcctctgcctcccgggttcaagcaattttcctgcctcagcctcccgagaagctgggattacagacgtgcaccaccacgcccagytaatttttgtacttttagtagagatggtgttttgcatgttggtcaggctggtctctaactgctgacctcaagtgatcctcccgcctcagcctcccaaagtgctgggattacaggcatgacccactgtgtctggcctgcaggccaacattttaaatagttcagtaattcagttattcgctactgggggaaggagcatccccctttaacagatgccgttaaaatttcctagaacccagttgcggatttcttagagaatttgttgagatataatttacataacattgtgattcaccctttgaaaacctgcagtgccgtgttttttagtaaattagggagattgtgcaaccatcggagtcgatttaggaacatgtttattcccccaataaagacgccaaaaccatcagcattgctccccactctgatcttccctcctcttcccagcccctggcaacgactaatctgtctcccgtcttggtgagtttgcccattctgagcatcttacgtaaatggaatcgtgcaaaatg

SEQ ID NO: 58165 - DNA, 650 bp, Homo sapiens
tgctcaggctggagtacagtggcatgatcttggttcactgcagcctctgcctcccgggttcaagcaattttcctgcctcagcctcccgagaagctgggattacagacgtgcaccaccacgcccagttaatttttgtacttttagtagagatggtgttttgcatgttggtcaggctggtctctaactgctgacctcaagtgatcctcccgcctcagcctcccaaagtgctgggattacaggcatgacccactgtgtctggcctgcaggccaacattttaaatagttcagtaattcagttattcgctactgggggaaggagcatccccctttaacagatgccgttaaaatttcctagaacccagttgcggatttcttagagaatttgttgagatataatttacataacattgtgattcaccctttgaaaacctgcagtgccgtgttttttagtaaattagggagattgtgcaaccatcggagtcgatttaggaacatgtttattcccccaataaagacgccaaaaccatcagcattgctccccactctgatcttccctcctcttcccagcccctggcaacgactaatctgtctcccrtcttggtgagtttgcccattctgagcatcttacgtaaatggaatcgtgcaaaatg

SEQ ID NO: 58166 - DNA, 1324 bp, Homo sapiens
ttcatcctggtgggctgaggaagacacctcctggaggsgtctgctgaaatgaggctaatttactgtttccactttttcttcaaaaatggggaaaatctcatcagggccattgcagctgacttgacagaacagtcacactagaagtaaggctgagctgcccatctcaattattccaacattaattaggaaggaaacagaacaccagcaggaatttgcctaaagcaattgattaattgtctcaagatttccaaggccgttacaaaaagtggaaaatcccaggttttgaaacgagacagacttgaattattaataatagctcttcccttcactggttgagttcccaccagaagccagtttctttatttttaaatagaggggaacagtctgtaccttccagtttgttcgaggattaaatgggagcgtctatttaaagccactgcacagtgactgccactcagaaagggcttggcgacctgaggccgtcagcactgcctgtgtctttccttggcccctgcagccttgcggtcctggccatcactctctgtggagtgggacagggcatccagcctcactttgctgatgccctcggctgccgtctctgcaggcacacgtctgtgccacagaaactggcacactgcgggtcagcctcgagtgcatgagggtgttttacttcctaattagcaaaggcatagctcttgttaaaatactggcagatcgaatgtctcattaccttttattcattactggcttctaattattctgaattgtttcttaattagagtctgtccggtggaaaatagatgtgaacagagtgagacgcagggcagacctctggggtgaaacggacagtggagggtccctcagagatggtctttgtcatcagtggggatgcttcattgggaggttctgtttccctgccagaacccgcccaggcccacttctccagcccctgaggaagtgccactctccatggctcccagggaggacaagccatggcctattgggagaaattcttagcagacttccagtcccggcaggaggcctccctggcgcaggggtgagtagagcctgtggcagtggtgtctccttacccggggtctcctccagggttcctctcccaatccttctgcaagtgaaagcctcatgccccgccccccccccaccctatagggcatgactccaggaaggagtgtgactcttagtccctaccttcagtttgtattaaagatcctattcttaccaggggactcaagatgtttcttattacatctcattgctaattgtcaataagaggttatttccctatcacttcgacagtatgcat

SEQ ID NO: 58167 - DNA, 1324 bp, Homo sapiens
ttcatcctggtgggctgaggaagacacctcctggaggcgtctgctgaaatgaggctaatttactgtttccactttttcttcaaaaatggggaaaatctcatcagggccattgcagctgacttgacagaacagtcacactagaagtaaggctgagctgcccatctcaattattccaacattaattaggaaggaaacagaacaccagcaggaatttgcctaaagcaattgattaattgtctcaagatttccaaggccgttacaaaaagtggaaaatcccaggttttgaaacgagacagacttgaattattaataatagctcttcccttcactggttgagttcccaccagaagccagtttctttatttttaaatagaggggaacagtctgtaccttccagtttgttcgaggattaaatgggagcrtctatttaaagccactgcacagtgactgccactcagaaagggcttggcgacctgaggccgtcagcactgcctgtgtctttccttggcccctgcagccttgcggtcctggccatcactctctgtggagtgggacagggcatccagcctcactttgctgatgccctcggctgccgtctctgcaggcacacgtctgtgccacagaaactggcacactgcgggtcagcctcgagtgcatgagggtgttttacttcctaattagcaaaggcatagctcttgttaaaatactggcagatcgaatgtctcattaccttttattcattactggcttctaattattctgaattgtttcttaattagagtctgtccggtggaaaatagatgtgaacagagtgagacgcagggcagacctctggggtgaaacggacagtggagggtccctcagagatggtctttgtcatcagtggggatgcttcattgggaggttctgtttccctgccagaacccgcccaggcccacttctccagcccctgaggaagtgccactctccatggctcccagggaggacaagccatggcctattgggagaaattcttagcagacttccagtcccggcaggaggcctccctggcgcaggggtgagtagagcctgtggcagtggtgtctccttacccggggtctcctccagggttcctctcccaatccttctgcaagtgaaagcctcatgccccgccccccccccaccctatagggcatgactccaggaaggagtgtgactcttagtccctaccttcagtttgtattaaagatcctattcttaccaggggactcaagatgtttcttattacatctcattgctaattgtcaataagaggttatttccctatcacttcgacagtatgcat

SEQ ID NO: 58168 - DNA, 752 bp, Homo sapiens
gtgtgtgtgtgtgtgttttcctttccatatggggcttctcatcagctcattacagttctggcaccttcctgtctctgaatatggaacagaaaacactttcagtgcagttttctctgagaggagagagaaagagggagacaggaagagaagaggtgtctgaaaccgctgaaggatctggaagcaggtttatgttaactcatatcttttctttaacgatggtcaaatgtttctgattgccctttgccattccgcacttgtgtgtctgttggggttatggatgggaagagtcggtagatgagaaacagtaaacaggaagttttccaaaagatactaggatcrttaagtcctgtgtgaaaaactgaagttaaatggcctagggaaggggagccgttccctgtcattcagaaaagtcatctggctacagtggagcataatatctagtcagaaatattattcttctaaaagctgcagttttatgtagacggaaataagggagaaggaacagaatcaggctatggacttgaatattgccacaaaaaatggattgggttgggggtggtcaggaagaggaggagaggggaaaatgggatgaaatacaaaacaaaacaaagctgaaacacccaggagagtcccaacctcttagcttgtaataagtcagcttttgttagcttggcttttgagtattaagcactcagttcatctccattgatttgtaatgaggctgggaggctcacaaagccttaatcaagcca

SEQ ID NO: 58169 - DNA, 752 bp, Homo sapiens
gtgtgtgtgtgtgtgttttcctttccatatggggcttctcatcagctcattacagttctggcaccttcctgtctctgaatatggaacagaaaacactttcagtgcagttttctctgagaggagagagaaagagggagacaggaagagaagaggtgtctgaaaccgctgaaggatctggaagcaggtttatgttaactcatatcttttctttaacgatggtcaaatgtttctgattgccctttgccattccgcacttgtgtgtctgttggggttatggatgggaagagtcggtagatgagaaacagtaaacaggaagttttccaaaagatactaggatcgttaagtcctgtgtgaaaaactgaagttaaatggcctagggaaggggagccsttccctgtcattcagaaaagtcatctggctacagtggagcataatatctagtcagaaatattattcttctaaaagctgcagttttatgtagacggaaataagggagaaggaacagaatcaggctatggacttgaatattgccacaaaaaatggattgggttgggggtggtcaggaagaggaggagaggggaaaatgggatgaaatacaaaacaaaacaaagctgaaacacccaggagagtcccaacctcttagcttgtaataagtcagcttttgttagcttggcttttgagtattaagcactcagttcatctccattgatttgtaatgaggctgggaggctcacaaagccttaatcaagcca

SEQ ID NO: 58170 - DNA, 752 bp, Homo sapiens
gtgtgtgtgtgtgtgttttcctttccatatggggcttctcatcagctcattacagttctggcaccttcctgtctctgaatatggaacagaaaacactttcagtgcagttttctctgagaggagagagaaagagggagacaggaagagaagaggtgtctgaaaccgctgaaggatctggaagcaggtttatgttaactcatatcttttctttaacgatggtcaaatgtttctgattgccctttgccattccgcacttgtgtgtctgttggggttatggatgggaagagtcggtagatgagaaacagtaaacaggaagttttccaaaagatactaggatcgttaagtcctgtgtgaaaaactgaagttaaatggcctagggaaggggagccgttccctgtcattcagaaaastcatctggctacagtggagcataatatctagtcagaaatattattcttctaaaagctgcagttttatgtagacggaaataagggagaaggaacagaatcaggctatggacttgaatattgccacaaaaaatggattgggttgggggtggtcaggaagaggaggagaggggaaaatgggatgaaatacaaaacaaaacaaagctgaaacacccaggagagtcccaacctcttagcttgtaataagtcagcttttgttagcttggcttttgagtattaagcactcagttcatctccattgatttgtaatgaggctgggaggctcacaaagccttaatcaagcca

SEQ ID NO: 58171 - DNA, 1127 bp, Homo sapiens
tcattctcagcaaactattgcaaggacaaaaaaccaaacactgcatgttctcatttataggtgggaattgaacaatgagaacacatggacacaggaaggggaacatcacactccggggactgttgtggggttgggggagtggggagggatagcattaggagatatacctaatgctaaatgacgagttaatgagtgcagcacaccaacatggcacatgtatacatatgtaacaaacctgcacattgtgcacatgtaccctaaaactgaaagtataataaaatttttaaaaaagtatagaatgactacaaacatctgggttcatttcacattgggttctctgctacaaaactagtgttatctgcatggtttctaggcttgtgagcttgctctttcctaatccagtgccaggcttttttccctctcattgcctctttcctattgtgagctcctgttgttctgccaayaaactactcctgttttcaaggtggccaaagtcagtgtttcttgtaacaagagaggcatggatgaaactaataatagaaattgagaagacagcacaagtggtgggataacaattgacactgggaaacaaccaggggtataactgacacagctgggaagctcaaagagtaactacagtctcaccaagatagaaggacgggagatccacttacaaatatgtgctaatcacacacacacacacatacattttaaatatgtatagttataattggcatatctaattcctaggtcattccccacttaaatatttattctactttctcatgaaaaaatatgcaattttgaaaatgatcccttttttattggaaagtcagagacaagggatacactcagaacacaaggtcctttgttcagagagttttgtgtgtgaaacggtaaaacgagctcttgctacttagaaaggcgggtggtaatagggcctgaatttattatttaggtgcacaaagaacaggagaaaacaaatgacattgaaaatttccttcctccagaagtttgctgaaacttttttagagcttatctattaaacagctggagttcctaacttgtcagcttatgttaattatgagttatctcacctcattttattttaaaagaaagtctatgca

SEQ ID NO: 58172 - DNA, 694 bp, Homo sapiens
ctgggagactacaatcatcctaataactgagttatggcagctcagcctggccaacttaatagcaacagcatatgaacacaacgtatcaccacatgtatcacaaccccatgtatcttggcatgacacaagtattagctaggaaaaaagtctcttggcatgatgtaatccaagagctcaagccttcccattagcccagaggaattcaagaaaggaattcaagagacaaattcaagggaccaaacctcacagaactgacacaaaactttccccaagcaactggcatacagtatgtgttccatactagttgttcagaaatatgacctaatgtctagatcatctaggagttttttagaactacaattcctaggccccattttggacctactgaattggaattttgggggacaaggccaagaattttgtattttaaaaggcctatgagtgattctaatggttagctgggtttgggtctactttagaccacgcagggccaccaaagacacttccttctcctataaagtacctgactgtttaggcataaaggaaacaagtgatgtatgtgactcacactggcctggcagggaaagtgttgactamttccttggacatcctgataggaaatgctgggagcctccttcgtgagccatcccttcagtctgcctgatttcaccctggccaggtacactgaagagct

SEQ ID NO: 58173 - DNA, 627 bp, Homo sapiens
aatcaagccacagactgctggatgtgctgttcaaagtcacccccatcatctcagaatggctaaaaactcccagcaaacgggcggagttgttgttgccatcataaacctggacacaggagagacccccaacccaatgtcgtcagcatggccttatgttgaacaacacctccttaccccacaacccacastcctggagtttagcactggtaacaactatcagaggcacagtgagttatcagatgcaaggaagatggcagagggaagctatcaactgagcaagttatctcgttttcccttgatgtcagttctatgctcagcccatctttagtgtgaatctagtctttgggaactcattgctattctaatctttccagtggagatttgttcttgttcccgcaatgcccatatagcaccagcttactctttagcagcctggggaggccaggtttgggttgcctacttgtcaaaccatctgtttcttcagagagacaggctgaaagcattcatctctacattgctaaaccctcaatcctgtccttccagtagatgagacagccatcctctcacctgatcccaccccactgtggcagtagcctgtcttgagcactctgctggacatcatccctg

SEQ ID NO: 58174 - DNA, 911 bp, Homo sapiens
aaatgcatagaaaactatgtgatatctgtaatagtgtccaccaattgttggcaaggatcatttctggctgggggattttgggtagtggttaacatctctcctttgacctctcccattttttgagtatttacagattggatgtgtctggatgtgaaacactgcgtcttcgtgctttgggtcccttgggtggggcaaagccacaactcaagcctaagtgtagagtcacagtccctgacccctctcagctgggtttacagcagtaggaaaggacattgcttaatgacacagcagtgctaattccccaggcggtaaccgggtggagacagcccaggaccatttgtctccttcaaacatttttgatggaaaaatgataggtgtgccatgggattctgacaaccccaagatgccacactatgctaaagaggtgccaggagcaccatctttcagagaccaaagcttctgaagaaactgggggagggaggtgacagcatccattgtgatccctgtccacgtcctgttctctctcccctatttcaccctaargatccacccttccaaaaacccttattttaagctattttcatgccaactagtagcagaccctggaataagaataggcaaagaaagtgctgtaaatgagaaaacaaataaatactaaaacaaaattataaaagaaaataataaaatgaaaaaaataatcacaacgcttatgacacaggaaaaatatcaatattgaattagaacctttataattatctaagaacatcactaagatgagtaaagagagtgcttagaggattcatatgaaagaaaatagaattaatatgacaacacagtccatttcaatagaaaaaataaagaaaaaatatagaatccaatattgttgaggcttcatggaatctcatacatgc

SEQ ID NO: 58175 - DNA, 571 bp, Homo sapiens
acagctagaaagaattggmctcctttggtcagccatgcagacaacgcatcagatacagaacctatcgcagtgccaggagtcatggaagcaaatccaagctcattggtctgactctgccgggtttgagggcccaggaccacagcctctctgctgctgttgactttgatgggggccacagcgaattgcagcatctgtattgggtctgattaaatgcatccacagcacctaacatcttggttctggaatcccaatttccgggccagttgctaaacctaacagtgcaacggtttcagtgcctaacaggtaagcaggccacggtggcttttcagtccttgctgtctgcaaccccagctgtgcagcacagcaagccagaggccaggttggatcttccccatgggctccagggcattggaactccttggaaccagagacttataacacgcatgtgtgtgaacagattcttaggggagaaagccctcactttcctcgaaattcaaagttgtccacacccccagaaagtgcagcctggctctgggcttctctgccctgcagccaaggtttgttgtctgtt

SEQ ID NO: 58176 - DNA, 651 bp, Homo sapiens
aattttaatcatggtttgaagtggctgtagaaaatatgaaatagacggcccggcgcagtggctcacgcctgtaattccagcactttgggaggccgaggcgggtggatcacgaggtcaggatatctagaccatcctggctaacacagtgaaaccccgtctctactaaaaattcaaaaaaaaaaaaaaaaaaaaaaaaaagcctggcgtggtggcaggtgcctgtagtcccagctactcgggaggctgaggcaggaaaatggcgtgaacccggaaggtggagcttgcagtgagcagagatcacgccactgcactccagcctggggacagagcgagactccgtctcaaaaaaaaaaaaaraagaagaagaaatagactagaaaatatcacttggaatgtcaataatgaagcagaaatatatttcatgctttcacttttactttgtgcttggagacataagtattcaactcgaaaaggatcagattaagatggaaaggtttaatgatctgttcatgtacatcccctatgctgggtatagttataaagtacttagtatatactaggcacagttctgaaattggtgatacatttttccttaaattctcaacagattaatttactgtgtgtgtacatgtgtgtgtataatttaaagta

SEQ ID NO: 58177 - DNA, 651 bp, Homo sapiens
aattttaatcatggtttgaagtggctgtagaaaatatgaaatagacggcccggcgcagtggctcacgcctgtaattccagcactttgggaggccgaggcgggtggatcacgaggtcaggatatctagaccatcctggctaacacagtgaaaccccgtctctactaaaaattcaaaaaaaaaaaaaaaaaaaaaaaaaagcctggcgtggtggcaggtgcctgtagtcccagctactcgggaggctgaggcaggaaaatggcgtgaacccggaaggtggagcttgcagtgagcagagatcacgccactgcactccagcctggggacagagcgagactccgtctcaaaaaaaaaaaaagaagaagaagaaatagactagaaaatatcacttggaatgtcaataatgaagcagaaatatatttcatgctttcacttttactttgtgcttggagacataagtattcaactcgaaaaggatcagattaagatggaaaggtttaatgatctgttcatgtacatcccctatgctgggtatagttataaagtacttrgtatatactaggcacagttctgaaattggtgatacatttttccttaaattctcaacagattaatttactgtgtgtgtacatgtgtgtgtataatttaaagta

SEQ ID NO: 58178 - DNA, 651 bp, Homo sapiens
aattttaatcatggtttgaagtggctgtagaaaatatgaaatagacggcccggcgcagtggctcacgcctgtaattccagcactttgggaggccgaggcgggtggatcacgaggtcaggatatctagaccatcctggctaacacagtgaaaccccgtctctactaaaaattcaaaaaaaaaaaaaaaaaaaaaaaaaagcctggcgtggtggcaggtgcctgtagtcccagctactcgggaggctgaggcaggaaaatggcgtgaacccggaaggtggagcttgcagtgagcagagatcacgccactgcactccagcctggggacagagcgagactccgtctcaaaaaaaaaaaaagaagaagaagaaatagactagaaaatatcacttggaatgtcaataatgaagcagaaatatatttcatgctttcacttttactttgtgcttggagacataagtattcaactcgaaaaggatcagattaagatggaaaggtttaatgatctgttcatgtacatcccctatgctgggtatagttataaagtacttagtatatactaggcacagttctgaaattggtgatacatttttccttaaattctcaacagattartttactgtgtgtgtacatgtgtgtgtataatttaaagta

SEQ ID NO: 58179 - DNA, 792 bp, Homo sapiens
tcctgacccttgctggtctgtctggtcttcaagtatggccacctgaggtccttcccacatttctcccagggttagctttacttggcatgttcacccccatgaatactaccagctcttcattggctgcctttcattttgaggctttgtgttctactttgtgtggtctgtattctgtttctcgtgaaaccactgcagcctgagtgacagttatgttttagggtattttttctcatacttaatggttatattatcagtaaggtccaaagagtcagctgaaatggtacatccattgctctgaattatacttccttttctaactaaggaatatttaagaattcaattcaaatatagagggaatatcaatggttcttggttctgatttttagctctttaaggaagactctattcactctagagtagtgattctcaaacttgtttaggctatagaccctttgggagtctgaggatgttatagagtctcttcccaggtaagtgaayatccacacaacatctggatgaggccttgtgtcccaagttaggaacccttgttctaccctaactggatcatcttttccttcatctcagtttggcaaaaagggaagccacttggcccttccaatgacttctcaggagaagggctagttgttggaagacagtggagtcctgaccttttggttgctctcatctcttttttctttttttagataattcgccagtgtgattattaatcttatgtattaacttgacagggacatgaggtacccagatatttggtcaaatatttttccgggc

SEQ ID NO: 58180 - DNA, 516 bp, Homo sapiens
ccatggttctttttataaagaacagcgtgctatgaagagcactttagaagagcttacattctcagaatgtgaatcaaggtctgggttaagccagacaaacagtcatttgaccttgctgctctgtcatggacaagcaggggtgaaaggaaggatatgagctgagacaggtgggcagaaggaggtcagagagctgataaccccsgtgcttgagtcaccttgtttctcaaaggatgctctgaaaatggataataaaaacaagaaaagaatcttaaaaatcagtttgttgatcagtttattgtgtgggtccccaccgaacctgaccacattgaaaatggccatttgttcctgactcaaggcatcccatctcctaatcagcccttaatccctagtagctctccagttacttccatggttaccgagtccccttcttttgaacaaccaagggcctcaggaaagactaaataaattataaccattagttccttttatctactgctttatttcaaggacttctga

SEQ ID NO: 58181 - DNA, 516 bp, Homo sapiens
ccatggttctttttataaagaacagcgtgctatgaagagcactttagaagagcttacattctcagaatgtgaatcaaggtctgggttaagccagacaaacagtcatttgaccttgctgctctgtcatggacaagcaggggtgaaaggaaggatatgagctgagacaggtgggcagaaggaggtcagagagctgataacccccgtgcttgagtcaccttgtttctcaaaggatgctctgaaaatggataataaaaacaagaaaagaatcttaaaaatcagtttgttgatcagtttattgtgtgggtccccaccgaacctgaccacattgaaaatggccatktgttcctgactcaaggcatcccatctcctaatcagcccttaatccctagtagctctccagttacttccatggttaccgagtccccttcttttgaacaaccaagggcctcaggaaagactaaataaattataaccattagttccttttatctactgctttatttcaaggacttctga

SEQ ID NO: 58182 - DNA, 1005 bp, Homo sapiens
ctaaaattatatttatgatatatgtataactgtatctatgcactgtgtatacatgtatgaatgcatttagttttaaacgtgcttattttctgatttgcctactttaagggcagggaacttcttgttcaagtttgtgtcttccagagtgaaaatgagccctaggaaggagcccttcataaataatttgtgaattgatgaatgaaatcaatagtaatctcctcattgcttctgggctatatctttgtggattttattttaaaagagagatgtgattattacctttgtcaggtaattagaatagcaataagtgtgtgtgtgtgtgtgtgtgtgtgtctgtgtgtgtgtatgtgtgtgtctctatcttcccctccctactacccatccaagcctctaataaccaaaacgctactctcttcttctaggaactcaatgtttttttgggtacattctcatccctaggcactcttctaaatagtttacatttattaactcagtgacttctcacagggactttatgagataggttctattatacacattttacagaagaaattacaggcagatggaacacaggagagaaagttgtttatctggctcattccttgtaattctactttaacatggagtaactcattctatttgcaacttagtgtattaaatgtttatccaacttttagcagtgtagtagtcccaagtagacagggtctctctaatttgaatatttaatcttggcttttaaatcactaagcttgctttgaaaagcttttttattgttctaagtgcttccccaaatgccataaataactaagctattctggaatcctgtcatctttcatttgggttttataaatcttctgaataataggcatatgtgttaagttctaagactcaataaacactgtttagaattattccttttttattgtgtaacaatattgtctgctggagaaaatctcacaatccactttttyttccttttatttttagttgacacataatcatgca

SEQ ID NO: 58183 - DNA, 645 bp, Homo sapiens
aactgagagatggaagtagtgagaaatgaggctacagaagtatataagtgccagtttatacagtgttgtgcaagatatattaaccatgtttaacctatgagcaatgggtccctaaagagctgagagcagacacatgataagcttaggaatatttttccagtggcagattggagaacagattgtgtgaggagtgggataacttggtgatagaaataccactgagaacttattatraggaatccaggtgtgagattatgatgggcagggcccgggctgtgggagtgaggtatttaaagaggtgcatgggccaggcacgttggctcacacctgtaatcccagtaatttgggaggccaaggagggcagataggttgagcttagaagtttcaaactagcctgggcaacatgataaaacaccgcctctacaaaaaaatacaaaaactcagccaggcatggtggcgtgggcctgtagtcccagctacttgggaggctgaagtggacggatcgcttgagtcggggaagtcaaggctgcagtgagtcgtgactgggccactcaactccagtctgggtgacaaagtaagacttagtctcaaaaaaaaaaaaaaaaaaaaaagagtagtgcattagtgcttggctttcagaatgat

SEQ ID NO: 58184 - DNA, 695 bp, Homo sapiens
ggatccagtcagatcatgcctcctggcatcacctcattgcaagatccaatcacatcatgcctccttaccctatgcttataaaaatcctgaccctgcccccagtgttgggagccgaaaaggccaaagggatcgtgaccaactcagcattccgctggaggctatatgatcaaatagcaaactgtttatcatgaatgcaggatgtgggcaaactcacactgccctgccaccaaaaggtttgctgagggacatcattcccgggctccgggctccttgaagttatctactgagaatattagcgcctattgctcaaaggatgcaatctcgaaagcctgctgtgaaccaaacgcccgamtaacaattactcgacaatcactccccactttctcgctatctcttttgcctaataaatatggagggccgtgtaaagctcatggcgcttgtccactagaggcaaggtgccccctgaccctttcttccaaatatacttctttgtctcttgtcttttattcccatgtttgccccactttgttcagtccaataggtccgcggcaccccagctcagagaggttactgctttgggaactatccctagtgtgctctttacttgttgcaagtaataaaatccccatgctaaatcctctttggttgcagtcattgggttgatacctgccaagtgtctgaacccacctgatgcg

SEQ ID NO: 58185 - DNA, 695 bp, Homo sapiens
ggatccagtcagatcatgcctcctggcatcacctcattgcaagatccaatcacatcatgcctccttaccctatgcttataaaaatcctgaccctgcccccagtgttgggagccgaaaaggccaaagggatcgtgaccaactcagcattccgctggaggctatatgatcaaatagcaaactgtttatcatgaatgcaggatgtgggcaaactcacactgccctgccaccaaaaggtttgctgagggacatcattcccgggctccgggctccttgaagttatctactgagaatattagcgcctattgctcaaaggatgcaatctcgaaagcctgctgtgaaccaaacgcccgaatracaattactcgacaatcactccccactttctcgctatctcttttgcctaataaatatggagggccgtgtaaagctcatggcgcttgtccactagaggcaaggtgccccctgaccctttcttccaaatatacttctttgtctcttgtcttttattcccatgtttgccccactttgttcagtccaataggtccgcggcaccccagctcagagaggttactgctttgggaactatccctagtgtgctctttacttgttgcaagtaataaaatccccatgctaaatcctctttggttgcagtcattgggttgatacctgccaagtgtctgaacccacctgatgcg

SEQ ID NO: 58186 - DNA, 511 bp, Homo sapiens
taatgtaaaacagataatcagttttttatattgattctgtgctgaaatgacattttgcatatgttgtgttaaatacattcgtttcacctttcttcatgagatgaggctggaaaaggttgaattgtgtttgcggctccactcttgctcctgttgggtagtgctggaccaggcaggaggtagtggcggctgaaccagggatgggagaagtggtcagcttgtagatgtattctgctgatatcattcttcttcttcttcttcttcttcttcttttttaaatggagtcttgatctgtcatccaggctggagtgcagtggtgcgatcttggctcactgcaacctccacctcccaggttcaagcgattctctcacctcagcctcccgagtagctgggattacaagcaygcgccaccatgcctggctaattttaatatttttagtacagacagggttttgacatgttggccaggctggtctcaaactcctaacctcaagtgatccacctgccttggcct

SEQ ID NO: 58187 - DNA, 668 bp, Homo sapiens
ccactgagctggcctacttcagacagccagggcccacccctctggcccccttagtgtccagctcgtggccccttggcatttccacaagacgccaagatggagattcccatggggacccagggctgcttctcaaagagcctcctgctctcaggtaaggaggaaatagaccctaaaggccaaggggagaaatggggactcagcccagagaytgaagtttcctcttagaagtagggaaagattacctgagaggatgaaattagaataagatgggggaggggcaacagaatcacagcctcattgccattttatctatggaattttctataatgttaggaccatgaaggcaggaatttatgtatgtttggttccctgctatatctccagtgtctagaaattgaaggaagtttagatgtattacatatagttggtattatagcttatatattacatatgcctataagtattggttgaataaatgaatgaatgaatgaattcagagagtccatgtgtttagaagcaggccacacagcatctcaaggtagaaaaacctctggatcaacaggatggcaaatctgtggtaaccatgcctgtgttcccactcctgcacccagggcagacatcactaatcaatcccagcattgtttccaatgagcagcactcagagtcct

SEQ ID NO: 58188 - DNA, 632 bp, Homo sapiens
gtgggagcaagaaaaaagacagccagtgtggctggatcaaaataagcaagtggtacaataatacatgaggatagggaaaggggatggcaaggtaggtagtcagattatgtggcacttacattcttttttgtggttgtggcatttaaaacactatagcaaggctgcattgatacctcatgatttagtagaaaggatttaygggcttagcatttggttccctcattacctacttaaataagttaggtcaaatcatgtgtctatatcttagctcacataagaatcttaaactaataatagatcattaagtctaaatcagctcaaactttaaaaatcataaaaatgatttttaaatccctaaagaagtgaatgagaaaataagtgaataacctcaagcacatggcttggagcactaagccaaaatcttaaatgtctatctcttttctctttatcaatcttattttgtcacccaaaagtgtgagtaagagatgccagggctttattggttttaatttaaaagtcacatcttttttggaaaaggcaatgcaattggcacttttggtgttttccttatatttatcacaacttaaaggctattggaaaagttagaaaagtagtgaaggaaagaaacatgt

SEQ ID NO: 58189 - DNA, 905 bp, Homo sapiens
tgagtagacacatgattagacttcttctgtagagggttctaaatatgaggctgcagctgaagtcattttatattcatatatatgaaaaaggtaaactacaggccaagctgcaagggaagaaagggagtggggaaagagagagattgatttaattatttgattgattgatttgcttcagtgaaaattccttaggaaaacctcttgcctgtcattcctcactagctttctacaatcagagatattcttattcaacatagtaaatatagcatgaataaaaataaaaacatgtccccaaaaccacacatcaccatcctctactgagacactggaaaatgctagttcccacccaagaatgactgactcagaacctttgggaatgggccctagaatttgcttgttattaaaccctctaggtgaaatgaawgctcctttggtcccctagaggaatctttcctctccaggattgtgcaccctagcagcaaaggagaattttttcaagaaagaatcactataacaaacattatatgagctgaacacaatgggctagtattgtactacctatgagtaacacaaattgggttttaaagatgagttggtagtcccggagaaatcacccattgtaacagagcttagaaatactaccagtcaaatcatgttttctaaaacataaaatcctgctctgatacatttagccagatacaaaggcataaataccagacacgactgttttaagagaatcacaccagatttaacagctgagcaggccatttgtcattctttaaaggtgtgtcattaatcttatactattcgaaaaagccaggcctctcccaccctgatccactttaaatctaacaactatttattgactatctttctcatgcttggcactctgctgagagatatag

SEQ ID NO: 58190 - DNA, 1125 bp, Homo sapiens
caaaacagtccctggtgtgcagtaaacattcaataagtgtcattattattatatttcatcttattaaaagttaaatggttatgctagtgtggaaaacagtaagaaaaagtctttagtgagaaaataattgaaaatacaaaatcaatataaatatrttgtgttatgtaaggtcagcaaaaaaaaggcatagggaaaaaatagtgaatatgtattattcactccatcaccctgcaatgttctcaatcaaaaatcttagtataattttgaagcctattaattcaagactgaaaatatatttaagtaaaaacaattggattggcacattggccatatagcttaaagataggattaaggcccctgaaattatgtccctcatataatacacaattagatattgatcgtgaggctgaaacaccagcttcaatttaaatacttattaccaattgtatcagctcattgtattaccttatatattataaaatataagacaagtggttaaacggctaaaaatatttaatttcaaaattttgcttacaggcttttaagcaaactttgtctacttttaccttgaagcaaatttaatctggattgaaaatatatatgcttaagaaaaaaacaaagcaaaggtggatggtggaatataatcaccaacacaaaaagagttctttgaaattattaacggtaaagaattaaaaatggatagggaatataaataataactttaagaaaaaacacaagtggtaatcaaatcaagaaataatgcaaatgataaacaaatgaaaaaatctctttttatgattatattgattcaactgacgtaagatatatttacttgtaaaatagcacagaattttcctcaatgataataatgttgataagggtagaataatcatagcaaagcctgatgcaatgtttactaggagccatagtcttttctaagtgctttatatgaattaactcatgaaattatcagaaaaatcccttaaattagtattactatttttagagccattcaaatattttactaataaagaaactatggtccaaaattatacacctagttggaggtggatctgatatttgaacccaagctgtctagttccgcaactgtgacttccaatcatt

SEQ ID NO: 58191 - DNA, 1125 bp, Homo sapiens
caaaacagtccctggtgtgcagtaaacattcaataagtgtcattattattatatttcatcttattaaaagttaaatggttatgctagtgtggaaaacagtaagaaaaagtctttagtgagaaaataattgaaaatacaaaatcaatataaatatgttgtgttatgtaaggtcagcaaaaaaaaggcatagggaaaaaatagtgaatatgtattattcactccatcaccctgcaatgttctcaatcaaaaatcttagtataattttgaagcctattaattcaagactgaaaatatatttaagtaaaaacaattggattggcacattggccatatagcttaaagataggattaaggcccctgaaattatgtccctcatataatacacaattagatattgatcgtgaggctgaaacaccagcttcaatttaaatacttattaccaattgtatcagctcattgtattaccttatatattataaaatataagacaagtggttaaayggctaaaaatatttaatttcaaaattttgcttacaggcttttaagcaaactttgtctacttttaccttgaagcaaatttaatctggattgaaaatatatatgcttaagaaaaaaacaaagcaaaggtggatggtggaatataatcaccaacacaaaaagagttctttgaaattattaacggtaaagaattaaaaatggatagggaatataaataataactttaagaaaaaacacaagtggtaatcaaatcaagaaataatgcaaatgataaacaaatgaaaaaatctctttttatgattatattgattcaactgacgtaagatatatttacttgtaaaatagcacagaattttcctcaatgataataatgttgataagggtagaataatcatagcaaagcctgatgcaatgtttactaggagccatagtcttttctaagtgctttatatgaattaactcatgaaattatcagaaaaatcccttaaattagtattactatttttagagccattcaaatattttactaataaagaaactatggtccaaaattatacacctagttggaggtggatctgatatttgaacccaagctgtctagttccgcaactgtgacttccaatcatt

SEQ ID NO: 58192 - DNA, 828 bp, Homo sapiens
ataaattataataaatatataaaaattatctataattaatgtaacatataataaataaattaatgtgtataccaagccttattttctatgcctcctacagctaaactggcttatactgtcctcttaattttctgaattctaaattctctagcacacagtgacatcattcatttgaacaatgttactttttccctgcttgcgtcacctaagtcttagtcactcaggtgacctaagcgtcctttgggacagagaaaggtcttacaacctttgtgtaactcccatatcacttggcttatagttgagtgtgcattaggaaataatgagattcacgtgttgaatgtaaccaaatcaacccaaatctgctgttgagtaccccacagccagccagtcatatttagctcattctgttccatactaatttaaaataattgataaggtgttaagtatttggcctgccttccagattgatcaccagcttcctaagagcccggattcttccttcttttctagaacayctagcatggtgctggacgctcaatggattcacagtcagccttatggctgaccataacaaaaagaacagggttaaacagtcagaagctatgttttccatgagactttaaaaaaaaaaatgtgtaaatgggaaaaaagtcaagactggcctgagttttctgatctcctttgctttccacaagttgtagcttccccattgcagaacgctaaagaacatcacactaacttctgttgggaaatctgaatgggcatccattagggctcttgccctcaactctaacagataagccacttttttgactgaatcattttata

SEQ ID NO: 58193 - DNA, 628 bp, Homo sapiens
ttaatcgagccccttcgaatactatgttggcctatttcttgtgatctgaatttttaagcacactttcaagtgtcactaagcaattatcgatacactttttcatatattcatttgtagtttatttcacacctatgatgaactgacaatgtgctatttgctgggcataaaaatatgaaccaaacctaatgcgattcttcaaggagcttataatatgatactcagaaggaagcctgaacatttgaaatgcaatgtgaaagtgctgtattaaaggttygtaaggtgctgaggaagcatagcacatgaaacccctaacaatacctggctgaatagtaattaacaatctgagcctttacgaataattttttctagcaacagttaatcccgtgaatgtaagagtgggaggagattgggataggcagtactgtgaggcgatgtgaaggtgtcttatacttgagatgaggcttatgagtgttgtacttagaaagtttttctcatgtacatatttgatcttttggtctcaattatctgagttaatttatttaaaaattaattgagcaattacaacatacctggtgatattgagggtaaaggtaaaaataaaataagacatagatccttatttttctct

SEQ ID NO: 58194 - DNA, 628 bp, Homo sapiens
ttaatcgagccccttcgaatactatgttggcctatttcttgtgatctgaatttttaagcacactttcaagtgtcactaagcaattatcgatacactttttcatatattcatttgtagtttatttcacacctatgatgaactgacaatgtgctatttgctgggcataaaaatatgaaccaaacctaatgcgattcttcaaggagcttataatatgatactcagaaggaagcctgaacatttgaaatgcaatgtgaaagtgctgtattaaaggtttgtaaggtgctgaggaagcatagcacatgaaacccctaacaatacctggctgaatagtaattaacaatctgagcctttacgaataattttttctagcaayagttaatcccgtgaatgtaagagtgggaggagattgggataggcagtactgtgaggcgatgtgaaggtgtcttatacttgagatgaggcttatgagtgttgtacttagaaagtttttctcatgtacatatttgatcttttggtctcaattatctgagttaatttatttaaaaattaattgagcaattacaacatacctggtgatattgagggtaaaggtaaaaataaaataagacatagatccttatttttctct

SEQ ID NO: 58195 - DNA, 1321 bp, Homo sapiens
cgtatatataaacaattttttatatatatataatttttttgttttttgagaccaggtctcactctgttgcccaggctggagtgcagtgttgcaatcatagctcactgcagccttgaattcctacgctccagcctcagcctcctgggtatctggaactataggtgtatgctactatgcccagctaatttttaaattttttgttcagatggggtctccctgttgcccatgcaggtctaaattcttggcctcaagtgagcctcctgcttcagcctcctaaagtgttaggattacaggcatgatccaccatgcctcaccaatatatttttaataactctccagataattctgatgtaaagccaggtgtgggggtcactgccctgtcagacaaggatcaggaggtatactgctgacttcagacttattccaaaatgatatcttattcttttttttttttcttttttaaaagatggagtctcgctatgttgcccaggctagaatcaaactgggctcaaacgacccttccaccatagcctcctgagtagctgggtctacaggcacacgccaccatgccaggcctgaaaggagattttaaaatgagatagataagggagcaaaagtgagcacattactattcaggagaaagggactacacagagagctctccagggaaattttaaagaggaattacagcccaagagggaatcacagggcaaatatgagaagaccctgagttccgccagggatctgctcagagggaggagtcgcatcaaaatcacgttccctctctgagccctagtttccccaattataaaaacaggccgctgaatgtctactatctagtaagttcattgtgaataattctgcaacatgtggctgttaaaactactcttcaagatgaagaaaatagttttgtcagttgtgccactgataattctgcctcattcatggaaaggagcagagtagctctgacattaagaaacactgggacatttgtgtcagggtttaaaactaactctgcttcaaaatcactgagaatctttgccatgatacgtactttcttaaaactgagttgtccactttttcttttagcttttttttttttttggtggggaggtgcggaatcactctattgcccaggctggagtgcagyagcacaatcatagcacagtgcaacctcgaactcctgggttcaagcaatctctctgcctcagcctcctgagcagctgtaactacaggtgtgtgccgccacacccagctaattttttaatttttttttttttgtagagacagggtcttgctatgttgcccaggctgatcttga

SEQ ID NO: 58196 - DNA, 1245 bp, Homo sapiens
tatgtgcagtgcaggctgctaagagctccttacagggctgagtgggtcgtgagatctgggatttgtagaaaaacatggctttttagggagctgtccaaaccttctatggggcctgttagtctctacatgtgccttttgcggtcattcactggatttgatttctgtcacttgtggctttatgatgctattgtttaggctggataagacagaacattccagaagcttctgctccagtgttttctcccaactgagtcagctgactccatcaattgtatgccagggggcctggggcaaaggaaggggagggcatgtagcccctttcgccagttagtayggattggtatggtggtgggaaacctctgagatggggaagggccaagcaagactgtggactcatctgacacaggatttacagtggcacatttcccaaacctttcacatactggggagttcagcatagtaatgtttttggaaaaagatgatgggcattccaaatgttgataacagccagtctggtttaaggaatgaagtgtattatttacatttttgtaaagctgcagattgagcagccctggaatgggtctgtgaatacaaggctcattggcctcatgatccttttgctcagggacatatttgtataaaatttgtatcaaagttgtggtatcccatggcttctgcagcctttttgaggtttattttttatcttgtcagatacctttttctattttgcctaccatttaacatttcaagcattaaaaaagaaaacaatttgtctaagggcacttccaattaatttgcgtatttctaagaagtatttactaaatttacagtatcccgtgaaatatcttattttggggtttcttagttttgctgtttggattattcatttctattttaggcttgtattatttaaaaagatgtaagggctagatcttaagttattttattattcattgataacaagtaatactggattttcaaatataatcaacatatataatatatacagcattatctttaagagtgtaaactatattttatattataaaaattacacatatatatgtgttccatatatataatcactaaagatcaacttgaaaatgcagtaaagttttgaacaaaaactactaatccatggcttcactgtctcaaaaataaccaatgctaactaacattttagtggatatcttcttggccatttttccatggatgagttttagatggttatcatactttgtacat

SEQ ID NO: 58197 - DNA, 1245 bp, Homo sapiens
tatgtgcagtgcaggctgctaagagctccttacagggctgagtgggtcgtgagatctgggatttgtagaaaaacatggctttttagggagctgtccaaaccttctatggggcctgttagtctctacatgtgccttttgcggtcattcactggatttgatttctgtcacttgtggctttatgatgctattgtttaggctggataagacagaacattccagaagcttctgctccagtgttttctcccaactgagtcagctgactccatcaattgtatgccagggggcctggggcaaaggaaggggagggcatgtagcccctttcgccagttagtatggattggtrtggtggtgggaaacctctgagatggggaagggccaagcaagactgtggactcatctgacacaggatttacagtggcacatttcccaaacctttcacatactggggagttcagcatagtaatgtttttggaaaaagatgatgggcattccaaatgttgataacagccagtctggtttaaggaatgaagtgtattatttacatttttgtaaagctgcagattgagcagccctggaatgggtctgtgaatacaaggctcattggcctcatgatccttttgctcagggacatatttgtataaaatttgtatcaaagttgtggtatcccatggcttctgcagcctttttgaggtttattttttatcttgtcagatacctttttctattttgcctaccatttaacatttcaagcattaaaaaagaaaacaatttgtctaagggcacttccaattaatttgcgtatttctaagaagtatttactaaatttacagtatcccgtgaaatatcttattttggggtttcttagttttgctgtttggattattcatttctattttaggcttgtattatttaaaaagatgtaagggctagatcttaagttattttattattcattgataacaagtaatactggattttcaaatataatcaacatatataatatatacagcattatctttaagagtgtaaactatattttatattataaaaattacacatatatatgtgttccatatatataatcactaaagatcaacttgaaaatgcagtaaagttttgaacaaaaactactaatccatggcttcactgtctcaaaaataaccaatgctaactaacattttagtggatatcttcttggccatttttccatggatgagttttagatggttatcatactttgtacat

SEQ ID NO: 58198 - DNA, 1245 bp, Homo sapiens
tatgtgcagtgcaggctgctaagagctccttacagggctgagtgggtcgtgagatctgggatttgtagaaaaacatggctttttagggagctgtccaaaccttctatggggcctgttagtctctacatgtgccttttgcggtcattcactggatttgatttctgtcacttgtggctttatgatgctattgtttaggctggataagacagaacattccagaagcttctgctccagtgttttctcccaactgagtcagctgactccatcaattgtatgccagggggcctggggcaaaggaaggggagggcatgtagcccctttcgccagttagtatggattggtatggtggtgggaaacctctgagatggggaagggccaagcaagactgtggactcatctgacacaggatttacagtggcacatttcccaaacctttcacatactggggagttcagcatagtaatgtttttggaaaaagatgatgggcattccaaatgttgataacagccagtctggtttaaggaatgaagtgtattatttacatttttgtaaagctgcagattgagcagccctggaatgggtctgtgaatacaaggctcattggcctcatgatccttttgctcagggacatatttgtataaaatttgtatcaaagttgtggtatcccatggcttctgcagcctttttgaggtttattttttatcttgtcagatacctttttctattttgcctaccatttaacatttcaagcattaaaaaagaaaacaatttgtctaagggcacttccaattaatttgcgtatttctaagaagtatttactaaatttacagtatcccgtgaaatatcttattttggggtttcttagttttgctgtttggattattcatttctattttaggcttgtattatttaaaaagatgtaagggctagatcttaagttattttattattcattgataacaagtaatactggattttcaaatataatcaacatatataatatatacagcattatctttaagagtgtaractatattttatattataaaaattacacatatatatgtgttccatatatataatcactaaagatcaacttgaaaatgcagtaaagttttgaacaaaaactactaatccatggcttcactgtctcaaaaataaccaatgctaactaacattttagtggatatcttcttggccatttttccatggatgagttttagatggttatcatactttgtacat

SEQ ID NO: 58199 - DNA, 820 bp, Homo sapiens
atcatgcttgtaatctaagcactttgggaggccaaggcaggcagatcatctgaggtcaggagttcaagaccagcctgactaaygtggagaaaccccgtctctactaaaaatacaaaaatacaaaattaggcgggcatggtggcgtatgcctgtaatcccagctactcaggaggctgaggcaggagaatcacttgaacctgggaggcagaggttgtggtgagccgagatcatgccattgcactccaacttgggtaacaagagtgaaactctgcctcaaaaaaaaaaaaaaaaaatatatatatatatatatatatataatatatatattttttatattatatatataatatatatattttttatatattatatatatatagctttatttagaagcagaaaatctgatcaagaaaaaggatttgtattagcattttaagccaaatgacaaaaagaaaattagtaataaatactacaaagtcattgtttttagtgatttttccatatcattttgccagagattaaataaaatgataatcccagtgttttatgtttacttgattgctatctggaaattgttataaagttcacaagtatatactctttgatacaatatttctactatcagaaatttatccaataaaagttatttcaaaaagaaccagacaaaaagttgtcctttctcaactgaggtctggatttcaatgcctagctaaagaatgtgaaatattaaaaataaaacacagatggaaacccaagtttgcaaggaaactctaaaatctgtatccatatatatttttttaatttcacatacataacgata

SEQ ID NO: 58200 - DNA, 820 bp, Homo sapiens
atcatgcttgtaatctaagcactttgggaggccaaggcaggcagatcatctgaggtcaggagttcaagaccagcctgactaatgtggagaaaccccgtctctactaaaaatacaaaaatacaaaattaggcgggcatggtggcgtatgcctgtaatcccagctactcaggaggctgaggcaggagaatcacttgaacctgggaggcagaggttgtggtgagccgagatcatgccattgcactccaacttgggtaacaagagtgaaactctgcctcaaaaaaaaaaaaaawaaatatatatatatatatatatatataatatatatattttttatattatatatataatatatatattttttatatattatatatatatagctttatttagaagcagaaaatctgatcaagaaaaaggatttgtattagcattttaagccaaatgacaaaaagaaaattagtaataaatactacaaagtcattgtttttagtgatttttccatatcattttgccagagattaaataaaatgataatcccagtgttttatgtttacttgattgctatctggaaattgttataaagttcacaagtatatactctttgatacaatatttctactatcagaaatttatccaataaaagttatttcaaaaagaaccagacaaaaagttgtcctttctcaactgaggtctggatttcaatgcctagctaaagaatgtgaaatattaaaaataaaacacagatggaaacccaagtttgcaaggaaactctaaaatctgtatccatatatatttttttaatttcacatacataacgata

SEQ ID NO: 58201 - DNA, 820 bp, Homo sapiens
atcatgcttgtaatctaagcactttgggaggccaaggcaggcagatcatctgaggtcaggagttcaagaccagcctgactaatgtggagaaaccccgtctctactaaaaatacaaaaatacaaaattaggcgggcatggtggcgtatgcctgtaatcccagctactcaggaggctgaggcaggagaatcacttgaacctgggaggcagaggttgtggtgagccgagatcatgccattgcactccaacttgggtaacaagagtgaaactctgcctcaaaaaaaaaaaaaaaawatatatatatatatatatatatataatatatatattttttatattatatatataatatatatattttttatatattatatatatatagctttatttagaagcagaaaatctgatcaagaaaaaggatttgtattagcattttaagccaaatgacaaaaagaaaattagtaataaatactacaaagtcattgtttttagtgatttttccatatcattttgccagagattaaataaaatgataatcccagtgttttatgtttacttgattgctatctggaaattgttataaagttcacaagtatatactctttgatacaatatttctactatcagaaatttatccaataaaagttatttcaaaaagaaccagacaaaaagttgtcctttctcaactgaggtctggatttcaatgcctagctaaagaatgtgaaatattaaaaataaaacacagatggaaacccaagtttgcaaggaaactctaaaatctgtatccatatatatttttttaatttcacatacataacgata

SEQ ID NO: 58202 - DNA, 820 bp, Homo sapiens
atcatgcttgtaatctaagcactttgggaggccaaggcaggcagatcatctgaggtcaggagttcaagaccagcctgactaatgtggagaaaccccgtctctactaaaaatacaaaaatacaaaattaggcgggcatggtggcgtatgcctgtaatcccagctactcaggaggctgaggcaggagaatcacttgaacctgggaggcagaggttgtggtgagccgagatcatgccattgcactccaacttgggtaacaagagtgaaactctgcctcaaaaaaaaaaaaaaaaaatatatatatatatatatatatawaatatatatattttttatattatatatataatatatatattttttatatattatatatatatagctttatttagaagcagaaaatctgatcaagaaaaaggatttgtattagcattttaagccaaatgacaaaaagaaaattagtaataaatactacaaagtcattgtttttagtgatttttccatatcattttgccagagattaaataaaatgataatcccagtgttttatgtttacttgattgctatctggaaattgttataaagttcacaagtatatactctttgatacaatatttctactatcagaaatttatccaataaaagttatttcaaaaagaaccagacaaaaagttgtcctttctcaactgaggtctggatttcaatgcctagctaaagaatgtgaaatattaaaaataaaacacagatggaaacccaagtttgcaaggaaactctaaaatctgtatccatatatatttttttaatttcacatacataacgata

SEQ ID NO: 58203 - DNA, 820 bp, Homo sapiens
atcatgcttgtaatctaagcactttgggaggccaaggcaggcagatcatctgaggtcaggagttcaagaccagcctgactaatgtggagaaaccccgtctctactaaaaatacaaaaatacaaaattaggcgggcatggtggcgtatgcctgtaatcccagctactcaggaggctgaggcaggagaatcacttgaacctgggaggcagaggttgtggtgagccgagatcatgccattgcactccaacttgggtaacaagagtgaaactctgcctcaaaaaaaaaaaaaaaaaatatatatatatatatatatatataatatatatattttttatattatatatataatatatatattttttatatattatatatatatagctttatttagaagcagaaaatctgatcaagaaaaaggatttgtattagcattttaagccaaatgacaaaaagaaaattagtaataaatactacaaagtcattgtttttagtgatttttccatatcattttgccagagattaaataaaatgataatcccagtgttttatgtttacttgattgctatctggaaattgttataaagttcacaagtatatactctttgatacaatatttctactatcagaaatttatccaataaaagttatttcaaaaagaaccagacaaaaagttgtcctttctcaactgagrtctggatttcaatgcctagctaaagaatgtgaaatattaaaaataaaacacagatggaaacccaagtttgcaaggaaactctaaaatctgtatccatatatatttttttaatttcacatacataacgata

SEQ ID NO: 58204 - DNA, 732 bp, Homo sapiens
accatggccaatggcaggcacatgacaaaatacgaaaattatgtctgataattcctaaggaaaagcctactacactttaataacttaaaaaagctctaggcagaaaatttagattaacgtcaacctgttttgtcagtaccaatagagatctgtcagaagtaaatataaatccatcctgcaagtttatacttaaaattgcctcaaagaattctcatagaaaaattccaatttagaggagcttacaaatttaaaaaccccaaaacacatcaggaaacaagttatcatcagtaggagctggcatgaasacaacaatttggtagaaataaagatatcagtatatactggtaagataatccactcactagaaagaaaaacaattctaaaatttatggcactagtaacatagcttcaaaagccaaattaataaaattataggagaaagtcactaatcttagaaatgcttcggaaaataccagatagcaaaacttaaacaaggccgataaagtggaacctagaaattaattaccttcttaccttagaaaagagaaaagaatgacataattgagccgagtatccaaatttagaacttaataaaaatacaacagaataagtgtcatagtgaaaacaaaaaaaagatacacttaaaaacagagattaatgtagaaaacaatgttagactagaagagaaaaataggagcccatgatttatttcttgaacaatgagagcaaaat

SEQ ID NO: 58205 - DNA, 716 bp, Homo sapiens
tcagttccatttcactgtttgccttactaattaacaatataatttcttagctaatccaggcatagactctgtggcaagttttaagtgagagcaattcactgcggcagtaccaactgtctagccacaatygaggtgtgacaggcatcaagtcacctgggggataaggtcagccaggtaaatatttaaaggctgtgccttccctggccagatctggactagcattatttcctttccataccctcataacccaagtacacagaactaccacggctgactggagtgtcttaggaggaaacattccaccacaaaggagatagaggttcagatgccctttccttgttcatcctcacaccattcaggcaaaaagggggtggtttccctaggtccaggagttggcaacaaacccaggcaaaagccagggacccagtgctccagcacacttctcctgggcagtgagggccctccgcagatccagacccattcggaagaaagaagcggatctctacgatccatcctcggcccttcctaaacagctcctgctgctgggaaactttgcaagggacatcatgtgccctctgtctctcagcatttggttaacaacatgagctctagtgtaagactacctgggttcaagtcctacttctgcactccctgtgtcctctgcacctcagtttcctcatctatataatataatcatataagcaacacttaggatc

SEQ ID NO: 58206 - DNA, 1080 bp, Homo sapiens
gcatatcaccccactatcatgaccctctattagccctcttcttcttttgtggctaattgagcttaaccgaggcaatatatttcaaatcagcaaagtagtttatttcagtttgctggttcaaacactatcttcaacagacaaggaggttcaacttttttgttgcagtgtataattgacaatgggcttcctaggcagcaaattaggcatttcgcattaacgctaaagtgccacagggagttgtgatgcgcaaacttcttgcactaaagtgagcatctttcttaaccgacctggtttgaaacctaaatactcggtgggtatcctgaaaatcttatgaaaccgtctattgtgtttctttacaattacacagtagctgactttacaagctaagtaggagccattgtaccctaatcagaagcgggtcactggggggcatgggatctcagcttaatataatgaatttaaacagtgtaaattcttttcacacagattaccctgctgaattcccaaatcattgatttggggcatagcttcttaagcttgaaatctttaaaactcttacatcattgctgagagatttgtagtcagttttcttcacataatagtgtgtatttttctcctttttccttctagaatgatatgagccacrtattagtaaataaccctctttccctcaaaatcatcctgcattttccaagcttttaaataggtatcaagaaacttctttggattttctttcaatttcaaagccttgtagtttaggtaattgcatccaaagataaccattcttgagttgatttgtatatattgtcaatgtcttattgactgtattcacacccatgaacagttttactttatttaagtaaagcatatgaagggactgagaaagaaaaatatggaatgcctggccatttctttatataaagtattcttcctagtgttgtgcaaagaaaagtgtgttttgtggcatggcatgatagcccttttgctgggagaagaattttaggaaaactgttatttaagtatatggcctatttattaagacattgtacatatttattgagcaagtgggacggacccatg

SEQ ID NO: 58207 - DNA, 663 bp, Homo sapiens
caggttagaacactgctttaaatcatgaaagagtctgcatgactcctgcattccatcagagaccatgtaagagttctggtttgyggtatagttagatactggcaagatgggtcctcaattttagcacctttcacagttcaggaacctggtgaaagctataatatatagataactgattctagtcattgtcatccagaaaggcctgtgttgtaaaatgttaactccactgcaaatgacaaaggacgttagactgcagttactggtcaatgcatggattaaaggaaaaatgaactatcagtgggccccttgagcatcttctttgtaaagaactgagacccaggaaaatagctatgcatttactgtgtacatagtatgttttggccaatctgcagataaaagacatcagtctcgaaggccttatttgggacatccctctcaacgataaaatcaaatatgaaactaagaaaaataataaaaatcaaattcctttgaaagttctctataaacattaagctcaaagctctccccaaaatccaatttagcaaaagacatttctacaataaagtggtgcttgacaagaacaatttaaggaaatagttctggtgtctttatttactattaaagagacatacacaaataaaatatgatgaagtacttatcaca

SEQ ID NO: 58208 - DNA, 663 bp, Homo sapiens
caggttagaacactgctttaaatcatgaaagagtctgcatgactcctgcattccatcagagaccatgtaagagttctggtttgcggtatarttagatactggcaagatgggtcctcaattttagcacctttcacagttcaggaacctggtgaaagctataatatatagataactgattctagtcattgtcatccagaaaggcctgtgttgtaaaatgttaactccactgcaaatgacaaaggacgttagactgcagttactggtcaatgcatggattaaaggaaaaatgaactatcagtgggccccttgagcatcttctttgtaaagaactgagacccaggaaaatagctatgcatttactgtgtacatagtatgttttggccaatctgcagataaaagacatcagtctcgaaggccttatttgggacatccctctcaacgataaaatcaaatatgaaactaagaaaaataataaaaatcaaattcctttgaaagttctctataaacattaagctcaaagctctccccaaaatccaatttagcaaaagacatttctacaataaagtggtgcttgacaagaacaatttaaggaaatagttctggtgtctttatttactattaaagagacatacacaaataaaatatgatgaagtacttatcaca

SEQ ID NO: 58209 - DNA, 663 bp, Homo sapiens
caggttagaacactgctttaaatcatgaaagagtctgcatgactcctgcattccatcagagaccatgtaagagttctggtttgcggtatagttagatactggcaagatgggtcctcaattttagcacctttcacagttcaggaacctggtgaaagctataatatatagataactgattctagtcattgtcatccagaaaggcctgtgttgtaaaatgttaactccactgcaaatgacaaaggacgttagactgcagttactggtcaatgcatggattaaaggaaaaatgaacyatcagtgggccccttgagcatcttctttgtaaagaactgagacccaggaaaatagctatgcatttactgtgtacatagtatgttttggccaatctgcagataaaagacatcagtctcgaaggccttatttgggacatccctctcaacgataaaatcaaatatgaaactaagaaaaataataaaaatcaaattcctttgaaagttctctataaacattaagctcaaagctctccccaaaatccaatttagcaaaagacatttctacaataaagtggtgcttgacaagaacaatttaaggaaatagttctggtgtctttatttactattaaagagacatacacaaataaaatatgatgaagtacttatcaca

SEQ ID NO: 58210 - DNA, 663 bp, Homo sapiens
caggttagaacactgctttaaatcatgaaagagtctgcatgactcctgcattccatcagagaccatgtaagagttctggtttgcggtatagttagatactggcaagatgggtcctcaattttagcacctttcacagttcaggaacctggtgaaagctataatatatagataactgattctagtcattgtcatccagaaaggcctgtgttgtaaaatgttaactccactgcaaatgacaaaggacgttagactgcagttactggtcaatgcatggattaaaggaaaaatgaactatyagtgggccccttgagcatcttctttgtaaagaactgagacccaggaaaatagctatgcatttactgtgtacatagtatgttttggccaatctgcagataaaagacatcagtctcgaaggccttatttgggacatccctctcaacgataaaatcaaatatgaaactaagaaaaataataaaaatcaaattcctttgaaagttctctataaacattaagctcaaagctctccccaaaatccaatttagcaaaagacatttctacaataaagtggtgcttgacaagaacaatttaaggaaatagttctggtgtctttatttactattaaagagacatacacaaataaaatatgatgaagtacttatcaca

SEQ ID NO: 58211 - DNA, 663 bp, Homo sapiens
caggttagaacactgctttaaatcatgaaagagtctgcatgactcctgcattccatcagagaccatgtaagagttctggtttgcggtatagttagatactggcaagatgggtcctcaattttagcacctttcacagttcaggaacctggtgaaagctataatatatagataactgattctagtcattgtcatccagaaaggcctgtgttgtaaaatgttaactccactgcaaatgacaaaggacgttagactgcagttactggtcaatgcatggattaaaggaaaaatgaactatcagtgggccccttgagcatcttctttgtaaagaactgagacccaggaaaatagctatgcatttactgtgtacatagtatgttttggccaatctgcagataaaagacatcagtctcgaaggccttatttgggacatccctctcaacgataaaatcaaatatgaaactaagaaaaataataaaaatcaaattcctttgaaagttctctataaacattaagctcaaarctctccccaaaatccaatttagcaaaagacatttctacaataaagtggtgcttgacaagaacaatttaaggaaatagttctggtgtctttatttactattaaagagacatacacaaataaaatatgatgaagtacttatcaca

SEQ ID NO: 58212 - DNA, 724 bp, Homo sapiens
aaaaagggagttctcaccctctcctgttggcagcaaaagaaggaggaattggaaaactgggatactctctaaagaccacagagggtattatgcagccaagtgtccccacttggctggggtaggggatgctgcatgatgacccaggtgttctttgaggacttcggtatcaatgcaatgaccacaaagtattgggaataagaacacaatgataatcaacagggtgactatagttaacattaatcaattgtacatttcagctagctagaagagaataattagaatgttcctagcataaagaaaagagatatatttaaggtgatggatatcccaattaccctgatatgattataggaatgtatcaaattatcacgtgtatcccgaaaatatgtgcatctaatatgtatcaattaaaaattctctaatctttataaaaagaatataatgatcatgtcaaatacgcgaaaagcaaagttattctatcaacatgttcggggagttacctctggcattgactgttaaggattggattctggtagtttacatttccagatccaagcaagaagttgatggagaaagaggagaatacyggctgattcctccattagtaggggaggaggtgagtgttaataaccccttgtccctcctccctccaaaaccacttctcaggccacctgtggtggctcacatctgtaatcccagtgctttgggtggccaaagcatgaga

SEQ ID NO: 58213 - DNA, 742 bp, Homo sapiens
ttgcctytttcatagaaaggacaggaggggaattaggattacatcgagaccctcccatgtgccagacactctgctaggtgcttttcctacattctcatttaattttcaacaacttcaatgaaaaggcaggaagcactgagatattgttgtcttgtattttttcaggtaacaaggacgtctttgtgtgcatgcccacaggggcaggaaaatccctatgctatcagctccctgctctgttggccaaaggcatcaccattgtagtctctcctctcattgctttgattcaggtgaggcttagggcaatgaagatggtagcccaaaaagattcggggaaggttttttgaggctggaaatttcacttctctattggtcttttgcctcttattttcttttctttttctttttccttttttttttttttttttgagacagagtcttactctgtcgcctaggctgaagtgcggtggtgcgatcttggctcactgcagcctccacctcccggcttccagcaattcttgtgcctcagccccccatatagctgggattacaggtgtatgccaccatacccggctaatttttgtatttttagtagagatgaggtttcaccatgttggccaggctggtctcaaactcctgacctcaaatgatccgcccacctcggcctcccaaagtgctgggattacaggtgtgagccaccacacccgcccctgcctcttattttctatgatttgcctatctcatt

SEQ ID NO: 58214 - DNA, 1621 bp, Homo sapiens
acaaaatgggatggtgttgagcacaagttcactaagctctcagaggagggatactgagtatggcaaaatcagattcactggtgagttaggattttaccttggccctaaaggaggggaagagttttggaaagtgctatatgaaccgacattctttaattagtaatttggcacattctcctgaaacggtctcttgttaaggtaacagacatgaattttatatggagctaaatgtctaagtcagcctttctgacaatcaacattcatgggtcccagattccttactttatatataaagggattagatgacttgtatcaaaccactgttcttactttatttagctcttatagagtttgtttaatatttaatttaatggaaaatagcaaatagaaatgaccttgccaagtttccaagaaatgaagagtggtcaatcatcatgttaactttcagtttccttttcacctttttgtgaacaaaataacaatattcagttttgcatctccaaacactgttgccgcacactatgatttatatacgagtatgattaggaaaaaatgaagagttgaatattgtcagttgtatgaaaaaatggtgtgagctttatgtctatctgaacatattagagcacataaaaagaacaattttaatcattttctttatttttttatttttattttttatttttgtagggacagagtctcaccatcttgcttaggctggtctcaaactcctgggcttaagtgatccttctgcctcagccccctaaagtgctgggattacaggtgtgagccaccgcacctggcgttaatcattttattgaaacaacagcagaaaaattgacttctgaagttagcatctgctatgcatccattagagacttacattaaacattaggacaaaactctgatactttttgaccagttcaaatatcagttcataaaaatgaaattcatcatctctccgttaggtagaagtggcaattttcatcacatcctcagtaattaaaaagtgtctacacaatgrgaaaaggaaggaagtcaagattggctatctaaagctgggtctatctggataatcaaagctacatgtaaatattagttttttgatgctgacttttattttacaataaataaaattacagccatcactactgtcaactcataaacataggtattagaagaaataaaaccctcttcaactcttgtcagaatctataagtatgaaaacatacaccatgttttttaaacactaattgacaccagagacaatttgccaaattcctgctcgagcgtttcattcaaatctgaaggagggatgtgtctaaatattagtatgaactctgcggtgtcttacatcttgtatgaaacattccatcttcagcaggcacacataaggatgggaaaaatgatcttttgacataaagttttggaatctttcaggaacactaagtttaaggtcagttgtttcctagtgactgtgccttggtgactatgcctttttgcatttgtatacaattaaaaggccacttgtcattaaatagagtatacacagcttttctatattgctttaaaaattatgcaggtagatttttccctggaactatatagaaccctatctttaaag

SEQ ID NO: 58215 - DNA, 1495 bp, Homo sapiens
tctcctcactaagatcattttcttctttcaggtaaagtaagaataataacttagacttcttgtatcctgcttaatggccagcattgtcaaatgggagctgtctttgtgttatttattcagtttcaggaaaggcaggctttacacatcatataaacacagccgcaccctttcaacagcttcatcaaacttgaaaagtttcatgaaactgttcttaataaattcagaagaacatgtgaataatgggaaagacagcatgttagcacgagaaagccagtcctgaaaatgaaactctctgtgttcccgtccaatcacatttctaattagtcctaatactttaaataaattgtttaatatctgtgagcttcagtctatttgtatgtgggattaaaatgttgtgagattaaaatgtcggtgaactttaacgcgagaattcccagccttggagctattgacatttgggactggatgattgtttattatgggggctgtcttgtgcattgtaggaggtttagcagcaactctcttctctacttattagacaccagtagcactcctctgccccccaggtcctcattcaaaaatatctgtagaaattgccaactgtccctggggagtacaacctcaaccccttcccagtttgaaagccattgctgcacacttttggtaccttctttcctttccacgtcgaagaggtacatgcattaatactaaatgagagactatttattctcttctttcaaattatttcccagagcttttatctacataattccccttaycaaaccaggctctaaggtctcctagatttttctttctttcttttttttttttttttttgagacagagtcttgccctgtcgcccaggctggagtgcagtggggccatctcagctcactgcgatgtctgcctcccaggttgaagcgattcccctgcctcagccttccaagtagttgggactacaggcatgcaccaccatgcccagctaattttgtcatatttcagtagagacggggtttcaccatgttagtcaggatagtttcgatctcctgatccttctagactcttgttaaagacctggtctgttgtattcaccttgaaaaacttagagacaaattagttttttatagtttaccctagagctatgtgagaaaagtgaactccttcactgccctcttccctcttctagctttttttcacctgtaagtttgtaaatcaggacactgtaatgataactctctcagggatcatttaagagaggagctgagttcaccatacagaaacatacaataggtgattatctctgtgggacaccgtcagagattctgggaagaccctttcacgctcagaagtagtgttccagggaagaccgatgatatttctaatagagtacattccctacgataagggcacaaaaagatgtttcacaaaaatatattgttgttaacactccatgatattagctgacttaattagaggtttcctcagttcactctct

SEQ ID NO: 58216 - DNA, 955 bp, Homo sapiens
tgtcaaatccctggttatattctccttttaaagataatttttcccatctatttccggcattttatacatttctaaatattctttttatctgtttcttcacaatcaaatacatatttgactgactgtgccagaggcaatgtcctataatcaacaaatcccatgtgttttctctcttgagcataagaccaagctctgcttcctaggcacttctgccatgtgagtaaaatctgtccaaagaatatgatcaaatgtgatgtatgccacttccaggcctttctcctcaaatctgtatgctctccttcctccaactggtgttttactcttcatctggcagctggaggcaggggatttgctagaggactgtgaggtcccagtaatgcagggccactaggagaaggatgcctggatctctaaatcactatatggaacaaagagagatacttactgactcacattttactgtaatatgagcaattaaaaagccttattgagattgtgtttgttacaacaattagtatatcctgattaatataccaacctaagtcaggtgggcacccaattaaagctaaaattttacaatttttgtaaaatgtaattatttctgtgattatcaatgtttattagactgtatttcttttttatcattagtataagtattagcctcccattttccactcattcttataaaataagtatattcaaatattcaaacatatatataaatgcctctctataggctaagatggttatattgtctaaaataaactgttggctaatagcaacaccattaggagatagcttgaaaattgttttccagctgggcacagtggttcatgcctgtaatcctagcactttrggaggtgggcggatggccacctgaggtgggcagatggcctgagctcaggactttgagactaccctgggcaacagagtgaaacatcatctctactaaaat

SEQ ID NO: 58217 - DNA, 784 bp, Homo sapiens
ggggaaggagtgttgccattaagcatgttctgggtggtctcctgggggtgcatgtgctattgttgtacatgctagtacatacgttacatgtctcattagcatctcaaatttccatccaggggtgagatttttactgtgaaaatgaaggacactaatcatgagttctgcccttgcatgaattggggtattttcctttctgctcttctacctccttgctgcaggatgttctaaccatgagcacagaatgtggtttgttctctccatctatttaccaagtttgttctccttcaagggaagctatgaccactctatctaacctacctaccattatccagaggaaatcatattctatgtwgtctttatgtttttagacattttcatggctactgaacccatctataatgggttctagtacaaactaccattaaatgtataatatagttatggcaatgattctacgggaagttgttttgtgttacaactttggactcataagttacgaacaagtctcctctggggcaccacctcagcaacaggaattgaatattctagccaaggtagcgatttctatgaggaatgtataggattggtatttaggggctacatctgtattattcttctccctggacttaggagcagcttatacagttcctggaaagtatttcaatgaaatttgattcaaaataaattgtatattcttcactaaaaggatagacaccaatggatgtaatgactcaatgagccatagatatctcagtattagagcaaacattcacacaatgat

SEQ ID NO: 58218 - DNA, 784 bp, Homo sapiens
ggggaaggagtgttgccattaagcatgttctgggtggtctcctgggggtgcatgtgctattgttgtacatgctagtacatacgttacatgtctcattagcatctcaaatttccatccaggggtgagatttttactgtgaaaatgaaggacactaatcatgagttctgcccttgcatgaattggggtattttcctttctgctcttctacctccttgctgcaggatgttctaaccatgagcacagaatgtggtttgttctctccatctatttaccaagtttgttctccttcaagggaagctatgaccactctatctaacctacctaccattatccagaggaaatcatattctatgttgtctttakgtttttagacattttcatggctactgaacccatctataatgggttctagtacaaactaccattaaatgtataatatagttatggcaatgattctacgggaagttgttttgtgttacaactttggactcataagttacgaacaagtctcctctggggcaccacctcagcaacaggaattgaatattctagccaaggtagcgatttctatgaggaatgtataggattggtatttaggggctacatctgtattattcttctccctggacttaggagcagcttatacagttcctggaaagtatttcaatgaaatttgattcaaaataaattgtatattcttcactaaaaggatagacaccaatggatgtaatgactcaatgagccatagatatctcagtattagagcaaacattcacacaatgat

SEQ ID NO: 58219 - DNA, 574 bp, Homo sapiens
tggacagatcccttacgcagtttcttttttgtaaaatgaaggaccttggttcgctaatgtttaaggattttttcctttctcaaacgttgtgttctaaaccttgtacaggcttctaattgaaattgttctacctttaaggcccatttgtctcctttctttttaccaaagcccagggccaagcatgtcccaggtgtttattatatagttgctgactgataagaagtgattgttggaatgctctctattggtcactaggaataaaccaagaatgtctttgggcaggaatgaaaatccagtgggaagctctggaagtcaaggaatatttccccatcagaagctggtctggggtttctctgataaatttggaaagctcagtggttgtcttgtttttctacctctgctaatcagcctctctaaacagataagaaaccaggaaaatcatttagctatataaattcaatacataaccttgttaatcacgttgctgcagcctgcgccttgtgagttggtcagagcagtggatgactttgcttctaagtgcaggtgaaatgccaccaaattcacatgctscctg

SEQ ID NO: 58220 - DNA, 743 bp, Homo sapiens
gaattatatggctattttgtagatgagaatagtacgtataattccacacttttttaccaaagcctgaataaaacagattttatatattcttccctaaaatagaatatatctttcctcttgctaactatctgccccaaacccagtatccaacttaatgtgattatattagaggcagttttgtaatatcaggatcaaaaatgatgcccactattactacaattatttaatattttactgtcacatttagccagtgcagttggacaagactaagaaactagatgtgtgaatataatttagaggaagaggaaaaactatttctacttgcaaagtaraacatgtgatacccaggaggtcacagtgtggtaggctaaattatgacccccatataggtccacagcctgatcattggaatgtctgaatatgggacctttgcctggcaaaagaactttgcagatgtaattgaattaaggcttttgggatgaggagatcatcttagataatctggatgtgtttcctgtaatcacaaggctccttatcagagggacgcaggaagagtccgtcagatagaaggtgatataacaaggaagcagaaggctagagagaaagaaatttgaagatgctttactgctggcttgaagatggacaaagggagcaatgagccaaaggacaagcaaggcctgtagaagctaaaataggtaagaaatcagatttttccctagagcctccagaaggagccagtcctg

SEQ ID NO: 58221 - DNA, 655 bp, Homo sapiens
cctggaccaaatgggcaaagcctggatcacaatatgaacctttggaggaacaaacaacctcatcctgatcaaagatgcccttccccttgtcaccattatgatgctactcaaatastgacatggctccaatgtgtacagaggctgatgtggggacgtctgctccatcataatgtcactgtgatttactcactgctcctggccacacctaagcctggtctaggctggcttgggctcattgggtttagcatttcctttcaggccaatgcagaggaacttagcttgagagctcagagacagagatgtcaatgtgaaataggaaataggacagactactaataatactggatcaggaaactccaagataattaaggttgtccgctgaagtccactggacactattcacacctcatttctcacttctctgttgtgacagcccaacatagttgagatcctcaggaaagaaaacaaattcacttgatccttgctgaggcttcaacatttcaaccactgaaaactttcttcaaatcttttcttacttgagtttaccttgtaacttctccagacaaccatctaaaataatgttcttcaaagttgtggttcataaactacctacattagaatttcctgaactacttgttgaaaaatgcaaattcta

SEQ ID NO: 58222 - DNA, 655 bp, Homo sapiens
cctggaccaaatgggcaaagcctggatcacaatatgaacctttggaggaacaaacaacctcatcctgatcaaagatgcccttccccttgtcaccattatgatgctactcaaatactgacatggctccaatgtgtacagaggctgatgtggggacgtctgctccatcataatgtcactgtgatttactcactgctcctggccacacctaagcctggtctaggctggcttgggctcattgggtttagcatttcctttcaggccaatgcagaggaacttagcttgagagctcagagacagagakgtcaatgtgaaataggaaataggacagactactaataatactggatcaggaaactccaagataattaaggttgtccgctgaagtccactggacactattcacacctcatttctcacttctctgttgtgacagcccaacatagttgagatcctcaggaaagaaaacaaattcacttgatccttgctgaggcttcaacatttcaaccactgaaaactttcttcaaatcttttcttacttgagtttaccttgtaacttctccagacaaccatctaaaataatgttcttcaaagttgtggttcataaactacctacattagaatttcctgaactacttgttgaaaaatgcaaattcta

SEQ ID NO: 58223 - DNA, 655 bp, Homo sapiens
cctggaccaaatgggcaaagcctggatcacaatatgaacctttggaggaacaaacaacctcatcctgatcaaagatgcccttccccttgtcaccattatgatgctactcaaatactgacatggctccaatgtgtacagaggctgatgtggggacgtctgctccatcataatgtcactgtgatttactcactgctcctggccacacctaagcctggtctaggctggcttgggctcattgggtttagcatttcctttcaggccaatgcagaggaacttagcttgagagctcagagacagagatgtcaatgtgaaataggaaataggacagactactaataatactggatcaggaaactccaagataattaaggttgtccgctgaagtccactggacactattcacacctcatttctcacttctctgttgtgacagcccaacatagttgagatcctcaggaaagaaaacaaattcacttgatccttgctgaggcttcaacatttcaaccactgaaaactttcttcaratcttttcttacttgagtttaccttgtaacttctccagacaaccatctaaaataatgttcttcaaagttgtggttcataaactacctacattagaatttcctgaactacttgttgaaaaatgcaaattcta

SEQ ID NO: 58224 - DNA, 594 bp, Homo sapiens
cccacaaatggatataatgggagagtaagaactgcaggactgtggataccaagaaacacctttgagcactgtgacaagaacgcctttcccttcctgacactctgacctcctggcttcgaggatgaggtattctttgactgtccaactcagacaggttcatgttcttttcaccatggattcctgcaggtcaatcctccacactctgcaacggttcttccaaaagacccctccttcactgtgatgttggcttctgcttcccgataatggctctttcttatatcaatacatttctgtgtcacccagygtcaccccaagcgtaccacatattcagctgccttcagatgactttcagtgggatgctctgccctcactggaatataaatgaattaatataaaccaagcacctactatgtgcaagctgccatgtgggatgtattttaaccttttacatcatcagagttaattggaggaaatgcagaacaggattgtctcatagagagggagctgggggtggaccccacctgggcagagcatatgtgcatgggacccatttactgctttcatcacttgccttcgtgggatggagccacatct

SEQ ID NO: 58225 - DNA, 717 bp, Homo sapiens
ctggtcattggcccctactttatatgaaggggagggagcagtgctgttctctgagatgggtaggactgaaaaaagctttgatttggaaggacagatcctgagttctattaggccttccctcttatctaggtcagaactcactgtataaaccctcacaacatacagcactgttgtaattaatcattatctcagtagttatgcgtttattatgtgaatttcctgaacaattattaggtccatgagggtgggacttgaatttctcttgttcaccaggaaatccacaaggcctgacttgctggcattcagcgaatgtttgttgaataaattagtgaccatctgccttgctccttccacccatgggaaatcaccgtttgaaacattcagcatttctgcaacctccatgcatcccaaacagaatttgttactaactgcacatgctggagttgaaaagcactgggcttggactcaaaagacctgggttgaagtcccgctagttatgtgctgtgctagcaaaakgtctacagatgagtcagaaatgcccagaatatgttccttcgttgacagagtgacctgaaagccgggccattcagaatacagaccacaccaaactgagccaaagcagtcatccttctgaagatgttatctccagcatgccctataatggcttatttcactttgtttaattttattccattgtattgttatttttatatgatg

SEQ ID NO: 58226 - DNA, 717 bp, Homo sapiens
ctggtcattggcccctactttatatgaaggggagggagcagtgctgttctctgagatgggtaggactgaaaaaagctttgatttggaaggacagatcctgagttctattaggccttccctcttatctaggtcagaactcactgtataaaccctcacaacatacagcactgttgtaattaatcattatctcagtagttatgcgtttattatgtgaatttcctgaacaattattaggtccatgagggtgggacttgaatttctcttgttcaccaggaaatccacaaggcctgacttgctggcattcagcgaatgtttgttgaataaattagtgaccatctgccttgctccttccacccatgggaaatcaccgtttgaaacattcagcatttctgcaacctccatgcatcccaaacagaatttgttactaactgcacatgctggagttgaaaagcactgggcttggactcaaaagacctgggttgaagtcccgctagttatgtgctgtgctagcaaaatgtctacagatgagtcagaaatgcccagaatatgttccttcrttgacagagtgacctgaaagccgggccattcagaatacagaccacaccaaactgagccaaagcagtcatccttctgaagatgttatctccagcatgccctataatggcttatttcactttgtttaattttattccattgtattgttatttttatatgatg

SEQ ID NO: 58227 - DNA, 717 bp, Homo sapiens
ctggtcattggcccctactttatatgaaggggagggagcagtgctgttctctgagatgggtaggactgaaaaaagctttgatttggaaggacagatcctgagttctattaggccttccctcttatctaggtcagaactcactgtataaaccctcacaacatacagcactgttgtaattaatcattatctcagtagttatgcgtttattatgtgaatttcctgaacaattattaggtccatgagggtgggacttgaatttctcttgttcaccaggaaatccacaaggcctgacttgctggcattcagcgaatgtttgttgaataaattagtgaccatctgccttgctccttccacccatgggaaatcaccgtttgaaacattcagcatttctgcaacctccatgcatcccaaacagaatttgttactaactgcacatgctggagttgaaaagcactgggcttggactcaaaagacctgggttgaagtcccgctagttatgtgctgtgctagcaaaatgtctacagatgagtcagaaatgcccagaatatgttccttcgttgayagagtgacctgaaagccgggccattcagaatacagaccacaccaaactgagccaaagcagtcatccttctgaagatgttatctccagcatgccctataatggcttatttcactttgtttaattttattccattgtattgttatttttatatgatg

SEQ ID NO: 58228 - DNA, 555 bp, Homo sapiens
gggtcagagcaggtgtcatttgggagatgatgcctaggccgagtcttgaaggatgagaaaagtattaggcggggggacacaggagcgagaggcctctgtgcagaagaacacgggcaagggcacaaaatcgagggccggggggagagagaggtggggagcagccacaacctggaggtgcatatgcggctcgcaggtggatatacactagtgaagacaggaaccagggagggagggtcttctcctcagggataaatatacactttattcttctaagggcaaagaaatatgtcaaaggatttcttttaaaatacatttaacgtgttttacaataatatttgttttctacatatgaaaaatatacccaaaaagttgggggggagggggtggggggaaacagaaaagtagagggaagaagaggaacaaattacccagggctctactgctgaagaaaactccagctaacattccacacaactgaagggttctaatcaaagtcacacccacagtgtctggtttacttctggtagcaatgaggaaaataggctgaaggkgaat

SEQ ID NO: 58229 - DNA, 823 bp, Homo sapiens
ggggttccagaccagcctgtccaacatggagaaaccctgtctctactaaaaatacaaaatagccaggtgtggtggtcagctactcgggaggctgaggcaggagaatcgcttgaacccggggggcggaggttgcagtgagccgagatcgcgccattgcactccagcctgggcaacaacagcgaaactcaatctcaaaaaaaaaaaaaaaaaaaaaagtttagatattatcgatttaagcatagtatgatttaaagaaagtttatctcggccgggctccttggctgatgcctgtcatcccagcactttgggaggccgaggtgggcgcatcacttgaggtcaggagtttgagaccagcttggccaacatagtgaaaccccgtctccactaaaaacacaaaaattagccgggcgtggtggcacgcgcctgtaatcccagctagtccagaggctgaggcaggagaatcgcttgagcttgggaggcagagrttgcagtgaaccgagatcgcgccattgtattccaggagcctgggggacagagcgagactccatctcaaaaaaaaaaaaaaaaaaaagtttatctcaaagttatttgaggttttgtcaaccgtggaaccgaataacaagtataaggaagaacaatacaattcatatctattttttttaaaagttattgcgtgttttaaagcagcagttggtgatctggcttactgcgggttttagccttccacggtccacagcccaaggtccaggtgttgtcctataaaagtctctggaagcacagacttgactcttcccctgagataggtatgggatagaaatggaaa

SEQ ID NO: 58230 - DNA, 1082 bp, Homo sapiens
tcaaaaatgcctggtctaggtgggtacagatattttcataacaggtattcagaaaaattagctatttttaacagtgttttattagtttttgtctcgttttctcagtgctattactgttttgcaattcagaattatcatttatgtatcttactyattccgtaagtttgttgtggcttagttaccattatgatatattgtgtagtacttttttcatttatatgggcacagtaaatatgctgtggctaggtaaaatgtaatatttatttcaataatgagacagccatgtattttctgccaattggtgtgtactttgctgtcaaggtgaaaaaatactcctttcagggctaacgtaggtttgtacaatgtgttttggtcataggatgtttgaatctgtccttccctagaatttatttgaatgccatgtaatcaccctttttttactaaagaatgtgattcctttgtgttcgtaaaaattaaagatcatgattgggaagttttataactctgttgtatataaatgttgctttttgtgtaattctgttattcagtatgaaatatttatatactgtctctaattaattggaaacctatggttttcatttcttatagatctgtctcgtaactgtgtaatcaaggaactagcaccacaacaggaaggtaacccaggagaagtattccacacagtgacattggaacaacatgaaaaacatgacattgaagagttttgcttcagggaaatcaagaaaaaaatacacgactttgactgtcagtggagagatgatgaaagaaattgcaacaaagtgactacggccccaaaagaaaatcttacttgtaggagagaccaacgcgatagaagaggtataggaaacaagtctattaaacatcagcttggattaagctttctaccacatccccatgaactgcagcagtttcaagctgaagggaaaatttatgaatgtaaccatgttgagaagtctgtcaaccatggttcctcagtttcaccaccccaaataatttcttctaccatcaaaacccatgtttctaataaatatgggactgatttcatctgttcttcattactc

SEQ ID NO: 58231 - DNA, 1082 bp, Homo sapiens
tcaaaaatgcctggtctaggtgggtacagatattttcataacaggtattcagaaaaattagctatttttaacagtgttttattagtttttgtctcgttttctcagtgctattactgttttgcaattcagaattatcatttatgtatcttacttattccgtaagtttgttgtggcttagttaccattatgatatattgtgtagtacttttttcatttatatgggcacagtaaatatgctgtggctaggtaaaatgtaatatttatttcaataatgagacagccatgtattttctgccarttggtgtgtactttgctgtcaaggtgaaaaaatactcctttcagggctaacgtaggtttgtacaatgtgttttggtcataggatgtttgaatctgtccttccctagaatttatttgaatgccatgtaatcaccctttttttactaaagaatgtgattcctttgtgttcgtaaaaattaaagatcatgattgggaagttttataactctgttgtatataaatgttgctttttgtgtaattctgttattcagtatgaaatatttatatactgtctctaattaattggaaacctatggttttcatttcttatagatctgtctcgtaactgtgtaatcaaggaactagcaccacaacaggaaggtaacccaggagaagtattccacacagtgacattggaacaacatgaaaaacatgacattgaagagttttgcttcagggaaatcaagaaaaaaatacacgactttgactgtcagtggagagatgatgaaagaaattgcaacaaagtgactacggccccaaaagaaaatcttacttgtaggagagaccaacgcgatagaagaggtataggaaacaagtctattaaacatcagcttggattaagctttctaccacatccccatgaactgcagcagtttcaagctgaagggaaaatttatgaatgtaaccatgttgagaagtctgtcaaccatggttcctcagtttcaccaccccaaataatttcttctaccatcaaaacccatgtttctaataaatatgggactgatttcatctgttcttcattactc

SEQ ID NO: 58232 - DNA, 990 bp, Homo sapiens
agccccaaaaatatgcttttactttctgcaatgacaaataattcaagtgaaagaaatatcattcctaaatgtaaagtactaaaattggccaggtgtggtggctcacacctgtaatcccagcactttgggaggatgaggtgggaagatcacttgagtccaggagtttaagaccagcctaggcaacatagtgagacttggtctccacaaaaaatataaaattaggcaggcatgcctggtgcatgcctgcagtcccagctacttgggggactgaggtggaaggattgcttgtgcctggaaggtcaaagctgaagtgagctatgatcacaccactgcactccagcctgggtgacagagcaagaccctgtctcaaaatatgaaaaaagaaaataaaagtactgaaatcgtataaatgcccatttttaatcatgtatctcagaatgatcaattcaaatatggaaggtctgttcattagccatatatgattaataagaggcttgaatgagtggaaataaaaatgtaactatcaactgtattttccaactagttgcctaatatgaaaataaggctctcactgtgggaaacaagcaaaaatattggtgtttgtgatatatgcacawacagaaagttttatttcagctctgtcaatctgaaagatggcaagtcacaatcatcttttgacttttttattctggaattcttcagtctgctggagcaaattattcttatttaagctgtaccaatatcactatactaactatactgcttaatttacctcaacataatttatgtttttcccagtaatatttcctaaatacttatatgaatctaccacagttggcagaatgttattgctccaatagtacatagtctagtacaattgtaatgttttagatggcaattagagcaagttacactacataaatgaaatggtctgcaaaacttcatagcataacttgttgtgtactgaaatatttgtgatccaatttgatc

SEQ ID NO: 58233 - DNA, 602 bp, Homo sapiens
attgaaatacaagaaggaatgaactaataataagtgaaataaggcaagaaaaaaattagctcggaccaagaaaaagttcagttcgacaacaggaagaagttatttattataaaaataaaatwatatattaagttatagcaatgatgaaaggccatctcatggtataagaacaaggtagaagtaaatttaggcttaggacaaatctgacaagtttagaagatgtaagacaaaagagccagcatcattcatatatgccaggcattattccaagtgccttacatgtattaattcatttaaacttttaacaacttgaaggagaatgatcactttttacagatggaaaaattcaggtgtgaaaactaacataactttgtaaaaactgttgtcattatttccttgaaataccagctgttatgctgctaatatttcctatgcctgtatgattttcattcatcgaattggagatgttaatctcaaatttaatgttttgaaagctggattaatatttaagccaatcagaagagactgtacaattttattgtctgggccatgggagtaaatgaaatcaataaattttccctgaattaaccttggggacaatg

SEQ ID NO: 58234 - DNA, 602 bp, Homo sapiens
attgaaatacaagaaggaatgaactaataataagtgaaataaggcaagaaaaaaattagctcggaccaagaaaaagttcagttcgacaacaggaagaagttatttattataaaaataaaattatatattaagttatagcaatgatgaaaggccatctcatggtataagaacaaggtagaagtaaatttaggcttaggacaaatctgacaagtttagaagatgtaagacaaaagagccagcatcattcatatatgccaggcattattccaagtgccttacatgtattaattcatttaaacttttaacaacttgaaggagaatgatcactttttacagatggaaaaattmaggtgtgaaaactaacataactttgtaaaaactgttgtcattatttccttgaaataccagctgttatgctgctaatatttcctatgcctgtatgattttcattcatcgaattggagatgttaatctcaaatttaatgttttgaaagctggattaatatttaagccaatcagaagagactgtacaattttattgtctgggccatgggagtaaatgaaatcaataaattttccctgaattaaccttggggacaatg

SEQ ID NO: 58235 - DNA, 656 bp, Homo sapiens
gcaggcccactgaagcaatacaagtatttcttccttaaacagcatgaaacgtgcatttgtgtgggagaatgcttcaaatccatattaatgaagaagtgatggctaagaggaatctgtcttcaaagcatcagatgcacataaaatataagccaggagtataatatttacatagtgctcagtactaccttaattactacaaagtatcagagtactgagggatcagtacatccagacaggccctggtggcagacacctggcaatgtcacccagtgccctcagggtgaaaggtacgtgggaaccaagatacgcaagctcataagccaaatgtgcacatgtccccgctccacgttgagggacatcatgtgagcagcttaaacttggccatggtagaagtatttacactacagaaattggcaaattctacaagtcatgtttcccctccctcctacttgggaagarccttagcagccactcttcccagcaagctttgggaacacactgtaaaccacccaaactccatggagaatgccatagtaccttcccttagaaacccacacagaacagaagtatctgatgtgggaaccctcagctccttttaggccattttcctgacctcctctgcagcactgtgcactgaacccctccctggaatccca

SEQ ID NO: 58236 - DNA, 851 bp, Homo sapiens
catacaaataggtggaactattacataaggaagaaggtaggagaaaggaagttgcagggagaaaagaaggagaaagagtgaaaaatatgagagatagtaaaagaaaaacctggaagagacaaaagagcaggggacagaacaccacgcaccttcaacccactggaccacaccagcctcaaatctgcgctgagtgcaggctctggtcctcccctcagccagggacagtggggttctccttgtatcccatggcccaaacgtgactctggcagcggctaaggtggaaccagtgctctggacactgtccaggcagacaattctgggagtcaccatggctggagtggtgcgatcttggctgactgcaacctccacctccggagttcaagtgattctcgtgcctcagcctcccaagtagctaggattacaggtgcgcaccatcccatccagctgatttttgtatttttttagtagagacggggtttcgccatgttagccagactggtctcaaactcctgaccgcaagtgatccatgcacctcggcctcccaaagtgctaagattacatgcgtgagctactgtgcctggcccatggcaacatcttgagrgtcaaatccccactacctagagcagggaccccactaacaagcccttggcattgctccttccctgtctcactcttctcactccccactcctgcttcctgggaataccactcaggtaaactacctgcagccaaagctgcttccagtggggaacctaagctaagactctgcccactcaagactgccccaaatacacacctccaagcccccacatccttcatcaattctctgtggcctcatgcaacgtggatcc

SEQ ID NO: 58237 - DNA, 1106 bp, Homo sapiens
gaaagaatcatggaagatgaaaacataaaggaaaataaatgaacaaagttatttaactttgtatataaaaagataccataaacaaaacatagaggcaaatgatgacaaagtattaagatacaaagagctgtaagacatcaacaagataaaatatgagcactacagaaataagcaagagatgtaaataaacttttttcaaagtttctataatagacatgttatgggagaaaattaaaaaggaaatgactcacctatagcttaattaaagctacatcctagatcagcaatggagctagaacaaggggtctatgactcagcaccctgtttaccaagccagtcccaggcaaaacatgagactggtaagcgtcaaaagagaaacacaaataatgaagtacagcagccctgtgggaaagcaatcatctggaatttagaaataaagctgtaccggcccctcctatttccatcccttttgctctactttacccctttcttcctagaatcagagaattgaggctgaaagaaacccaagaaacgtgaaggtatcatttctttattttgcgacgtgacaaaactgagacccaagtagtggaaaaagttggcactgaggcaagctacctgttccagtggtcctctcattgcacctgatgactgatgcctttcttttttttggcagggggggtgtagggaatgggtctcactctgtcaccctgcctggagtgcagtggtgcgatcttggctcactgcaacttccgcctccagtctcaagcaatcctcccacctcagcctaccaagtagctgggaccacaggtgtgagccaccatgccccgttaattttttgtatttttggtagaggcagggtttcaccatgtttcccaggctggtctcaaactccttcgctcaggcaacccactcacctcccttggcctcccaaagtgctgggattataggcatgagccactgygcccgacctggatgcccttcttaccagagaactgaaaagtgctgaaaacaaagacatgactttacaaatacctcaccctcccaaaaatgtcagcagaaagaaagaaagagaaacaatacaaattcccaatgttttgttagaaaat

SEQ ID NO: 58238 - DNA, 1501 bp, Homo sapiens
atagtgtctgtgtcttacccaatctgggaaaaatagaattattgatgccaaaagaaagttttgtattttcttttgagtgacagaatcagatatcaacattgtcatataaacaggcaggtctgggattaattccttggccaaaatgagcaaacacaaaagacttttcagaaaagctgtgctttgctcctttccctgtggtgctggtctttaaaacaaacaaaccaaccacaaagaatgggggaagcattctcaaacagatgaaaactaaaccaataaaaacctacaatcattcattttgaaaaggaaatggcaagctagtcagtaatatctatcttctctagggcttattaattttttttaggccacaattatttggtgattcttcccttgcttaaaagtaagcactccaaggctactaaagagcatttttttaatatagtataaaaggtattaagtttagctttaataccccagtctcttcgatgagttgttgatgtaatagttgatgcatatcaacttatttacccagcataagctgttcccaatattaaaatgcaaacttacaagttacttgaaaaaatgtgatacatcactgagaagctccacttcaccatatgctcccactctctgccctcaactcctaccccaatttggcacaaggtatttactgcttctaaagatttcattcctctttatttaattattttattttttctgtgtgtgtgtgaatccagctggtcaactctttatttcctatttttctttaagaagtgtataaatacatacacccacatacacacacacagccacatactctctcacacacacacaagtcactttaccatacagttatgtaaccagaggatgcctgtcctgactaatatccttttarataaagcatttgaaccatcacaattgctggtttaatctaataatttaatgtggaaatctactttcaagtaagacacccccttaaaaaacaaacattaaataaccaattggaccaaggcatatttgatattttaaatcttgtcacaaatcttatagacttaaataaagtgcagagttgagaaggaaaaaaattaacatattccgatgaataaattatgacctaagtatgggttacatgtaatcattcagatagacgctgtgtctcaaatgtaaaaggtatagatattttttggaaaagccaactgtttaataattagaatctttgatgtagaatgattaaatacagatttttacgacaattctttgtgagaatgtcactaatgttttactagaatctcaaagatgccaaattctgtaactagaagcaatgattctgccatcaaagttatctagacttaaatcctgcttgtatcagcttagttttgctgtgtgacttggaccaattacttaacctctctgtgactcagtttcttcacatgttaaatgcagataattttagtacccattattataagattcttgtgaagatttaacaaatcagtatgtgtaa

SEQ ID NO: 58239 - DNA, 1501 bp, Homo sapiens
atagtgtctgtgtcttacccaatctgggaaaaatagaattattgatgccaaaagaaagttttgtattttcttttgagtgacagaatcagatatcaacattgtcatataaacaggcaggtctgggattaattccttggccaaaatgagcaaacacaaaagacttttcagaaaagctgtgctttgctcctttccctgtggtgctggtctttaaaacaaacaaaccaaccacaaagaatgggggaagcattctcaaacagatgaaaactaaaccaataaaaacctacaatcattcattttgaaaaggaaatggcaagctagtcagtaatatctatcttctctagggcttattaattttttttaggccacaattatttggtgattcttcccttgcttaaaagtaagcactccaaggctactaaagagcatttttttaatatagtataaaaggtattaagtttagctttaataccccagtctcttcgatgagttgttgatgtaatagttgatgcatatcaacttatttacccagcataagctgttcccaatattaaaatgcaaacttacaagttacttgaaaaaatgtgatacatcactgagaagctccacttcaccatatgctcccactctctgccctcaactcctaccccaatttggcacaaggtatttactgcttctaaagatttcattcctctttatttaattattttattttttctgtgtgtgtgtgaatccagctggtcaactctttatttcctatttttctttaagaagtgtataaatacatacacccacatacacacacacagccacatactctctcacacacacacaagtcactttaccatacagttatgtaaccagaggatgcctgtcctgactaatatccttttaaataaagcatttgaaccatcacaattgctggtttaatctaataatttaatgtggaaatctactttcaagtaagacacccccttaaaaaacaaacattaaataaccaattggaccaaggcatatttgatattttaaatcttgtcacaaatcttatagacttaaataaagtgcagagttgagraggaaaaaaattaacatattccgatgaataaattatgacctaagtatgggttacatgtaatcattcagatagacgctgtgtctcaaatgtaaaaggtatagatattttttggaaaagccaactgtttaataattagaatctttgatgtagaatgattaaatacagatttttacgacaattctttgtgagaatgtcactaatgttttactagaatctcaaagatgccaaattctgtaactagaagcaatgattctgccatcaaagttatctagacttaaatcctgcttgtatcagcttagttttgctgtgtgacttggaccaattacttaacctctctgtgactcagtttcttcacatgttaaatgcagataattttagtacccattattataagattcttgtgaagatttaacaaatcagtatgtgtaa

SEQ ID NO: 58240 - DNA, 1501 bp, Homo sapiens
atagtgtctgtgtcttacccaatctgggaaaaatagaattattgatgccaaaagaaagttttgtattttcttttgagtgacagaatcagatatcaacattgtcatataaacaggcaggtctgggattaattccttggccaaaatgagcaaacacaaaagacttttcagaaaagctgtgctttgctcctttccctgtggtgctggtctttaaaacaaacaaaccaaccacaaagaatgggggaagcattctcaaacagatgaaaactaaaccaataaaaacctacaatcattcattttgaaaaggaaatggcaagctagtcagtaatatctatcttctctagggcttattaattttttttaggccacaattatttggtgattcttcccttgcttaaaagtaagcactccaaggctactaaagagcatttttttaatatagtataaaaggtattaagtttagctttaataccccagtctcttcgatgagttgttgatgtaatagttgatgcatatcaacttatttacccagcataagctgttcccaatattaaaatgcaaacttacaagttacttgaaaaaatgtgatacatcactgagaagctccacttcaccatatgctcccactctctgccctcaactcctaccccaatttggcacaaggtatttactgcttctaaagatttcattcctctttatttaattattttattttttctgtgtgtgtgtgaatccagctggtcaactctttatttcctatttttctttaagaagtgtataaatacatacacccacatacacacacacagccacatactctctcacacacacacaagtcactttaccatacagttatgtaaccagaggatgcctgtcctgactaatatccttttaaataaagcatttgaaccatcacaattgctggtttaatctaataatttaatgtggaaatctactttcaagtaagacacccccttaaaaaacaaacattaaataaccaattggaccaaggcatatttgatattttaaatcttgtcacaaatcttatagacttaaataaagtgcagagttgagaaggaaaaaaattaacatattccgatgaataaattatgacctaagtatgggttacatgtaatcattcagatagaygctgtgtctcaaatgtaaaaggtatagatattttttggaaaagccaactgtttaataattagaatctttgatgtagaatgattaaatacagatttttacgacaattctttgtgagaatgtcactaatgttttactagaatctcaaagatgccaaattctgtaactagaagcaatgattctgccatcaaagttatctagacttaaatcctgcttgtatcagcttagttttgctgtgtgacttggaccaattacttaacctctctgtgactcagtttcttcacatgttaaatgcagataattttagtacccattattataagattcttgtgaagatttaacaaatcagtatgtgtaa

SEQ ID NO: 58241 - DNA, 1501 bp, Homo sapiens
atagtgtctgtgtcttacccaatctgggaaaaatagaattattgatgccaaaagaaagttttgtattttcttttgagtgacagaatcagatatcaacattgtcatataaacaggcaggtctgggattaattccttggccaaaatgagcaaacacaaaagacttttcagaaaagctgtgctttgctcctttccctgtggtgctggtctttaaaacaaacaaaccaaccacaaagaatgggggaagcattctcaaacagatgaaaactaaaccaataaaaacctacaatcattcattttgaaaaggaaatggcaagctagtcagtaatatctatcttctctagggcttattaattttttttaggccacaattatttggtgattcttcccttgcttaaaagtaagcactccaaggctactaaagagcatttttttaatatagtataaaaggtattaagtttagctttaataccccagtctcttcgatgagttgttgatgtaatagttgatgcatatcaacttatttacccagcataagctgttcccaatattaaaatgcaaacttacaagttacttgaaaaaatgtgatacatcactgagaagctccacttcaccatatgctcccactctctgccctcaactcctaccccaatttggcacaaggtatttactgcttctaaagatttcattcctctttatttaattattttattttttctgtgtgtgtgtgaatccagctggtcaactctttatttcctatttttctttaagaagtgtataaatacatacacccacatacacacacacagccacatactctctcacacacacacaagtcactttaccatacagttatgtaaccagaggatgcctgtcctgactaatatccttttaaataaagcatttgaaccatcacaattgctggtttaatctaataatttaatgtggaaatctactttcaagtaagacacccccttaaaaaacaaacattaaataaccaattggaccaaggcatatttgatattttaaatcttgtcacaaatcttatagacttaaataaagtgcagagttgagaaggaaaaaaattaacatattccgatgaataaattatgacctaagtatgggttacatgtaatcattcagatagacgctgtgtctcaaatgtaaaaggtatagatattttttggaaaagccaactgtttaataattagaatctttgatgtagaatgattaaatacagatttttacgacaattctttgtgagaatgtcactaatgttttactagaatctcaaagatgccaaattctgtaactagaagcaatgattctgccatcaaagttatctagacttaaatcctgcwtgtatcagcttagttttgctgtgtgacttggaccaattacttaacctctctgtgactcagtttcttcacatgttaaatgcagataattttagtacccattattataagattcttgtgaagatttaacaaatcagtatgtgtaa

SEQ ID NO: 58242 - DNA, 733 bp, Homo sapiens
cccaggaacatctgtttcctttaaagatgagtgacagccagagagggtgagagctgaggacaataaaataaagtttactaattgatatggtttggctgtgtcaccacccaaatctcatcttgaattgtagctcccataattcccacgtgccctgggagggatctggtgggaggtacttgaatcatgggggctggtttttcccatgctgttcycatgaaagtgaataagtctcatgagatctgatagttttaaaaagaagagacccccctgcacatactctcttgcctgctgccatgtaagacatgcctttgctcttccttcatcttctgccatgattgtaaggcctccccagccacgttggactgtgagtccattaaacctctttcctttataaattacccagtctcgggtacatctttattagcagtgtgagaacagactaatacactcacaaagacaaatgtaatgattaaagcccagtcctcaggcattggagtccgtggcctagactcagagccactccactgggtctagctgagtgccctcaggtacttagacaccgttggcttctatttccttatttgtaagctggggagagtaaagcctttcttgtccccttttcatgatgcttaaaagaaataaacagtgtttggcacatagttgcatacaaggctgagttgaaagggtgagagtggtcatatgacaagccacacatgggagaagcgtgtgacgc

SEQ ID NO: 58243 - DNA, 1154 bp, Homo sapiens
gctgaataagggcaagggctgtgactgtttacaattgtatcctgagaacttatcacagggtctggcatataggtattcaatggattgttgtagactgaatgaatgaacaagttggatcacatgcactctcagttttaacctttgtaaagagaaaataaatctagagtccttcagtttaactttgttctcttgatcatttcagatatttttatctagactttcttctagctccattatgtttcttttggtgaggtagtaagaactgtgaatagataccaataatctcaataagtacaatttccttcgcattaccttacactggttagcaatagcacttatttgacactttttgccccaaatttgtaagtacaacacattaattcttgttggtctgacctttcaatatgccctcaaatttgcttttatttactctgctggaataaattcctccttccaaatcaattataaaaatgttaaacgagactatatttagcacctattaacctttttctaaccagaagggctcatcagcctctgtatttttgtatcctggatttaaataaattgtaaatacaaccaaatttgagtgtctaacatgtgcaaggacaactctcttgtccttgataaataatatacaatattctttggtatggagaagaattagaagacttttagattcatgaaaagggcctttaaaaagtccaagtaaaaaatcatgttttagtttcgccttatgtattgatttatttattgccttccactctctaaccccagatacacactcctatcatacctaagaattctataggaatccttttattcaccaatcctacaccactgtccttgcactctctgacctccctcctgtcatcctgaagaactctacagaaatccttttattcattaatcctgcccccctttattataaatgctactacagaagcttagagctggaatgaatcttaagagatttctaagtgtaattcccatataccagcttgatattcaccaataataaaacaaatcactatggccaagtatagtattttacctctttaatatatcagcatgccrtattacacatactacttacttgtactcatcatagacttcctgtttgggcagtgaagtctccggatgttcctctagggtat

SEQ ID NO: 58244 - DNA, 677 bp, Homo sapiens
tttatgttatatcccacctcttttgccgtcctcacccctacctccagctcaatcagttgtagcaatgccctgtcctcagaatatctgccttttcacttctctcatgacttttggttcttagatttttgtagttgcttccaaccttgcctctttccaatccaattgccatcctagattggtctacctttctcacaaaccttctgaaatcttcaatggcttctgatcacccatcatttaataataagcatagacacaatttattgagtgtctcataagtgaaagatgttcttaggaaacttctatgcttaatcttcgcagcaaatctgccagttgggattatccacaattttaaaaaacagaaaataccctccaatgattaaaaatcaaaatacaacatgaaagctgaacccctctgtgatttgccttgtttacttcctcagcctccatcttttcctccacttgctcccaaagctccaattaccacattgcttcattatcggtccttctacctgaaatgttttcyttctcataatttcctggcagagtatatacatccatcaggtttcagtgctttaaagatacatgccttaacccacctagcctggttttgatttctcttaattgtatttacttcatcttaccagttatcactctgtgagttccttgaaggtaaacac

SEQ ID NO: 58245 - DNA, 786 bp, Homo sapiens
cttgagcccaggagttcgaggctgcagtgagctgtgattacaccactgcactccagcctgggcaacagaacaagaccctgtctcaaaaaataaaaaaacgaaacaaacaaaggttcccaaaattgacttcatttagcttcataaaaagctcacttattgcccctatttttctcattttgtcggtgaaaactttgtcctaggctggcatttgggaaccacatggtctggctttcccagactcccagacacaaagacacacacagacccataccccccatgccacacacacacacacacacacacacaggcacacacacgcccctcatcacgagggctccagcccggccccctgatggagccctggctgttagtggtcagggtggccgcagctgctggagagtagatgggcagatacatctgcacctgtgcgggccaagggttaagtgccttttgcgaggtggtgagtaggagagagtcgtgggagcttcctgtttagacagagggaggttggggttatcttgctggctcccacactgagcagacgaagagatggggtgcccggcggtcagcatcccgcaggtagggaggtgacgtggggcaggggggcaggtggcaragcatccccagcctggaagaggcagagctggccacggctgcccctcccaaggagcatggcttaccaggacaccccgctctagccagaacccaggagccacagaatcgcaccagatcctggaaacagaggttgttatgagacccagaaagcactgggtccctggttgctct

SEQ ID NO: 58246 - DNA, 1497 bp, Homo sapiens
ctgcctcagagaaactttctcagagcctcagactgggtcaggtcccacgtaaacattctcaaggccagccgtgccttcttcttaacaggtgagacaccctggccttccctggttcataggcaactcccccatcggactgtgagcttcataaaagcagagacaggggggccttttcatggtgagctaccagccccctggcacagggtaggaatcgtggatgatggttggatgggtgtgtgtgcaactgcacctctgtcctgccactgtgaactctggtcatggacaaaacatagccccaggtgactgggccgtttgtctcacgaggagtgactctcaactggtatatttcaggcctttgccaaccccgaggatgccctgagacacggaggcccccagtattgcaggagcgaccccgacgtggaacgctgcctcaggcaagtacttcgggcccctggcctggccacacctggccatggcctgccctttcagaacttcttctgcacacaggggacttggaggactcccaggggctgaggttttctgtgttcctgatcttctctgactgttttactttattcaatgatttaatttcaaatgaactttggaaaagtaagacgtggtcatgactcataattacaaagtgagaaaggtggtgacttcagtgaacattcagtctccctcctacctctgacctccaggcactacgcagttctactggccaggggcaaacactcctgccaatggccatgcatcttcccacagagatttgctgcatttacaaacatgtgtgccacgcttttcccgttctgccccatagaatcaccctttatcctctggtctgtactatgcttttttttttttttttttttttttaatatggcaacagagtttgttccatatcggctcacagaggagttgcattcactgtattggtgctccagtatttatgttgccactctgttgaatgtacagcccataacttccctaaccaattcccctgcgatgggcatttgggctccttctgtgttatgaacagaaggcctcaatacctctttttttttttttttttttttttttttgagacagagtctcactytgttgcccaggctggagtgcagtggtgccaccttggctcactgcaacctccgccacccgagttcaagcgattctcctgcctcagcctcccaagtagctggggctacaggcgtgcaccatcatgcctggctaatttttgtatttttagtagagatggggtttcactatgttggccaggctggtctggaactcctgacctcagatgatctgtccgcctcggcctcccaaactgctaggattacaggcatgagccaccgcacccggcctcaacacttttttcatttgcctttatgggtatgtgtgagtaaaaccgcaggatgcaacaaaatcatgtcccactactggtgtgggagccatttttccatccctctgacaatgcaactgacaactcattgtattggc

SEQ ID NO: 58247 - DNA, 565 bp, Homo sapiens
ggagtgcattggtgtgatctcggctcactgtagcctcaacctcccaggctcaagcgatcctcccactttagactccctagtagcagggactacaggcgcatgccaccacaactgggtaattttttttttttttttgtatttttagtagagacggggtttcaccatgttagccaggatggtctcgatctcctgacctcrtgatccgcccaccttggcctcccaaagtgctgcgattacaggcgtgagccaccgcgcccggccacacctgggtcatttttgtattttttgtaaagacatgtttttgccacattgtccaggctggtcttgaattctggggctcaagagatctgttgcccatctcagcctcccaaagtgctgggactacaggtatgagccatggcctgggccaattcctgcttttaccctttcctgtacaaaaaggcataggtcgtaagtttcatatctcagtgtgttagcaatgtaaaacctggctcaccatatccaaaatagggtcttgatctggccttgggcaggctagaaatttaactgcactggtataaatcca

SEQ ID NO: 58248 - DNA, 694 bp, Homo sapiens
tccgggtgcagggtccaccctgcctccacggtccccgcctgcaccaccccaactcctactcatgggggtcacgatgctgccctcccaggggattcccctgctgcagacctgccccacctggccaggcactattggggaaaccaaggcaggggctttgcccccactctggggagtctgaggagtggcatgaacccaggaagacacaggagaaggaagggacaggcgggcctgcaggagcagccgagctgagctcctgatgcctaaggggcctgggtctgggcctgagtctgcgcctttccaggaggggctgggcttcgtgcaacygtgaactcctagggccccttcagcaggccttggctggcccagaggccctgaggcagttctgccagtccttacgaagcaatggccctgctcagggtgagggaagagaggcccaggcagcctcgcttcatttccaaggccgccatcttcatttccagggccgccatgtccccagctctggggtggctttgcccttggaggctggtaaccccaggaaacctctgcatctccctagctgtggtcagcaggccccttctccggcagaccctgcccctcgcaccctacaaggataagcagggttccctggtggcaaagccttgggccaggcctctatccctggcctgggggtgccctggcctcgcttattctcatc

SEQ ID NO: 58249 - DNA, 945 bp, Homo sapiens
agctttactcattggccagagggcatttgcctgatatacagttaagttctgtggaagaacctggcttatttagccaaatgccgtctgatgagaataaggatcaagagtttactgaggcatttgtttccaagcattgtgtagagtctttgtctttaagagtgtttttttctttctttctttctttttttttttttgagacagagtcttgcactgtcacctggactggagtgcagtggcacaatctyggctcactgcaacctctgcctcccaggttcaagtgattctcctgcctcagcctgcccagtagctgggacaatgggactacaggtgtccgccaccacacctgactgatttttttttttttttgtatttttagtagagacggggtttcaatatgttggccaggctggtctcgaatgcctgaccttgtgatccatctacctcagcctcccaaagtgctgggattatgtccgtgagccaccacgcctggctatctttaagagtcttgaagctgttctccctaattgagacttgggtcttcaaaggaagcccttaagcaaagatgggaggtgaacgtgaattctattcagttcccgtgtttagaattattgttaccttttgacactttaaaaaattgatataacactatgtggttagcatatgttgtgcacatagcaaattacataaggtacactaatattatgaataaagctcaatgagtatggacatacgtacacactcatgtatctactacctggaagaaaatatgggacgtttctagtgccccagaaggctctctcatgcttctttcctgttggtggcccccttccagcccataactactactctaatttccttaatgaagtcatacattctacatcttttgcatctagcttctttcattcaacttagtatctataaaagttacccatattgttgcatgca

SEQ ID NO: 58250 - DNA, 945 bp, Homo sapiens
agctttactcattggccagagggcatttgcctgatatacagttaagttctgtggaagaacctggcttatttagccaaatgccgtctgatgagaataaggatcaagagtttactgaggcatttgtttccaagcattgtgtagagtctttgtctttaagagtgtttttttctttctttctttctttttttttttttgagacagagtcttgcactgtcacctggactggagtgcagtggcacaatctcggctcactgcaacctctgcctcccaggttcaagtgattctcctgcctcagcctgcccagtagctgggacaatgggactacaggtgtccgccaccacacctgactgatttttttttttttttgtatttttagtagagacggggtttcaatatgttggccaggctggtctcgaatgcctgaccttgtgatccatctacctcagcctcccaaagtgctgggattatgtccgtgagccaccacgcctggctatctttaagagtcttgaagctgttctccctaattgagacttgggtcttcaaaggaagcccttaagcaaagatgggaggtgaacgtgaattctattcagttcccgtgtttagaattattgttaccttttgacactttaaaaaattgatataacactatgtggttagcatatgttgtgcacatagcaaattacataaggtacactaatattatgaataaagctcaatgagtatggacatacgtacacactcatgtatctactacctggaagaaaatatgggacgtttctagtgccccagaagkctctctcatgcttctttcctgttggtggcccccttccagcccataactactactctaatttccttaatgaagtcatacattctacatcttttgcatctagcttctttcattcaacttagtatctataaaagttacccatattgttgcatgca

SEQ ID NO: 58251 - DNA, 757 bp, Homo sapiens
attgaactggtgggttgatttagtaaacaggcaaatgtttggaatcttgtagagccataataaaaatagagatgaatgctgtgcttctgaggggagacagaaagcggccttttcattcgattgtcgacacaaagtgggaaaggattccttaaacctttcttaattatgtggatcttgaagtagatctttggaacaataaagtcaggatggatactgaagtggtaagaagttcaagttgtagaatagcattaaatatcatttttcaccttaatggaatgtatttttaaaaatctttttattggcttacttttttggcctaaagtatttccaacttattattgtttttattttcaaataatccatattatgtgctacaaggaaaatacataaatatatatttcagttatatttccccctccctctttcgtttttatccctttaaaatgtatccagtgtttctcttggctcatatrtgcttttctttagatgtataaagatactatttaatataatttaagataatatccctttattccctgctatgaaaactgataaagttaatatacttttaatccttcttttctttctaatttttgtgtactattttaactgaaggtttttaatatttatgtcctgtcttataattacagttcttacaccttagttctctatttaaaaccttagttctatattaaaatctatgtgataaatcaccgcagcctctctattcttgagttctttgtcttgatacatatac

SEQ ID NO: 58252 - DNA, 1020 bp, Homo sapiens
  misc_feature (1)...(1020): n = A,T,C or G
atgagctattttggggatgagacccaaktccaagcacaaacttttatttatgttttacattcatcatatacacatagcctggaggtaaatttgaataattttttgcatgaaacaacgtttgtgttaattacttatgtgtagaattttcaactttaggcatcatgttggtgctcaaaaaattttgaattttggagcattttcgattttagacttttggattaggaatgctctacctgtattccaaaagagcagcagaaaacatctaaaactatcagtgattcaaagaaataagagaagtaagataaaaaaacatacacactgacatacatactattcaagtattatttaatatcacacaaagaggataataggatttaattacattagcttatattactaacaccttacccaaatccaacagtgcactgtatatttttgactaggtctaatagaaattgttttaaataagtaaatatattttctttaaaaagcattattttttaaagagtcttcaggaacatcattgagggtaactaaaattgcaagtaactattaagtgcataaattctctttaataataataaatgtcaagttttttatggtgacttaacattagaattcaatgtcctgaaagttatttcctctgcactgaagaaaataggaagttttatttttcttactattatntaaaatcaagctgctcaggctaacagtgcctcagatacatttaggcaatattattttgtgtggtaaaataatcatgaacaataacatttcattttaaaattggaaattaaaaataagaaacacaacttattaaatgtatctgacttttctatttaagggtttattgacaatgccagcataatgcagttatgagtattaatgccattatttttcattatagtcacgttctcatgccatatttcatatgtgacttaccagtcattatttcaaacactttgagagaaaatttttataattctgaaagtaatataatgtcactactgaagattcagg

SEQ ID NO: 58253 - DNA, 1020 bp, Homo sapiens
  misc_feature (1)...(1020): n = A,T,C or G
atgagctattttggggatgagacccaagtccaagcacaaacttttatttatgttttacattcatcatatacacatagcctggaggtaaatttgaataattttttgcatgaaacaacgtttgtgttaattacttatgtgtagaattttcaacttkaggcatcatgttggtgctcaaaaaattttgaattttggagcattttcgattttagacttttggattaggaatgctctacctgtattccaaaagagcagcagaaaacatctaaaactatcagtgattcaaagaaataagagaagtaagataaaaaaacatacacactgacatacatactattcaagtattatttaatatcacacaaagaggataataggatttaattacattagcttatattactaacaccttacccaaatccaacagtgcactgtatatttttgactaggtctaatagaaattgttttaaataagtaaatatattttctttaaaaagcattattttttaaagagtcttcaggaacatcattgagggtaactaaaattgcaagtaactattaagtgcataaattctctttaataataataaatgtcaagttttttatggtgacttaacattagaattcaatgtcctgaaagttatttcctctgcactgaagaaaataggaagttttatttttcttactattatntaaaatcaagctgctcaggctaacagtgcctcagatacatttaggcaatattattttgtgtggtaaaataatcatgaacaataacatttcattttaaaattggaaattaaaaataagaaacacaacttattaaatgtatctgacttttctatttaagggtttattgacaatgccagcataatgcagttatgagtattaatgccattatttttcattatagtcacgttctcatgccatatttcatatgtgacttaccagtcattatttcaaacactttgagagaaaatttttataattctgaaagtaatataatgtcactactgaagattcagg

SEQ ID NO: 58254 - DNA, 1020 bp, Homo sapiens
  misc_feature (1)...(1020): n = A,T,C or G
atgagctattttggggatgagacccaagtccaagcacaaacttttatttatgttttacattcatcatatacacatagcctggaggtaaatttgaataattttttgcatgaaacaacgtttgtgttaattacttatgtgtagaattttcaactttaggcatcatgttggtgctcaaaaaattttgaattttggagcattttcgattttagacttttggattaggaatgctctacctgtattccaaaagagcagcagaaaacatctaaaactatcagtgattcaaagaaataagagaagtaagataaaaaaacatacacactgacatacatactattcaagtattatttaatatcacacaaagaggataataggatttaattacattagcttatattactaacaccttacccaaatccaayagtgcactgtatatttttgactaggtctaatagaaattgttttaaataagtaaatatattttctttaaaaagcattattttttaaagagtcttcaggaacatcattgagggtaactaaaattgcaagtaactattaagtgcataaattctctttaataataataaatgtcaagttttttatggtgacttaacattagaattcaatgtcctgaaagttatttcctctgcactgaagaaaataggaagttttatttttcttactattatntaaaatcaagctgctcaggctaacagtgcctcagatacatttaggcaatattattttgtgtggtaaaataatcatgaacaataacatttcattttaaaattggaaattaaaaataagaaacacaacttattaaatgtatctgacttttctatttaagggtttattgacaatgccagcataatgcagttatgagtattaatgccattatttttcattatagtcacgttctcatgccatatttcatatgtgacttaccagtcattatttcaaacactttgagagaaaatttttataattctgaaagtaatataatgtcactactgaagattcagg

SEQ ID NO: 58255 - DNA, 1020 bp, Homo sapiens
  misc_feature (1)...(1020): n = A,T,C or G
atgagctattttggggatgagacccaagtccaagcacaaacttttatttatgttttacattcatcatatacacatagcctggaggtaaatttgaataattttttgcatgaaacaacgtttgtgttaattacttatgtgtagaattttcaactttaggcatcatgttggtgctcaaaaaattttgaattttggagcattttcgattttagacttttggattaggaatgctctacctgtattccaaaagagcagcagaaaacatctaaaactatcagtgattcaaagaaataagagaagtaagataaaaaaacatacacactgacatacatactattcaagtattatttaatatcacacaaagaggataataggatttaattacattagcttatattactaacaccttacccaaatccaacagtgcactgtatatttttgactaggtctaatagaaattgttttaaataagtaaatatattttctttaaaaagcattattttttaaagagtcttcaggaacatcattgagggtaactaaaattgcaagtaactattaagtgcataaattctctttaataataataaatgtcaagttttttatggtgacttaacattagaattcaatgtcctgaaagttatttcctctgcactgaagaaaataggaagttttatttttcttactattatntaaaatcaagctgctcaggctaacagtgcctcagatacatttaggcaatattattttgtgtggtaaaataatcatgaacaataacatttcattttaaaattggaaattaaaaataagaaacacaacttattaaatgtatctgacttttctatttaagggtttattgacaatgccagcataatrcagttatgagtattaatgccattatttttcattatagtcacgttctcatgccatatttcatatgtgacttaccagtcattatttcaaacactttgagagaaaatttttataattctgaaagtaatataatgtcactactgaagattcagg

SEQ ID NO: 58256 - DNA, 833 bp, Homo sapiens
ttattcacacaggccactttacttcaaaggagagtaacctggggtctgtttcaggaatgttaaagttctacatacaatgactgaagcctaaaatctaaatgagatattttgtcttctaatatcaacaaatttggcaaatataaaagtattttttgtcttgcacaattttcagattagtgcttctttcttaactgcaagttaaacccacttaagatttttaaagaagatttggtaggccaggcttggtggctcatgcctgtaatcctagaactttgggaggccaaggtgagcagatcatctgaggtcaggagtttgagaccagtctggccaacatggtgaaactccatctctactaaaaatacaaaaattagccaggtgtgatagcacacacctgtaatcccagctatttggcaggctgaggcacaagaattgcttgaacccaggagacagaggttgcagtgagccaaaatcaagccactacactccagcctgggtgatagagtgagattctgtctcaaaaaacaaacaaacaaaaaaaaagttttactacataatagcttatgtttttgaacaattactgtctatagttaggcacaagggagaatagggcattttatttyctggaattactgacaaattatttcttcaaattcttcccttctatgatttcttcttgatcgtgttgtcttatcttcctgtactcattaattaaatgacttggttaaatatattggtatggggcaatgtataatcacagtcttattaccttctcatttttctcaaaaacttaaatgatataattacccttatcttcttacatagctattgatgca

SEQ ID NO: 58257 - DNA, 833 bp, Homo sapiens
ttattcacacaggccactttacttcaaaggagagtaacctggggtctgtttcaggaatgttaaagttctacatacaatgactgaagcctaaaatctaaatgagatattttgtcttctaatatcaacaaatttggcaaatataaaagtattttttgtcttgcacaattttcagattagtgcttctttcttaactgcaagttaaacccacttaagatttttaaagaagatttggtaggccaggcttggtggctcatgcctgtaatcctagaactttgggaggccaaggtgagcagatcatctgaggtcaggagtttgagaccagtctggccaacatggtgaaactccatctctactaaaaatacaaaaattagccaggtgtgatagcacacacctgtaatcccagctatttggcaggctgaggcacaagaattgcttgaacccaggagacagaggttgcagtgagccaaaatcaagccactacactccagcctgggtgatagagtgagattctgtctcaaaaaacaaacaaacaaaaaaaaagttttactacataatagcttatgtttttgaacaattactgtctatagttaggcacaagggagaatagggcattttattttctggaattactgacaaattatttcttcaaattcttcccttctatgatttcttcttgatcgtgttgtcttatcttcctgtactcattaattaaatgacttggttaaatatattggtatggrgcaatgtataatcacagtcttattaccttctcatttttctcaaaaacttaaatgatataattacccttatcttcttacatagctattgatgca

SEQ ID NO: 58258 - DNA, 833 bp, Homo sapiens
ttattcacacaggccactttacttcaaaggagagtaacctggggtctgtttcaggaatgttaaagttctacatacaatgactgaagcctaaaatctaaatgagatattttgtcttctaatatcaacaaatttggcaaatataaaagtattttttgtcttgcacaattttcagattagtgcttctttcttaactgcaagttaaacccacttaagatttttaaagaagatttggtaggccaggcttggtggctcatgcctgtaatcctagaactttgggaggccaaggtgagcagatcatctgaggtcaggagtttgagaccagtctggccaacatggtgaaactccatctctactaaaaatacaaaaattagccaggtgtgatagcacacacctgtaatcccagctatttggcaggctgaggcacaagaattgcttgaacccaggagacagaggttgcagtgagccaaaatcaagccactacactccagcctgggtgatagagtgagattctgtctcaaaaaacaaacaaacaaaaaaaaagttttactacataatagcttatgtttttgaacaattactgtctatagttaggcacaagggagaatagggcattttattttctggaattactgacaaattatttcttcaaattcttcccttctatgatttcttcttgatcgtgttgtcttatcttcctgtactcattaattaaatgacttggttaaatatattggtatggggcaatgtataatcacagtcttattaccttctcatttttctcaaaaacttaaatsatataattacccttatcttcttacatagctattgatgca

SEQ ID NO: 58259 - DNA, 2813 bp, Homo sapiens
aagaacaagtgttagctctatttctcactgcttattctagttaactcaataggagtactaggagggccctaaaaagatatctggggcatgaaacctggatggaggcagtttttggaaaggagaataggttaacctaagaaaattggtctcggagcagatgacccacagaagaaggtatttcaaagcaagaggatctcagtggatgaatagatgctgaagctctaaagcaaagatccagagaagccagagtcagctcttctatgtcaatgacaaacaccttgtagggtagattaaggccacagtagtggaggatggcatattttctaagtatgttcttcacaaacaacatgatgttcatttttttctctaatcatagagaagccattcaaaggaatgtgggaggcttagtgtatcttttatgcttttcaatatatattatgcaggcaattcttcctgtaacatagaagtatttttaggccttaggctcatctaattttcatttgtaggtagaaataagaaatccctacaagaaataaataaatccctacaacctcacaatgtgagcatgatattggtcttgtggggacacagcagagaagacggcagctcactggcatcttctgcacataaatgcagctgaatttgcccagtgtgcacccaaaggttgattttactgaatttgttgtttcgtagctttggttagaaaagctttgccagttgtacaaataggcagagggtgtcctcagatagcaaagaatatcactgaactcgttgattcacaacaaatatgtcttttgctcttccagagatcctggaaggcttaaagaatgctagtttataatgcgttttactcatctaggcagttcttacagagccctgtatgcttgttccttcttggtgcttaatgtctgtgttaacatatctgaaattcataggtaacacctttcccaagataatttagctctggtattagatttagaatcttcatcctggtttttttggtctagtgtttctcaaacgttattaaatttacgtaagcatattcatctacatctttttagatctcatggaagatataccagtaaagagaaatgatgaaattcccagctccccacttgtgggaagacagatatgtggcatctcctctcccccagatgattttgtggctttgttgggatcctgcctggcatccctgaatctgtaaagccagttcatgaacagtctggacattgataagccccacggtcggcaatgctgctcctagattcaggaggtagggccaacttcggctttcttggacatttgtttcggttggataggtgaaagacacctagagaattttgtaagtgaggagccaacactgggtaggaaacaaggccagaggattaaataagtatctatggtgacaaagcactggaagaaattccagaagttggaataaaccatgtcctgtgctgtaaccaccagaaatgggcagaacacctcttcaggggactcgaggttaatgttttgctacctagcaaactgatgtcaggaagatcttaaaccttctagtctgttcaactccttcaattttccctaagcatttagggcagctggcatccagatgattattcctttaggttaaggtctgagttttaattaaaattactgatgcccagaggacttactctcattttggatagtgaaggctgtgtgcttgtcagaacaggattgtaagtgtagtagaattgccagtcctccttccaggtcatgttgctaaaaaccctgaaacttagagtaaggatatttctaagctacagtaaccataggcgctataagctttgctgggttcttaggtcttctgataggaatggaaagcgacctgggttgcagcaggtccttcgaggaacaaatgccaagacagtattagatggacaggaattcactggggtagatgtctatgagagaaaagagtaggggccacaggaggggcttgccccacaaagtagggaaggaaggaggtcagttataaatcctcagattgcaatgagttgcacaaggactttgggtagggcaatagcaagtctttgactcaatrtttgacagggatcccacagtgagttaatgggcttgccttcatgtctttgccatggcaccttggctggaccttttagtcaattgcactccctactgaaggtatctgaatggagctttcccatgaccagtagagctctaacctgagaagaatcctagaacttggatatagatctcagggctgtttttttgtttgttgttaaggtataaaatccagttacatctgaagcaaggtgtagatcttcatattgctagctctagactctacagggtgaacataatcagctacttaaatagttcgtgttgtaagcttcactgagcattaagaaattaacaacttatggccaggtgcggtggctcacacctgtaatcccagcactctgggaggctgaggcaggcagatcatgaggtcaggagatagagaccatcctggctaacacgatgaaaccccgtctttacgaaaaatccaaaaaattagccaggtgttgtggtgtgtgcctgtagtcccagctactggggaggctgaggcagaagaatggtgtgaacccaggaggcagagcttgcagtgagccgagatcatgcctctgcactccggcctgggtgacagagcgagactcagtctcaaaaaaaatttttttaaacaacttatgcctgagttttatgtgctataggttactactcaggaagtcttttgtaaaacaggtggagtgtcctgatgtctggttgggaaactggaa

SEQ ID NO: 58260 - DNA, 2047 bp, Homo sapiens
ctattaggttgcaaaagtaactgtggttttggccaatatgcaggaggtggaggctgtggtgaaccaagatcgggccactccactccagcctgggtgacagagcgagaccctgtcttcaaaagattagaaatcacaagtgtcaatccactgttttgtgacttctgttctatttttgtgcttcaactgtattcctcaagttatggaaagagggaaagcagtaagggcctgctaccaaaggaccatgttttccttgatcatgtgggagctctctcacagcttgggctctcagtcatcgcttccacagagtttggggtacaaggtatccttttgcgtatctactccagtggctgtaaagtattatggctctcatggccggtctgaggggatggagggcacagaatctaactgccagcatccttgtcctccttcctctgtgcatgaaatcccctgcacttccagaaagttgtcacttgtgccttccaagcagctgttgaaaaagtcagctctcacacccgacggtgtatggtctgcaagagtcccagtggtaagggaggcacatgaccttagtgagatgacggttgaggccagggctctccactgagcaagcagctgagaggcagggagggctaaactgactttagagatgcataaaaattgacatgcttctgaaagcataacttttacaaagctcacaggcatcatatatatatatatacctatgataatggctataactatgaatattctacactaattgtctcttgatagtcatatcaagccttaacattagcacattctaacaaagcatactcacactttcactgatgagttagaataaacagaagactaaagcagtatcagaacaaggatctctgaggaccagtgtaagctctttaaggtcacaaatgatagaaaagtggttatttggaaaatcactttatttccaaggaattactttcctacactacgacactcaaaattagctataagaattgatctacatcttcagttgggtcacatttcagtgaatgctatgtgactggtagtgactgtttactgccgaacaaaaatctcaggacagaaaacatgaagaaagttttgcctcttttcaaagggaccttataacatagtacatgtgcctgctgtgattgtgtacttgggattcctagaagacagatcctgaaacaaaatatagaagcatttgtgtactggggaaaggaggctgcaaacccagggctgcaagagtgagggaattaaagtcaggcaggaaagagttacatgacggcagctgctcaattacgagaagacactcagctgcttgcttcctatgcaggtcaaataaaaacactttaaatatttggaggggaacactgcagtcttggcctgctaagtttctccttgcagttgtgaactttcacatacacrttaagattattagattcgtagaagcttgtttctgatgaatttatatttgccaaaattagttggtgactttatttcagataatcattttggtaactataccagctcttttgatacactattagtatctgttctcctatcttcttactcaaagtgatatacttaagaaattggaaacataaatagaacttaaaaatccagtctgacaatgttctttaactagaaatactagaaatcatgagtgtcaacctactgtctttgtgctttctgtcctgctttttgctttctttgagttatggaaagaaggaaagcagaaaggggttgataccaaatggggcatgttctctttgatcgtacaggatgcatctctcagccttagctccataaaatgtccttgctgaaatggagtttgaagtatgagattgtctataaggaatggctgcctatggaaggggggaggggaagaaggcagaattagagaagaggtctgctgtgatctgggcaccacaaagttttcactaatgtggtagagagttccagagctagtattgctcctcaatgtctgtgatggtttggcctctttaggctaccttgctcagatatcagatgtaggctgtatccccac

SEQ ID NO: 58261 - DNA, 692 bp, Homo sapiens
cctagtccctggttctttccaaaactcgagtccctcatctgctctctccggagcaggctcgctcaaatgttttgctcagttgtcctttccagctctgagtctctggtctatagttctgcagtattcactgagcagcagccttaagtatgaatgattatgaggaagagattaaaagaagaggaactattctcaagagcctatagttttaaaaatctgcacccttcaattctgatttagatttaaatctagctcttggtgtgaatcttattttaaatttcatgaaaattggaaacggcacgcgcaccggacggtgatgatgctgcccatgactttccctctttctccttgctgtagtccaccccagcgcttcttgtagggtgttccctggaccagcagcctcagcatcaactgggaactgcttagaaatgcaaagccttggccccaccccatgcacacaaaattggaaaggctggggcgggaccagtagtcttgttttaatcacatagagcygctctctactctgattcaatgcgtgacttcaatgcacactcagtctgagaaccaccattctagctttgaatactttagtaaatatcaggactttaaaagaataaagaaaaatcaaacgagagcagttacaataattctttggctcttaggtgaaggcgtggccatctttatgtatactaggt

SEQ ID NO: 58262 - DNA, 636 bp, Homo sapiens
attgctaccacgatgaacaacagtgtcctaatttttatctaggctgattttacacattctggatagttattgtgtaggcaaatgaygtgttagatgcagtattaaagttaaaagtctctgtttttaacctcacataaatttccaaaataatgggcaacagtatgaagactcattaggcacttaatcttacagagagaatataataacattgcaaaagtaaaacaagtctagaattattttgcacgttaaaaattaagggactgtgactcagacaggtctagtgatttattcaaagtcacaaaaccacatatagttggatttaggacattgcccctcaatctagtacccattcttagtaggtggtagatttgatagagacgggtccgtaccgttccgttccaagggatatttaggacacagctcatagggaggtaaactgctgaaggccaactcctttcagactggcctcttcaagaggcccatggaagtcattatggactagtgcttaggcattcaatatgggtcaaggtgtgagcttgcagctgaaaccagtttctgccacaagtccttggctccagtatcctgatcacaccagtagagggactggggcagctcaagtgacgctgtccagtgcgg

SEQ ID NO: 58263 - DNA, 1135 bp, Homo sapiens
taaaaagctaaattagaaaattggggctggtatttgattcctgacacaacttctgttctcctaaaacagtggacttacaccttatagatcctaacaggttcctattaaagtcactggaatattggctgggcgtggtggctcacacctctaatcccagcactttgggaggccgacacgggtgagtttcttgaggccaggagttcgagactggcctggccaacaaggcgaaacctcatttctactaaaaatacaaaaatcagtctgatatggtggcatggatctataattccagctgcttgggaggctgaggcatgagaatcacttgaactcgggaggtagaggtttcagtgagctgagacggcaccattgcactccagcctgggcgacagagtgagactctgtctataaacaaaataatacaataaaataaaacaaaacaccagtgacctaaatctacaccaaacccacaattaaaataaataaataagtaaagtcattggaatattgaaccaactttatatggagttgtgccagagaatgctctttcctctgaaggaggccaacatgaatctcctcaagtgcagggctttattttacatatagaaccaaccatctcacacgcctctcaacaccggttccccaacatgccaatttaaactttcattttcaaagacactaaatcaatagatgcccactgagcttgtgactgaactaactcctaatagaagaaaacttaaaagggttgacaggtgtcaataggtgctgattgacttttaagagatatattaaaaaatgagggtgccaatttattttctctgccagtgacaaataagtttcaattcccttacaatacagttgcatccctttcatacacctytttgattattcagggtttctgtacctctctcttcttctgctattctttttctctagaacatcataacttccccaatggataagagttatgtctttatcttctgcactgaagcccacttcttggaactaaacaacataccatgagttaacttacttatctggcaatatctattatgttaagtgtgagagcaaatcaaaatattaaaagtcttctttataaagatagtaagtcacctggtgaaggttatatctaaaacta

SEQ ID NO: 58264 - DNA, 1350 bp, Homo sapiens
tgtattgagtgcatcgaaatccctcagacccaaatgcgttgggtccagcttctgcacaggctcaccaaggcttccttagaggactctctcatcctctccaatcagataccacaatttcccggcgggtctccctaccccagcctctccctgtgctggttcattttccacactgtgccagtcttcagctctaaagcacagatctgagcactttgtggctacgttagaacccctcagcggttcacttttgactctaaaataaagtccagckttaatcctgacacacaagggggtctctgacctgacccaagtccctctccagacgtatctcctgcctggacagccttcattctcagacttttcccttctctctctctctctttttttttttttgtggctacacatgctgttctctctgcctagaacacctctttctcctcttttttagaaaaaattgggggttgaggtgcgaggaggagaatgccaactttcaaaatccagcaaaaacatcacctcctcagtgaagccttcccagatgtccctgtacagagttaattgctcccaacttgcatgattctaagacacagtgttcttactttgattgtagcacatatggtattcctccataacttctttcttcatggcttttgctctcctattaaactgagctcttcaaagtcagggtcatattattcaccttggtgagatggggcagaacagactacagcaaagcagttctccagtcccagctgtggagccggaatgttgggttggaatcctggccattcaccttggaaagttgcttaagcctcagctgtaaaatgaggataataagagtaagcgtcacagggaacactgaatgaaataaaagtgtgcggcacaatgttaatgcctcatgactattggctattattattatctgattcccagtacttagcacagtgacttgtatacagtaggcattagtcaagtcaaaaagtcttttgacttcttgaataaaatggcaggatcagaatttcaactcaggattctaaatctacttttttttttagctgcttcagtaccatattttgtctgatgtttacagcattccagaatttcagaaaaagaaatggaaggctggaggcattaagtaagccagggtattagagggaccatgggattcctggaaaccaggtcagccaacgctgttttcaaatatgtgccctgtgactgtgcgaggctgcttgtctctcaccctctactgcctcactgtggccatgccaggcaatgcaagcttttaaagtttggcttcttcctttggaattatacatccaatggctttcatttgtttcactgtagttttatttatta

SEQ ID NO: 58265 - DNA, 1350 bp, Homo sapiens
tgtattgagtgcatcgaaatccctcagacccaaatgcgttgggtccagcttctgcacaggctcaccaaggcttccttagaggactctctcatcctctccaatcagataccacaatttcccggcgggtctccctaccccagcctctccctgtgctggttcattttccacactgtgccagtcttcagctctaaagcacagatctgagcactttgtggctacgttagaacccctcagcggttcacttttgactctaaaataaagtccagctttaatcctgacacacaagggggtctctgacctgacccaagtccctctccagacgtatctcctgcctggacagccttcattctcagacttttcccttctctctctctctctttttttttttttgtggctacacatgctgttctctctgcctagaacacctctttctcctcttttttagaaaaaattgggggttgaggtgcgaggaggagaatgccaactttcaaaatccagcaaaaacatcacctcctcagtgaagccttcccagatgtccctgtacagagttaattgctcccaacttgcatgattctaagacacagtgttcttactttgattgtagcacatatggtattcctccataacttctttcttcatggcttttgctctcctattaaactgagctcttcaaagtcagggtcatattattcaccttggtgagatggggcagaacagactacagcaaagcagttctccagtcccagctgtggagccggaatgttgggttggaatcctggccattcaccttggaaagttgcttaagcctcagctgtaaaatgaggataataagagtaagcgtcacagggaacactgaatgaaataaaagtgtgcggcacaatgttaatgcctcatgactattggctattattattatctgattcccagtacttagcacagtgacttgtatacagtaggcattagtcaagtcaaaaagtcttttgacttcttgaataaaatggcaggatcagaatttcaactcaggattctaaatctacttttttttttagctgcttcagtaccatattttgtctgatgtttacagcattccagaatttcagaaaaagaaatggaaggctggaggcattaagtaagccagggtattagagggaccatgggattcctggaaaccaggtcagccaacgctgttttcaaatatgtgccctgtgactgtgcgaggctgcttgtctctcaccctctactgcctcactgtggccatgccaggcaatgcaagcttttaaagtttggcttcttcctttggaattawacatccaatggctttcatttgtttcactgtagttttatttatta

SEQ ID NO: 58266 - DNA, 593 bp, Homo sapiens
ctgtaatcccagctacttgggaggctgaggcaggagaatcacttgaacccgggaggcagaggttgcagtgagccatgatcatgccattgcactctagcctagctgacagagcaagactctgctcagaagaaaaaaaaaaaaagaaaagaaaaagagaagacttaataattactaaaaaagactatagatcactaaattcaaaatgagtcttgacatgatggttcatgcctgtgatcccagaactctacaaagcyaggatgagaggattgcttgaggccacaagttcaagaccagcctgggcaacataatgagacccagtattcacaaaaaataaaaataaaaaatccagacaggtgtcatgcacctatagtactagctgaggaacgaggattgcttgagcccaggagtttgaggctgtaatgaggcatttgatatgccactgcactccagcctaggtaacagagcaagaccctatcttataataataataataataaagtgaaagtggggacattactatcaattctacagaaataaaaaggattatagaagagtactctgaacaattgtacaccaacaaatttggtagccta

SEQ ID NO: 58267 - DNA, 614 bp, Homo sapiens
gcttcaaggggcatccctggccagatctgaaagacctgagcatcaacaagagcaacggtggctacgtatcataagataattgaataaaacaaaaacccgtgagtcattgtgacaagtaaaggctaaaggtgctaccatgccaaaccatactgctcagctacaggccactttcttttgccaggcaggcatgaagaggaccatttgaaaagagttggcgagatgaaggaaaggcacggtacaggcctgcataatattacagagatttcattatgagagaggaggtattaccaaatgagaacatatttctcttccttattatgggttagacaagggcttaaaaactggtggcttaatgtcctgctatgactcacagatatttttactcacaaacttctttaattgggaaattgcacttaaattccagatttctggattgtcttaaaawccaggcaatctagtcttcattccaacctgaaaacagtcagctaacatgagcagaaattgtcctattcagtagggcctgcatccttgggctcatcagagcttccagtagtacaggctcccttcactgattgttgtcacctgtctggcccctggagacattatcctttatg

SEQ ID NO: 58268 - DNA, 883 bp, Homo sapiens
cattgtcatgtgttctttgtcacattttctttgcttctgagacattattcatgattccatatagcaaagcaagtgtgtgttgggtttatttcaggggtgtctatcctgttctttttaactatttgtcaattcttataccaatagcataaggtcttaatgacctttataataagtcttgatttttggtagaaaaaactctctcttcttgttcttgttcattggctatgcttcacctgttgcatttccattaagtttccatgcatttccatgtaagttttagaatcattttgtcaattctataaaaactctkttgggcttttaaatgagattgcatcaaatctcattttgcagggattgacgtgttcacaacatgtattctaactcaaaagcataatattttcctacttttatttggggtttaatttctctcaactatgtttaataggtttctttatagaagtcttgcacaccttatattgcatttattctgcagtgtttgacatttgtgctcttaaattgttttttttttttttttttttctgagatggagtcttgctctgtccccaggctggagtgcaaaggtgcgatctcggctcactgcaagctccgcctcccgggttcacgccattctcctgcctcagcctccccagtagctgggactacaggcacccgccaccacacctggctaattttttctattttttagtagagatggggtttcaccatgttagccaggatggtctccatctccggacctcgtgatccgcccgcctcggcctcccaaagtactagggttacaggcgtgggccaccgtgcccagcctaaattggtattcttaaaaatttaaaacttctggcaacatatagatgttcaactgattttt

SEQ ID NO: 58269 - DNA, 554 bp, Homo sapiens
tagaaagcctgtagaacttaacttaatgactacaaattagtcatcaagcctgggctcaagcaatgatttgattcccagggttaagcaccgtgttctcctttataatgaaaacctgtcttattctggcaaatacagtatttatgaatttttagtcacccagcctcagagaaagacccaaatgccttgactaaaaacaattttttttttttgagagtcttgctctatctcccaggttggagtgcagtggtacaatctcagctcactgcaatctctgcctcccagatgcaagtgacycttgtgcctcagcttcccgagtagctggaattacaggcacctgccaccacgcccagctaatttttgtatttttagtagagacggggtttcaccatgtgatctgcccccagcctcagcctcccaaagtgctgggattataggagtgagccactgtgcctgggcctaaaaacaactttgtaacacaagacacttaggcttttttttttttcaaagagcagagtctcgcttgctatgttgcctacgctggtctcaaactcctg

SEQ ID NO: 58270 - DNA, 522 bp, Homo sapiens
accagcttgggcaacacagtgagacccccatctctatgaaaaaaatttaaaaattagccggggccaggcatggtggctcatacctgtaatcccagcactttgggaggccaaggcaggaggatgacttgaagccaggagttggaaaacagcctgcttacattaaaatgcaagtggaaggaggtaaattgaggtaggaattgttactggatggaatgtcttaactgtgagttgtccaagttcttggtgtattgaacaaaaaattgaacaaaacgcactaacaaagcaacaaaagaacgggctaatgaaggcacagatttattgaagaagccgaagtacaattcacagggtgggagcaggcttgagcaagtggttcaagagcctcttcaactggggtttttattaagctaaaggaaccaagcaactcccctcwgtgccctttagaggactccaattggccacagcccatgaaggattggcctgtgaccagaggctgacgtggaggcttggcacacaatcagaggc

SEQ ID NO: 58271 - DNA, 640 bp, Homo sapiens
aaatccagtctttggatctacaaattacaatgctcaatatagcacataatgtactacttacatccaggtagtcacttaaagaaaacaacagattatatctattttaaaattctgtcccggtacctatcatgtttacaagcctatgtcactcagagcacatgctctggagttctaatagccatattttaatttccacgagcttcagcatttatgtgggagagcagcaagatatcaaaactagaaagaagagcaaagatgagattatgaagaaacttacatattatgcaaaaggtttcagaggcaatcctttaagagatttatttatttatttatttatttatttatttatttttgagacggagtctcgctctattgcccaggctggagtgcaatggcatgatcttggctcactgcaacctccacctcctgggttcaagcaattctagtgcctcagcctcccgagtagctgggattacaggtgcacgctgccacgcctggctaatttttgtatttttagtagagaaggggtttcactacgtcrgccaggccagtctcaaaactcttgacctcaggtgatctaccctcctcggcttcccaaagtgctgggattacaggagtgagccaccatgcccggcccctt

SEQ ID NO: 58272 - DNA, 565 bp, Homo sapiens
gaccagctcatctaagtagataataattagttagcatcccattacataacactgatgcacatgctccatacactgaaaaaaaaaatatatatatatatatatatcagtctgttttgtataaacgggcccaaayatagcatgcttttctgtttattgtttccactgcaatctctgtacttacgttccgtgaaatgaattcaagtttcaaatgagagcagaaaaaggtcatgaaacatcagagtatgacctctatggaaaatctctagttgggtttttcttatgtgccagcccgtgctccaaaactttatatgtatgacatatttaaatcccctaaacaatcctcatgttatggactggattttcatgttcccctaaaattcacatggccaaatctaatccctattgtgatggtatctggaggtagggcctttgagaggtgatcaggtcatgagggtggggccctcacactgcagttagttcccttgtgagaagagaacaaagagctaattcacactccttctgtcacacaaggagaaaagaagtacaaagtctgcaatgtggaaga

SEQ ID NO: 58273 - DNA, 588 bp, Homo sapiens
tcatgtggatcactaagagaaggagacattactactcctcccagggcaggattatcatttttcaaagctcacatttatagcaaaatttcgagtctgcttacgcagcctgacctctctgagactcccttctgggctcaacctctcctgacttgtaccccttttgtagccccgactacctcccaaygtgactttccactcagcatccttcccctgcaagtcgaggagctaactgtggttgggaccatttattttcctggtacgcaggcctaaagtatcacatcatgaaaatgcattcaatgaattcagaatctctccattcacagaggaagaaatgcagcatcagaaagggggctgtggcagtgcacacacttgcctcagggggccagaagaacccacctgaagtggacaaacaattctgagcagaaaacccttgtccagggtcagcaggcatctttactctgctttcctcgcaagctcaaggttagaccagccccttcatcctgtagtcacaataactggtcacgcttctcatctccatctttacctgcaatatctcatgtacacatcatcatcaccctgtgagatgag

SEQ ID NO: 58274 - DNA, 501 bp, Homo sapiens
tcctctgtatgtcttcttcactcgtcttcaccttttccacacccagatataggcagatatttactcagattgtacattaaacctctgtttgtcaacttacagagtttggtctccccaattaactcagtgctgttgaagtatcaagctatgcttcacttacacaagcttttatgagcacataaagacataaaaggtagtatatagtaacaaatcatggtttacaccattgaaaaaacaaaaataagtacagtttgatccctgcttttaatgcaaaaatagtctaggttcaaaactttaggtctatctcttactgtgtccatgaacatgaaaatatactgcaygagtctcaccatcccaatctatgaaatgaaaataatcctaatatatatttcctcacttattgtgattaagttaaataatctctatacatgtaaaatacttagggcctggtacatggtacacaagagattttaactgctattattatcattgtcatttatt

SEQ ID NO: 58275 - DNA, 501 bp, Homo sapiens
tcctctgtatgtcttcttcactcgtcttcaccttttccacacccagatataggcagatatttactcagattgtacattaaacctctgtttgtcaacttacagagtttggtctccccaattaactcagtgctgttgaagtatcaagctatgcttcacttacacaagcttttatgagcacataaagacataaaaggtagtatatagtaacaaatcatggtttacaccattgaaaaaacaaaaataagtacagtttgatccctgcttttaatgcaaaaatagtctaggttcaaaactttaggtctatctcttactgtgtccatgaacatgaaaatatactgcacgagtctcascatcccaatctatgaaatgaaaataatcctaatatatatttcctcacttattgtgattaagttaaataatctctatacatgtaaaatacttagggcctggtacatggtacacaagagattttaactgctattattatcattgtcatttatt

SEQ ID NO: 58276 - DNA, 501 bp, Homo sapiens
tcctctgtatgtcttcttcactcgtcttcaccttttccacacccagatataggcagatatttactcagattgtacattaaacctctgtttgtcaacttacagagtttggtctccccaattaactcagtgctgttgaagtatcaagctatgcttcacttacacaagcttttatgagcacataaagacataaaaggtagtatatagtaacaaatcatggtttacaccattgaaaaaacaaaaataagtacagtttgatccctgcttttaatgcaaaaatagtctaggttcaaaactttaggtctatctcttactgtgtccatgaacatgaaaatatactgcacgagtctcaccmtcccaatctatgaaatgaaaataatcctaatatatatttcctcacttattgtgattaagttaaataatctctatacatgtaaaatacttagggcctggtacatggtacacaagagattttaactgctattattatcattgtcatttatt

SEQ ID NO: 58277 - DNA, 546 bp, Homo sapiens
tgatgtctaatacacattatgtacaatcacaggcaagctagttatcacttggattttaaaccttcaattttctggcacactcctgtactctcagctactcaggaggctgargtggatcacttgagtccagttgccaaggctccagtgagctgtgattgcaccactgcactccagcctgggcaagaaagtgagaccctgcctcaaaaaaaaaaaaaaaaaagttctcttctgcaaaatatgtgattgcagagctgagacgatctctttgttcccatgtaattaaaactttctgaaatttaaataacatagcgcatgttttctgtgtctgtgtgtttgtgtgtgtgtaatatagcaacttctttaattaccaaaatagccctataaggctgatacttattattttatttaataaaggaggaattgtcaaaaaagacagtaagaagtttgcactaggtcatagcagatattaattggtggagatatcatacaattcaggcaatctggtttcagggtccatattataagccatcaaactgtgactcctca

SEQ ID NO: 58278 - DNA, 546 bp, Homo sapiens
tgatgtctaatacacattatgtacaatcacaggcaagctagttatcacttggattttaaaccttcaattttctggcacactcctgtactctcagctactcaggaggctgaggtggatcacttgagtccagttgccaaggctccagtgagctgtgattgcaccactgcactccagcctgggcaagaaagtgagaccctgcctcaaaaaaaaaaaaaaaaaagttctcttcwgcaaaatatgtgattgcagagctgagacgatctctttgttcccatgtaattaaaactttctgaaatttaaataacatagcgcatgttttctgtgtctgtgtgtttgtgtgtgtgtaatatagcaacttctttaattaccaaaatagccctataaggctgatacttattattttatttaataaaggaggaattgtcaaaaaagacagtaagaagtttgcactaggtcatagcagatattaattggtggagatatcatacaattcaggcaatctggtttcagggtccatattataagccatcaaactgtgactcctca

SEQ ID NO: 58279 - DNA, 546 bp, Homo sapiens
tgatgtctaatacacattatgtacaatcacaggcaagctagttatcacttggattttaaaccttcaattttctggcacactcctgtactctcagctactcaggaggctgaggtggatcacttgagtccagttgccaaggctccagtgagctgtgattgcaccactgcactccagcctgggcaagaaagtgagaccctgcctcaaaaaaaaaaaaaaaaaagttctcttctgcaaaatatgtgattgcagagctgagaygatctctttgttcccatgtaattaaaactttctgaaatttaaataacatagcgcatgttttctgtgtctgtgtgtttgtgtgtgtgtaatatagcaacttctttaattaccaaaatagccctataaggctgatacttattattttatttaataaaggaggaattgtcaaaaaagacagtaagaagtttgcactaggtcatagcagatattaattggtggagatatcatacaattcaggcaatctggtttcagggtccatattataagccatcaaactgtgactcctca

SEQ ID NO: 58280 - DNA, 852 bp, Homo sapiens
aaaagataaagttgactgacactttaagatygtctgaaggtccaccttcccaataagctacaaaagagtttcctctttttgcctctgtatctgggtgatgttcatgtcttgctaattataaccaccaaagctcaaatctaagaaataatgtgctttccttatttatttattaatttatttttttgagacagagtcatattctgttttccatgctggagtgtcgtggtgcgatctccgctcactgcaacctctgccacctaggttcaagcaggtgcctgccaccacacccaagtagctgggattacaagcatgggccaccatgcccagctttttattttttctgtacttttaatagagacagggttttgccatgttggccaggctgtcctcgagctcctgacctcaactgcctcgcccaccttggcctcccaagggaggcagggattacaggtgtgagccaccgtgcccggccttctttctttatattaaatgctgtattatcttacattggcatggtcataatccatattttgagaaagagaatagagatcacaacattaagagctctcaaattactaaaaataaaaaccttagtgccctcccaaggtactaaaaaatatagagagtgatatgtgcaacaaacatttattaactgtctgttatgtccaggctctatgttgagtgctaggaatacaacattaaatgagatacagcaccatcttctggaagactcaatactaagataggtaggatgagtaaatagatagaaagaatatacctcaggctagtcccttcttttctcatgctttggttttcccacctgtaaactaaggattgaattagaatcatgca

SEQ ID NO: 58281 - DNA, 852 bp, Homo sapiens
aaaagataaagttgactgacactttaagatcgtctgaaggtccaccttcccaataagctacaaaagagtttcctctttttgcctctgtatctgggtgatgttcatgtcttgctaattataaccaccaaagctcaaatctaagaaataatgtgctttccttatttatttattaatttatttttttgagacagagtcatattctgttttccatgctggagtgtsgtggtgcgatctccgctcactgcaacctctgccacctaggttcaagcaggtgcctgccaccacacccaagtagctgggattacaagcatgggccaccatgcccagctttttattttttctgtacttttaatagagacagggttttgccatgttggccaggctgtcctcgagctcctgacctcaactgcctcgcccaccttggcctcccaagggaggcagggattacaggtgtgagccaccgtgcccggccttctttctttatattaaatgctgtattatcttacattggcatggtcataatccatattttgagaaagagaatagagatcacaacattaagagctctcaaattactaaaaataaaaaccttagtgccctcccaaggtactaaaaaatatagagagtgatatgtgcaacaaacatttattaactgtctgttatgtccaggctctatgttgagtgctaggaatacaacattaaatgagatacagcaccatcttctggaagactcaatactaagataggtaggatgagtaaatagatagaaagaatatacctcaggctagtcccttcttttctcatgctttggttttcccacctgtaaactaaggattgaattagaatcatgca

SEQ ID NO: 58282 - DNA, 604 bp, Homo sapiens
tacacagtgtgtgtgactccatttataaaaaaattctagaaaatgtaaaataatctacaatggcaaaaacagatcagtggrtttcctaggctggggcagagggatgtttggactgcaaaagagcacaaggaagcttttgaggtgatgggaatgttctgtaactcgattttgactgtggttttcctgatgtcaaaattcatctatgtactatatacctccaatggctgcagtttattgtatctaaaatattattcaattaaattgatgaaaaaatttcaaagtaaaaaaatagtaggaagaaatgagttgtctaagaaaccaagcacaagagagggtggtaaaaatgaaaagtgtttaagtgtttgtaagaaataaaatgtgatggcttacatatgcccacaaatgagactaaagtgcatttgaggaaggcttcctctttcccaaaagatgattttacactgactgctacacacttacaggtcagtgtgttccttttcccctacctctgatccatagtcatcaaataactgttgtctcaggacaaaatttcctgctcaagaatatcccagacattatagaaaaccagtattttggaagttgaaag

SEQ ID NO: 58283 - DNA, 1278 bp, Homo sapiens
gcttaaaacctagatgatgggttgataggtgcagcaaaccaccatggcacatgtatacctatgtaacaaacctgcacgttctgcacatgtatcccagaacttaaagtaaaatcagaaagaaaagaaaatactttataattatatttaaatatttgatataattgtatttgaatataatttaaatactaaataatttgaatattaaatacaattatatttaacatctattccataaaattattttggatgagttaatttgtctcattgttaccagggttgactgaagagcactaagtatttcttagatttttaaaaagtaaactaatgtatgattcagcarttgcactccttggtgtttactctgatgaactgaaaacttatgtccatacaaaaacctgcacgtggatatttataacagccttatccataattgccaaaacctggaaacaaccaagatgtcccttgtaagtgaatgaataaataaactatggtacatcagacaatggaatattactcagcactaaaaggaaatgacctatcaaaccaggaaaagacatggaagaaacttaaatacatattactaagtgaaataagccaaccttcaagagctacctactgtataattccaactatacgacattctggaaaagggataactatagaaatagaaaagaaaaaaaaaagatcagtagtagccagggtttagtagggaagaagggaaaaattggtggaacacagaggatttttagggaactatatgatactgtagtagtagatacatgccagtagacatttgtcaaaacctatagaatgtacaataccaagggagaaccctaatgtaaactttaggtgatgatatggcaacacaggttcatttaatgtaccattgtggtgcgggatgtggatagcggagtagattgcatgtgtgtggggacatgggatttacaggaactctctgcgctttctgctcaattttgctaaaactaaaacttctataaaaatagaatttcttgattaaaaaataataataaaactgtctctaagagcaccatttactaaaagaacattggctttagatctaatggaaagacaaaaacagcaggctctagtattgttaaaattaccagaagaattttgctttttaatatttcattttactccctgaagagctaagtttgagccaaccacttaaaaaagaatttggactgaatcagaatcaaaattttattggaaaagttttgaacagttttcataatttcattttttaaaaataaatgc

SEQ ID NO: 58284 - DNA, 1331 bp, Homo sapiens
tcaccaagcacacactttaccaggaaagtggctgaggttggatacaagaggtaaaggttctcaccctggggtgtggtgggctgggaatggtttgcagccagatgaactggtttgaatcccgggtacgtctcttaagtggtctttggtttttgactgattttcacagactrgattttgtcatctttagtttgagaaccaataattagctttttaaaaaaaaaaaaggaaaaaaaagaactatatctgagttccaaatggcaagattttcaaaaggaaaggttgttttatacataacagagctttatataaatgcaagatgttaccattttcacattgcaatatacagtggatataaaaatctacaactttgggtaaaaaaatgtctgtaactcatttcagttctgttatgaacaaggcttttaatgtctgtgagcctcactttagtcatcttaaaatataaatactcactttacaggttaataatgagagttcatggcatggcgtctagatgttcaataaatgttagttgaatctaaaatgaaagcaaccaaccctcaatttccttcctttattgtcttccccaaaaccatacaaataagcaaggcagaaactagagatgaaactcaagtcaatcaatttgaaattttggtcagaggtttggttggtagacaagattaaagacaacctcaaacacagctctacagatttataggtgggtaaattgcccttagtaaacctagcctcattaacatgacaggatggcctggctatatttagacgaatacctgccttttcttttgaaatttaggaaagagaatttgccaagttttagggttttttgaactgtgttctatgaaacaataaggtgtcggagggttctcaggactctgcaagagagggttggtgatactagggtgggcttctgggggcccctgattctctggttcaacctaagcatccacactttttatgtttttatttggggaaaaaaattctgctttaagacaatttttaaaactatgaccatggcccttatgaggtctggtgacacatcccatcctgattagttgggcctttttacatgttccagaagtggcaccacgaattccagctaattctcttaccagcacagactgaggatcgcagaggggaaaggctgagaagaaacacagcgagatcattaaagtaactgactggtgggtccagggaggctgggggagggataatggggaaaggaaacatgttgatcaaagagtacaaagtttcagttggacaggagtaataagctttagtgatctattgcacagcatggcgactatagtaaataataa

SEQ ID NO: 58285 - DNA, 1255 bp, Homo sapiens
ggagaagagggaagaagcaggaagagagcagacacagggtggagactcaccagtcctgccaggtggggctttgtctggtccggactgtctctggtacgagagggcacatgcacattctcacgcagctccactctccctggccttcaagcctgctgcccccgagctccttttacagtgccaggtctgagtgtggctgaaagagccatctgcagagcctgctccatgcacatggtcagctctttgtggaagctgcttactggggggactttagaactcagcctttttgtcccacggaccgcatacttctgtgggttttttccccctaaattgaaccactcctgtccctaattgtgtcactcctgctgtcacctctagccatcagagccagtggcatggttctgattgtgttgcaatgtgtccttgaagcattctttttgtttgtgttcaatggctctccttcagctcacaacacagtggtggcaatggtttcctagggtcacccattctcctctgaggaccagcccagaaaagctcagtcgtaatgaacggggcttcagacggatggacacacacatgggcttgagagccctcctggctttggccactctaacaagattttgtcatttgtggcttttgcacattggaaaaactttcatctctgagtttctatgggctataaatacttggtaggttaaaaaggaatcattcagaacatgaaataaacataacctggcacgtacacagcaacacacctcaacggagcccttcaacttctaggccagagctgcaggaatcggagccggggcttccttcatcccgtctcgcattcacttccctcccgggctgggcactgctctggtttctgacctcttttggttggatattttcctaatgaggcaggaggatgaggtctccatgttccttacgccttttaaccacagagtgaaaactgttgattttgttggcattggggaaaatgtttagaatgtatggaaaacatgttatggatattatatatctaccataaaccaagaaaagagtctggcagagggaaattctatgttgattaggaaaagtcaccacgatcctggtctttatggctttattttttttctaaacaattgctttattctttttttcagaatataaaagaaaggctaagaaaaagaaaaaccaatcatgtctttcaaagatagcattcttaacatcttggtcctgtgctttttwaaaaaaaaaaaattgaggtaaatgtaca

SEQ ID NO: 58286 - DNA, 664 bp, Homo sapiens
caactaaagtggttgtaggtggaattttattttatttttacattttttcttttttgagacagggtctcactctcactcaggctggagtgcagtgctcaagccatggctcactgcagcctcaacttcctgcgctccagcaatccacctacatcagcctcccaagtagctggggccacagatgtaggccaccacatctggctaatttttctattttttgtagagatgggggtttcgtcatgttgctcagactggtctcgaactcctgggctcaagcaatccgcctgccctggcccctcaaagtgctgggattacaagcatgagccaccatccccagccctggaattttaaatcttcaaaatattctaaaatatcaatctcttgttaaagagctttgaattcccygggctactacaaaccctaagaattctgtgtttctctataccttttattcaccttgcacaaagaattccatttcctattattaagtttgaaacttgactgtgaggttcagagcacttacataatgaggtaagttaaacttcaactcagaatgactggttttcggacaaagaatgcaaccgctaatagcatgtatcatttttagatgagatttagaaacaatgctaatgtttcatgtgctgctctcggtcccatgcacccatct

SEQ ID NO: 58287 - DNA, 664 bp, Homo sapiens
caactaaagtggttgtaggtggaattttattttatttttacattttttcttttttgagacagggtctcactctcactcaggctggagtgcagtgctcaagccatggctcactgcagcctcaacttcctgcgctccagcaatccacctacatcagcctcccaagtagctggggccacagatgtaggccaccacatctggctaatttttctattttttgtagagatgggggtttcgtcatgttgctcagactggtctcgaactcctgggctcaagcaatccgcctgccctggcccctcaaagtgctgggattacaagcatgagccaccatccccagccctggaattttaaatcttcaaaatattctaaaatatcaatctcttgttaaagagctttgaattccctgggctactacaaaccytaagaattctgtgtttctctataccttttattcaccttgcacaaagaattccatttcctattattaagtttgaaacttgactgtgaggttcagagcacttacataatgaggtaagttaaacttcaactcagaatgactggttttcggacaaagaatgcaaccgctaatagcatgtatcatttttagatgagatttagaaacaatgctaatgtttcatgtgctgctctcggtcccatgcacccatct

SEQ ID NO: 58288 - DNA, 1127 bp, Homo sapiens
tgcctgtatttcctctaactgtattctccctctcagttccaagtaagaacccagccttttctctccttgacttgggaggagacgcttgcaggcatcagtgcatcagttacttcttggcttttgctttaccaaaagcctgagctgcttgagggttctgtgcaagagaggaagggagacagaactggcctgtgagagaggagattcgccatggctgggagcaggacccactcctcggcagtcctcagaggggagtggctgggtgtccccaaggagactgggttctgcctccacagcatccaggctcagcaaaaattcctgggcaccacagatggcatagaggcctcagggctgctggcagtgaccacatgcaggtcaggaggggcagctgccagacagagggctgggagccattctcccctttcccctgcaccctgtgggcctggggagggtgagatgcctctttcagtttctgaaatgactgagcttgagtgtgtacccccatcctgacaggggtaggggaggggatggaggctgtgagtttaatttagagaaaatagagtaacatgatttgtcttgcacattcacatttttaaaagaagatawagggtgtgaaggttagcagaagaataggccattccaggactctggtttgggtcactggaagccaatatgaaaatgactagaaagaaattcactaaatgttaacagtagttttccctgggtagaggaattatgggtgattgatattctgttcttttgtacttgatattctgtaaattttttctaacaggacattttacttcagtaataagaaaaataaccagaatttacgtacacccccaccccaccaccttcagtggccactcattacctgcaggctaaaatggaaatcccttggcatagctttcaagggttttcctgctccctgaatctaccctccatttgtgccattgggccctccctgtgctccgcctccccttcccatgcctggccattcatccctcaagactcaactctgaaatgccctcccccaaagaaatgtctcctccttgcccacttccaatgtggctcttagtaccctgtgttttaatgcctatgtccagccacgtctgtcccccccaaccagt

SEQ ID NO: 58289 - DNA, 519 bp, Homo sapiens
tacataatttatatatgtacacaaacatatgaaacagaaatagttgcccaattaaaccttgattagtataaaacttggacactatcattgtttaggaaacgtctgctcattttcaaagatagatgtttgctttattttctaacrtaaaataatagttgtctattaagaaaatgccagtatctgtaataacaacccccagacatatgatagctcaaatgtaatgaatgtgtattttttactcacagcaaagagaaatgattcttcagctggcaattctcccccaatttgtcatgtcgctgtctttaagtggcttgtactttcaaagtgtaagtttgtattaaatcagtgattgggaagaatattaaaattttagaagttttcaccagccagggctgtaagtggctcagtcaattttctcatagcctactatttagaattcaatcacattgccatacccaactgcagaagaggatgcataatggaatttagctgtgtgtcctggaaaaagaaaggtgttga

SEQ ID NO: 58290 - DNA, 519 bp, Homo sapiens
tacataatttatatatgtacacaaacatatgaaacagaaatagttgcccaattaaaccttgattagtataaaacttggacactatcattgtttaggaaacgtctgctcattttcaaagatagatgtttgctttattttctaacgtaaaataatagttgtctattaagaaaatgccagtatctgtaataacaacccccagacatatgatagctcaaatgtaatgaatgtgtattttttactcacagcaaagagaaatgattcttcagctggcaattctcccccaatttgtcatgtcgcygtctttaagtggcttgtactttcaaagtgtaagtttgtattaaatcagtgattgggaagaatattaaaattttagaagttttcaccagccagggctgtaagtggctcagtcaattttctcatagcctactatttagaattcaatcacattgccatacccaactgcagaagaggatgcataatggaatttagctgtgtgtcctggaaaaagaaaggtgttga

SEQ ID NO: 58291 - DNA, 955 bp, Homo sapiens
aagcatttggaaaaatatagtattttagttattgaatgccaacaattctgaagtcattttctatatttaaaaagcaaaaagccttctgcttggttagaagagactttttctggctcgtgctgtctagccccggaatggagagtgagagggcagggaataaggactcctttgcataaggtggtttggtcagctggcacaaatatgtcctctgarcaaaggcacatgacatttgtgatcctggcactgatcgtgaaggaaccacacccattgtcttccacataatttccagcatgccagtaaactcgatcatctatattactattagaaaggtccccactgtgcctccctacagcacagagcaccaatgttagagacagggcttccacaaggcatcgcagacttgctggaattctacatgagccttccataaaaacaaatacagctccaaaagcagaagtttttaacttctgtagtgagaactatagaattcaaacaaaaagtgaaataaataaaaatgcttaaatgtgaatttttttacacagtctcaccaatctaagaatttataattcaaaaaagagaaagcagaatcacttttatataaatgcaaaacatatatttcagtttttactactcattattagtagatgttttttcacttaaaataatttcattgggtattgcttagcagtacatttgtacatgaaggaaaactaacaataaccatagtaaatgatcatcaataaactttaaaaactcatgctccaagccaagtaaccactacagaatttggtgtttgtttgtaacaaacttttcttgaacataaccagaccacatgttcacaaataatggcctctaaatgaaggtaaatagagaaacaagtgcaagtttttcactgaaaattcacaaattagttcagacgtatctgcaaaattaaaatgtaaataaactaaatgca

SEQ ID NO: 58292 - DNA, 955 bp, Homo sapiens
aagcatttggaaaaatatagtattttagttattgaatgccaacaattctgaagtcattttctatatttaaaaagcaaaaagccttctgcttggttagaagagactttttctggctcgtgctgtctagccccggaatggagagtgagagggcagggaataaggactcctttgcataaggtggtttggtcagctggcacaaatatgtcctctgagcaaaggcacatgacatttgtgatcctggcactgatcgtgaaggaaccacacccaytgtcttccacataatttccagcatgccagtaaactcgatcatctatattactattagaaaggtccccactgtgcctccctacagcacagagcaccaatgttagagacagggcttccacaaggcatcgcagacttgctggaattctacatgagccttccataaaaacaaatacagctccaaaagcagaagtttttaacttctgtagtgagaactatagaattcaaacaaaaagtgaaataaataaaaatgcttaaatgtgaatttttttacacagtctcaccaatctaagaatttataattcaaaaaagagaaagcagaatcacttttatataaatgcaaaacatatatttcagtttttactactcattattagtagatgttttttcacttaaaataatttcattgggtattgcttagcagtacatttgtacatgaaggaaaactaacaataaccatagtaaatgatcatcaataaactttaaaaactcatgctccaagccaagtaaccactacagaatttggtgtttgtttgtaacaaacttttcttgaacataaccagaccacatgttcacaaataatggcctctaaatgaaggtaaatagagaaacaagtgcaagtttttcactgaaaattcacaaattagttcagacgtatctgcaaaattaaaatgtaaataaactaaatgca

SEQ ID NO: 58293 - DNA, 955 bp, Homo sapiens
aagcatttggaaaaatatagtattttagttattgaatgccaacaattctgaagtcattttctatatttaaaaagcaaaaagccttctgcttggttagaagagactttttctggctcgtgctgtctagccccggaatggagagtgagagggcagggaataaggactcctttgcataaggtggtttggtcagctggcacaaatatgtcctctgagcaaaggcacatgacatttgtgatcctggcactgatcgtgaaggaaccacacccattgtcttccacataatttccagcatgccagtaaactcgatcatctatattactattagaaaggtccccactgtgcctccctacagcacagagcaccaatgttagagacagggcttccacaaggcatcgcagacttgctggaattctacatgagccttccataaaaacaaatacagctccaaaagcagaagtttttaacttctgtagtgagaactatagaattcaaacaaaaagtgaaataaataaaaatgcttaaatgtgaatttttttacacagtctcaccaatctaagaatttataattcaaaaaagagaaagcagaatcacttttatataaatgcaaaacatatatttcagtttttactactcattattagtagatgttttttcacttaaaataatttcattgggtattgcttagcagtacatttgtacatgaaggaaaactaacaataaccatagtaaatgatcatcaataaactttaaaaactcatgctccaagccaagtaaccactacagaatttggtgtttgtttgtaacaaacttttcttgaacrtaaccagaccacatgttcacaaataatggcctctaaatgaaggtaaatagagaaacaagtgcaagtttttcactgaaaattcacaaattagttcagacgtatctgcaaaattaaaatgtaaataaactaaatgca

SEQ ID NO: 58294 - DNA, 747 bp, Homo sapiens
acacagcatacagagagggcaagtaggatgagaatgagaagagacactttagattcagaaatttcaccattgccccctcccgcacctaggaagaaatggrtgtttaatgtattttgctcatgactgcagtatgcatgtattttttccttctcagtgttttctaaacttgcactaaaaggattcattaaatcatcttgttcagatggctcaggtatttctgttgcttaccttgtgctgttgggttctacagtatttctataataatgttacaagaatagtgctgcactgtaatctatcatatagaactacatgagggaaaagttttgatccattttttttcaaaaaatgtatcttgtttgcaaagacacaataaagttacatcttatagactataggcaataaagctaacaataaaccttatttaacatatacactcaaaaaaaaggatttgttaactacagcaagagcacttttaaaagagtggtgaggacacagccaccaattctgtaggatgaatatggggtaagtgagtagaggtaacaattacagactgcttttctcagcaagtttggcagtaccctcctcactactgttcagtcctcctatctaatcttcattttcttactgactttacagtaaagaggttgccaagtgtttggagttttgtcccattcttttttttttactactattaaaatctttattttttagagtacttttaagttcacagcaaaattgagaggaagg

SEQ ID NO: 58295 - DNA, 654 bp, Homo sapiens
tcccaaataataaatgttgttttgataaaatacactgctggtcatgcacaacacctagataactataatctctttttctcctacattagaaagcatgtctgagtgtctgagtgagaaacacttaaagtgatagtcttatagaattactaatttattttttaaaggaaaatatttgctaactcattgttagcataaaagcattgcaatgtgatgacacaaacatcatagtaccttgaataagagccactatgtataaaagtaggaagctacccataaaattatgatagttatctgcttaaaatccttcaaagactccctctaaagtcatcacagttcattagacacgcaatgccctttataatgtggccacaacttatctctccagtctttcttctttcactttctcctatgattccctggccccaggagaagaagaagaaaaaaaaacaaacaaacaaaaaaaccggctacgtctgaattacatcaygtaatttaatttttagggcctttgcttgtattttcctatctgcttgaatcaccctttcgctatattctatgcatactcatctttcaaaacttaacccgaatgttactttcttcatgatatttgcatgcctcaaaataattttttctcagtgctcaaataaaatttct

SEQ ID NO: 58296 - DNA, 553 bp, Homo sapiens
attgctgtagagtattccattgtacgaatatgctacatgttatttatctattctagaaattgagtacgctgattacttctactttatttttctttttcaaaatcatttttgttattctagtttctttgcttttctatgtaaattttagaatgatcttgtctatacaaaaatcttgctgagattttgataagaattgtgtgaaacttcaatttggggagaattaaccatttttctatgttgaatattccaatccatgaacacaggatgtatcttcatttatttagatcttttccagtttctgtcatcagcattttgtagcattttgtgcatgagtcctatacatgtttcaaataaataaataaatgaaatgaaacatgagtcctgtacakgttttgttagagtacactcacatatttcatttcattcattcatttatttgtttatgtatgtatgtatgtatttttagagacagggtctcgctctgttgcccaggttggagtgcaatggcgcgaccatggctcactgcagccttgaactcctgggcgcaaagcga

SEQ ID NO: 58297 - DNA, 694 bp, Homo sapiens
attagaactttaattgtaatgaaaaaattctgggccgggcaccatgctcaagcctgtaatcctagcacttggggaggtcaaggtgggcggatcacttgaggtcaggagttcaaaaccagcctggccaacatggtgaaaccccatctctactaaaaatacaaaaaaaattagccggatgtggtggtgggcgcctgtagtcccagctactcaggaggctgaggcaggagaatcacttgaaccygggaggcagaggttgtagtgagccgagatggagccaccgcactccagcctggatgacagagcgagactccatctcaaaaaataaaaaaaacagaaaaaattctggaaataatcaaaacatccattagtaggagactgattaaataaattgtggcatacaatgaaataatgtgttgctgttaaaaagaatgaaataaatttacacatttcacataaagacttctaagatatattatgaagtgagaaaaacagcaaaatttagtcagtatttaatatatcatttgcataaatgttttcaagactatacacatatatgctgatatttgtataaacaattcttgaaggataaataattacagactctaattatatttaaagaaaagggctggaagttgatggagaggaagacttcattttatatcattttatactgtttggattttttttttttttt

SEQ ID NO: 58298 - DNA, 1289 bp, Homo sapiens
gcacaggacggccctcgacaacagaacgttattcagcccaaaaagtcagtagtgcttaggttgagaaaacccagcactaatcatttggaaactcaatatttatagcaatcaattatttcgggagtactataatttctacaaggtcactatccattgctcctgcctcagagtaaggtggtggtgttttttttccccaagtgagatctaaagggagaaaaaaatggaatggacagttattattatctgtgcctattatgtgctaggtattctatataaacatttctaatatataattcttacaacaaccctgtgagatagacattattacctccgtttcattgattgggacacaagctcaaatacttgaatgatctgcacaggtttcccaaaaggtaatgaaagaacctgggttataaatcctrtctctgattgtccgggggtagaatagaaaggaaaacagtaaatatgtggatatttatccacatatctctaactcctaatacaatgcctaatatccacaggtgccggtaaatacatggtaactggtcaattgttcaagtgcacatagctagtaagtggcccagcccgaagcccatattttattttactgtactgtgctttctcctttggtccaaagtaggaaaatttcgttacccaaacaacagcaaggaagcatagcagaatggatccttggtatttacaacctaagtcaatgattttatatggatcacttgcaatttttattgcatgtaagaaactattgaatgttaagggacatggcttacattctggttttgcctacatacatggaattctaattcttcatacatgaaatatttatgatgtaacaattagcattaatcctttaattcaggaaaacagtaggaggagctcctttcttttaaatgaataagcgtttacataaatctgtataataattaattttagagcaccaaaactacaaataatatattacaaagatatagaagattctacatatataaagaattgctttttaaaaaactttagtcagaattatcattaaagtcagggatgataaatgagataaaaaattatgtgaaattgaattaagggtatttggggatacttattacttccatactagaaaatttgaaaaaataagttaaatagatacatgcttagaaaaattaaaatactaaatgagatgtaagaacagagaatatgaataaagcaaacaaaaaaaggaataaggattatatagataataaattatctggcagtattagtctgttttcattctgctgata

SEQ ID NO: 58299 - DNA, 561 bp, Homo sapiens
gtgtggtggtgtgcacctgtagtcccagctacttgagaggctgaggtgggagggtcacttgagcccaggactttgagatcagcctaggcaatatagcgaaaccccatctctacaaataatacacacaaaaaaatagctgggcttggtggtgtacgcctgttgtcccagctactcaggaggctgaggcaggaggatcacttgagcccaggaggtggaggctrcagtgagctaacattttatttttgagaccctttccccaaataaaaataaaaaaccacgttcacggtgctggaatccaggtgctggtaggcggcactctctgcggaggctctaggggaggctcttgtttccttgcttttccagcttctagagctactacgttccttgcagtccttggcttgtggcctcttccttcatcttgaaagccagcagtgtagcatcttcaaatctttctgccaaagtcctcacatcaccttcttttacccttgtagtcaaatctccctctgactccctctcctaaggacacttgtgattacatttggggcccatccgggaaagcca

SEQ ID NO: 58300 - DNA, 634 bp, Homo sapiens
gctgctcgggctgtagttctaacgtggcattgcataaccactgttacataaccctccacagctgacagtctgtgaacatgtgaccttccagtgacttacacggggctcctttcattaccattgcaataaaaagaacttggttttggctgtagctgcataattgatctgaaaaaaaaaatcacaacaaataactatttcaaatacattaatcacatgtaaccacatcaaacccaaacaggcttctatgagaatgtagtttttgtggtcttgttgctagcaatttaaatactgatrtaaatgaaacacacatatctactctgttgaaaaagcaataagtccagggctcccactctcaaggagctagtgtagaagtagtgttcagggaagctaaggcacagggaaggaaacaattccaaaaccacggggtgagctccatgaatgaggtgggcactaggagaggacagatccagggctgaggtccttgtcacagagaaagacagtctccagcttcatcactgcagtgaagggcacgcgatctttatgtgaacaaagtctgtcccagaacacttccaaatactgcaggacatgtggctcaacatgagccaaaaagacggtgtccccatgcatagacctg

SEQ ID NO: 58301 - DNA, 634 bp, Homo sapiens
gctgctcgggctgtagttctaacgtggcattgcataaccactgttacataaccctccacagctgacagtctgtgaacatgtgaccttccagtgacttacacggggctcctttcattaccattgcaataaaaagaacttggttttggctgtagctgcataattgatctgaaaaaaaaaatcacaacaaataactatttcaaatacattaatcacatgtaaccacatcaaacccaaacaggcttctatgagaatgtagtttttgtggtcttgttgctagcaatttaaatactgatataaatgaaacacacatatctactctgttgaaaaagcaataagtccagggctcccactctcaaggagctagtgtagaagtagtgttcagggaagctaaggcacaggsaaggaaacaattccaaaaccacggggtgagctccatgaatgaggtgggcactaggagaggacagatccagggctgaggtccttgtcacagagaaagacagtctccagcttcatcactgcagtgaagggcacgcgatctttatgtgaacaaagtctgtcccagaacacttccaaatactgcaggacatgtggctcaacatgagccaaaaagacggtgtccccatgcatagacctg

SEQ ID NO: 58302 - DNA, 679 bp, Homo sapiens
gacataaattaatgccagaagcaggcaagaatgatgcctgcaagaaaaatatgaacacagacacacaaatctcaaatcaaaattagcaaagcaaatcaggcaatctggacataaacacttcattatgaacatgaagactttaactcaggaatttaaagacagtcgaacactaaaatatctgctaaagaaatcyaccacattgaaacattaaaggagaaagtccatatgctcatcctattagatgcaaaaagggtgtttaataaaatgtaatacccaattgtgatttttaaaaattctcagcaaacaagaatagatagaaacgttcttaaaccaatatgaaacatctaccaaaaccctaccaaaaaaaaaagcatcataatgtaccccccacatgtgtaccactattatatattttaaaagttagtttcaatgtagaatttgaaacaaatcaataaactttttaaattctgtcacattctttaaagcatcacacttaatggtaagacattagaattattttctttaggctgggtgcagtggctcacgcctgtaatcccagcactttgggagaccaaggcgggtggatcacttgaggtcaggagttcgagaccagcctggccaacatggtgaaatccccctctactaaaaatataaaaaattagccaggcatggtgatgca

SEQ ID NO: 58303 - DNA, 679 bp, Homo sapiens
gacataaattaatgccagaagcaggcaagaatgatgcctgcaagaaaaatatgaacacagacacacaaatctcaaatcaaaattagcaaagcaaatcaggcaatctggacataaacacttcattatgaacatgaagactttaactcaggaatttaaagacagtcgaacactaaaatatctgctaaagaaatccaccacattgaaacattaaaggagaaagtccatatgctcatcctattagatgcaaaaagggtgtttaataaaatgtaatacccaattgtgatttttaaaaattctcagcaaacaagaatagatagaaacgttcttaaaccaatatgaaacatctaccaaaaccctaccaaaaaaaaaagcatcataatgtaccccccacatgtgtaccactattatatattttaaaagttagtttcaatgtagaatttgaaacaaatyaataaactttttaaattctgtcacattctttaaagcatcacacttaatggtaagacattagaattattttctttaggctgggtgcagtggctcacgcctgtaatcccagcactttgggagaccaaggcgggtggatcacttgaggtcaggagttcgagaccagcctggccaacatggtgaaatccccctctactaaaaatataaaaaattagccaggcatggtgatgca

SEQ ID NO: 58304 - DNA, 737 bp, Homo sapiens
ctttaaagtcgaattacgagagtgggcaytctgaaacaccgtgactgtgcccctcgcttccagagcttttttttttttttttttgagatggagtctcactctgttgcccaggctggagtacagtggcatgatcttagttcactgcaacctccacctcctgggttctagtgattctcctgcctcagcctcccgagtagctgggactacaggtgcttgccaccacgcccagctaatttttgtatttttagtagagacggggtttctccatcttggccaggctggtctcgaactcctgacctcatgtgatccacccgcctcggcctcccaaagtgctgggattacaggggtgagccaccgtgcccagcacagagcatctttattagtgagttctcctcacctgtctgttgtcgcctctcatttggtgaatggaagccttgatgggtgccgcgtaaaggctacacataccaggtgcccttgggaccgaagcacaggattcccaagagtccatagcaagacactgtgagttgctcagacaagcccccattaggagcctgagtctgaagctgccgttccacttggccgcctcgagctgacctcaggacgcagtgtcagcagcctggtcacacctgcataggcaccgacaggtgggcagaagcatcgtggcaggacacattcccgcccccggcaggattaacctgaggtaggggggccgttgctgggtcctcaggccatatctt

SEQ ID NO: 58305 - DNA, 1210 bp, Homo sapiens
tttttttcaacttgcttccttttatgggggacctactttcatgtatcccatcttatcctctttcttgaattcttttttttgtttttctgaaggacacccttgagtccttatatggtttggtaggcagaacagtggcctgccaaaagtgtccacatcctaattcctggaacctgtaaatatgttacttttcctgccaaaaggaactttgctggtgtgactaacaccagcaaaattaaagatcttgagatgggaagattatcctggattatctggctaggtccaattgaagatccttataaatgaaagatggaggtaggtccgagtcagagtgacttgataagagaaggattcaatccaccattgctggccttgaagacagaaggggaccactagtcaaggaatgtagtcagcttccagaagcttgaaaaggcaaagaaattgatttttccctraagcttccagaaggtacgtaattctgccaacaccttaattttagctcattgagatctctttggacttctgtgataatattttatagaagtaggaaactaatacatataggaagtaaatttgcttatttctttaatttccaaaagtgtctttaatttatattcgttatttgatagcttaactagattctagttaactataaaattccaggttcaaaataatttcctctctgaactttgaaaacaacataccgtttttttctagcatgctaatgaaatgtctgatgatagtctgattcatgttcttttgtaataaccagtgttttccctctcaaagagtttaggttttctttatgtcttttacatttaaaagtgccacaaacatgcgtctagttattggcttaacctgcgtgggatttggccctgcagtatcaagctttgagtatttttcagcataggaaaaatttcttctgctcattgattatgttttgtgatgtgtttgttctgtctccagaaacctgttaggtagatactgacctttatgcttgttaatttttctgtcatattttgatctctttgtcttttgctctgtgttttgaaagatgtctttgactatttttcacattgctgtattggactttagttgttattaggttcttctgattttgtttttcatttggaaattatttttttttccaatttttccagaactatttcttattttccacttgctgttccaaaaaaaaggttgtaccattctc

SEQ ID NO: 58306 - DNA, 1550 bp, Homo sapiens
tctggggttaaaaatccatggacacaatctctaaatcctattccagttccagcctcctatggtcttaggtaaggaagcacacattgatttcattttgctttagattttttttttgagaaaatactttatggctgggcataaaggttcatgcctgtaatcccagcactttgggaaagaatcactttgggaggagaatcacttgaggtcaggggttcaagaccagcctggccaacatggtgaaaccctgtctctactgaaaatacaaaaattagctgagtgcggtggtgcacggctgtaatcccagctactcgggaggctgaggcaggagaatcacttgaggttgcagtgagccaagattgtgccaccattgcacttcagcctgggtgacagagtgaatgagactccatctcagaaaaaaaaaacaaaaaaacaccttatgctttctgctgtcagactaaccataaacgaattatttaatgagtccaggtgatttttaaaatagacattagtgagaagaaacaaacatttatatcttacaccttattctgttgttattctatggttgaatattttatttcgccatgacagtagatatgtaaatgattgactgataggcacaccctacaaataatgtttgttgtacaatataaataaaatttaacataatgagaacatgatgggtaggtattctgatatttctgtttctgattccaatatctgtgattaagatgtttatgcaaatgtttcactgctctggactgttctataagttatattgattcaatatctctactttctttagagagaaaaatctcattaagtgagaatctaatgggctggaaaaattcaacagactaacctcagatgaagtaatatatttattgaaaaaaatagcaccttgttagctggaaaataatgatacattgacttacattgttctgtatttgattaaaaaaaaaaaaccagaagctttttgctgartttcttgcacaagttttatgagctggattatagcttataagagatgatgatcagaaaaataatgctggattttagttcatgtttatataaataaaagaaagatgttggcatactatgttgtcaactggtttaaccgatatctcccttagaagtgacagtaataagttaacagtgaaaatccttacaattttctggatctatccaaagtcagttctattttgttaattttatcttcaagcaaattttctctcacatgattgtttggaggagagtggggaaatacatctattttcaattacaaggaccaccttccacctgtctactgattttccattacaacccttcctctaaatgcagtcaaagttgttggtccagtctgaatttctgtgctgtatttggaaagagtgttttggtgcagtccaccacttgctgtgctttaagactcatgatatactcaggtggtcacaactcttgtgtaattttattttgcagaattacacatccagcccttcagtgccacccccacctataagtgccttgtagacctcatttccctcacctgtgcttct

SEQ ID NO: 58307 - DNA, 1097 bp, Homo sapiens
attcgggaagctgaggcaggagaattgtttgaatctgggagatgaaatttcagtgagccaatattacgccactgtactccaccctgggggacagaacgagcctctgtctcaaaaaaaaaaaaaaaaaaatcttctaccactctaatgtaggtagaaaaaaaatgcttctggactggatgtgagatgtgaatgaaatctcaaagtcaagatgcttccaaggttgggagccctgaaagaactggtaagttagaggcaggagattgggttttgcacatgttgagtcatcttactcttgcagcaggtggcatggagtggtcactgatgaaggaagtgttgaacactgcaggtatcttgtgccaaatctggtgctcatatgatggcttcaactccagcattgagatctgtctagaagagaaggcttaatttatgggcgtggtaaccaacttcaatggattagcatcctttttctatgagacattagcccaatcctaaattaagctttcctaaattaagctttcttgagggttttaggagaaaaatttagtgtgtgagggattttcttgttgcacgtggctaggtgactgacacaaagtcatcaaagtcttgttagcctaccacattactctgtaaataattagtaattggtaaatagtgcatgatacacacattcaaagagcattaagattttgtgaacttctgtagaagaggctgtcctgaagaatggcacgtgtgcaaactagataatggagtaaaacttggaagttgctgctgttgataatgttgatttgaaattccctttagcctgtgccttggtgcatctctgctgtgtaccttatctccatcttccacacaccagggcagcctgcccagtggaacagacagtatcttcttactccctgcttgcagctctttcttcctttcatctatcctatgtcacagtctaactcagtcactcactcaatcattcattgaacagatatctgctgatctctttctacacgctagacaccagaacacatacctgaactgtcctcgccttcagttggcttgcagctgmactcttgctttggggcagggctgctcaccctttccacatc

SEQ ID NO: 58308 - DNA, 705 bp, Homo sapiens
acccctgaaaccatgccatgtgtgtgtactaatagggaactttgagtatattaagtttctgtggaatgtgcttacctctgttcacctatctccattgtgacaaaagtcttattttagcaaacattcctcaaaatcctggaattttacagataaaaggaactttgggattagcttgtatattcttatcttgccattttattggacacaactgtgatctggagaatttttgtgatctgtccacaattatgtagctagatagtacaggcagttttgttttaatggagtctgatacatgtgtaagcatsttattgtcatgctctctttaacaaatcgaaattactgttctttcaacataaaattaagtcatactttaatttttttcatgttctaatcaagcccttgttcataggcataactgatttgtgtacatagttactaagagacataacattttatacaatcagcattttttcatgttgtttacactattgaaagttgcctgttttgtttttgcttatttttgctacataccatctagaacagtggtagatttgttagagttttacttatagaaagtattatttctggctgtggtaagtgtattctaaggactatattaattataattatagtttagtagtggccatgtggcctctaactcccatcccacactttcctatttgaggggctgatatattataccta

SEQ ID NO: 58309 - DNA, 829 bp, Homo sapiens
tttttagacattttgattttgctaaaattctaaacctattcacacatatctttgtcttttccaatagagttttcaacaaatttatgttcattattttaaaatccttccttgtatttgaatctatcattgcatgacaaattactcccaaatatattaacttatcaaatattatctcacagtttgtatggatcatgaatacatctgtggcttaggctcaagctctctcacaaggctggaatcaaggtgtcagctagtgctgtggtcttggagaggactcctctatgaaaggatctgcttccaggtttactcacttggttgttgacaggatttcaacwttttgtggactgttggaccgaagttctcagttccttaagggctatggatcagaggtccccttcagtttctcgccatgtggcattctccatagggcaactcacatatggtggctgggatggggagagagaaagagagagagagagagagagagagagagaacctaaggcagaagccacattcttcattgtaatgaaatcttaaaagtgatatgcctgtaaatggatctactcattagaagtgagttgctagggccaccccacactcacaaagatgtgattatacaacagggtgaatattaggagtggagatctttgggagacaaggtagaggaggcctattacaactggtaatatctacatatgtttcatttgtgagtctcctttcattaactgatcctttaaattgattatgcgtcacatttttcttcttcacctgtttcataatttttgattgcatgtcagatattgagtattaaaaaataatagaggctgaa

SEQ ID NO: 58310 - DNA, 1300 bp, Homo sapiens
ttaccaataagttcctcatttccatttgagaccttatcagcctggacttcactgtccttatcactatcagcattttggtcacaaccatttaacaagcctctaagaagttccaaactttccctcatttttctctctttttctgagccttttaaactcttccaaactctgtcttttatccagttccaaagctgcttccccattttcagttatctttatagcaactcttctggaaccagttttctgtattaggccatttttccattgctataagtacctgaagctgggtagtttataaatgcaagaggcttaattggctcatgcttctacggtctgtacartcatggtgctggcatctacttggtttttgcgggggacttactgagcttttactcatggtggaaggcaaaatgggagcaggcacgtcgcttgatgaaagcaggagcacgagaaagagtgaggtggggggtgctacacacttaaacaaccagatcttgtgagaactcacttagtattgtgagactagcaccaagctatgagggatctccatgatccccatgatacaaacacttccaccaggccccacctccaacaatgaggattacaatttaacataagttttggtagggatgaatattcaaactctatcaacctccaattaactttttaaaaaataacccttttatgatatgaatattcccttccacccctttgtatgtccacactgagagtggatagagagtgggatgtcctatgtgaagttgaggagaaaaaaaaaatcctccagacacacaacaacatatgaattaaactaatgttcttaaataactaatgtccaaaatgtactattgcattttctatttcaaagccaaaggcggaaaacaaaaaaagcttcaatatcttaccaagttatgcaaagaagaatttccccaacagtataaatctgtgaacttgttcactgaatgatatgaaataaaaattctaaaattgggcattttatcaccagatccataccttactgagtcaccagcaaaggttagcttatgtttggacaggaaagtttgctgtgacaaatgaagcaggtttatcaaattagctgtacttggtggagtgccagcttaacacaacttttttttccctcacctcagctctataaacccgtgttttaggctcttatcccctgtgcctgaccaatatattagacaaagaccacagccttccagtgcctttcagatattggcacaatctcatttttagttattaaaacattgctccaattgaatgtcataattccagtctctca

SEQ ID NO: 58311 - DNA, 1123 bp, Homo sapiens
cccttgtccagccaacctctctctcaggtacagcacttacccctgtggcccacctgcctctggtgctatgggctattcctgggaactggaactgatggggatgggtggaagggcrtcttttcttctggtaggggctgatctcttttactctccagtaggggtggagtgagctgtggaaaggcccctcctgcttgtctctagcacccccacctctctcttcagctctggtccaccaccctcacttgtgccagaccacccgggatgtccatggccgtcactaccctggtttcttttgccctcgtctgtctgattctccagaggaagcctactgctgccacctgcaggctgcagggggctcctgctgcacccgggctgaatttgaggccctgtaccaagtcaatctgtccgctcttccgcccccgcccatcctcaggtgagatctccaaccccagagccactggaacatcgacagggtgttccagtatctggggctctgttcctaaattatggggtggtaggcttgtaacttacagactagtgaagggacagaccgcaacagaaaatcatgtagatcatgattacaattacaaaggagaagttcagggggctgtgcaagctggtaatggggagccatcctgaatctgcccatgggtggctctaggatgagctcctaaattcgtatgcaaatgtgtgtatgtaagacgacacttatttggggagggagtcctgagctttctccggactcccagggattctgtaccccccacagagcgcagcagcgagagcgcggtcggggccgggatccagatactttttctctcccgcaggggcccaggcccgctcctagtgctgggcctctacaacctactggttgtgaccctgatgaccgtagacctcgtgcacttctgctgcggtcggggccggagtctgggctggagccaccgcaggcctccctctgggtcctccgccgcgagctccctgcaggtctctgcggggacagcttaggtgcgcccggagcttgcctgcacctgcgatccagagccaagcgccccgcccctgcccgggcgcgctccctccttagccctgcccctctctgaccccacctccgacgcaagagtggggg

SEQ ID NO: 58312 - DNA, 1123 bp, Homo sapiens
cccttgtccagccaacctctctctcaggtacagcacttacccctgtggcccacctgcctctggtgctatgggctattcctgggaactggaactgatggggatgggtggaagggcatcttttcttctggtaggggctgatctcttttactctccagtaggggtggagtgagctgtggaaaggcccctcctgcttgtctctagcacccccacctctctcttcagctctggtccaccaccctcacttgtgccagaccacccgggatgtccatggccgtcactaccctggtttcttttgccctcgtctrtctgattctccagaggaagcctactgctgccacctgcaggctgcagggggctcctgctgcacccgggctgaatttgaggccctgtaccaagtcaatctgtccgctcttccgcccccgcccatcctcaggtgagatctccaaccccagagccactggaacatcgacagggtgttccagtatctggggctctgttcctaaattatggggtggtaggcttgtaacttacagactagtgaagggacagaccgcaacagaaaatcatgtagatcatgattacaattacaaaggagaagttcagggggctgtgcaagctggtaatggggagccatcctgaatctgcccatgggtggctctaggatgagctcctaaattcgtatgcaaatgtgtgtatgtaagacgacacttatttggggagggagtcctgagctttctccggactcccagggattctgtaccccccacagagcgcagcagcgagagcgcggtcggggccgggatccagatactttttctctcccgcaggggcccaggcccgctcctagtgctgggcctctacaacctactggttgtgaccctgatgaccgtagacctcgtgcacttctgctgcggtcggggccggagtctgggctggagccaccgcaggcctccctctgggtcctccgccgcgagctccctgcaggtctctgcggggacagcttaggtgcgcccggagcttgcctgcacctgcgatccagagccaagcgccccgcccctgcccgggcgcgctccctccttagccctgcccctctctgaccccacctccgacgcaagagtggggg

SEQ ID NO: 58313 - DNA, 1123 bp, Homo sapiens
cccttgtccagccaacctctctctcaggtacagcacttacccctgtggcccacctgcctctggtgctatgggctattcctgggaactggaactgatggggatgggtggaagggcatcttttcttctggtaggggctgatctcttttactctccagtaggggtggagtgagctgtggaaaggcccctcctgcttgtctctagcacccccacctctctcttcagctctggtccaccaccctcacttgtgccagaccacccgggatgtccatggccgtcactaccctggtttcttttgccctcgtctgtctgattctccagaggaagcctactgctgccacctgcaggctgcagggggctcctgctgcacccgggctgaatttgaggccctgtaccaagtcaatctgtccgctcttccgcccccgcccatcctcaggtgagatctccaaccccagagccactggaacatcgacagggtgttccagtatctggggctctgttcctaaattatggggtggtaggcttgtaacttacagactagtgaagggacagaccgcaacagaaaatcatgtagatcatgattacaattacaaaggagaagttcagggggctgtgcaagctggtaatggggagccatcctgaatctgcccatgggtggctctaggatgagctcctaaattcgtatgcaaatgtgtgtatgtaagackacacttatttggggagggagtcctgagctttctccggactcccagggattctgtaccccccacagagcgcagcagcgagagcgcggtcggggccgggatccagatactttttctctcccgcaggggcccaggcccgctcctagtgctgggcctctacaacctactggttgtgaccctgatgaccgtagacctcgtgcacttctgctgcggtcggggccggagtctgggctggagccaccgcaggcctccctctgggtcctccgccgcgagctccctgcaggtctctgcggggacagcttaggtgcgcccggagcttgcctgcacctgcgatccagagccaagcgccccgcccctgcccgggcgcgctccctccttagccctgcccctctctgaccccacctccgacgcaagagtggggg

SEQ ID NO: 58314 - DNA, 757 bp, Homo sapiens
taggatgagacctgtagggcaaatggcaaaagagttggtattgtttcagtttcttctaagttgctatccaacttgataattcttcttcactgtttttttttctttctctctcatagattgtgcttcttggtcagaccccgcatcaagaatatgcgatacattgccagtgagtgtgccatggtactatgtgtaactgtgggaaagggcgggcaaaatctaagggccttggccataaggaccctctaataagaaaataattgtttgagttggccgtagcacttgtggaggatgtctgcttccccgcttctttttttttttttttttttttttgagacggagtttcactcttgttgcccagtctggagtgcaatggcacgatctcggctcactgcaacctccgcctcctgggttcaagcgattctcttgccttagcctcccaagtagctgggattacaggtgcccaccaccagatcgggctaattttttgtgtttttagtagagacagagtttcaccatgttggccaggctggtcgcaaactcctgacctcaggtgatccacccgcctcagcctcccaagtgctgggattacaggcrtgaaccactgtgcccggcagcttccctgtttctagcataacagatggcccatgacttgctgggctgcattccttctctctgtaggtcttgtcaatgctgacaaattggctggccgaactcgcaaatacaaagtgatcttcagccctcaaaaggtgagtttgga

SEQ ID NO: 58315 - DNA, 679 bp, Homo sapiens
  misc_feature (1)...(679): n = A,T,C or G
cnnnnnnnnnnnnnnnnnnnnnnnnnnnnnnnnnnnnnnnnnnnnnnnnnnnnnnnnnnnnnnnnnnnnnnnnnnnnnnnnnnnnnnnnnnnnnnnnnnnntaacccttacacactcatacagccagacagagaggggcagagcgctgaaatcaggtcccaccaactccacacacagtgctctgcccctctccccacagcggaacgcagaagagcgtttgggaggcagtgcctctgcaactcagcggggccttgggaccgcagccaatycacctgagtccaactgcgtttcttcagtttacaaagggaggtgggggcggtgctgtttgaaccttcctcacagaattgtaataaatgcaaataaagggtttggtgcgagtacatgccatgataaacacacagtattagcttactgaatccagtatttagtgttgacaaaaaaattatccctggacatcttactggttttgagaaacttatacagacagaatttcaactgtaccttatctagccatttattcgtccagcgagcatttactgagcgctcctcctctgccagtgaggacagctgtctgctcccaaggagctaaccgttaaatggggagacaaacagtctggtggttacaacagcaacgccaacttcaagcagattcggctggagcgggtttgttttttttttt

SEQ ID NO: 58316 - DNA, 679 bp, Homo sapiens
  misc_feature (1)...(679): n = A,T,C or G
cnnnnnnnnnnnnnnnnnnnnnnnnnnnnnnnnnnnnnnnnnnnnnnnnnnnnnnnnnnnnnnnnnnnnnnnnnnnnnnnnnnnnnnnnnnnnnnnnnnnntaacccttacacactcatacagccagacagagaggggcagagcgctgaaatcaggtcccaccaactccacacacagtgctctgcccctctccccacagcggaacgcagaagagcgtttgggaggcagtgcctctgcaactcagcggggccttgggaccgcagccaatccacctgagtccaactgcrtttcttcagtttacaaagggaggtgggggcggtgctgtttgaaccttcctcacagaattgtaataaatgcaaataaagggtttggtgcgagtacatgccatgataaacacacagtattagcttactgaatccagtatttagtgttgacaaaaaaattatccctggacatcttactggttttgagaaacttatacagacagaatttcaactgtaccttatctagccatttattcgtccagcgagcatttactgagcgctcctcctctgccagtgaggacagctgtctgctcccaaggagctaaccgttaaatggggagacaaacagtctggtggttacaacagcaacgccaacttcaagcagattcggctggagcgggtttgttttttttttt

SEQ ID NO: 58317 - DNA, 841 bp, Homo sapiens
ttgttttctcctcaaactccctttaccatctttgttgttcctatgactccctcaccctccattaaaaattgtaaattgggcaagtcacagtggctcagtcctataaccccagcactgtgggaggctgaggcaagaggacagcttgaggctaggagttcaaaactaacctgcagcatagaaaggcccagtctcaacgaaaacaaataaattaaaaaataaaatataaatcaatctggcccaagatcgcataataagcaggaaaggcaagatttcagccccagcttacctgacttgagaagtgcgctgctrtgtgcactgtgttctgtatatcttgctaacaattacaggtcttcttgtacttctcctttaaaactgggaactcttccaccccagcattctaacaagcatgaaggcagcttcagttacaaatctctcaaagtccccatcgttccacatttatgatctatttaattgatacataatcagatagtagctgcatgtatatcatagatgtatctggtatacaaacagattgacttgactccatctagaatatgattttcctgttgtagtgcattctgaagttcttctgaagaaaactgaacccaacccgaacctctgtgaaagccagtctccttgtcctagaacttcaaaatatgggaaaagattaatcatgaacttgagaaagtttccatgagctccaaatcaaactgccaaatttttcatcggccacaatcgggttgattatttattgtttgagacagcgtctcgctctgtgacccaggctggactgcagtggtgtgaacatgactcactgcagcctcaacttcctgggttcaag

SEQ ID NO: 58318 - DNA, 558 bp, Homo sapiens
aaaaattaattcaagatggattaaagacttaaatgttagacctaaaaccataaaaatcctagaagaaaacctaggcaataccattcagaacataggcatgggcaaggacttcatgactaaaacaccaaaagcgatggtaacaaaagccaaaattgacaaatgggatctaattaaacgaaagagcttctgcacagcaaaagaaactaccgtcagagtgaagaggcaacctacaaaatgggagaaaatttttgcaatctactcatctgacaaagggctaatatccagaatctacaaagaactcaaacaaatttacaagaaaaaaacaaacaacctcatcaacaagtgggcgaaggatatgaacagacacttctcaaaagaagacatttatgcagccaacagacacatgaaaacatgctcatcatcactggccatcagagaggtgctttgttttttaacacttgcctgaaggacttaggtgactgatgggtgagcaagrggaaagttgtttggattcatgggtgaacttttaggcaatttccatattccatgtatgagtgc

SEQ ID NO: 58319 - DNA, 782 bp, Homo sapiens
tgcatgtacatggtatacatatggacagagtgtttgggagatgagaggagaagcattttacccagctttggtggctttttaggtggcaagagctgggctgagtttttagcaatgacaagaattcggccagatgaagactcggtgtaggaaaggaagagcaggtgtcctaaatagaggtaacaacgtgtgtggagctggtggtgtggaacctgaattgatactgggtggcaaatgaagattcaggtgcattgacataggaaaacccaaaagctgtttgataggagggaccaasctacttcttagttattagattcattttggtctcaaagtatcgtatttttcttgaatagcaaacagaaacttatacatgtagtatagagtccatcacatgccaatctctggcaaagccaagccttactaattggactgtgctcaagaaatcctattttagaaaaaaagacagagtcagcttgtgtaggctttgtatcaaacatagtgagaatttaaaataagttttgtgacttaaagggggtaaacgttatttacccgaaaaattcacttacttggctttataaaaaagaaatatagctttcaatttttctattagaaggactttaaaaaaaaagtaaatcttgaacacaatcaagtatgtaaaacaaaaataagtgtagcacctctgcttgaaggaaggtgtgtgtgtgtgtgtgtgtgtgtgtgtgtgtgtgtgtgtgtgtacagaagcatccagagctcaaaccactcagcatgcccctttgcctgaa

SEQ ID NO: 58320 - DNA, 782 bp, Homo sapiens
tgcatgtacatggtatacatatggacagagtgtttgggagatgagaggagaagcattttacccagctttggtggctttttaggtggcaagagctgggctgagtttttagcaatgacaagaattcggccagatgaagactcggtgtaggaaaggaagagcaggtgtcctaaatagaggtaacaacgtgtgtggagctggtggtgtggaacctgaattgatactgggtggcaaatgaagattcaggtgcattgacataggaaaacccaaaagctgtttgataggagggaccaacctacttcttagttattagattcattttggtctcaaagtatygtatttttcttgaatagcaaacagaaacttatacatgtagtatagagtccatcacatgccaatctctggcaaagccaagccttactaattggactgtgctcaagaaatcctattttagaaaaaaagacagagtcagcttgtgtaggctttgtatcaaacatagtgagaatttaaaataagttttgtgacttaaagggggtaaacgttatttacccgaaaaattcacttacttggctttataaaaaagaaatatagctttcaatttttctattagaaggactttaaaaaaaaagtaaatcttgaacacaatcaagtatgtaaaacaaaaataagtgtagcacctctgcttgaaggaaggtgtgtgtgtgtgtgtgtgtgtgtgtgtgtgtgtgtgtgtgtgtacagaagcatccagagctcaaaccactcagcatgcccctttgcctgaa

SEQ ID NO: 58321 - DNA, 782 bp, Homo sapiens
tgcatgtacatggtatacatatggacagagtgtttgggagatgagaggagaagcattttacccagctttggtggctttttaggtggcaagagctgggctgagtttttagcaatgacaagaattcggccagatgaagactcggtgtaggaaaggaagagcaggtgtcctaaatagaggtaacaacgtgtgtggagctggtggtgtggaacctgaattgatactgggtggcaaatgaagattcaggtgcattgacataggaaaacccaaaagctgtttgataggagggaccaacctacttcttagttattagattcattttggtctcaaagtatcgtatttttcttgaatagcaaacagaaacttatacatgtagtatagagtccatcacatgccaatctctggcaaagccaagccttactaattggactgtgctcaagaaatcctattttagaaaaaaagacagagtcagcttgtgtaggctttgtatcaaacatagtsagaatttaaaataagttttgtgacttaaagggggtaaacgttatttacccgaaaaattcacttacttggctttataaaaaagaaatatagctttcaatttttctattagaaggactttaaaaaaaaagtaaatcttgaacacaatcaagtatgtaaaacaaaaataagtgtagcacctctgcttgaaggaaggtgtgtgtgtgtgtgtgtgtgtgtgtgtgtgtgtgtgtgtgtgtacagaagcatccagagctcaaaccactcagcatgcccctttgcctgaa

SEQ ID NO: 58322 - DNA, 1330 bp, Homo sapiens
ctatctttgatttttgaatatgttggttttattcttctttcttgttatagactagtggttcgcaaagtgtggtatccagaccaacagcatcaatgacacctggaaacttgttacaaatgctgatttccaggccctatcccagaaacagagggtgggagtcagcaacatgtgttttaacaaggcttcttggtgatcctggtaggggtaaaatgcctgtaaagattcagaatgatcactatgggctacatctctctgctttctacatgacagaaaatagccagtgatgttacattgctgtaggtgctgttaatattcatattttacagatgaacgacaatttttaaaacttgcttgagctgacacagcttgtaagcaggataagaatgtaggcaatctatcccagcactttgggaggctgagrcgggcggatcatgaggtcaggagatcgagaccatcctggctaacacggtgaaaccctgtctctactaaaaatacaaaaaaaaaaaaaaaattagccgggtgtggtggcaggtgcctgtagtcccagctactcaggaggctgaggaaggagaatgacatgaacctgggaggtggaacttgcagtgagccgagatcatgccactgcactccagcctgggcaacagagcaagactctgtctcattaaaaaaaaaaaaaaaaaaaagaatgtaggcaaattgaccaataatgaatcctacctctataagttgtccactatgaagggcagcacatcttgtggatggtttgaatatgaatgaggtgatatctgaaatctcatccatctgcaagatcacagactatctttggacatttgatgttttaaaatatgaccaatgtggctaggcgtggtggctcacacctgtaatcccagcactttgggaggccaaggcaggcaaatcacaaggtcaggagttcgagaccagcctggctaacaggctgaaaccctgtctctactaaaaatagaaaaaattagctgggtgtagtggtgggcgcctgtaatcccagctactcaggaggctgaggcaggagaattgcttaaacccgggaggcggaggttgcagtgagccgagatcgcaccactgcactccagcctgggcgacagagtgagactctgtctaaaaaaaataaaaataataaaataaaaaaaaattgaccaatgcattttgtactgcagagtgaaataagaaaggtgctggcatgtgggattctcaatacagattgttttctgagacactagagcatttgaaattgactttggctgggatcaagtccagctggacagagaggagtaaaggcattttaactacccct

SEQ ID NO: 58323 - DNA, 1330 bp, Homo sapiens
ctatctttgatttttgaatatgttggttttattcttctttcttgttatagactagtggttcgcaaagtgtggtatccagaccaacagcatcaatgacacctggaaacttgttacaaatgctgatttccaggccctatcccagaaacagagggtgggagtcagcaacatgtgttttaacaaggcttcttggtgatcctggtaggggtaaaatgcctgtaaagattcagaatgatcactatgggctacatctctctgctttctacatgacagaaaatagccagtgatgttacattgctgtaggtgctgttaatattcatattttacagatgaacgacaatttttaaaacttgcttgagctgacacagcttgtaagcaggataagaatgtaggcaatctatcccagcactttgggaggctgagacgggcggatcatgaggtcaggagatcgagaccatcctggctaacacggtgaaaccctgtctctactaaaaatacaaaaaaaaaaaaaaaattagccgggtgtggtggcaggtgcctgtagtcccagctactcaggaggctgaggaaggagaatgacatgaacctgggaggtggaacttgcagtgagccgagatcatgccactgcactccagcctgggcaacagagcaagactctgtctcattaaaaaaaaaaaaaaaaaaaagaatgtaggcaaattgaccaataatgaatcctacctctataagttgtccactatgaagggcagcacatcttgtggatggtttgaatatgaatgaggtgatatctgaaatctcatccatctgcaagatcacagactatctttggacatttgatgttttaaaatatgaccaatgtggctrggcgtggtggctcacacctgtaatcccagcactttgggaggccaaggcaggcaaatcacaaggtcaggagttcgagaccagcctggctaacaggctgaaaccctgtctctactaaaaatagaaaaaattagctgggtgtagtggtgggcgcctgtaatcccagctactcaggaggctgaggcaggagaattgcttaaacccgggaggcggaggttgcagtgagccgagatcgcaccactgcactccagcctgggcgacagagtgagactctgtctaaaaaaaataaaaataataaaataaaaaaaaattgaccaatgcattttgtactgcagagtgaaataagaaaggtgctggcatgtgggattctcaatacagattgttttctgagacactagagcatttgaaattgactttggctgggatcaagtccagctggacagagaggagtaaaggcattttaactacccct

SEQ ID NO: 58324 - DNA, 1330 bp, Homo sapiens
ctatctttgatttttgaatatgttggttttattcttctttcttgttatagactagtggttcgcaaagtgtggtatccagaccaacagcatcaatgacacctggaaacttgttacaaatgctgatttccaggccctatcccagaaacagagggtgggagtcagcaacatgtgttttaacaaggcttcttggtgatcctggtaggggtaaaatgcctgtaaagattcagaatgatcactatgggctacatctctctgctttctacatgacagaaaatagccagtgatgttacattgctgtaggtgctgttaatattcatattttacagatgaacgacaatttttaaaacttgcttgagctgacacagcttgtaagcaggataagaatgtaggcaatctatcccagcactttgggaggctgagacgggcggatcatgaggtcaggagatcgagaccatcctggctaacacggtgaaaccctgtctctactaaaaatacaaaaaaaaaaaaaaaattagccgggtgtggtggcaggtgcctgtagtcccagctactcaggaggctgaggaaggagaatgacatgaacctgggaggtggaacttgcagtgagccgagatcatgccactgcactccagcctgggcaacagagcaagactctgtctcattaaaaaaaaaaaaaaaaaaaagaatgtaggcaaattgaccaataatgaatcctacctctataagttgtccactatgaagggcagcacatcttgtggatggtttgaatatgaatgaggtgatatctgaaatctcatccatctgcaagatcacagactatctttggacatttgatgttttaaaatatgaccaatgtggctaggcgtggtggctcacacctgtaatcccagcactttgggaggccaaggcaggcraatcacaaggtcaggagttcgagaccagcctggctaacaggctgaaaccctgtctctactaaaaatagaaaaaattagctgggtgtagtggtgggcgcctgtaatcccagctactcaggaggctgaggcaggagaattgcttaaacccgggaggcggaggttgcagtgagccgagatcgcaccactgcactccagcctgggcgacagagtgagactctgtctaaaaaaaataaaaataataaaataaaaaaaaattgaccaatgcattttgtactgcagagtgaaataagaaaggtgctggcatgtgggattctcaatacagattgttttctgagacactagagcatttgaaattgactttggctgggatcaagtccagctggacagagaggagtaaaggcattttaactacccct

SEQ ID NO: 58325 - DNA, 1134 bp, Homo sapiens
atggtggtgcacccctgtcatcccagctactcagaaggctgaggcaggagaatcgcttgaacctgggaggcagaggttgcagtgagctgagattgtgccactgcactccagcctgggcaacagagtgagactgtgaaaaaaaagaaagaaagaaagaaagaaaaaaaagaaagaaagagaaggagagagggaggaaggaagggaagttaaacatatataataaaagtagatagcatagtatatcaacccccataatcctgaaactcaacaaccatcactgatgattggtcaaatgtgagaggtgccctccatatacctggaggaaacgagcatctttctctctgaacacacagggacacggaaaaaatctgaacaaacaggccctactaagtcccctcagtttattaccattggatcctattgtcacggagaatcttattccyccacgactctccgttcttcatcaagcctagctcaggtttgtctggtctttgctcccttatgaaggcccccatgtcacataaaatgtacattaaatacatttgtatgctttctcttgttaatctgtctttcattcaagtggctttagccacaaacctaggaatagcagaaagatatttttcttcccctacatattgtctataccctaaattacctcgctcctatattaattttaagcaaattctagacattacattactttatgcataattactataaaaaaagttcttaaaaaaacccaaccacataaccaccgtaatactatcacacttaagaatttcaaaatagttctttgataccatcaaatagacaactttcagattttctattgccatacaggtattacttttttaaacaatgttttgatagaactattatgttaaaataataagaaattatgtgtctggagctgaaaatctgactgaatgacttcagagtaaaagactatcaagaatgtatgagtctttaagaagaatgttatagatattaagtattttataaaatcagagagtggtatcaacatccactgagtcctatgctcagaaggccaaaggaagcataatttttaactgggcctgacatttaggcattaggtaagtagaatttaaaagggcaaattcagactaggaagag

SEQ ID NO: 58326 - DNA, 965 bp, Homo sapiens
tataacttttttctctccaaaccatcacccctatttttcccyttggaccgtctcttcaaagttagcttctaataggctttctctttctgatattcatcttttaaatattatagtcatatgtgcagatttctagatcacgactgaaaattgaaagtggaatctgaatccacacgaaatggatttttttttttttaaagagcaagacacatatcatgcagtagctaattgtttgtgcatggttgaatgactgaacacaccgtggtgaggtttttcagccttccatcacagcttgcccataacagggaacacagaaatggtgtgtgcagcccagcatgaaagaaaagacctcaggtcggttcctttccagtctgccactcacagacagaggtgaggcacgatgctgtccatctttttcaagtggacacaggttgctctcagggcatgtttgctgccttgatccggatgagcaaacagtgatcttgtggaagtaacaggaacgggagttttgacatcagaagaagagcactgtggtcaacagaattgcatctctttgtcctcaacagccatttctcatgagatccacgacccttggacccatgtcacttggcattcctgcaaaacctcatgccaagattgtcattgtggctgatatatagattcgaaggtaatctcacatgtagtaagaaaaagaggtacacagaggccagctattagccctcatgaagaaactagtctctctgcttctgcaaaaaatacattacttacatttgcaacttaatgttttcaaggcatttcctgaatatttatggcacttggtgcttataagatattgtgagagaaataacagaggctcaaagttacccaactaaccccaaatcataaagcaatttagtggctgagtggttaacctcctgacactttcatttccttcattttattaattcaacaaatatttcttgagcatt

SEQ ID NO: 58327 - DNA, 965 bp, Homo sapiens
tataacttttttctctccaaaccatcacccctatttttccctttggaccgtctcttcaaagttagcktctaataggctttctctttctgatattcatcttttaaatattatagtcatatgtgcagatttctagatcacgactgaaaattgaaagtggaatctgaatccacacgaaatggatttttttttttttaaagagcaagacacatatcatgcagtagctaattgtttgtgcatggttgaatgactgaacacaccgtggtgaggtttttcagccttccatcacagcttgcccataacagggaacacagaaatggtgtgtgcagcccagcatgaaagaaaagacctcaggtcggttcctttccagtctgccactcacagacagaggtgaggcacgatgctgtccatctttttcaagtggacacaggttgctctcagggcatgtttgctgccttgatccggatgagcaaacagtgatcttgtggaagtaacaggaacgggagttttgacatcagaagaagagcactgtggtcaacagaattgcatctctttgtcctcaacagccatttctcatgagatccacgacccttggacccatgtcacttggcattcctgcaaaacctcatgccaagattgtcattgtggctgatatatagattcgaaggtaatctcacatgtagtaagaaaaagaggtacacagaggccagctattagccctcatgaagaaactagtctctctgcttctgcaaaaaatacattacttacatttgcaacttaatgttttcaaggcatttcctgaatatttatggcacttggtgcttataagatattgtgagagaaataacagaggctcaaagttacccaactaaccccaaatcataaagcaatttagtggctgagtggttaacctcctgacactttcatttccttcattttattaattcaacaaatatttcttgagcatt

SEQ ID NO: 58328 - DNA, 965 bp, Homo sapiens
tataacttttttctctccaaaccatcacccctatttttccctttggaccgtctcttcaaagttagcttctaataggctttctctttctgatattcaycttttaaatattatagtcatatgtgcagatttctagatcacgactgaaaattgaaagtggaatctgaatccacacgaaatggatttttttttttttaaagagcaagacacatatcatgcagtagctaattgtttgtgcatggttgaatgactgaacacaccgtggtgaggtttttcagccttccatcacagcttgcccataacagggaacacagaaatggtgtgtgcagcccagcatgaaagaaaagacctcaggtcggttcctttccagtctgccactcacagacagaggtgaggcacgatgctgtccatctttttcaagtggacacaggttgctctcagggcatgtttgctgccttgatccggatgagcaaacagtgatcttgtggaagtaacaggaacgggagttttgacatcagaagaagagcactgtggtcaacagaattgcatctctttgtcctcaacagccatttctcatgagatccacgacccttggacccatgtcacttggcattcctgcaaaacctcatgccaagattgtcattgtggctgatatatagattcgaaggtaatctcacatgtagtaagaaaaagaggtacacagaggccagctattagccctcatgaagaaactagtctctctgcttctgcaaaaaatacattacttacatttgcaacttaatgttttcaaggcatttcctgaatatttatggcacttggtgcttataagatattgtgagagaaataacagaggctcaaagttacccaactaaccccaaatcataaagcaatttagtggctgagtggttaacctcctgacactttcatttccttcattttattaattcaacaaatatttcttgagcatt

SEQ ID NO: 58329 - DNA, 1000 bp, Homo sapiens
tagtgttcattcttcaacaacasagtctagtccttctatcttgtttcctaatacatgattgataagcaatatccatgataaagatggacactgaggtgaactatggattgatcaattcttatgagatcaattttcaagattcagaccatggatccctaatttctcagggaatcaggcttacaggattttgtggtcaagtgagtgtatacacaaggttttctgtgccagagccttgtagctggtttccagggttggttttcctccctttcccacagcaatagaatttctagagaagcggctgggcgcggtggctcacgcctgtaatcccagcactttgggaggccgagtcgggcagatcacgaggtcaggagatcgagaccatcctggctaacgcggtgaaaccctgtctctactaaaaatacaaaaaattagctgggcgtggtggcaggtgcctgtagtcccagctactcgggaggctgaggcaggagaatggcgtgaacccgggaggcggagcttccagtgacccgagatcacgcctctgcactccagcctgggcgacagagcaagacttcgtctcaaaaaaaaaaaaaaaaagattttctagagaagcaaacgactgtccagaatagagtatatttccccgcttaccttgatgccagatatgtttatgtggccaaattctggccatggaataaaacttgaagtatccaacagaagtttctgagagccttctttaggagctaagtacatagttttgtctttttgctctatccatctgttgcctggagtatacatggtgttttggactatgatgaggccacactcgaggagtggatgagtggggaatagaaagacgcccgggtagctgacaacttcgtgaaacggagcttccatgccatgcctgggcctttgtgtgaaggagaacaaaatttctgtcttgtttaaaacactcttgtgttgagtttagatgttacagtcatctctaatcctaaataatgca

SEQ ID NO: 58330 - DNA, 1000 bp, Homo sapiens
tagtgttcattcttcaacaacagagtctagtccttctatcttgtttcctaatacatgattgataagcaatatccatgataaagatggacactgaggtgarctatggattgatcaattcttatgagatcaattttcaagattcagaccatggatccctaatttctcagggaatcaggcttacaggattttgtggtcaagtgagtgtatacacaaggttttctgtgccagagccttgtagctggtttccagggttggttttcctccctttcccacagcaatagaatttctagagaagcggctgggcgcggtggctcacgcctgtaatcccagcactttgggaggccgagtcgggcagatcacgaggtcaggagatcgagaccatcctggctaacgcggtgaaaccctgtctctactaaaaatacaaaaaattagctgggcgtggtggcaggtgcctgtagtcccagctactcgggaggctgaggcaggagaatggcgtgaacccgggaggcggagcttccagtgacccgagatcacgcctctgcactccagcctgggcgacagagcaagacttcgtctcaaaaaaaaaaaaaaaaagattttctagagaagcaaacgactgtccagaatagagtatatttccccgcttaccttgatgccagatatgtttatgtggccaaattctggccatggaataaaacttgaagtatccaacagaagtttctgagagccttctttaggagctaagtacatagttttgtctttttgctctatccatctgttgcctggagtatacatggtgttttggactatgatgaggccacactcgaggagtggatgagtggggaatagaaagacgcccgggtagctgacaacttcgtgaaacggagcttccatgccatgcctgggcctttgtgtgaaggagaacaaaatttctgtcttgtttaaaacactcttgtgttgagtttagatgttacagtcatctctaatcctaaataatgca

SEQ ID NO: 58331 - DNA, 1574 bp, Homo sapiens
catatggtataggaactgttaggatcctgtgctggaatctgtggggctgtggctcagaacatgatatctcaaactacggcaccttgacccactgagtactttgaacaagaggactggaaggtctcagaagcaaggcttctctaatattcttctgctctcccctctcttgtccctcattctcctctggagcaagtcatagaatccagaattcctcttcccaagtcacgttatataaactagaactcttcactgagcgtggtggctcatgcctgtaatcccagcactttgggaggccaaggccagtggatcatgaggtcaggagtttgagaccagcctgaccaatgtggtgaaaccctgtctctaataaaaatacaaaaaattagccrggcgtggtggcccatgcctataatcccagctactcaggaggttgaggcaggagaattgcttgaatccgggaggcggatgttgcagtgagccgagattgcaccacagcactccagcctgggcgacagagtgacactctgtctcaaaaaaaaaaaaaaaaaaagaaaaagaaaagaaactagaactattctccccaaagcaagtcgtaaaacccagaaatgtcactcttcctttctctcatctcccttgaagacctaattccagaggggtcctgtcctatatcttggggaagagacacaacattgagagaccaagaagaatctgaacagatgaaccttgctgggtctgtcctgtcctcagtctattaccacgagatcacacccttttgtccaatcagatttctatatggctgtgcattctttattgaacctaagcataaaaatagatagttttctctaggtctttgggtcttcagttcaaaaagctctgtgtcaagtaagactttgataaaataagattgttatgcatttctcttgttaccttgtttcttattataggagtgtcgaccatgacgcctgtgatgggtgaaggaaggcttcacacttttctgcccctacagtggtaaggctggtgtgtatttaaggcatttgtgttgctgcaccagccatattgttcagctaatcatattttgttatggacaagttttcttcctggagtctggggctgagtaatacagtccatttattgttggtaaacacacctgatggtccacttcatgtgaggtgctgtgcttactctcctatggatgggacaatcaccataaatgttgaaataaatatcctcggccgggtgtggtggctcacgcttgtaatcccagcactttgggaggctgaggtgggcggatcacgaggtcaggagatcaagaccatcctggctaacatggtgaaaccccgcctctactaaaaatacaaaaaattaggcaggtgtggtgatgggcgcctgtagtcgctgctactcgggaggctgaggcaggagaatggcgtcaacccaggaggcggagcttgcagtgagtcgagatcatgacactgcactccagcctgggggacagagcgagactccctctcaaaaaaaaaaaaaaaaaaaaaaaaaaagaaaaagaaagaaatatcctcacacgaaacagtcatatt

SEQ ID NO: 58332 - DNA, 685 bp, Homo sapiens
agacctcacactctacaccaaaataaattacataaaatatttaaatataaaaaacaaaataacaaaaatgcttttaaaaattgataatattctataagggactgcatctattttataattccaggataaatttacaatataaaatattttaataattcttattcaatatttgcttttattgttattattaagtatatatttagttgttatgttcatatgtaatggcgtgtttttcagtattgcggcaatagaggggacaaaaaataaaaataaaaaattgtagtattgatctagaagcacacgaacagctgaatatgttacaatatgttcaagccatgtttcagcaatctgtttctggtctaatggagacattcccagccaggagggattttgcctcccagggaacatttggcaatgtctggaaatatttttgattgtcccaacttgggcagtgcagagggtgatgctactggtatgtggtgtagaaaggccagcaacaatctaaacagggcagctacccagagcaaagaattatccagctcaaaatatcaatagcgcmtctgttcagaagccttgcactagtggaaggatggtgcttgatgttcttaataataaacctgtttcctgggacccgtggaaactcccaggcattgagacaccagaaaccagaagctccttctttgat

SEQ ID NO: 58333 - DNA, 755 bp, Homo sapiens
tagtgaataggtctcacgagatctgatggttttataagggctttccctttgtacttggctctcattctctctttgcctgctgccaccatgtaaggcatgcctttcaccttccgccatgactgtgaggcctccccagccatgtggaactgtgagtccatcaaacctctttcctttataaattacccagtctcaggtatgtctttattagcagtgtgagaacatactaatacaaggttcttcagcttccttgaaacccgattgggttgctagacattttggctttaatttctagggaaggtataagaagcctatagcattttgtgtgttggtctctgaacctgagcctggcacagatgtgagggtttctaccattaacacccgccccccttaggctcactggcttttctctagggctctgcttctgaccctggggagggagagtcaggcaagacctttcaaggcttccaaaagtgaccaacacactccaaaatcttgatagttttctaataaatctcctcatctttactctcratagacatctgtcatgagctccaaagcatagctgccagtttagccagctgtgcccttgccacgtggcgaggattgccacacatccagaaggatgggataacatgcagtaagtgagacagcaaagcagtcataactgggaggcccagcctacggtgtgaatgtcagctccagtcttacacaagactgatggatggatgtcagctccagtcttacacaaggtggat

SEQ ID NO: 58334 - DNA, 663 bp, Homo sapiens
ggaggctgaggtaggagaatggcgtgaacctgggaggcagagcttgcagtgagccgagatcacaccactgcactccagcctgggcaacagagcgagactctgtctcaataataataataataataatagaaaaaatagaaaatcagtaaggctatagaaaacttgaacaccatcaaccaaaccaatctagttgacatttgtagaacctcttctacctctgccacccctgggacagcacgaccaatacctcctcttactcctcctcctcagcctactcaatgtgaagatgacaaggatgaagacctttaggatgatccgcttccacttaatgaatarcaagtatattttcttgtctttattttgtttttaacattttcttttctctagcttatgtcatggtaagactacagtatacgtataacacacaaaatatgtgttgattgttcatgttaatggtaaggcttctagtcaagagtaggctattagtaattaagttctgactgggggagtcaaaagttatacacagatttttaaactgtgtgcttgtatcagtgctcctaaaccctacattgttcaagagtgaattgtatagaacaacactcctcatgaacataaatgtaaaaattcttaacaaaatattatgaaatcaaatccagaagtata

SEQ ID NO: 58335 - DNA, 699 bp, Homo sapiens
tcccacttcagcctctggagtagctgggactacaggcacacactaccacgcatacctggctaatttttaaaaaattttttgtagagatgggggtctcactataatgcccaggctagttccgaacacctggcctcaagtgatctgcctaccttggtatccctaagtgttgggattacaggcatgagccactgkgcccagcctgaaaagattttaaagaagtatttaataaatcttggaagatgctgattctgctcttcttggagctccgcttggacccatggacccaaagaacaggacttcagggatcttgtagctcaaccccctcatcttacaaatggctaaaaaggtttgaagacttaccaaagtcatacagccaacaaatggatgagctggggccaggctggggtctccaggagccttacccagtgtcctatctactgtctcatgtctgcctcatttttggacaaaaggagctatttttaaatgtcaataaagaaccggggtacactcagttctttttttcttaaggcagacattgcctatgggtcgatgggttctcatcgtaaaaaacccctgactatacccggaaagttttattctcttcaacataaaattaaagtatattcaagtcctttagatcttacagccactcctttgggggttggcaaagcatgtgtcagtcgagcaataaacatctgt

SEQ ID NO: 58336 - DNA, 642 bp, Homo sapiens
cctgaggtctggagttcaagaccagcctgaccaacatggtgaaaccccatctctactaaaaatacaaaaattagccaggcgtggtggcaggcacctgtaatcccaactactggggaggctgagactagagaatcacttgaacccaggaggcggagtttgcagtgactggagatcgtgccagtatactccaggctgggtgacaagatcgaaactccgtctcaaaaataaataaataaaaatttaaataaaaaaaaaaagccagtctaggcccatttcaacaatcaaaagggaagaaataaacactcccaagtatcagaggttaggttgcccaataagccaggaggggcctggccagaatgctacaggactgtgggacattctggtgccttctgtctgcctggagcttgggttgccagatcctcctccttagctggcccatctcccacagcccttttctcttctctcacataggaaagttggggatggggcaaagctrccaaagacaagctttaccttctcatatttaaattggaatttttctgggattaagcccactacctcttgttctaaccttgggggcccttggagggtgggtaggcagagaaaccagatgtggctcaggcacactcactgaggtgacct

SEQ ID NO: 58337 - DNA, 957 bp, Homo sapiens
cagggaagagtaattggcaggttactggaagagtcaggaatgaggcaacaacggccaggactcaattggtagctgtggaaacagaagggaagagagcagatccaggaaaattttcagagaggtaaaatggatgattctgtaacatactaaataagggagatgaaaagtgggaaaaacataaatcttccaggttcaaaatttaatgtgccaacagaatgatgatgatgccaactgacaagaggaaatttgggaaagggtattattttggtattaattatcataggtttgatttcctataagttaagtcttagaaaatataaaatgtctcatggtcttttcatcgtacaacatctactgacataagaagtcagtactggagatataaatgttggagttttacatacaaacttaattcgaaaccttgtaggagttaaaaattaaaaagggttagtattaggcaactacttggtatccacagttctcctatggcaaacycctatggcaaaaagagcaactaattttatcttatttcacaaacttcttatgaaaataggacatattttcataagaagaagaatttatccatgaaaataggactattttcataagaagtttgtgtgccactgcactccagcctgggcaacagagcaagactgcataagtcttaaagatagagtttatgatttataacaaaaggtgcttatgtcttaaagatacatacgtttatgatttgtgaagttataaatcataaatcttaaaaataaattctgataacttttttaaaaattgaaaactcatgagccactagaagtgtgaacattgccagcctccctaaagccttattagttaccctccacccaaaggtaaccactattttgacctctatcagtacaaataaattttgtccttttcaaactttgtataaatggaatcacacagtatgtaactttttggggt

SEQ ID NO: 58338 - DNA, 957 bp, Homo sapiens
cagggaagagtaattggcaggttactggaagagtcaggaatgaggcaacaacggccaggactcaattggtagctgtggaaacagaagggaagagagcagatccaggaaaattttcagagaggtaaaatggatgattctgtaacatactaaataagggagatgaaaagtgggaaaaacataaatcttccaggttcaaaatttaatgtgccaacagaatgatgatgatgccaactgacaagaggaaatttgggaaagggtattattttggtattaattatcataggtttgatttcctataagttaagtcttagaaaatataaaatgtctcatggtcttttcatcgtacaacatctactgacataagaagtcagtactggagatataaatgttggagttttacatacaaacttaattcgaaaccttgtaggagttaaaaattaaaaagggttagtattaggcaactacttggtatccacagttctcctatggcaaacccctatggcaaaaagagcaactaattttatcttatttcacaaacttcttatgaaaataggacatattttcataagaagaagaatttatccatgaaaataggactattttcataagaagtttgtgtgccactgcactccagcctgggcaacagagcaagactgcataagtcttaaagatagagtttatgatttataacaaaaggtgcttatgtcttaaagatacatacgtttatgatttgtgaagttataaatcataaatcttaaaaataaattctgataacttttttaaaaattgaaaactcatgagccactagaagtgtgaacattgccagcctccctaaagccttattagttaccctccacccaaaggtaaccactattttgacctctatcagtacaaataaattttgtccttttcaaactttgtataaatggaatcacayagtatgtaactttttggggt

SEQ ID NO: 58339 - DNA, 796 bp, Homo sapiens
taaaattgttggtctgtggttaaagaaatgtaatgaaataggaagaaattattgagatacaagcttactaggcaggggttctgggtacactggtttagttaaagattctgagagtggttatcatggctagtttgttcagttgcctgaaacttgaatcctaaaaakgctcaaatgccagtcttagtatgttgcagaggaaaatccagagactcatgaagattggattgctagactagacttactgtgtaagatttattcatccacaccctaaattcatccctcaggctgttcatatgacatttcccccatgaaggctgagagaggtatactcctggcaagaggcccggtatccctgaggaattctaaggtgactcaagtgtaaataagaactggtattgggaactgctgccatcaaagtaggttctttaaattctgtggggttgattgattctggggttgcaagggccaagaagtgacactttgtcacctatggcaaggttggcacagctactccaatgggaattgggcccacagccatgaaaagccagttcactctggctggttggaactccctagtatcccagtcctatgtgatctctggactctgttcaactgcgagcaacctggttattattcacttgctttataaaatgttcacatgatgcctgcatggcttcatatttacacaaacagaatccaagtggccctatgtggatttctttccaaattctagccacagcagcttcttgaactctgatctctgtctctttactctggaaaaaggcagcgctccttt

SEQ ID NO: 58340 - DNA, 671 bp, Homo sapiens
ggtattacttgaattccctacagtgtgtcttgcacgtagcaggagctctacagaactttctcagtttattaattaccggccctcccagctattgatggcttgtagtgtctttttacagtatctaaatgctgcagaagcattggctcttggttcacagacatcacrggttcacctaggctgccaactcagtatcaaatagcctgatgttgaacactgacatacctgtaaaatgcaactcatgatatcagatgcgatttttgcatgaggagtgtcttcgtctttcccaaagggtctcaggttatgttccaagcaggagtcccagagccccacaagggcctttgcatgcttttcaatggactcggtctctctgatggctgttgtgattcttgtgatacagatttcaactactgcctggtcattgttattggtttggtaatcctgtttggaaagaaaatcttcatgttaaataatactctagaaagttatccttcaaaggacaaaatactaactcagtcatttagaaaatgggtgcaccaggctgtgtgctaaggggtgagggtgtaaagcctaatacaataaaggcttccttccttggagatcctaatcttgtggaagaggcagatacacaaacatgctaaaatggagcaggttctactatcacccttagacag

SEQ ID NO: 58341 - DNA, 671 bp, Homo sapiens
ggtattacttgaattccctacagtgtgtcttgcacgtagcaggagctctacagaactttctcagtttattaattaccggccctcccagctattgatggcttgtagtgtctttttacagtatctaaatgctgcagaagcattggctcttggttcacagacatcacaggttcacctaggctgccaactcagtatcaaatagcctgatgttgaacactgacatacctgtaaaatgcaactcatgatatcagatgcgatttttgcatgaggagtgtcttcgtctttcccaaagggtctcaggttatgttccaagcaggagtcccagagccccacaagggcctttgcatgcttttcaatggactcggtctctctgatggctgttgtgattcttgtgatacagatttcaactactgcctggtcattgttattggtttggtaatcctgtttggaaagaaaatcttcatgttaaataatactctagaaagttatccttcaaaggacaaaatactaactcagtcatttagaaaatgggtgcaccaggctgtgtgctaaggggtgagggtgtaaagcctaatacaataaaggcttycttccttggagatcctaatcttgtggaagaggcagatacacaaacatgctaaaatggagcaggttctactatcacccttagacag

SEQ ID NO: 58342 - DNA, 1131 bp, Homo sapiens
gcacttcttatggagatcattctgggttagtaaaataaataaccattgaccttaaagaatacaaattcaaattgtgaatgtccacttatacatggattttttttccacctctgcacccttgagacagcaagaccagcccctcctcttcctcctccttctcagcctactcagcatgaagacaatgaggatgaagacctttaagatgatccacttccacttaataaaaaatatatttttcttccttctgattttcttaacattttcttttctctagcttgctttattgtaagaatatagtatataatatacataacgcatataatatatgtgttgactgtttatgttattggtagggcttccactcaacaataggcaatcagtagttaagttctgggggagtaaaaagttatatgcagactctcaactacatagaggtcagagcccctaacccatttgttgttcaagagtcaattgtattctcaacgagatgaaaaggatactgttaagaaccccgttgggtttttctctaagaagcagaaccaaaaaaagctatgaagaatagaattcttcatgtgtttttaattaatttttatctatgcaatccaagtacaatttgtaacaagttaaaacggagataatatgattattcatggctggaagatttaaagcattgtttattgaaattgactaattttttgcttactacttaatccagccttaaagtagagctcattgttaacctcaaggcacaattttataggacagcaatagataaagtaaatacatgagttttcaacaagtcagatgctgcatttgttgaaatatttttaaaacaagctctttcgcttgtggcatttttactacgttacacacaagctcagctaagtgagcatgagccatgttaatatcttgtgagtataaatgtacagactgctcttattaatttcagtraagccagaagtacagcatccttctcacataagtacaagcacaaagacattttgagttaggcattgtattccatgaaatgaaaaggaacaagagcataaaaaaaagcttccaagcaaaacacacaaacaaatacaggaataagttggaaaccagaagcctgaagcgttaattaaacattac

SEQ ID NO: 58343 - DNA, 886 bp, Homo sapiens
agtgtgtcctcttaaaaacatcctgagttctaaacctaatgctaaaacagacagttaataaaatcaaccaccccaaatgaactcacccctgatgaaaacaaagtaatataagagcctaaggatatttagtatgctcaaaaagaaaaggctcattagctctgtaagatacccatgtcaaaaagattcccrtggttaagtcggtttcatgtgatttaagatccctcttaaaaattcatacctcatattaaagactaaataatcctacagtaaagaaagaaatcttgcttaatttttttttagttcaggttttcccaactttatttaaccagagagccctttcctcatttaataataagcaacacatactgactgcatactaaacgcctggcactattctatgctttacatcaactaacttatttaatcctcacaacaagcctaatggggtaggtagtacagcagaaaaaagttaaatgcctttcccaaggtcatatggctaggaagtggcagagctggggtttgacccatgatagtctgcctctagaatctgcctcttcaccatcaggctatactactgcttctgtggaactagtagaacccaagaaactcatgctccctggaattctcatcagcaaatgttgacataagataatctgtatctatacaaaaagggaaaagaaaggattatactgaaaaaagtgtgaggaatggacaaaaatcccaacagttaactcagttgtgttttgctagtaggactaagttagatttcctttttttcctttaaaatgtttttattgttcagccttccttcaagaaattaataggggtagttaacatttactgaatgcttgttctatgtaaggtacaatgctaagtgctttacatg

SEQ ID NO: 58344 - DNA, 1065 bp, Homo sapiens
tttcatgagaaaacactttgtttataacagaaggcaatcaccaatataagaaaagatgctacaagatcacaagcattttaatatttaaatttttaaaaggttatttataaacgtctttcatacctttctctagcagcattttctaaactgtgttccacaaracaaactaattaaaacaaaagctgagaaatgctgcagaccatagagagattctcagtgcatgtaaacacagtgcatgcaaagtccagcagaaaataaaccccttagacattggttccccagcactggagaccagggacccttgttttcaccacagatagatgcgtgctaaaatgcataaaatacaggaaattgtattttctcatgcccttttcttaagccaggatacaaatccttcctagttctcccgagcgtgaggagaggccaacccattgtccctggggaattttgaaagcaaggagagggaaggtggccaattagtatttatgggttgcaattttaggtaactacacacattcctcctaactcttcctggataagggatgaggcagatgacaagaaaggagtgaaaatcatcagttcttaatacataaagtgactatccctcgagacctgtctctcaccaagtaaagaggaaaaatagaaggaggtaaaaggcagggagagaggagaacacattcaggaatctatttttttttttaacaaagagctttactcttttttataaaatgatatcatcatgacaaccaaggtaatgtgatgcaaattctaggttttcatggattgggagacaatattgttaaaatttccatgcaacccaaagcaatctaccaattcaatgcaatccccatcaagatcccaatgtcactttttacagaaatagaaaaacaatcctaaaatgtatatgaaaccacagaagactgaggatagccaaaattatcttgagaaaaaaaaatgaagctggaggcatcacacttccagatttcaaaatatattacaaactacagtaatcaaaacagcatgacactggcatacagacagacatactgacccactgaaataaaa

SEQ ID NO: 58345 - DNA, 1065 bp, Homo sapiens
tttcatgagaaaacactttgtttataacagaaggcaatcaccaatataagaaaagatgctacaagatcacaagcattttaatatttaaatttttaaaaggttatttataaacgtctttcatacctttctctagcagcattttctaaactgtgttccacaagacaaactaattaaaacaaaagctgagaaatgctgcagaccatagagagattctcagtgcatgtaaacacagtgcatgcaaagtccagcagaaaataaaccccttagacattggttccccagcactggagaccagggacccttgttttcaccacagatagatgcgtgctaaaatgyataaaatacaggaaattgtattttctcatgcccttttcttaagccaggatacaaatccttcctagttctcccgagcgtgaggagaggccaacccattgtccctggggaattttgaaagcaaggagagggaaggtggccaattagtatttatgggttgcaattttaggtaactacacacattcctcctaactcttcctggataagggatgaggcagatgacaagaaaggagtgaaaatcatcagttcttaatacataaagtgactatccctcgagacctgtctctcaccaagtaaagaggaaaaatagaaggaggtaaaaggcagggagagaggagaacacattcaggaatctatttttttttttaacaaagagctttactcttttttataaaatgatatcatcatgacaaccaaggtaatgtgatgcaaattctaggttttcatggattgggagacaatattgttaaaatttccatgcaacccaaagcaatctaccaattcaatgcaatccccatcaagatcccaatgtcactttttacagaaatagaaaaacaatcctaaaatgtatatgaaaccacagaagactgaggatagccaaaattatcttgagaaaaaaaaatgaagctggaggcatcacacttccagatttcaaaatatattacaaactacagtaatcaaaacagcatgacactggcatacagacagacatactgacccactgaaataaaa

SEQ ID NO: 58346 - DNA, 1065 bp, Homo sapiens
tttcatgagaaaacactttgtttataacagaaggcaatcaccaatataagaaaagatgctacaagatcacaagcattttaatatttaaatttttaaaaggttatttataaacgtctttcatacctttctctagcagcattttctaaactgtgttccacaagacaaactaattaaaacaaaagctgagaaatgctgcagaccatagagagattctcagtgcatgtaaacacagtgcatgcaaagtccagcagaaaataaaccccttagacattggttccccagcactggagaccagggacccttgttttcaccacagatagatgcgtgctaaaatgcataaaatacaggaaattgtattttctcatgcccttttcttaagccaggatacaaatccttcctagttctcccgagcgtgaggagaggccaacccattgtccctggggaattttgaaagcaaggagagggaaggtggccaattagtatttatgggttgcaattttaggtaactacacacattcctcctaactcttcctggataagggatgaggcagatgacaagaaaggagtgaaaatcatcagttcttaatacataaagtgactatccctcgagacctgtctctcaccaagtaaagaggaaaaatagaaggaggtaaaaggcagggagagaggagaacacattcaggaatctatttttttttttaacaaagagctttactcttttttataaaatgatatcatcatgacaaccaaggtaatgtgatgcaaattctaggttttcatggattgggagacaatattgttaaaatttccatgcaacccaaagcaatctaycaattcaatgcaatccccatcaagatcccaatgtcactttttacagaaatagaaaaacaatcctaaaatgtatatgaaaccacagaagactgaggatagccaaaattatcttgagaaaaaaaaatgaagctggaggcatcacacttccagatttcaaaatatattacaaactacagtaatcaaaacagcatgacactggcatacagacagacatactgacccactgaaataaaa

SEQ ID NO: 58347 - DNA, 651 bp, Homo sapiens
ggctgccgtgctcataaaggtagacccacgtgtacttccctgtggctccaagaagcgccagctcgctcatttgctcacacccagcaggcagagaaggcagcagcaggcaggaccgccaccctcccatgcaaatcacccccgggagtgcagctgggctcctcccgctcctcctrggcaatgctcctggggagtctgtggggaagatgccatccagggcgctgtgcgctcttcctcatcctcgccctcctgctggacgcggtcggcctggtccttttgctgctggggatcttggcccccctgagttcctgggacttcttcatctacacaggtgccctgatcctggctctcagcctactgctctggatcatctggtattccctcaacattgaggtgtctcctgaaaaactggacctgtaatttggccatgggaagaggagaagagacgcaggtgctgtatgcagacatgtctgtgaacctggggctcttgggcagcaacacgttgcagcttccacctagcaagccacgccgggaccaggtgagtgcacacaagacctacctggcagggtggccagagaggcttggacaagcaggggcaagaccaggcctcctgaggctgcataagcaaatagccagacactgcaccctgactgg

SEQ ID NO: 58348 - DNA, 648 bp, Homo sapiens
caggcttggtgggtgtccagacctcccagggttatccatcctcctggagtcctgaacatgcagggagttggggaataggttctttaggtgaaatgcgaccaggcactgatgaactgcattgctagatcctaaaagaaaaaccaagcaccctcatgccctgctggtttattatctagaaggcgggaaggatgagagcagtgctgtcctgaactaaatgcaaagtgacmtcctaggagggcaaagagtgttgcatgatttttgtttcccaggaggtagctcttacaacttctgtcccaccctgtgggcagttcctactaacctgctgttctgacataactctaaggagatctgaatgccgtctcctttcccattaaagatagccaacaacaaagcctaaatagtgagttcaggtctgatagaatttcccctatagtcaaaagtataaaggatttcagtggaaacatctaacctgtaaacctagacccaaggtttaagggaggccagtaagttttaggccctagggatttggtaagctcaatccccagctcattttttaagggttttgtcccagatgtatgcttgaaggcagtgattttcaactatggaaagttttacacagctgcagatgttggactggggtgaccggga

SEQ ID NO: 58349 - DNA, 1180 bp, Homo sapiens
tgagttaattaggaataactaagtcagcatggtgctttcctgctacagaagcagggatttacaatgcatagagaaaataatattgcctttcgtttgcattgatttttcacttaccaagcactcatgtctgacaaatgacctcacttggtccttaaaagaactcagtgagataggaaggtgggtggcattattattattattatttacatgtaactgatgagaaaattgactcagagagggaaaatgatatagtcaatcagtacagatgaaacagaaacccaggatgcccatctctaagatgaggtatatgggagaaagtagtaaggctttgctgtaaatatctaccttaatattaaagtccaggtcccagaggtaaagtaagcaacttcatgtattctgccaggtgtaggtggaatgcatacacctgcagatgattgtcccaggagctctgtcccagaaggcaaagtcattgtccctacccatccctgtctctgtctgaagaccagcctgcaagcaggagagaaggaaggaaggagtcttccyattctccaccctttctcctcttctggctaacggccccaactctgtgtcgagaataaaggccagaaggtcctcaacaggaggttccttttcttatgtacctaggccattgggccttgaaggcctaagaagttccgtgagggtttttgaaaagggcaaacataaagatggggaagcgcaaggccacatggtcgtttcatgacccaaagctttgagcacccctccccaaggattataagatctcatctccctttctctgggggaggggacagtcaaccaactcatgtcaacagagcatggcatatgagcctagtgctgagctagaagcttgtgggtaggggcataacttgtatagttcaaagtgtcttcatggcctcacaaaacatccctatcttagaggcagactaaacgatattcccaatttagagctgaggaaacagggagaggatgggattttcccaaggtcacatcattatggcaaaagtagagaccttctaatgacaagtctgttgctctttctgcttcccctggctgcgccaggctccagaagtttactccctgcttgtgggggcagctcacacctggattcatccatccatttataaattatacttaggcaccaaccaacttccagatgccc

SEQ ID NO: 58350 - DNA, 948 bp, Homo sapiens
tgggggtgcccagctccagtggggccctggctgcttcctcttccctctgtttctgtcacccttggcccaggcccctgcccattctgtaccccagaagcctccttatagggcttgggccggagattggggtcatgaagaaatagcctgtagagggggaaggaatgagcgctgagaaccaccatctgtttatctgctttgggagttggagtggtcttggagatagggagggcatgatgtcctcaaaatctgggtgctaaaacttctgaccacagtcaaataaaaaagaaagaatgtgtcagaccaaccacctggtggattttcaggctctgcagccaccgtagaatgctgctcagagaccccacagatcccagggcaggaagcccttgctgtgtgccaggcactatgtctcatgctctacaaacattgtcttaattatccccaaatggcttcatgaagcagagttaattattttctccaacaggtgccttgttcaaggcaacccaaccagtaggcagtggagctgagattcaaatacagatacagccaacagcaaagcctgtgctcttcccattatgccaggttgtctctctaacaaaccctgccctcaaagagcttacaatttagttgtagaaacaaggcatcaaaccatcaaaaaagagtgccagaaggatctttttagattttctggtccagtttaacacacgtggagatggcaggctgggggattttagttaaggtaaactcaggttatttgtcacctactgtatgacagatattaggtgatgtatgggggacacagcgatgttaaggagccrtactcagaatgacacacccaaggtcacaagttggtggcagagccaacttaaacctggggcacagacatctagacttgagctttgtctgaaagagcagttgctacccaccattcacatatgtggtaaaaatgca

SEQ ID NO: 58351 - DNA, 597 bp, Homo sapiens
acggcgagaagggagaggaaaaagacggatgacctggcccctycggtggaaatggcaagggaagctcactcaatggcatcgaaatgtgggccctgtttttcaggccaaaagaacagtgttgctgagcagcactcaagagacgacccatggaagtcagaaataaagtcagggcgaggccgggagattgggaaagcacatgggaagaggctgaaagagaagttttggaaggtgaggaaactgagctgaggaagtgagccaggaaggagagaggggggaaaactattattaaaaggaaagggtgctggggaaagaggtcccagttcccttcgtcagcagccagttgatgggtccagagcaaaatgaccccacaggaacagcaaggcgacccagtttcagaaaagtgtcgagccagaaatggagtgagcccacaagctggctgcagaaagcttagcagctgacctggacttcttgagcttccccagatctcaggcagaaacagtcctgtgcctccctccaccctgggaggatagcagaggccgagaactgccaactgtgggcaagggccctgggcctgcgaggggctcttggctatggttg

SEQ ID NO: 58352 - DNA, 676 bp, Homo sapiens
ccagtccctgtggcctctgctagcagacgactgcggcccccaggtgtgaggatgagcgcagcagctggcccagggcgccacgtgtgttctgttggctctgaagaaggatgtgttgaccagctgacacttacagggctgaaagagaccacagcattctcagaggcaaatggaacattccagtgatgaaagccatgccggttcaaatgcaattctttcaagaggtctggagggttcctgccccagagtgtgtgcttatgtgagtgttggatgctgcattaatatttcacaaatatccatataaatattttagtgtgttgcatttcgatgtcaatctcactagctttcctgactccaaatcttagattgcatttgccttttcccttcgcatatttatttgtgaaaaccttattttggaagcaaatgaaggccatactgtaagaggtgaactacaacatctctatgaaggaaaagtcaggccctggactccacagacaatcaaagtaagtacacgtgaaagagctaacttgaggacttgtttctcacagggaattctatctggcacaggattggagaactttycttccatagagtccccaacttgatttcatcctgatattgttctgttcactgtagctgcaccccaaaggaaaatgtcttccttggtgatctgctgaga

SEQ ID NO: 58353 - DNA, 1061 bp, Homo sapiens
agaaaaggggctgagttccattctgggtttgctgtagtttggttgggattattgttggcattacagatgtaaaagattgactagcccataggccaaaggcctgttctagttgaccaagtttcaagtaggattaagaggttggttgaggggtgcagtttctggtgtaggccaggtaggtagaaagtgaggaacagggttgcctcttggctgggtggagtctctgaaatgttagaagaagcgctgaagccttgattgatagttctgccccttgttgccctggggcttatctgattatgggacgagggtagaaagtaagaagcacttttgaatttgtggggtagaacttcaacaataagtcagttctagtggctgtcgcctggggactagtgagaaagctactcttctccctcttccctctttctccccatggccccactgcagaattaaagaaggaagaagggaaggcggaggagtctataagaaggaatcatgatttctatttagcagattggatgggcaggtggagaatgcctgggggtagaaatgttagatcttgcaacatcagatccttggaataaagaagcctctctgtgctgcctgctgtgtcctgggttcttgccttgggggactcggggagcgaggaagagagctcttcctcctggataacatcttggattctgtaccattccactgtcccttcccaccagacattttaaatggtcctcgttgtccccttccctgcccttgccttcctgctcattgtgtaggaaccagtgacttcatgaagtttctccggagccacctgcatcctgctgctctgaagtcacttcctgcctgaggtgtggaggcggcagggagaaaccaggaagmcactaataatatcaagaggccggggcgtgcatctgtgctggagatcttaatgctggcgacatgcctccatcaccaaggaagatggataagagttgggtcccgtaaagaccacaggggctggaggtggcactgagaagactgagttagaactaacgggccagcccaccctcccccagcaagggtatcttgaa

SEQ ID NO: 58354 - DNA, 1967 bp, Homo sapiens
gtataaatatctcaaaataagaaaaagagacctgcacaagctttacttttccaagccagattagagaaatgcaccatatctctcatctaaataactattaatgagaaataaaggtagtgtgtatgtcctgtcaacccaattattacacataaatcaggagctcttttagtattcttaatgacgcaggctttagaaacaattcattgttacccaaagagaattcttatagggaaatactcatggttcagtgagaagaatatttaaaaaaaaaatggagagattcggtcctagccttgggttcaccaactggtagtcatgtaagcccaaaacacgttacttcctttaaatatgcagaagttttcccatctacaaaacaagaaaaatatgtattcttctttgttaactttttaatatgaaccaaacaacatttatccatgatttgatctttgatttctgaaaattgttcacaaatcaaggcagggctgtccacatttacaatttcacttttgttaaatgaaccagaattagcttactgacagacagacttagctaaggctgagccagcccttttgcttttgaggtcaggaagtaatctaagacccaagagttttctctccactgcttaacttccctgagtcaagtttccttcctctacctcggagttggtaaaatttctttctgatgaaaatgtactttggggctggtgtggtggcttatgcctgtaatctcagcactttgggaggccgaggtgggcagatcacctgaggtcaggagtttgagaccagcctggccaccacggtgaaaccccatctctactgaaaatacaaaaattagccgggcctggtggtgcacacttgtaatctcagctacttgggaggctgaggcaggagaatctcttgaacccgggtggcagaggttgctgtgagccaaaatcgtgccaccgcactccagcctgggcaacaagagtgagtcttcatctcaaaaaataaaaataaaaataaaagaaaatgtgctttggatttccagtaagtctccagtaaatgaaagttagtggcatgtatgcaacagccaacttggagagttcagtggacgtttgtcatgcatttgccatcttcattcccttttatgtttggtgactcttccacctcttgaggcagagtctgctatcccttatagaagcttaaagtgctggatactcatctcccagcattcattgcagctaaagtgtgggccctgggcaaccactgmaacctcagaatcagtccccagtgatgcagacatggagagactgcaaaggatccattttgggacttgacaatgatagcagcagctccatccggttggggaggctttattggcagcagtttggtgaactggtggtagctgtgttatattgcaccagaccccttccttcgatatgtttcggggcttcactccagctggattgcttctgattctagttctctggccctgtggagtgagctacaccaaattcttttgatggattctttttcttgccaaaattggtaagaattcgtttcttttaacaaaaaactcattgacccagaaatcatcctcaaggccaagaaatcaaccaggaccagcagagtaccctgctctatcctaaaacctcccagtgaggtgccactaaacctcctgactccattcaacctttccattcacaatatatatcacacagtgaaccacagggatgaaaggggggaatcccaaaagtaaccaaattgtagttcaatggtacagaaagacaaacctaggagattagatcatctaaaatattttaggaccaaccctactcagaccttttatatggaagcagaatgggatgttagaaaaagagcatggactttttagtgaaataatctttaaaaatctagttttggtcattcccttcatcatctcttgtccttcaatatcctaaggacaatacacccagacacatcccagtt

SEQ ID NO: 58355 - DNA, 555 bp, Homo sapiens
  misc_feature (1)...(555): n = A,T,C or G
atgggaagtaatttgtgtaagggaagtataactgaaagaagacatggtatcaatatctgtatcaaacttataattaaatagatgaagaaaaaggaattattacttgaattttagtttatatttaagccgtagtaacagcaaatgaaaaaataaattttaacttctcagtgtcctttgtcattgaagagtatacagaagaaaactctgaaatgaaaagctactatattttatggttcacctctctataaggtcttatgtgtatttgtttggaaagggagagagaaatttcaaagacggcaaagaagtatttgaaaatcattaaatagtaytttaacttcagtgttacatgggtacgtgcatcacaagtatcaatattggggaaaattaaaaggaaaacagtattggaacataatacaaaccaccgcaganctggaagtgacaatgtaggccatgacgaagtggccagacattctcaggtgtgcctacctgctcaatatcacgaaacagttcattgacacaagatgacttgttttatacagtttagagattcatctc

SEQ ID NO: 58356 - DNA, 883 bp, Homo sapiens
gggatttgcactggtatgtcactgattccaaatcagatgctctcattccatggcaccaggttgtctcctgtagcatgagactataatcgaccaacacaaaaaggagacagggagaggatgccgaccaaactgccaagctaatgcatctgagaagggaatacatacaactagcctgtcctccattcctgggctggacgcttcactaaaccagacgacaaagccttctggaatacctrctgtgagttgggcactgtgaaggcagtatgcccactcccagccctcacagagctcatggtgtaactggggacaacaaagtgtaaacaagtagttaaatgtcacaagataaatgtaggggagacaaagaggtagtaaggcagcatgtcaggaaatggtaaacaacacatcatgtcacaccacgaatcatgagcaatccatcagtggtaggattcgaattaaattacaattcgattttacttatttattatttaggagacattctgtttttcaattttttttcttctccacatcagcccacccattttaaagccccaagcattgatatgatttcataccaataatttggagataatgatttgtgtctcggttctgcctgcatggatctccttctgataatttggggaaagaatgatgtgtatctcccctcttttcagagagtggccttggggattttattctttgttggggcagggtcttagcttttctgacagatttaggaaacaggaagacagacatccagaactgaaaaatctgtcaaactcattttctttcacggttttctgccaatttttgctccctccctttctctctctctttttccccttcttttgagtaagaggaagagttgggaaaatacgtatgtgcc

SEQ ID NO: 58357 - DNA, 883 bp, Homo sapiens
gggatttgcactggtatgtcactgattccaaatcagatgctctcattccatggcaccaggttgtctcctgtagcatgagactataatcgaccaacacaaaaaggagacagggagaggatgccgaccaaactgccaagctaatgcatctgagaagggaatacatacaactagcctgtcctccattcctgggctggacgcttcactaaaccagacgacaaagccttctggaatacctgctgtgagttgggcactgtgaaggcagtatgcccactcccagccctcacagagctcatggtgtaactggggacaacaaagtgtaaacaagtagttaaatgtcacaagataaatgtaggggagacaaagaggtagtaaggcagcatgtcaggaaatggtaaacaacacatcatgtcacaccacgaatcatgagcaatccatcagtggtaggattcgaattaaattacaattygattttacttatttattatttaggagacattctgtttttcaattttttttcttctccacatcagcccacccattttaaagccccaagcattgatatgatttcataccaataatttggagataatgatttgtgtctcggttctgcctgcatggatctccttctgataatttggggaaagaatgatgtgtatctcccctcttttcagagagtggccttggggattttattctttgttggggcagggtcttagcttttctgacagatttaggaaacaggaagacagacatccagaactgaaaaatctgtcaaactcattttctttcacggttttctgccaatttttgctccctccctttctctctctctttttccccttcttttgagtaagaggaagagttgggaaaatacgtatgtgcc

SEQ ID NO: 58358 - DNA, 481 bp, Homo sapiens
gaatctcaaatatatgattccctttccaatactcattttttgacacactgttaactcagtgtgttaacagtgaggtcagttaaattgttctaatttatactcttatttttacttcacaagtttctcaattctgaaatatggcagaatttgacaagatttttttttaatgattaggctgaaccccataatttttagccaagaattctcgaaaccagatggagaaagctgttcaacaaagatgaataaaaagatttaaatagttaaaaaaaaaaaarggcctcctttagttaggaggttaattatattatgataattataaacatgtaaaatataaaactagttaagcctttactataatatatggctcataagttttaaaagcaaaataattttaaacacacccaaaaaaactaaagaccgtccgggcgtggtggctcatgcctgtaatcctagcactttgggaggctgatgcgggtggatc

SEQ ID NO: 58359 - DNA, 481 bp, Homo sapiens
gaatctcaaatatatgattccctttccaatactcattttttgacacactgttaactcagtgtgttaacagtgaggtcagttaaattgttctaatttatactcttatttttacttcacaagtttctcaattctgaaatatggcagaatttgacaagatttttttttaatgattaggctgaaccccataatttttagccaagaattctcgaaaccagatggagaaagctgttcaacaaagatgaataaaaagatttaaatagttaaaaaaaaaaaagggcctcctttagttaggaggttaattatattatgataattataaacatgtaaaatataaaactagttaagcctttactataatatatggctcataagttttaaaagcaaaataattttaaacacacccaaaaaaactaaagaccstccgggcgtggtggctcatgcctgtaatcctagcactttgggaggctgatgcgggtggatc

SEQ ID NO: 58360 - DNA, 1649 bp, Homo sapiens
ggtctcaccagccatattaaacggctgaaaggcattagggaaaccagggtgtgtggtggcgcacaagacagggaagtcctgagaattccaggcaggctgcaaccacagccgcgctccctgttgctccatccatcccatctgtggggcggccttgtgcggagctgtgcttcccaagcctacaggcgagggaagaataaatttgcctccttcractttgagcacttgtgtcccgcctgcctcaggtggacccacctctcccacaaatcagagcaagagaatgttgttatgagaacaagccggttcagaaaaagagacagatgatttcccgaagcggctgcaaaaagcccacaggaactatggaccacaccctaaggaacagcactaacatcttcacctatggctgatgtcaatagcaatggggggcagtggctgccttcccacaatctacccattttctgggctgggaggggtgaagtcaccacccgtccctgtgtgcctgaggtggtggtcagccacaggagctgacattctgctgtgaatctggatgcggggtggcagggtacccaggccacaccctggtgggctgcagggctcaagaggcagctgcgttgcttgtatttaaagtcaaatgggagcaattagaaaagaggtaaacgcaagttctctcttgtaggtcgggctacaggtgactttttaaaagtctgaattatcctaaattttctataataaacattttaaataaaaaataagtattttgactggtttaaaagtttataacaaaacaaaacccaggctcttgtttcacagatgctgtgaggcgggaggaggcgtctgctgctggagtggccccaggatcctggcctggcagaaggggcttccttcttccgaggcaggtcaaaccccatcctcactttagagcccctgttccccacacttactttgaaagatttaaacccacaggaaagttgaaagaggaagacaatgaacacccacatgcctctcacctgtgtctgccaaaggttaccattttgccacacgcttcatctatatgtcatcttttatatgaccttttgtaatgaatcattggtagataccacgacccttcgtccctaaacgttttaggatggactttctaacaactcagacattttcctatataactttcctacataaaagtacattaacagtgcctttatcacttgcaaggaacttaacaatttgataatattacacatttatactatcatccagtcctcagttgaatttaattgttcccaaaatgtcctttatggctgtttttgtttggtttgttttcctctttagcatccatgtcttgaataggcacagcacccagccctcgctcaggctgactccataccatgcggaagtcaggtcagctgcccgtggctcggttgtctcccatgtcatctgtctcctaggttggccttcccctaggtcattcatcccctagcctggccgtcccgtaggtcatccatcccctagcttggccatcccataggtcatccatcccctagctcgactgtcccgtaggtcatccatcccctagccgggccgtcccgtaggtcatccatcccctagctcgactgtcccctaggtcatccatcccctagcttggccgtcccgtaggt

SEQ ID NO: 58361 - DNA, 1649 bp, Homo sapiens
ggtctcaccagccatattaaacggctgaaaggcattagggaaaccagggtgtgtggtggcgcacaagacagggaagtcctgagaattccaggcaggctgcaaccacagccgcgctccctgttgctccatccatcccatctgtggggcggccttgtgcggagctgtgcttcccaagcctacaggcgagggaagaataaatttgcctccttcaactttgagcacttgtgtcccgcctgcctcaggtggacccacctctcccacaaatcagagcaagagaatgttgttatgagaacaagccggttcagaaaaagagacagatgatttcccgaagcggctgcaaaaagcccacaggaactatggaccacaccctaaggaacagcactaacatcttcacctatggctgatgtcaatagcaatggggggcagtggctgccttcccacaatctacccattttcygggctgggaggggtgaagtcaccacccgtccctgtgtgcctgaggtggtggtcagccacaggagctgacattctgctgtgaatctggatgcggggtggcagggtacccaggccacaccctggtgggctgcagggctcaagaggcagctgcgttgcttgtatttaaagtcaaatgggagcaattagaaaagaggtaaacgcaagttctctcttgtaggtcgggctacaggtgactttttaaaagtctgaattatcctaaattttctataataaacattttaaataaaaaataagtattttgactggtttaaaagtttataacaaaacaaaacccaggctcttgtttcacagatgctgtgaggcgggaggaggcgtctgctgctggagtggccccaggatcctggcctggcagaaggggcttccttcttccgaggcaggtcaaaccccatcctcactttagagcccctgttccccacacttactttgaaagatttaaacccacaggaaagttgaaagaggaagacaatgaacacccacatgcctctcacctgtgtctgccaaaggttaccattttgccacacgcttcatctatatgtcatcttttatatgaccttttgtaatgaatcattggtagataccacgacccttcgtccctaaacgttttaggatggactttctaacaactcagacattttcctatataactttcctacataaaagtacattaacagtgcctttatcacttgcaaggaacttaacaatttgataatattacacatttatactatcatccagtcctcagttgaatttaattgttcccaaaatgtcctttatggctgtttttgtttggtttgttttcctctttagcatccatgtcttgaataggcacagcacccagccctcgctcaggctgactccataccatgcggaagtcaggtcagctgcccgtggctcggttgtctcccatgtcatctgtctcctaggttggccttcccctaggtcattcatcccctagcctggccgtcccgtaggtcatccatcccctagcttggccatcccataggtcatccatcccctagctcgactgtcccgtaggtcatccatcccctagccgggccgtcccgtaggtcatccatcccctagctcgactgtcccctaggtcatccatcccctagcttggccgtcccgtaggt

SEQ ID NO: 58362 - DNA, 782 bp, Homo sapiens
gaagtcctgagaattccaggcaggctgcaaccacagccgcgctccctgttgctccatccatcccatctgtggggcggccttgtgcggagctgtgcttcccaagcctacaggcgagggaagaataaatttgcctccttcaactttgagcacttgtgtcccgcctgcctcaggtggacccacctctcccacaaatcagagcaagagaatgttgttatgagaacaagccggttcagaaaaagagacagatgatttcccgaagcggctgcaaaaagcccacaggaactatggaccacaccctaaggaacagcactaacatcttcacctatggctgatgtcaatagcaatggggggcagtggctgccttcccacaatctacccattttcygggctgggaggggtgaagtcaccacccgtccctgtgtgcctgaggtggtggtcagccacaggagctgacattctgctgtgaatctggatgcggggtggcagggtacccaggccacaccctggtgggctgcagggctcaagaggcagctgcgttgcttgtatttaaagtcaaatgggagcaattagaaaagaggtaaacgcaagttctctcttgtaggtcgggctacaggtgactttttaaaagtctgaattatcctaaattttctataataaacattttaaataaaaaataagtattttgactggtttaaaagtttataacaaaacaaaacccaggctcttgtttcacagatgctgtgaggcgggaggaggcgtctgctgctggagtggccccagga

SEQ ID NO: 58363 - DNA, 727 bp, Homo sapiens
aaaacatataatgcaccccataaatatatacaccgattatttatccacaaaaattaaaaataaaaacaaaagaagaaacagcaccaatatacaacctaccattttacctyaagaaaatagaaaagcaagagcaaacgcaaaattagtactcctttttttacctataaaactagactactttatattgtttaaagacaaacaatagaagagagacatgaaaagaagagttgatttgttgaaaagataaacaaaattgacaaaccggtaattagactaagaaaaaaagagaaaactcaaataaataaaatgagagatgaaaaaggagacgttacaactgatattgcagaaatcatagaggatctgaagtctattatgaacaattatacaccaaataattggaaaatcgagaagaaatagataaattcctggaaacataggacctaccaaaattgcattatgaataaatggaaacctgaacagaccaataatgtgcaaggagattgaatcaataataaaaggaagccatcaaaaaaagctcagtaccgcacagcttaattttgtcaaatatttacagaagatttactaccaattcttcacaaaatattccaaaaaactaaagaggagggaattattcccaactaattctacaaggtcggctgtacccaggcaccaaaaccagacaaggtccccaaaaaaaagaagaaaaactacagaccaatatccctga

SEQ ID NO: 58364 - DNA, 691 bp, Homo sapiens
ggttttagtctgttgtgcagcttccctaataaggggtaagtgtttctttggctggctgaaagaggcctgctcctttcctggtgctatgaatccaggtgggactgcagtggctcttctatggccattgactgtgtgagccccacggtaaggcggggaggaggcaggacaggatgcaggcatccaaagacaccactgtgagctctctgaggggtcagaagacacagagagccatcccttatcacttaggaaattctgagttattgacaataaatgtggcagggtacaggaggagagagctcttgtaattaagtgattgcttcaaatatatcaccgccctctagagatgggaaatacctagaccaagaattctttcagagccatatctcagatacgacaggacttcctgtcgtaagataataaacagtaccatactttaaaagccagtatttctagtatcatagtattactgtgtttctctctgtttatccctgagccccrgggaggtcttgttagagtgtaccagcactgtgacagctggcagatggggcactgagagccggaggaggtgaggaccggtcactccacaggcctccccgacgtctgcagcgcttgtagggacatctaaggggccagtgtgacttaaatacactgcataagtttgaaatgcatgtagttttagcttttgttaaaa

SEQ ID NO: 58365 - DNA, 792 bp, Homo sapiens
acaagatcataaagtaacaaatacgtattattcttatacataattcgaaaatataaatacaatggctttgatctatttaaccatctctccactaagctttaagtcttactagggattttttttggaagggagagaaaaacacccactacagaaacagttttattactccagcaagctggggtttctgtggtgatacacagaatcctcatctaccagagagagccctgactgggatgcaggactggttacaacgtcaagatccttctctgtgaccaacttgatgtcttatttgtaaaattcttccaaggaggaaacgctaaattttttttaaaaactcttctcactgaaaaccttatgtccatcgcggagctgtctgcggtggcggcggcgcctctggtctcccgcggcccggagcccgcagcaccgcctctccctccctgccgcagccccgcagcccagcagcgccccagacacacgccgtcgggcaggagccgctcgctctccggaaagtgacaacagaattcatcgaagtgaagaatttyttaagaagataacaaaaagagaaagaaaatgccggaaccaatcaacgtaacagtaactacaatggatgctgagctggaaatttgccattcagcccaaaacaactggcaaacaactttttgaccatgtggtgaaaatagttggtttgcgcgaggtctggtttttggggctgcagtatgtagacagcagaggttattctacatggcttcaactaaataaaaaggtgacgcagcaagatgttaaaaaagagaa

SEQ ID NO: 58366 - DNA, 909 bp, Homo sapiens
ctctgcatttttcaagcttgtaattctctaacttaaaaaaaaagttcagctatcaagaaaacttgcttttttctcattaagacccmgaatcacaagaatgtctgattaaattaaccacaagttctagagcacaagcagtgctctgtttaatcttcagttttcttattcatactgggtgatggaaacacttttctccttcttgttactttggactccctaggtacagggacacttccttgttactggctctgaaaagacatgtgtctcgtaaacagtagtcggaatagatcagcgttttatatcttcgagtacatttgttagctataaagtaagatatgagagggaggaggaatatatcctaggtagaagagaatatttcatatttcgtaatcacattttctcagaaatagtgtatccaaatattcaacacacaaaaaggcagcatcctaactgctttttccttctctcctcacctgactgtgtttttccttacctattttatcttttcatttcagttctgcacttcaccttgtcgtccccccttatctccttccctctgaatttattaatcaagtaatccatctttaccgtgtaggcagtgccgtcaccacaaatcctgcagctgctcacactgactataaaataaacctctttgagaagcctcagaatggtgactggttgcataaagtagattatgcctgtctggagccccctggaaattgttgtattccacttattacctgtatttgaaatgaaaatatcaagatagtttatctttgaaatgctcctttccagactatgaagttgaaaacttaatagtatcatgaattcagtttaaaacaacaatctatttattcaagatactctcttcacaatactatacctcagaaatgttctcaataaagtatg

SEQ ID NO: 58367 - DNA, 579 bp, Homo sapiens
taagccaacaattttgcttttatgtttaggatagttttggctcaatttcttccacttgcgttgaaaaaaatgactgasttatatacagaatacggattactgggctaaggttaaatagccattctggtaggaaacagcttgagcaaaggcatctaggcagaaaatctcagaatgtattcaaactggagtatacattaaatggaaaaaatgggaggtaggtctagataagaagtgctttgaatttcctgataaagaaaataaaatgtactctataaaaaaaatgaggaactgtggaaagtttttgagtagggcagtgaaatgcacaaactttgctttctgaagagtttcctggtactcaaaggagaaatatttggaaggggagatttaggagtttataataaaagagaaaaacatgataatcaataatcaatcactttggcagtgaataggaagtcttattatatgtggtgtagaatagacaggaggcaaacgtcaagattgattctaaaattttaagtttttcactgtttaatgaaatagtaggcccttgataaatggttttgaaaggctggttaacta

SEQ ID NO: 58368 - DNA, 579 bp, Homo sapiens
taagccaacaattttgcttttatgtttaggatagttttggctcaatttcttccacttgcgttgaaaaaaatgactgacttatatacagaatacggattactgggctaaggttaaatagccattctggtaggaaacagcttgagcaaaggcatctaggcagaaaatctcagaatgtattcaaaytggagtatacattaaatggaaaaaatgggaggtaggtctagataagaagtgctttgaatttcctgataaagaaaataaaatgtactctataaaaaaaatgaggaactgtggaaagtttttgagtagggcagtgaaatgcacaaactttgctttctgaagagtttcctggtactcaaaggagaaatatttggaaggggagatttaggagtttataataaaagagaaaaacatgataatcaataatcaatcactttggcagtgaataggaagtcttattatatgtggtgtagaatagacaggaggcaaacgtcaagattgattctaaaattttaagtttttcactgtttaatgaaatagtaggcccttgataaatggttttgaaaggctggttaacta

SEQ ID NO: 58369 - DNA, 579 bp, Homo sapiens
taagccaacaattttgcttttatgtttaggatagttttggctcaatttcttccacttgcgttgaaaaaaatgactgacttatatacagaatacggattactgggctaaggttaaatagccattctggtaggaaacagcttgagcaaaggcatctaggcagaaaatctcagaatgtattcaaactggagtatacattaaatggaaaaaatgggaggtaggtctagataagaagtgctttgaatttcctgataaagaaaataaaatgtactctataaaaaaaatgaggaactgtggaaagtttttgagtagggcagtgaaatgcacaaactttgctktctgaagagtttcctggtactcaaaggagaaatatttggaaggggagatttaggagtttataataaaagagaaaaacatgataatcaataatcaatcactttggcagtgaataggaagtcttattatatgtggtgtagaatagacaggaggcaaacgtcaagattgattctaaaattttaagtttttcactgtttaatgaaatagtaggcccttgataaatggttttgaaaggctggttaacta

SEQ ID NO: 58370 - DNA, 579 bp, Homo sapiens
taagccaacaattttgcttttatgtttaggatagttttggctcaatttcttccacttgcgttgaaaaaaatgactgacttatatacagaatacggattactgggctaaggttaaatagccattctggtaggaaacagcttgagcaaaggcatctaggcagaaaatctcagaatgtattcaaactggagtatacattaaatggaaaaaatgggaggtaggtctagataagaagtgctttgaatttcctgataaagaaaataaaatgtactctataaaaaaaatgaggaactgtggaaagtttttgagtagggcagtgaaatgcacaaactttgctttctgaagagtttcctggtactcaaaggagaaatatttggaaggggagatttaggagtttataataaaagagaaaaacatgataatcaataatcaatcactttgkcagtgaataggaagtcttattatatgtggtgtagaatagacaggaggcaaacgtcaagattgattctaaaattttaagtttttcactgtttaatgaaatagtaggcccttgataaatggttttgaaaggctggttaacta

SEQ ID NO: 58371 - DNA, 725 bp, Homo sapiens
cctgatctggagtcttggaaagaaaacgaaaaaagtaccgggtcttcttgtccacagagcaaccccagtgagagatgaccgaggatatgaggcagctgcctctgttctgcttgggaaggcctggggcccagagcctggcaataatcctagaacgttagaagagaggggctggggagagggatgagggatgaggtgctctagaagggagactctaggctttcatccaggactccaaacagaactgtggggctgtttgtaatccctgtactcccatctgccagactcaccattgatctctttacacaacccaaaatcatagatccatagtcatggctgcggctgtgcccctcgggtcatccctcctctatgtcatcatattccctcagtatccactctatttccaaggaactgccttatactcyccatctttttctccacctctgctctttaaccaaagcccagcatctcctctcatcctgtctaacttggtccacaataaagggtggatgaagtgaaatttgaaccttctcaagtgcaggtttatcactgtacagattcacaagatgcgtccctagaccagcagcatcaacttgcatttgggaacctgttaaaaatgtaaattctagcccagctggtggctcatgcctggcctgtaatcccagcactttaggaggcagaggtggggggattccttgagtcccggaagtcaaggtggcagtgagtca

SEQ ID NO: 58372 - DNA, 785 bp, Homo sapiens
caattttcgtgcttcagcctcccgggtagctgggactacaggcacctgccaccacgcccagccaatttttgtatttttagtagagacggggtttcaccatgttgcccaggctgctctggaactcctgagctcaggtgatctgcccaccttggcctcccaaagtgctgggattacaggcttgagccaccgtatccagcctaacttctttaaattgtctctttgattcagcaattccaggtctaggaatttttcctagatgcgccggcacactgagaaattgtgtayctgcagctggtgtgcacttacagacactgccacgtcatttgtgttatcaaaagtaggaaaccacctaaaggctcatcagtggtagtacagtttaataaattgtgacatctccctacaatggacgatttgggagctgtcagagaaatgaggacgccctttctattctgagatggagcaatgcttaaggacacaaggtgaagcagccaggtacagaggtttgcgtgccctggtttgtgtaagcagggcaaggggaaagtaaacaaatccacacactcattgcgcattcatgggatatctgtgaacagggacagaagagagagtactggctgctcctggagaagccccaaggtggtgagggacagacaggtttggcttcatgagcatgacacctgcaaagccacaaagcctggctccaaagggccccgtacacggtttaatgctctcctgtcactgtcttgaaattcctgattttttttctaattttttattgtgttaaaata

SEQ ID NO: 58373 - DNA, 785 bp, Homo sapiens
caattttcgtgcttcagcctcccgggtagctgggactacaggcacctgccaccacgcccagccaatttttgtatttttagtagagacggggtttcaccatgttgcccaggctgctctggaactcctgagctcaggtgatctgcccaccttggcctcccaaagtgctgggattacaggcttgagccaccgtatccagcctaacttctttaaattgtctctttgattcagcaattccaggtctaggaatttttcctagatgcgccggcacactgagaaattgtgtatctgcagctggtgtgcacttacagacactgccacgtcatttgtgttatcaaaagtaggaaaccacctaaaggctcatcagtggtagtacagtttaataaattgtgacatctccctacaatggacgatttgggagctgtcagagaaatgaggacgccctttctattctgagatggagcaatgcttaaggacacaaggtgaagcagccaggtacagaggtttgcgtgccctggtttgtgtaagcagggcaaggggaaagtaaacaaatccacacactcattgcgcattcatgggatatctgtgaacagggacagaagagagagtactggctgctcctggagaagccccaaggtggtgagggacagacaggtttggcttcatgagcatgacacctgcaaagccacaaagcctggctccaaagggccccgtacayggtttaatgctctcctgtcactgtcttgaaattcctgattttttttctaattttttattgtgttaaaata

SEQ ID NO: 58374 - DNA, 833 bp, Homo sapiens
tcgggcgccataaaccgcagccaccaccgtagctcagcaggtgccgagcgcccaccctcctctcrgcggggagccgctctgcgaccccctcctcggccccgccgagagccatccgcgccgaagaggcgccggcggccaccccgccgctccccagcacccgggcccgagcacccttctccgggcgccaaggggagctcagggtgaactggacacccggcctggggcatgggctcagggcagggcccgggggcgcaccagggcaggggacgaaatcgccccaggagctccaggactgagactgctgagaaataaacgaaaagtgcgcacagaggactggtgggtggggttggactccggagttgggaccccttggcacagccgcgtgggttcgtacccccacttccccaacccaaaggaacccaggccccagcgggccgggccggccggggagaggtgtgcctgtagacttggtgctttatttttccctttctgcaagtttctctctcatccctctccgccagctgcgttctcgactcttctgatttcaccaccagcgcctggaaaattcaaattcagtgtataagagggcaggggccagggaccaggagccaacaggtcaggaaaaggggtttccagattcgggagcgcttctgctcctggggtttaagaacagagaagaaaaggcgcatttgagacacgtccctgtgcagagagaagtcgggggacatccgggggtccgcattccccctcccccacctgggcggaggaatccatgtacctaagcacgcagaaacttgaagatggggatctattataaatgacctggctaaatg

SEQ ID NO: 58375 - DNA, 945 bp, Homo sapiens
tgcatggaaggttgagaggaacacagccagccccaagtctccctcgccctgctgggcacttcctctttccacctcggcgctggtgggagagtcggagtgcgccataaacaaggcaggaaacggctatcatgatgctcacttccgctcttcctagaagggattctgctcggcaatctctccactccccaccccctgccatgcacaggattttgtactcccagctcctctggaggctcagaggaggagatggtcctgctgcactggcccagccttcctctacctggcttgtctttttccttgtcctcaaccccaaacagcaagtatcctaacaaagaatggatagtacactattatttttgtgacattcatctcagtgtcatattccaaaggagcttgacataattgtcctgttcctaatttggacactggtttacgaaagtgtggtgaccactggagactgttctctgacagtgtaacaggtattcgcccctttccccagggtactaagactcacgtggccctgacagccagcacagtctcttaggaggttccggagggtggcagtgggaatgagcgtagagccgtgtcatttcggagggctgagtgcrttccacacatcttcccaaagcccaccccaagaggctgtctaacgcagggggaaacaatgagaaaccagataccatggaattagcaaagaatttctcagatgaaacaggaaagggaggaaatccagaggggtttacattacacctggctcaggttgaaaggattcagggccagttgttggcaatattaaactccaggctgcgtttgaaagggtccttcactcgggcagccaaagagaggcgttcctgccaggataggttgcatcgctgcagatctccagccctacgtgcacacacacgtgtacacacacgtgcacacacatgtatgcatacacatgca

SEQ ID NO: 58376 - DNA, 945 bp, Homo sapiens
tgcatggaaggttgagaggaacacagccagccccaagtctccctcgccctgctgggcacttcctctttccacctcggcgctggtgggagagtcggagtgcgccataaacaaggcaggaaacggctatcatgatgctcacttccgctcttcctagaagggattctgctcggcaatctctccactccccaccccctgccatgcacaggattttgtactcccagctcctctggaggctcagaggaggagatggtcctgctgcactggcccagccttcctctacctggcttgtctttttccttgtcctcaaccccaaacagcaagtatcctaacaaagaatggatagtacactattatttttgtgacattcatctcagtgtcatattccaaaggagcttgacataattgtcctgttcctaatttggacactggtttacgaaagtgtggtgaccactggagactgttctctgacagtgtaacaggtattcgcccctttccccagggtactaagactcacgtggccctgacagccagcacagtctcttaggaggttccggagggtggcagtgggaatgagcgtagagccgtgtcatttcggagggctgagtgcgttccacacatcttcccaaagcccaccccaagaggctgtctaacgcagggggaaacaatgagaaaccagataccatggaattagcaaagaatttctcagatgaaacaggaaagggaggaaatccagaggggtttacattacacctggctcaggttgaaaggattcagggccagttgttggcaatattaaactccaggctgcgtttgaaagggtccttcactcgggcagccaaagagaggcgttcctgccaggataggttgcatcgctgcagatctccagccctacgtgcayacacacgtgtacacacacgtgcacacacatgtatgcatacacatgca

SEQ ID NO: 58377 - DNA, 945 bp, Homo sapiens
tgcatggaaggttgagaggaacacagccagccccaagtctccctcgccctgctgggcacttcctctttccacctcggcgctggtgggagagtcggagtgcgccataaacaaggcaggaaacggctatcatgatgctcacttccgctcttcctagaagggattctgctcggcaatctctccactccccaccccctgccatgcacaggattttgtactcccagctcctctggaggctcagaggaggagatggtcctgctgcactggcccagccttcctctacctggcttgtctttttccttgtcctcaaccccaaacagcaagtatcctaacaaagaatggatagtacactattatttttgtgacattcatctcagtgtcatattccaaaggagcttgacataattgtcctgttcctaatttggacactggtttacgaaagtgtggtgaccactggagactgttctctgacagtgtaacaggtattcgcccctttccccagggtactaagactcacgtggccctgacagccagcacagtctcttaggaggttccggagggtggcagtgggaatgagcgtagagccgtgtcatttcggagggctgagtgcgttccacacatcttcccaaagcccaccccaagaggctgtctaacgcagggggaaacaatgagaaaccagataccatggaattagcaaagaatttctcagatgaaacaggaaagggaggaaatccagaggggtttacattacacctggctcaggttgaaaggattcagggccagttgttggcaatattaaactccaggctgcgtttgaaagggtccttcactcgggcagccaaagagaggcgttcctgccaggataggttgcatcgctgcagatctccagccctacgtgcacacacacgtgyacacacacgtgcacacacatgtatgcatacacatgca

SEQ ID NO: 58378 - DNA, 945 bp, Homo sapiens
tgcatggaaggttgagaggaacacagccagccccaagtctccctcgccctgctgggcacttcctctttccacctcggcgctggtgggagagtcggagtgcgccataaacaaggcaggaaacggctatcatgatgctcacttccgctcttcctagaagggattctgctcggcaatctctccactccccaccccctgccatgcacaggattttgtactcccagctcctctggaggctcagaggaggagatggtcctgctgcactggcccagccttcctctacctggcttgtctttttccttgtcctcaaccccaaacagcaagtatcctaacaaagaatggatagtacactattatttttgtgacattcatctcagtgtcatattccaaaggagcttgacataattgtcctgttcctaatttggacactggtttacgaaagtgtggtgaccactggagactgttctctgacagtgtaacaggtattcgcccctttccccagggtactaagactcacgtggccctgacagccagcacagtctcttaggaggttccggagggtggcagtgggaatgagcgtagagccgtgtcatttcggagggctgagtgcgttccacacatcttcccaaagcccaccccaagaggctgtctaacgcagggggaaacaatgagaaaccagataccatggaattagcaaagaatttctcagatgaaacaggaaagggaggaaatccagaggggtttacattacacctggctcaggttgaaaggattcagggccagttgttggcaatattaaactccaggctgcgtttgaaagggtccttcactcgggcagccaaagagaggcgttcctgccaggataggttgcatcgctgcagatctccagccctacgtgcacacacacgtgtacacacacgtgyacacacatgtatgcatacacatgca

SEQ ID NO: 58379 - DNA, 945 bp, Homo sapiens
tgcatggaaggttgagaggaacacagccagccccaagtctccctcgccctgctgggcacttcctctttccacctcggcgctggtgggagagtcggagtgcgccataaacaaggcaggaaacggctatcatgatgctcacttccgctcttcctagaagggattctgctcggcaatctctccactccccaccccctgccatgcacaggattttgtactcccagctcctctggaggctcagaggaggagatggtcctgctgcactggcccagccttcctctacctggcttgtctttttccttgtcctcaaccccaaacagcaagtatcctaacaaagaatggatagtacactattatttttgtgacattcatctcagtgtcatattccaaaggagcttgacataattgtcctgttcctaatttggacactggtttacgaaagtgtggtgaccactggagactgttctctgacagtgtaacaggtattcgcccctttccccagggtactaagactcacgtggccctgacagccagcacagtctcttaggaggttccggagggtggcagtgggaatgagcgtagagccgtgtcatttcggagggctgagtgcgttccacacatcttcccaaagcccaccccaagaggctgtctaacgcagggggaaacaatgagaaaccagataccatggaattagcaaagaatttctcagatgaaacaggaaagggaggaaatccagaggggtttacattacacctggctcaggttgaaaggattcagggccagttgttggcaatattaaactccaggctgcgtttgaaagggtccttcactcgggcagccaaagagaggcgttcctgccaggataggttgcatcgctgcagatctccagccctacgtgcacacacacgtgtacacacacgtgcacacacaygtatgcatacacatgca

SEQ ID NO: 58380 - DNA, 945 bp, Homo sapiens
tgcatggaaggttgagaggaacacagccagccccaagtctccctcgccctgctgggcacttcctctttccacctcggcgctggtgggagagtcggagtgcgccataaacaaggcaggaaacggctatcatgatgctcacttccgctcttcctagaagggattctgctcggcaatctctccactccccaccccctgccatgcacaggattttgtactcccagctcctctggaggctcagaggaggagatggtcctgctgcactggcccagccttcctctacctggcttgtctttttccttgtcctcaaccccaaacagcaagtatcctaacaaagaatggatagtacactattatttttgtgacattcatctcagtgtcatattccaaaggagcttgacataattgtcctgttcctaatttggacactggtttacgaaagtgtggtgaccactggagactgttctctgacagtgtaacaggtattcgcccctttccccagggtactaagactcacgtggccctgacagccagcacagtctcttaggaggttccggagggtggcagtgggaatgagcgtagagccgtgtcatttcggagggctgagtgcgttccacacatcttcccaaagcccaccccaagaggctgtctaacgcagggggaaacaatgagaaaccagataccatggaattagcaaagaatttctcagatgaaacaggaaagggaggaaatccagaggggtttacattacacctggctcaggttgaaaggattcagggccagttgttggcaatattaaactccaggctgcgtttgaaagggtccttcactcgggcagccaaagagaggcgttcctgccaggataggttgcatcgctgcagatctccagccctacgtgcacacacacgtgtacacacacgtgcacacacatgtatgcayacacatgca

SEQ ID NO: 58381 - DNA, 737 bp, Homo sapiens
tgaggctcattccctggggactccaagaatggggcaggcccagctgcgcagccagtcctggctccactgacttaggctgcacccctgcacatatgtgtgtgtgtgtgtgcatgcgtgcgtgtgtgcatgtgcgtgtgtgtgtgtgtgtgtgtgtgtgtgtgtgtgtgygcgcattttcccaggggacctctcctccttcctctgaggcaaagtggcctgcaggggcccctgcagagcatacagggaggtgcttccttccctctgcccagcgagcaaagggtggagccttggcacccccagcaaccccctccaagggtggagccttggcacccccagcccccaccccgcaagggaaaggggaagctgcacgaggagcaagatttcattccccagagggcacagcttgggcagattcccatcatctaggggctgtgccccacatctatttctgccaaacaagaagcagacgagggggctcaggggggcgggcctcacaggaacggaagcaccaccccacctctattccctgtggcctccaaaagagctgggcaacctctgccagccactaccccttagcccaaggggagtcctcattccagagccagcatcttcatcttgtcctgatgccctgcccacccccgccgagcttcacactgggctgctatggaaaactgaaaggtcagagggtggaggtcctctccctcctggacatggaaacctccccctgcctggcactt

SEQ ID NO: 58382 - DNA, 552 bp, Homo sapiens
tgtgcgtgctctgcggcaccccctctaggctttccccactcactggaggccccagcctggcttcagagggactcagtggggcttgaccacgtcccagctgcgtgaccttgagcaggttccttgacctctctgggcctcggctttctcactctgtaaaatgggcacaaacaaggctttgtgaggatgagtgtggctgtcgtgcctgtgagtgcttatgtgattctcactcctgccccaggtcccctccagctcctcccttttgcggtcccgaggtctagcctaagtcccccttgcttctcttgcagggtgtttatttctctcggcttcttcctctccctacgctctcactttgttttatttcatctccgtccctctgccctccccttttcgctatcggtttcaattctccgctgaaacctctgaggaggccctgcccgccccactgtcccgccgrccctccccgcagcacccaccctgcccggcttctccggggcttgccctcctgtagcccaggagttggggctgggggcggctgtgctgacatcactggcg

SEQ ID NO: 58383 - DNA, 873 bp, Homo sapiens
ttccccaccttttccagcttctggggctccgggtctgggacttcgtccctctaatctctgcctctgccgtcacagggtcttcgcctctgtgtctgtgccatctcttctttgtgttacagagatacttgtcattgcatttaggacccacttcgtcatgtaggacaatctcatctcgaaatccttaatttaattacacctgcaaagacccttttcctaaataaagtcacagtcacaggttcctggggctaggccttcggcttatctttttagggggtcaccattcagcccactctcgtctctattcctggggaaactcacagaggggagtgcatggttcagattcaagctcccgccactgcaggtggcacccagaggtgatgtcatcttcccctccactctccacccaagagcccctttaccttcagtgagtacctgtgctggctaggtggtttacctggtggggggacccagactcgaatgccaaggctatgagccccaggtcaccacrtcctctcaagctatggctgctgtcttcatgcatttgctgtaaaaactgggcatgggagtgagaagagatgctttgctggattcacccctcccattctccccttccctgctagggaacagcagccctttctccccacggaccacggtcagctgcccctgccaagatggtgactccttttcttgcttgctggctccttggcacagaagcccgaagtgctcagccagcagccgtagcgccaagtgtaatgggacccatgatgcaaatcctgctggaagggtaccgctctgggaatcgggtcttgcagactcaccaaacctagagttgtgaggttggaaggcagaaattcccccagggagaccactgga

SEQ ID NO: 58384 - DNA, 692 bp, Homo sapiens
cactatgtccatcttcctcactagactctaaaagggcagggcccatgtctgtcctgttcactgttgtaccttgtgcctagcatggcacatgggaagctgaaaattataacaagaaaactatgaaagctaactctgaggcactgaggattttcttgtaaagcatcagtgggctggtgtgctggatagagatggaatctcatgtacattataaatactcaaatcttagcagcagctattggttttgatagtcagtcctacctggagccttgatcattacttgtctttgaggcactaaggagttaaagggaagaatccatcatgccagaggaggaggaacaaaaagcaggcaccatcctctaaagcctccttctccaccactgcatccccacctctcagagcctggagccaagcacttactgggcgycaaacaagcaggaagaaaactaggattttggccaatttaagccaactagggagtattcagcatctatgccaaactagatatgactgtcctaggtgctgctgaggacaaagagtggaacacaggactttttggctctagcgagtttatagtctcaaagggattcttttgggattgtgcagaaggggagtatggccaagtataaacacacacacataccctgattattaacaatagtgaccatatttattgaacaacccattaggcacac

SEQ ID NO: 58385 - DNA, 711 bp, Homo sapiens; identical to SEQ ID NO: 6898

SEQ ID NO: 58386 - DNA, 711 bp, Homo sapiens; identical to SEQ ID NO: 6899

SEQ ID NO: 58387 - DNA, 674 bp, Homo sapiens
agaaacagatatttttggtttaacgtgataagggctgtggtaaaaatattcagagcaagttgttgcagcttaggagaagggcaggacacctggttttgtggaacacagggagggaagaggagggagtcaagtgtgaaagtcagtgtacacaatgggagggtttgtaccttctgagggcgagaggcggggaagagatgtggaccagaygtggactccagcctggggagtggcagggaggatgccggagcgattcaggaggtggatgaaccaggtgagggtgggagagagtgggaagtggtcgttaattgaggtggatgagtccagcagccctctgacgagtggacaggaaggtactagaaggtaaagacacccatcaggaatgaaggaacctggtacaaagtgagaaaagctggaatggagaaggaacaagacaaataggctcttggaatggttcagctgccttgctgagagtggtctgtgaaagcggggatcttactgcagtgaggtttctcttttaaataagtctgctccttctttctgttacatcaaaagaagaagaaaattcctcaaaacctcccaaagaccaccacggctaacactttggaaatatttccttcagatcatttttcctacatcgatttgtgtttggttttaacatggttctaatcacactg

SEQ ID NO: 58388 - DNA, 634 bp, Homo sapiens
gagggaggtcctggaaccagtctcctgctgattctgagggttggctgtgtcatgaaattaccaccgattccattgaaatgaatgttttatgataaggtttcagtttacaagttctagaaatggactatataaagaacaaaataragagggaagaagaaagttgtccgtgtagttgttttaataagaactaaaatatatacttattaagccccatctatacaggatatttaactccatactatgcagaaagaaaattgtttctgccaaaattacagaaatgtaggcttgatttataataatgtagaaacagttccaatgagttgttaaatcttgtttatttctgggacttcactgagttttcttttgcatgaagttattatttaaagttctagttagcgaattaatgtcaataatttaaatgaatatctttgtgtgcaattatcttggattggaaggcaataaaacagctggaattacttttaacaaattacacattccttccccgtcatgtactctactgttagcattagggaatgttactgctgtaatttcgtatttaaagtagaagcatttggtttagaggaaattatagagctaaaaaaatccatatgctcctcacattcaccctaaagta

SEQ ID NO: 58389 - DNA, 666 bp, Homo sapiens
agccatatttagtgaaaacatctgaaatgcccttcggttgcatttgaccaatacaactcagtatcttttgacataagcaggtctctgaaacaaatataaacattgataaaatggaattgcctaatatgtagcattcagyatacatttcaaagtattaattcagttattcttgttggcggaaggggagaaaaaaaaaaaagaagaaaaatcctcttttaagcccatgcacaaaagatgagagcctctgctagggatctttcctaaaatgcctttgattgtatagctctagcagcataggtccttcctcagcttcttaggcatttaggtaattttgggagaacagagagcatattagccatagctactgactttgataaatcacctgggctctctggaaagcaaaaggatattgtaaggagaaatgcaatactgtctgtgataatgctccgaggtctccagagaaaggaacatatttaaaaatggcaaaagcctaagagtgaggataacagaatggccaggggctagtttcagctccaccaagtggcagaatggggtagatggtggtctatctgccatcatccttctgaaaactctcttcccgcagacggatgcacactattgatcaattgatctgtagatggtcattccggccactccactttaaag

SEQ ID NO: 58390 - DNA, 666 bp, Homo sapiens
agccatatttagtgaaaacatctgaaatgcccttcggttgcatttgaccaatacaactcagtatcttttgacataagcaggtctctgaaacaaatataaacattgataaaatggaattgcctaatatgtagcattcagtatacatttcaaagtattaattcagttattcttgttggcggaaggggagaaaaaaaaaaaagaagaaaaatcctcttttaagcccatgcacaaaagatgagagcctctgctwgggatctttcctaaaatgcctttgattgtatagctctagcagcataggtccttcctcagcttcttaggcatttaggtaattttgggagaacagagagcatattagccatagctactgactttgataaatcacctgggctctctggaaagcaaaaggatattgtaaggagaaatgcaatactgtctgtgataatgctccgaggtctccagagaaaggaacatatttaaaaatggcaaaagcctaagagtgaggataacagaatggccaggggctagtttcagctccaccaagtggcagaatggggtagatggtggtctatctgccatcatccttctgaaaactctcttcccgcagacggatgcacactattgatcaattgatctgtagatggtcattccggccactccactttaaag

SEQ ID NO: 58391 - DNA, 755 bp, Homo sapiens
aacctaggtgatgggttgaaaggtgcagcaaaccactacggcacatgtgtacgtacataacaagcctgcgcattttacacatgtatcccataacttaaagtaaaaaataaataaataagtgaataaacaaataaaaaagaaaatgaggtcagaagggtaactttaaaacactaaacagtatttactgttccaaagaatgttatattttataataataaatatcttttctaagttgtgttgtggtatcttttatatattaaacatgatgctaagtgttttatgaaaatactatcatttaatacttctaaccatcctgtaaatgaaccttagagaagtyatttaatttgacaaggttatggaacaggaaagttcctgaattgaaaccattttatagctaatattgttttttctttttttttaaaaagtttttaaaacatttttgaaacatttaaagcaatttaaaaatagttttaaaatgtattacttttcatttattttattttctttatatgtttatatttcaatagaatgatctaattcagaacaatatttagtatgctactaatagttaccttgtgtttactagagtggttcaattatactgcaatataacactctaatatccatttcattgaactgcacctatttgtcagccagagataagtatctagcaacagcatttgtgcacttatgacctgtccaaattttatgtcctgtacaagtgtttgcatgctatataaatccagctgcaagtt

SEQ ID NO: 58392 - DNA, 644 bp, Homo sapiens
ttttttttttgagacggagttttactcttgttgcccacgcagtgagccgaggtcgcaccgcggcactccagcctggcgacagagtgagactccatctcaaaaagtaataataataaattgggggaaattaaaaacacgttggaactaaatattgaagaaaatactacgtaaggaaggaagttattaatcagagatacatattcttttttttttttttttttttttgagactgagtctcactctgtcgcccaggctggagtgcagtggcaccatctcggctcactgcaaggtccgcctcctgggttcaagcgattctcctgcctcagactcccgactagctgggattacaggtgcgtgccaccatgcccaggtaatttttgtatttttagtagagacggggtttcatcatgttggccaggatggtctggatttcttgacctcgtgatccgcccaccttggccttccaaagttctgggattacaggcacaagccactgcgaccagcctaatcagagttaaatattcttaagtcgtgtgtgtgtgtgtgtgtgtgtgtgtgtgtgygcccccgtaaagaaaggggtctcaatatgttgctcaggctggtctcaaactcctaggctcaagagatccttctgcctttgc

SEQ ID NO: 58393 - DNA, 644 bp, Homo sapiens
ttttttttttgagacggagttttactcttgttgcccacgcagtgagccgaggtcgcaccgcggcactccagcctggcgacagagtgagactccatctcaaaaagtaataataataaattgggggaaattaaaaacacgttggaactaaatattgaagaaaatactacgtaaggaaggaagttattaatcagagatacatattcttttttttttttttttttttttgagactgagtctcactctgtcgcccaggctggagtgcagtggcaccatctcggctcactgcaaggtccgcctcctgggttcaagcgattctcctgcctcagactcccgactagctgggattacaggtgcgtgccaccatgcccaggtaatttttgtatttttagtagagacggggtttcatcatgttggccaggatggtctggatttcttgacctcgtgatccgcccaccttggccttccaaagttctgggattacaggcacaagccactgcgaccagcctaatcagagttaaatattcttaagtcgtgtgtgtgtgtgtgtgtgtgtgtgtgtgtgcgcscccgtaaagaaaggggtctcaatatgttgctcaggctggtctcaaactcctaggctcaagagatccttctgcctttgc

SEQ ID NO: 58394 - DNA, 649 bp, Homo sapiens
atgagccctctgtggttctgaagaattgccttgagtatatgcagcctcaaaaaacccacttcctaggctcagtctttgatcaatatttatcattatcaccagttattgttctaataaactctactctggaaatatggtgttatggtttacttgggagtgtgagttcagggcatcattgaagactcacgtacttttactgagaaagtgacattgatctctgtagattttgaattaaatgatatgatgaagtatataaaccaattacttttggtcaaggtggtaaaaaaagtttagtatttgatagattcttcatctccacgatcacaaatattttctcctaggatttcttctagaaatattactgctttaggttgtatatcaggtctaggttctacttttttttttttttttctccaggcagtttctcactccgttgcccaggctggaatgcagtggtgtaatcacagctcactgcagcctcaacctrctggactcaaaggataagatctgcttttaattaatttttgtatacggtatgggatagggaccaaagttcatttttttgcatgtatacatatccaaatgttccagcatcatttattaaaaagttatttttgtctctactgcatttcctttgtgcttacatcaa

SEQ ID NO: 58395 - DNA, 757 bp, Homo sapiens
acgtgctttccgggaagccacttcgcaccctgaatgtgctgctgggaattgcgcgtggctgctgggttctctcttatgattgggtaagccctgtgtgtgaactgcgtattttaaaacaaggcattttgatagagtgggtcaccctgaggtgccgacatcagcactcaggccggcgtgcacccttgtggatctgcacactttcctgtgagctgggaacacccgtctttcctcctgttggtctcccgtgggctgctacccttcaaccagggccaagttctggggcaacaggaggacggggagggtagagagcaggaagtgagtagcctctaagataaagcagaagcaagattacaaagatgctgaaagaaacgcaaratgcatgttctcacagtcaaagagctttcctctatgtgtgaccaagaaacattgtgagctgtggtggtggtggtttgcagagccaaaataattcagtgattgtttgtacagatggatttacttaggatgaaggatgttcttttaatcccatttggataggttttatcctatgtatatctatctgtaacattatttgcccttgtttctgtagattaaagatagcttttaaaaatacataattattttcgttattcataaaaactgaaatgaactgttattggttctattattactttcatcctcaacctaaggttgctccaaagcattcctttctggtgacagtagcatcacttgttacgtatgttaccattctgcatctgtg

SEQ ID NO: 58396 - DNA, 757 bp, Homo sapiens
acgtgctttccgggaagccacttcgcaccctgaatgtgctgctgggaattgcgcgtggctgctgggttctctcttatgattgggtaagccctgtgtgtgaactgcgtattttaaaacaaggcattttgatagagtgggtcaccctgaggtgccgacatcagcactcaggccggcgtgcacccttgtggatctgcacactttcctgtgagctgggaacacccgtctttcctcctgttggtctcccgtgggctgctacccttcaaccagggccaagttctggggcaacaggaggacggggagggtagagagcaggaagtgagtagcctctaagataaagcagaagcaagattacaaagatgctgaaagaaacgcaagatgcatgttctcacagtcaaagagctttcctctatgtgtgaccaagaaacattgtgagctgtggtggtggtggtttgcagagccaaaataattcagtgattgtttgtacagatggatttacttaggatgaaggatgttcttttaatcccatttggataggttttatcctatgtatatctatctgtaacattatttgcccttgtttctgtagattaaagatagcttttaaaaatacataattattttcsttattcataaaaactgaaatgaactgttattggttctattattactttcatcctcaacctaaggttgctccaaagcattcctttctggtgacagtagcatcacttgttacgtatgttaccattctgcatctgtg

SEQ ID NO: 58397 - DNA, 1106 bp, Homo sapiens
actgctgtggaaagctttctgctgcagtattgctttaagacctttaagggaaatgttttggtcaatgatgttccacttcttgaacattcatgaagctatttggtatcaagcaagcaaaagaacaccaaaacgagsacacacctcttaatgctgcctaaacaaccccagagttttcaaggctaagtcgctcacatttggtacatgtttaattttcagtgatcttctaactcagatattaattttataaagtaaaagtgatacaggacagattgacaagttgcctaaaggcacccagaattagagtataagagagaaaaggttaacattttacattgaacagaaatcaaaacaagtacttactcagatggcatgcttgtcatgactaatgttcttgttggctagagatttcaaacaagaaggaacaaaaaacagtcaaaaacataaaaaatatttttcccacagaaataaactgtaataagttttttgaaaagttacatcacttaaaaataaacatttaagcatatgtcaaagaaaaaaaacctttatattcctggaaaaaacaggccaagagatagaaactcagatactgtccccaaagcaatccaaaataatccagacatgaggtacaagagcaaaacaaaaaaatttcccccaggaatctgttccaccagttagccagcagacctccaagtgtgtcaacgtcttcatgcacttcaaagtgagaaagggtaagaagggtgtttttgtagactcgtcagccacttttctcaagacttctaggcagcctcattctcatttcagacacaggtgcacaataatgcttgtgcttctgttgcacctgtcaagtgaatcccccacatacagaagcatggataagggaacttatttgttctattgacatctgctatcaactggaattgaaaaaaatttaaataaaatgtttaattttttttttgcttatctaagaaatgcacgctgacttgcaaaaaatttaaatgctatagaaatatataatcagaaacacaaattttcctgtaattccaccagctagaaatgactattgtttaacaatttggcagtatattcagccaaatgttcactctata

SEQ ID NO: 58398 - DNA, 1106 bp, Homo sapiens
actgctgtggaaagctttctgctgcagtattgctttaagacctttaagggaaatgttttggtcaatgatgttccacttcttgaacattcatgaagctatttggtatcaagcaagcaaaagaacaccaaaacgagcacacacctcttaatgctgcctaaacaaccccagagttttcaaggctaagtcgctcacatttggtacatgtttaattttcagtgatcttctaactcagatattaattttataaagtaaaagtgatacaggacagattgacaagttgcctaaaggcacccagaattagagtataagagagaaaaggttaacattttacattgaacagaaatcaaaacaagtacttactcagatggcatgcttgtcatgactaatgttcttgttggctagagatttcaaacaagaaggaacaaaaaacagtcaaaaacataaaaaatatttttcccacagaaataaactgtaataagttttttgaaaagttacatcacttaaaaataaacatttaagcatatgtcaaagaaaaaaaacctttatattcctggaaaaaacaggccaagagatagaaactcagatactgtccccaaagcaatccaaaataatccagacatgaggtacaagagcaaaacaaaaaaatttcccccaggaatctgttccaccagttagccagcagacctccaagtgtgtcaacgtcttcatgcacttcaaagtgagaaagggtaagaagggtgtttttgtagactcgtcagccacttttctcaagacttctaggcagcctcattctcatttcagacacaggtgcacaataatgcttgtgcttctgttgcacctgtcaagtgaatcccccacatacagaagcatggataagggaacttatttgttctattgacatctgctatyaactggaattgaaaaaaatttaaataaaatgtttaattttttttttgcttatctaagaaatgcacgctgacttgcaaaaaatttaaatgctatagaaatatataatcagaaacacaaattttcctgtaattccaccagctagaaatgactattgtttaacaatttggcagtatattcagccaaatgttcactctata

SEQ ID NO: 58399 - DNA, 1220 bp, Homo sapiens
cattgctcattattcacagtgaaggttccagggagtcagcttggctttttgagcccaggaaagagatacaatrttaatattgggggtctcactgaagtctcactacaaaggtcccccttctcactcactattttcccttctgatagaatcgaatcataggttcttatgcgggaagaaagctcggaaactatgtagttcaacctgcagttgcctcaccatggacattatctctgacttgttttctcatttgcccctctctgagatctaaagaactcttgctccctttttttttcaaatcttccaggagtctggcaagggcttatttattgatgtttcccttttcttttctttcttttctttctgtgtttgtgtgtgtgtgagtgtgtgtgtgagtgacagagttttgctcttcttgcccaggctggagtgcagtggtgcagtctcggctcactgcagtctcggctcactgcaacctccgcctcccgggttcaagcaattctcctgtctcaaccttccaagtagctgggattacaggcatgtgccagcacgcccagctaatttttgtatttttagtagagacggagtttcaccatgttggccaggctggtctcgaatgcctgacctcaggcgatccgcccaccttggcctcccaaagtgctgggattacaggcatgagccaccgcacctggccagtatttcccttttctgaatgcatacgttgccccactgctttgacttttgtatctaaatttcacctacctaaagtcgaatgttaaaattcattatgcaaagtcaagggaaactatattgaagacactgatgtaaatcaggcttgtttattgccatttacataaacacatatattaggcgatgtgtaaagtgtcgatctctctgcagtggccttgatgatattcctggactaatttacttcccggaagtttcttttagcttaatgacttggagaatggcaaacacgtgacgcctccgttcatggtggaaaactgagcgcaggtgagcagcgggtggaggaccagagccactccatcacattcttctctgctgtttactagaggcagcattgtgttggtcttgaccaagttactcaacttttgtatgtctccaaatctttcaaatggatgtaacgttattcatcttgtaggactatttttttcttttttgagaatcagagaacatagaaacagtttggctcacaacacact

SEQ ID NO: 58400 - DNA, 963 bp, Homo sapiens
ctgcctttccaggaactggctagttatgatgggacatggttttgctgtgaggccaagatgcaggaggggcaggaagcacccatggggctgtcttcactgcaggtgacacacgctgaacacagccttcaacccttgccatgtgcagcccccgcaaggcaagctggctttggattgacaagtggtttctgggagatgcagtagaagtacttttctctattcttctgctaagtcaactaaaaaccctggacgttatacataaagcaaacagaagaatcccctggaaggcagaagaaagccaagcgctggccgatgacctcagggcctgaggagcatcacactcccaggctggcataggcagaagcccagtgggaagggcagaatctcctgctgcttcctgcaggagtaatgaggggccctcctgctgtggggtatcaacagagactgagtgtggaacccagactcctgccttcacttacagtaacaaggtgacatttcccttcccttcacacagggttttacatttgctccctgtgatagccttagatcatgttagggctattgaaccagaggcccctctgttctgttccacacaaaactcacctccctggattcttcagttgattttggatcttgtgatgagaagttgtgagcttctgtgctaaacttaaggacagagaaggactctaatttatctttgcattcatcaaagatgaattatttgagtctaaactacccatagcatttagtgtagtgtctgggcgtataggaacttgatacatatgggttgaactcttgatggaattgttragagcataagtgtttctggaacattctgtttatctgactttacagtgattaactagacataccttacagagactgacacagacaatgagaaattggaatttctttgtcaccagaactgaaatctgctgagggcgatgagagagctgctgtagagaa

SEQ ID NO: 58401 - DNA, 963 bp, Homo sapiens
ctgcctttccaggaactggctagttatgatgggacatggttttgctgtgaggccaagatgcaggaggggcaggaagcacccatggggctgtcttcactgcaggtgacacacgctgaacacagccttcaacccttgccatgtgcagcccccgcaaggcaagctggctttggattgacaagtggtttctgggagatgcagtagaagtacttttctctattcttctgctaagtcaactaaaaaccctggacgttatacataaagcaaacagaagaatcccctggaaggcagaagaaagccaagcgctggccgatgacctcagggcctgaggagcatcacactcccaggctggcataggcagaagcccagtgggaagggcagaatctcctgctgcttcctgcaggagtaatgaggggccctcctgctgtggggtatcaacagagactgagtgtggaacccagactcctgccttcacttacagtaacaaggtgacatttcccttcccttcacacagggttttacatttgctccctgtgatagccttagatcatgttagggctattgaaccagaggcccctctgttctgttccacacaaaactcacctccctggattcttcagttgattttggatcttgtgatgagaagttgtgagcttctgtgctaaacttaaggacagagaaggactctaatttatctttgcattcatcaaagatgaattatttgagtctaaactacccatagcatttagtgtagtgtctgggcgtataggaacttgatacatatgggttgaactcttgatggaattgttaagagcataagtgtttctggaacattctgtttatctgactttacagtgattaactagacataccttacagagactgacacagacaatgagaaattggaatttctttgtcaccagractgaaatctgctgagggcgatgagagagctgctgtagagaa

SEQ ID NO: 58402 - DNA, 2814 bp, Homo sapiens
caaggtcaggagatcgagaccatcctggctaacacagtgaaaccccgtctctactaaaaccacaaaaaattagccgggcgtggtggcgggctccggtagtcccagctactcgggaggctgaggcaggagaatggcatgaacccaggaggcggaggttgcagtaagccgagatcgcaccactgcactccagcttgggcaagagagtgagactcagtctccagaaaagaaaaagaaaactttgcttttggataacgaagttacaagtattatggggtctgcatgagccccttgagaaaggctggggttagtggtgggcagaaatagagagagagagaaaggggatagagaatgagtcaggggctgggccagcaaagcagagtaagaatccctaactctcagcagaacacactaccagtgaccatccccattgtagggttagctgagaggccctattaggtacagaaatggctactattttaattttgtccatgcatctccatttacttcaagcttctagtaaaggtctctgtttctgcactctcccctccacatttctatacgacttttaaaatgtagttttttttcaaatcattttcccccatgatattttctctagtatctctacgccacttaactaaattttcctttgttcataatttgttagaacaaatatttactgagcatctactatgagccagatgaatgttagacttactagaaacacaaccataaataagacagacaggtagctgctcttggaatccacattacaatagaaagacaaaatgcatgattagatacacagacagataaagcagtcaaatgaacaaaataagttttaatagtacacacaggaaaaaaggagctgagacagagaataacaaatagggcttgaactgtgaactggggacagaggaagctcttctgataaagcgaccttgcaatgcaacatgtataaaggagctgactacaaaactgggtttagaatcaggaagacggggcagagttctcagcacaggccaagaactaaaggcagaaagagtgtagccttggggacgtggaagcccagagcatttggaagacgcaaacaagggagaggggagcagctgacaatggaagggaaggggaccatcatgcagcacactggacctgggtcagcaaacttctgtaaaggggaaagtagtgaatgccttaggcttcgtgggccgtaaggtctctgccacaggatccaaatctacagctgtagtacagaggcagccactgactacatcgtcagatgaacatgcctgtgttccaataaaacggtatttatggatactaaaattgaatttcatataatgtaaatatcatgaaatagtaaacatttgaattttttttttctcttaaccattcttacctcatgggccattaaaaaaaaataaacagtatggcagggtggatttggctgggggatgatagttggccattctctgctatagaccactgaactctaagccattttgtcagaaggataaagctgatccatgtgttgaagtatyacaggtagttaggcataagcccggcaggagaggcctctaccacccactaggaatgttgggtgatagctcaacaattatcacattgcctctctaaaagtgataaattggcagccagagccagggagaggccatttcctgacagtccacacctgttgtgctaaagtgttaactgaatgcagacgccagggagaggccatttcccgggcatgcacattaagagacaaaatggcggagaaacgggaagaaagcttcagatgggcacccacacaacttcctaaacaagctgcctgtgctcaattcccgcactgtgcatgcgggcagcccaccctaagggaagaactgcggaaaagggcgagcctacaaatcccaggatcaaggttaaacatcaaattagacctccatgcccgcctgggactcttcccagtgtactttcctttctttctgttctgacgccttttaaataaacttctgctcctgctctgacccttgcgtcagtctcttcttttgccttatgctcctccgtggaattctttcttttgaggaagcaagaactgaagttgctgcaaacccatacgtgtttgctgccggtaacttggataccttccactggtaacaaaaggggttacatttgcttatgtataagaaacaaaatgaaacagacaggcatgaggctgctacagtaactgaagcaagacatgatacttgtctcgactgtaacagcagagataaagatctatgagagatcgattttgagataaaaatcaataagccatttcaatggactccataagaagatgaggtagagaaaacaatgatggctggctgatactgagtcttaccccattccctccccgaaaaaaaagcagaaaataaaaaagaaacttaaataaaagacacatatgacctacattctcactgacacggagataacagcgcaaattcagatgacctataagtagaaaaataatcaaattccaacacagctgcaagtctatggatgcagaaagtcggggagaatacgcttaagactccataaaaagtagtacagcctggagaacttacatgaagcacaggtaaaagaagtctcagaaagaggacacccagcacaactgccacaacagagaacccacacagctcacagcacccactccagggaaggggtctgaatgggagcaagactaggacaggcaggctctgaaaaacatcagttctggggggagtggcagcccttgaaccaatggcagtgaaaaaaagaagaaactaagagaaaaacatt

SEQ ID NO: 58403 - DNA, 1988 bp, Homo sapiens
tactagtgcctatttttttggtttttggagacagaatcttactccgtcgcccaggctggagtgcagtggtgcaatctcggctcaatgcaacctccgcctcccaggttcaaacgattctcctgcctcagcctcccgaatcactgagactacaggtgtgtgccaccacacctggcttttttttgtatttttagtagagatggggtttcactatgttggccaggctggtctcgaactcctgacctcaggtgatccgcctgccttggcctcctaataatgcctgttttctaaacatgcattccatgaatcccaactatgcttgtgcagatcatgtacttcatttttccccacagcttagatcaccctacttccctaactgataaatatccctaagccttatctttgggaatgaagatgtgagtactcttctgcctcctagctgggcttccccgtgaatgaatcttttcccttttgtaaaacccgtcatcaaagtgatcggtttagtgtgcgtgggcaaaagatacctatttggtatcaaggacattattaagtcaaatagaggctacctgaacacaagcagtacgtgatagtaaatctgataacagagatggctatactaagaaaccttgaataaggcaaattgtttgctatctccatttcctcatagctcaatgattcctgcccatttcactgaaaactgcactaagttcagcaatgaccttacagtgttcaaatccaaagtacatttgcccatcctatttttcttgaactttctgtagtttttaaaaattctatctttaaaattactccattctagttctgaaaggcaattaaaaaattactcctggccgggctcggtggctcatgcctgtaatcccagcactttgggaggccgaggtgggcggatcacgagatcaggagattgagaccatcctggccaacatggtgaaaccccgtctttactaaaaatacaaaaaaaaaaattagctaggcatggtggcatgtgcctgtagtcccagatacttggaaggctgaggcaggacaatcgcttgaacccagaaggcagagattgcagtgagctgagatcgcgtcactgcactccagcctagcgacagagcgagactccgtctcaaaaaaaaaaaattactccctactttgacttccacacttcctttctccttctcctggcattcttctctccctctgtcactgggtccctgctcccatcgcctgtccttgaatactgaacaacgctcctctgtcaccactcttcatcctaaccatgcctgacatgggacgatgtccacacctgtgacttcacatgacccctatggtcctgaccccctagatcatcatctctagccttgaacactccaagctccagacttgtatatccaaatatctaacagatatttttcagtatgcccaaatttacaatttttcccttagaaacctgttccttttcctgtattcctcactttgcttaatagcactatgcattcaagtaaccagtgtaagaatccagcatttcatcctaggttcctcctcctcactcaatgcccacaggcattgagttctgaaagtcctactgttctaaattcttcacactttggctcttttttctcccaccgcttacccattgcttcgtccagattctaagtaaaaactcccaaaataagaaaaygcaaatgtaactttttaccaatcagaagactgtcatatgaatcaacagcaaaataagtgtcttacctttgcccccatatccacaagctgtgttgtaaatgtctttgaataattttctgttccattggatgaccacacttcaacataggccactacatctgaaaacaagatatgaacatgaaacatacatttgaaattccagcatcccctgcccaatagattttgttctatttacatttaagagtaaaccgaggccggcacagtggctcacgcctgtaatcccagcactgtgggaggcggaagtgggt

SEQ ID NO: 58404 - DNA, 1988 bp, Homo sapiens
tactagtgcctatttttttggtttttggagacagaatcttactccgtcgcccaggctggagtgcagtggtgcaatctcggctcaatgcaacctccgcctcccaggttcaaacgattctcctgcctcagcctcccgaatcactgagactacaggtgtgtgccaccacacctggcttttttttgtatttttagtagagatggggtttcactatgttggccaggctggtctcgaactcctgacctcaggtgatccgcctgccttggcctcctaataatgcctgttttctaaacatgcattccatgaatcccaactatgcttgtgcagatcatgtacttcatttttccccacagcttagatcaccctacttccctaactgataaatatccctaagccttatctttgggaatgaagatgtgagtactcttctgcctcctagctgggcttccccgtgaatgaatcttttcccttttgtaaaacccgtcatcaaagtgatcggtttagtgtgcgtgggcaaaagatacctatttggtatcaaggacattattaagtcaaatagaggctacctgaacacaagcagtacgtgatagtaaatctgataacagagatggctatactaagaaaccttgaataaggcaaattgtttgctatctccatttcctcatagctcaatgattcctgcccatttcactgaaaactgcactaagttcagcaatgaccttacagtgttcaaatccaaagtacatttgcccatcctatttttcttgaactttctgtagtttttaaaaattctatctttaaaattactccattctagttctgaaaggcaattaaaaaattactcctggccgggctcggtggctcatgcctgtaatcccagcactttgggaggccgaggtgggcggatcacgagatcaggagattgagaccatcctggccaacatggtgaaaccccgtctttactaaaaatacaaaaaaaaaaattagctaggcatggtggcatgtgcctgtagtcccagatacttggaaggctgaggcaggacaatcgcttgaacccagaaggcagagattgcagtgagctgagatcgcgtcactgcactccagcctagcgacagagcgagactccgtctcaaaaaaaaaaaattactccctactttgacttccacacttcctttctccttctcctggcattcttctctccctctgtcactgggtccctgctcccatcgcctgtccttgaatactgaacaacgctcctctgtcaccactcttcatcctaaccatgcctgacatgggacgatgtccacacctgtgacttcacatgacccctatggtcctgaccccctagatcatcatctctagccttgaacactccaagctccagacttgtatatccaaatatctaacagatatttttcagtatgcccaaatttacaatttttcccttagaaacctgttccttttcctgtattcctcactttgcttaatagcactatgcattcaagtaaccagtgtaagaatccagcatttcatcctaggttcctcctcctcactcaatgcccacaggcattgagttctgaaagtcctactgttctaaattcttcacactttggctcttttttctcccaccgcttacccattgcttcgtccagattctaagtaaaaactcccaaaataagaaaatgcaaatgtaactttttaccaatcagaagactgtcatatgaatcaacagcaaaataagtgtcttacctttgcccccatatccacaagctgtgttgtaaatgtctttgaataattttctgttccattggatgaccacacttcaacataggccactacatctgaaaacaagatatgaacatgaaayatacatttgaaattccagcatcccctgcccaatagattttgttctatttacatttaagagtaaaccgaggccggcacagtggctcacgcctgtaatcccagcactgtgggaggcggaagtgggt

SEQ ID NO: 58405 - DNA, 1988 bp, Homo sapiens
tactagtgcctatttttttggtttttggagacagaatcttactccgtcgcccaggctggagtgcagtggtgcaatctcggctcaatgcaacctccgcctcccaggttcaaacgattctcctgcctcagcctcccgaatcactgagactacaggtgtgtgccaccacacctggcttttttttgtatttttagtagagatggggtttcactatgttggccaggctggtctcgaactcctgacctcaggtgatccgcctgccttggcctcctaataatgcctgttttctaaacatgcattccatgaatcccaactatgcttgtgcagatcatgtacttcatttttccccacagcttagatcaccctacttccctaactgataaatatccctaagccttatctttgggaatgaagatgtgagtactcttctgcctcctagctgggcttccccgtgaatgaatcttttcccttttgtaaaacccgtcatcaaagtgatcggtttagtgtgcgtgggcaaaagatacctatttggtatcaaggacattattaagtcaaatagaggctacctgaacacaagcagtacgtgatagtaaatctgataacagagatggctatactaagaaaccttgaataaggcaaattgtttgctatctccatttcctcatagctcaatgattcctgcccatttcactgaaaactgcactaagttcagcaatgaccttacagtgttcaaatccaaagtacatttgcccatcctatttttcttgaactttctgtagtttttaaaaattctatctttaaaattactccattctagttctgaaaggcaattaaaaaattactcctggccgggctcggtggctcatgcctgtaatcccagcactttgggaggccgaggtgggcggatcacgagatcaggagattgagaccatcctggccaacatggtgaaaccccgtctttactaaaaatacaaaaaaaaaaattagctaggcatggtggcatgtgcctgtagtcccagatacttggaaggctgaggcaggacaatcgcttgaacccagaaggcagagattgcagtgagctgagatcgcgtcactgcactccagcctagcgacagagcgagactccgtctcaaaaaaaaaaaattactccctactttgacttccacacttcctttctccttctcctggcattcttctctccctctgtcactgggtccctgctcccatcgcctgtccttgaatactgaacaacgctcctctgtcaccactcttcatcctaaccatgcctgacatgggacgatgtccacacctgtgacttcacatgacccctatggtcctgaccccctagatcatcatctctagccttgaacactccaagctccagacttgtatatccaaatatctaacagatatttttcagtatgcccaaatttacaatttttcccttagaaacctgttccttttcctgtattcctcactttgcttaatagcactatgcattcaagtaaccagtgtaagaatccagcatttcatcctaggttcctcctcctcactcaatgcccacaggcattgagttctgaaagtcctactgttctaaattcttcacactttggctcttttttctcccaccgcttacccattgcttcgtccagattctaagtaaaaactcccaaaataagaaaatgcaaatgtaactttttaccaatcagaagactgtcatatgaatcaacagcaaaataagtgtcttacctttgcccccatatccacaagctgtgttgtaaatgtctttgaataattttctgttccattggatgaccacacttcaacataggccactacatctgaaaacaagatatgaacatgaaacatacatttgaaattccagcatcccctgcccaatagattttgttctatttacatttaagagtaaaccgaggccggcacagtrgctcacgcctgtaatcccagcactgtgggaggcggaagtgggt

SEQ ID NO: 58406 - DNA, 670 bp, Homo sapiens
aattctacaagcatcgagagagaaaaatgacracaaaggaggaaccaagaatcagaagtcacgcaggaagccagaaggcactacagtcacttcctcccctcagagggacaatgggcaggaagaggacagggcagcagcctcctttatggagagagttctttcagatgaaacggatgggagactaggggatatatacaaatggggtcagtttgggcttaactagagacagatacatagaaaatcatgcaaataaacatgattattaactccaatgagaaactaaaagttgtgtcagaaggaaaagaagtcatactaagtgttctggttcagctatgaatagcgtttgtgtatccttagcaatatcaatattaatattgatccaaccaaaatgacacaattatatggacaaatggagggactgaaagcacgtgtctgcgatgaaggatgaccaaagagcagcccaatctgcaccactagatatagtcaattgataaggcctaatactgaacaattgtgaaatggtaataaaaatatttcacatggaaatgaaagttaatactaaaatattcatctggaagaactgaaggtggttgtctcttggagagaaaggaaagaggggttgccaagaactactgattttcatgataagccttgttgaatttttttttag

SEQ ID NO: 58407 - DNA, 670 bp, Homo sapiens
aattctacaagcatcgagagagaaaaatgacgacaaaggaggaaccaagaatcagaagtcacgcaggaagccagaaggcactacagtcacttcctcccctcagagggacaatgggcaggaagaggacagggcagcagcctcctttatggagagagttctttcagatgaaacggatgggagactaggggatatatacaaatggggtcagtttgggcttaactagagacagatacatagaaaatcatgcaaataaacatgattattaactccaatgagaaactaaaagttgtgtcagaaggaaaagaagtcatactaagtgttctggttcagctatgaatagcgtttgtgtatccttagcaatatcaatattaatattgatccaaccaaaatgacacaattatatggacaaatggagggactgaaagcacgtgtctgcgatgaaggatgaccaaagagcagcccaatctgcaccactagatatagtcaattgataaggcctaatactgaacaattgtgaaatggtaataaaaatatttcacatggaratgaaagttaatactaaaatattcatctggaagaactgaaggtggttgtctcttggagagaaaggaaagaggggttgccaagaactactgattttcatgataagccttgttgaatttttttttag

SEQ ID NO: 58408 - DNA, 776 bp, Homo sapiens
catttattaatattacttattatatttgttcagttatttcaaatatggatctatttctacataagtatattgcaaacttctggaggatgggcatggtggacgattcctttttgatacctaccaaagctatgtccgtagtagatgcccccaaaataattcatggataaacataaaggtcaaattcaaggtgacttgatatgcaaagttaagtcaaagtctggagataaaaaccaaggttagattaaagctgacactgtaaatagttaagacatttggagaacctaagtacatcaagacagagctgcattcaaagttctgtggtctacttttttggttaatgtttatttgttttaatgaagagatacttttgttcccaaagtactctcaagtttcaagttttggtgacctgggacttggtatataaacgtgagcttactctgccaacaccctatgtgactttcgagactttgtgcctgcctcctttgttttcctagattgcaaagtcgtaatctccacacactgagatactgaacttcttttattgctggtctgatacgattgacaagagagagattagtttcttgycccttgctggaggtggggagatgaaaacaccagggagaaaaatatagtggaagatcatcttgagtcgatgttcagaatgaggagtcctcgatcctgggccagcatcagtccatggcgcttttggtctcactgtggtttcactccccattaaatggggaaaatacttggcattttctgacattccgggttct

SEQ ID NO: 58409 - DNA, 1255 bp, Homo sapiens
cccctcccccagtaaaaaatagattattctctgaaaagcaaaaattaccttcatgtattttctgaatgatatgctacgctatcattctcatgaaatgcttttcattatcttgtcctgaatcattgtattattgtagtatctcctggcctcttaagcacataacacagtgaagttgattctactattagaatcctcccccttaattaaatgagaaatattattacttcatcccagcttggactagcattcacttccttttcacccactgtgtttcatctcatcctcaaaatatctgtatgtgcatttcatttctgtggtcagtcaataagcatttatccataatgaatcttgcttctgagagtccattaaattattcccccaaagaatttctttatcctctcccactatcgtttcttgatactaggaaagagtttaactaattcaactaggaaagtttaactaacttcctaaggatacaagttaaaatatccagcgtatggttatatggctcttaagaagcagaggcttggaaaactaaaaataggagagaaggggaagaagaaaggaaagaatttgcttgtgccaagcaccttccaaatgaaaggctgtaggctaaaaactttagactcattgcttcatttaatccaaattatccttcccctctcaatctttaatcttaatttcttctaacaggtccccaccctggctgcacctatagtggaaattttattttgctggaaaatccatgcacgaaatgacagagtgatatttttaacaatatgaactgaatttccccatcattcaacccataaaaaccaccaactcatcattacttactgrccccttcgctcaaatatcatttaaaaatacctgtttttggatgttttaactgttgactttgctatgatggctctgcctccattcgtagtaaataataaagctgaaagaagccttatagatcaactaatctaattctcattaccccactttggagataagaacattgagggcagcgaggcagatagccatcccctacaacctttctacttgtctgtgcatcagcaggtacttaaagggctagagaaattcccaaacccacctaccaaggaagggtcacaccatctgattgttctaggactttcatttaaccttcgattcaaagctactttaattatttgtattagtttacccagttgcttacactgattttgaggaaccactcaatacgatagacctgggcataatttgagatgca

SEQ ID NO: 58410 - DNA, 1255 bp, Homo sapiens
cccctcccccagtaaaaaatagattattctctgaaaagcaaaaattaccttcatgtattttctgaatgatatgctacgctatcattctcatgaaatgcttttcattatcttgtcctgaatcattgtattattgtagtatctcctggcctcttaagcacataacacagtgaagttgattctactattagaatcctcccccttaattaaatgagaaatattattacttcatcccagcttggactagcattcacttccttttcacccactgtgtttcatctcatcctcaaaatatctgtatgtgcatttcatttctgtggtcagtcaataagcatttatccataatgaatcttgcttctgagagtccattaaattattcccccaaagaatttctttatcctctcccactatcgtttcttgatactaggaaagagtttaactaattcaactaggaaagtttaactaacttcctaaggatacaagttaaaatatccagcgtatggttatatggctcttaagaagcagaggcttggaaaactaaaaataggagagaaggggaagaagaaaggaaagaatttgcttgtgccaagcaccttccaaatgaaaggctgtaggctaaaaactttagactcattgcttcatttaatccaaattatccttcccctctcaatctttaatcttaatttcttctaacaggtccccaccctggctgcacctatagtggaaattttattttgctggaaaatccatgcacgaaatgacagagtgatatttttaacaatatgaactgaatttccccatcattcaacccataaaaaccaccaactcatcattacttactggccccttygctcaaatatcatttaaaaatacctgtttttggatgttttaactgttgactttgctatgatggctctgcctccattcgtagtaaataataaagctgaaagaagccttatagatcaactaatctaattctcattaccccactttggagataagaacattgagggcagcgaggcagatagccatcccctacaacctttctacttgtctgtgcatcagcaggtacttaaagggctagagaaattcccaaacccacctaccaaggaagggtcacaccatctgattgttctaggactttcatttaaccttcgattcaaagctactttaattatttgtattagtttacccagttgcttacactgattttgaggaaccactcaatacgatagacctgggcataatttgagatgca

SEQ ID NO: 58411 - DNA, 768 bp, Homo sapiens
cattggggactgcaattgaattccctgctgctcagtgggatagttgcttaaagcagattaaaatttgatttagcaacgtgacattccttattcctcatccttacaatgtctgcaatttacttttagatactttagtatcacagtgtgatttcttatatgtgccaattagtttaaaccacaccctaggtgcagtcagttaccataaatcaggaattcacctcccaggagtggccagcaagtaatctaattcagaaagctcatcttatggaaatggctatgacaatctctgttgttacctttttcctttatcaataacagggaatatgctaattagtgcaatgagtttagaaatgagttttcattggtattatatgtggcttactaattagcatgatagatgttagaaaaagactcttattggcaaaattagtctactctactcacagtatgtggattatctaaatattttagagaaaactctccaaacttgtaaggaccaagtctgggaatctagcaagccctggagcctgtgtttttgaactggtgcctyatgcttgatctttaaagggtcctcccacagctaggttgatgtttctggttgcctgatactaatagaagggaaacctaattctgacttgtagattattttggcatgcaaaatggttcacataatggacagagagcaaggttcttcattgaacttatagaaccagttggatgaaaagtttttgccttcttactaatagatgcttgtttaatacatgactg

SEQ ID NO: 58412 - DNA, 627 bp, Homo sapiens
gggatccttttgctcttctttgctgaaggcttgactggagctggaagatccacttctgtgtggtttactactcagatcagactcatttttggcagctgggattatttcctctggaagtcaacctcttcatgccatgacagctggcttcccccacagagagtggtgaaagaaagaaacagagatgcaaggagggagttacagcctcttatgactcagtctcagaagtcacaatgccactttcactttttccacattctgttcattagaaatgagtttcatcagaatgaggaaagaaaatgcacaaacccccgctgtgaattaccaggtgtcctggatgtgtcagaatttgatatgcctgttgtaacaacctcaggggaaggaattcggctcctcaaacttttgatgttatgattgtcaaaggactgtggtgcatttccaaaccaccacacacactaacagtgtaaaatttcaaatgaagcttcagacctctggacttagaatacaggtctctccactcaccaagaagagcattaccaggagacaccctccctcacactstgtggatttaccttggcttaagtgtgctgaaggaaaaaaataaacaataatgaaataattcattctact

SEQ ID NO: 58413 - DNA, 799 bp, Homo sapiens
cccttaaaattatttatcgcaatgcctaatctgtttatgtatcagggtagttgtgaggtcacttgtatttatccgctctcatgctgctatgaagaaatacccgtgactgggtaatttattaaaaaaataaaaaaataaaaaaaaaagaggtttaattgactcagttctacccggctgggaggctacagcaaacttataatcataacggaaggcacctcttcacagggtggcaggagagagaatgaatgccaagcaaagggagaagtaccttataaaaccatcagatctcatgagatctcactcactatcatgagaacagcgcagcatgggaggaaccacccccatgattcaattatctccacctggtcctacccttgacatgtggggattattacaatttgagatgagatttcagaggagacacagagccaaaccgtatcagcactcaagatacacgttataatgcacacatagggaagggtattctgtgaggcacaaatatttattaactctaagcatgatttatttaccaggcatccaaaaaaaaaagccaagtaagagggaaagagcatgaaaatgacaacattaatgataacattaatgataactgtaacctacactcacatttacttctatggtcattaaaggcacttttctctaatgttgacctaattttaatttcttgtataccttggaaattatataaggcaggtatcatcatcattctyatggatatgaaaactgagtctcaataaagttaagtgacttatcttggctacacagttgctatggaagggat

SEQ ID NO: 58414 - DNA, 2192 bp, Homo sapiens
taatgaatggccatgcctacactgcatccatcagcaggagacgattcctctgcgttaacagccttgtttagtggctgcctccctgcttatcacacctcagcctgattaaattgttatataaagagaaatgcttttgtaataaatatctgtcgggaatttcagtcaggttccaggaccaccattgctgagtcatggttcttttcttttcaattaatgaggctttcataggtgctggcaggggtgacttcagagggaacagcagattggtttcaggggcacagagaggaggaatgagtagaaatgtaaagaactgcctggccgggcgatttccaggagtagctagaactctgggaaccagtcagagttcccaaggtctctccaggactttgtgggtgacattcctcccccaggttaagaaggcggaaagaatgaggcatgctggggccctgctgggctcaccgtgtcctctgcagtctggccacttcactggccaaatcagatatggtacatccagaaggaggggagggccaaggggagggagcacagtgctgcgtgtctacaggattctgaggtctgtgtaagcatggattaagtgtttactgtgtgaagttctcttctaggaactctctatgccttagcccaggggtccccatccccctgggctggagactggtaagaagtaaagttaggaacctggccacacagcaggaggtgagtggtgggccagccagcatcaccgcctgagctcggccccttgtcagatcagtgggggcattcgattctcacaggagggggaaccctgttgtgagctgtgcatgcgagggatccaggttgcaagctccttatgagaatctaatgcctgatgatctgaggtggaacagtttcatcctgaaaccatttcctccctctaacccccaccatccatggaaaaatctcttccatgaaactggtccctcctgccaaaaaggctggggacccatgaaatctgcacaaggaaccaatgaggtcaccattattatctctattgtatgcatgtgcaaacagggaagcaacaaggaactgaaatgagttgatcagttcacatagctaagtaggtgggagagccaggatttgccccagcatctgctccagaaccttgccctgagrctccatttgatacttccaagctctgtgaggtagggaacacattggagcatctgcctactcagctgtgtaccacacatgttaggcagtgttggaagcagaagataattagatgtgggtcttgccccacaggaatttgtgatacaactggggcagaaaaaacacacctacaaaatggctaaaaataaaaataaaaaagttcacattagcagatatgcaagcaaccaaaaaaagaaagtatacacatgtataatcacctttgaactcagaaagcaaaaaggcaccagcgtctgcactctgggccttaatcattacgtttgagaaacctgtagttagcttgatatctaaaaatgttaaatattttttaaaaacttttctctttctgctttttttggatcgatcatatatatttttactttttatgttatatatatttttctcagtcagcttttaaaaaatacattcttttaatggttaccatcaacatttcatatcttctatattttgttttgtgagcatattaagtttggctttataaggaattcgtttatttcatctaatttgttgtattttcttctaaaaagataggtgacttctcctctcttctaacaccagtcaatgcaactttaggatctttgaaaacattttataagctttgattactagagtaattacaaaataaaatgtatttattaaacaaaatattttgacaaaacaaaaagaaagctgtagttagaactgtggtgagggaagaagatttgcaccaactttgtgatcagaatggatgcacagctaatcttcctgggtatggtgactgtttggttaaaccctgaagacaattgtggatttgaatggaagtaagaaaaagaagggcaagtgcattgtcaactccgtccatcctctccaaggagccaaggggaagtagctgtgtggatcaggcccactaagctgcagttgtccatgcctggtggaggctctgttggcagtgttggtgacaaggctgtggaagaagggggagggacaccacctggctgttcatcggctgtgat

SEQ ID NO: 58415 - DNA, 758 bp, Homo sapiens
gcccaagcaaggtcttcagcatactggtcttgtttgtttcttattctggatgctggccagagaagtgtgttcattttacgaaaattcattcaactgaatactagagacatttctctatatattatctcaacaacaacaaaaaattttgaaaaaattatgtaacccttgcaaccatttacaatgcaggtgctgcaatccttattttgcacatgatgacattgaggcatagaaaggttaaggaacttgtccaaagccacacagctaggaatggcagtgctaggcttgcaattgagatctatctggcttcaaagctggtgctgtctccataccccacactgctcccccagactgagatgcaggaggggtgattcctcaggcactccctcaccctcaactcccccatgccacactttaacactacacacacacaaagtcaatcctaaaccagagggccaggctagagagagtggcagagggagggctgggtggctaccaagaccaataagtacaaccctattctcaaagaagcttccagtctgatggggaggcaggcatggcacaataacacaagactatgctttcggggcatggggacagtgccaagcaccagctaggcatgaaatccatcagcctcygagtttggggtacctgaagaagaactgctttcaaagctctcaggtggagttaggccagatctggggctcggtgtcttaactcctttctgctcagggctgctgctgaggtggccaatgggctct

SEQ ID NO: 58416 - DNA, 758 bp, Homo sapiens
gcccaagcaaggtcttcagcatactggtcttgtttgtttcttattctggatgctggccagagaagtgtgttcattttacgaaaattcattcaactgaatactagagacatttctctatatattatctcaacaacaacaaaaaattttgaaaaaattatgtaacccttgcaaccatttacaatgcaggtgctgcaatccttattttgcacatgatgacattgaggcatagaaaggttaaggaacttgtccaaagccacacagctaggaatggcagtgctaggcttgcaattgagatctatctggcttcaaagctggtgctgtctccataccccacactgctcccccagactgagatgcaggaggggtgattcctcaggcactccctcaccctcaactcccccatgccacactttaacactacacacacacaaagtcaatcctaaaccagagggccaggctagagagagtggcagagggagggctgggtggctaccaagaccaataagtacaaccctattctcaaagaagcttccagtctgatggggaggcaggcatggcacaataacacaagactatgctttcggggcatggggacagtgccaagcaccagctaggcatgaaatccatcagcctctgagtttggggtacctgaagaagaactgctttcaaagctctcaggkggagttaggccagatctggggctcggtgtcttaactcctttctgctcagggctgctgctgaggtggccaatgggctct

SEQ ID NO: 58417 - DNA, 675 bp, Homo sapiens
cccccatgaccaaaacacctcccactgggccccacctccaacattagggatcacatttcaacatgagatttggaggatcaaacatccagactatatcatgtggcctagccaagttgacacataaaattaaccatcaccactggcctcccaatttaaatgtacttgttgtttaaatgtaccagaacctccaggacagggaccacagtctttccctatctaagcagagatgtatagyccagcaacctatccttagtgtggccagggcaaaagagagggaaggcacacaggctggccttaatggtacagtgactggttctttgtgcctgtttccctgcccaaggctccttttctctctgctcccctttaacaaagtcaccaagcaaacagaaaaaccaaagcaggagatcgtggtgggcagctgaattgcaagatggaagagttacaacaaatattttggtcaaccagccccaagtcatgaaagagagaccagccctccccactttgccctctcatctctggatgccccaaaagaaataatctggattatgtgggcagctgcctcctggagaaactccagtgttatctctggaaattctaggccctcctaagcagaggatataatatcaggatgtaaagaaattttgacaggctgaaatgagtctaactctaacaaaa

SEQ ID NO: 58418 - DNA, 617 bp, Homo sapiens
tctccaacaccagtgcatactgtattgtgatgtgcatgagaaatgatcttttactatgttaaaacaccaggattctggaattgtttgttatagaatttgtcttccctgatatactcacaaaatggaggtgacctagaaagttcacaagatatgacatatctgtcattctctggctactaatagatcctatcagtgcatgtaagaaaagggtctagtagaaaaggaaacacgttsgtagctgtacatactgcttattgtaattgtccacttattcatgcatttaacaaatatttattatgtacttactatgtgccaagctctgtgtaagtattgggggtgcacaagtaagcaaagtagacatgggccctgcccttgtatagctgacagtctggtgggataccaaacatgaaacaaattattcttatatgaacagctattatgaaagaagacattatagaccactgttgggaacaggggtctcacctagacaccaaggagatctatttttttttcctatttagcacatcaaaaaaccaggaaatgggagcaggagagcctgtgttgctaggaattagacggaatcatgaacatcactctgtccactgacttgctccagt

SEQ ID NO: 58419 - DNA, 1146 bp, Homo sapiens
agtgttacctcatttttcacaaaaatagactaaaattttacacctgctttagagtagagtatatactttgaatgaaaaggtaagatgtccacagagcacattttatatttcaaaaactagaaaggaagaaaaaatcttcaattcataagaacaaattaaaataaccattggataattcaaactgtgattgagaggcttatatccttagaagcgtaagaaactgcattaaactcctatagctattaccctgaacctgtaattacatcagcacatttttgctttcttttagggatcatcacagcatgagagaaaggaggagtggggaaggaaagatagtattcattacattctacagaatgtctaaccatagagtaaacgaacagatgatcggaatgccgttccaataagaacttttcccattgttaattacgtggtcttagaatccttgaaagacaacgtgacagacttaggcatcaagagtatttgggcaagcacaaatcctcttaataaaataaaaatatttgaaaacaaaagcagaaaaactgtataatcaggattttagcccttgacattacatttctgtctcattatgaaaacaaccttggagctaatcatataaaaaccttataaatactccctaccatcaaaggtatttacataaaataataacaatataaaacaccaaagctctagttcaagcaaagcaatatgcaattctaaccttcttagtttaaaaacaaatctgaataaaggtcatatamaaggttttcaatatactttccactgcactatttcagcaaaagaaaaattagcagtcgaagccgcactttgaggagatagtaaaatattgtattttgatattaattaatacggtaaatacataaacacttagctccaattatctaaataaatttaattatatttaataacattagtaaccttcctagtacagattaaaattgttacatttatttgcacgcaaggaaaggtaagcagttttctcagaactactcaataagctacaattatagttatttatttagtgtttattatatatgtgtgtgtttgaaacatatatatgatatacttgtataagaatgtgtttatatattagtatgtttatataccatgttgtatatataacga

SEQ ID NO: 58420 - DNA, 1146 bp, Homo sapiens
agtgttacctcatttttcacaaaaatagactaaaattttacacctgctttagagtagagtatatactttgaatgaaaaggtaagatgtccacagagcacattttatatttcaaaaactagaaaggaagaaaaaatcttcaattcataagaacaaattaaaataaccattggataattcaaactgtgattgagaggcttatatccttagaagcgtaagaaactgcattaaactcctatagctattaccctgaacctgtaattacatcagcacatttttgctttcttttagggatcatcacagcatgagagaaaggaggagtggggaaggaaagatagtattcattacattctacagaatgtctaaccatagagtaaacgaacagatgatcggaatgccgttccaataagaacttttcccattgttaattacgtggtcttagaatccttgaaagacaacgtgacagacttaggcatcaagagtatttgggcaagcacaaatcctcttaataaaataaaaatatttgaaaacaaaagcagaaaaactgtataatcaggattttagcccttgacattacatttctgtctcattatgaaaacaaccttggagctaatcatataaaaaccttataaatactccctaccatcaaaggtatttacataaaataataacaatataaaacaccaaagctctagttcaagcaaagcaatatgcaattctaaccttcttagtttaaaaacaaatctgaataaaggtcatatacaaggttttcaatatactttccactgcactatttcagcaaaagaaaaattagcagtcgaagccgcactttgaggagatagtaaaatattgtattttgatattaattaatacggtaaatacataaacacttagctccaattatctaaataaatttaattatatttaataacattagtaaccttcctagtacagattaaaattgttacatttatttgcacgcaaggaaaggtaagcagttttctcagaactactcaataagctacaattatagttatttatttagtgtttattatatatgtgtgtgtttgaaacatatatatgatatacwtgtataagaatgtgtttatatattagtatgtttatataccatgttgtatatataacga

SEQ ID NO: 58421 - DNA, 705 bp, Homo sapiens
gtggagaaggaggctttagaggatggtgcctgctttttgttcctcctcctctggcatgatggattcttccctttaactccttagtgcctcaaagacaagtaatgatcaaggctccaggtaggactgactatcaaaaccaatagctgctgctaagatttgagtatttataatgtacatgagattccatctctatccagcacaccagcccactgatgctttacaagaaaatcctcagtgcctcagagttagctttcatagttttcttgttataattttcagcttcccatgtgccatgctagrcacaaggtacaacagtgaacaggacagacatgggccctgcccttttagagtctagtgaggaagatggacatagtggatagtaagtacatgtgataaattctatgtcaggaaatgcagggtgctatgggaatcttaggaaggtcacataactattttaacaagtgaaagaaggccagttatttagctttagtaggaaacaaagctctccttaataaaatataaagtaagtgccatattgtgggtttgaagatttctttgttctatatgatatatattttctgtgctgagaagaggatagtacactaaaaatcgatatgtcttgtaactcagtgttttatggtcaacttataacaccttcaacttatagaagaattaagattatcttctaaggcaggctttccaaca

SEQ ID NO: 58422 - DNA, 671 bp, Homo sapiens
agattacatttccaacaytttcattcacataacactgtctgggacccagcaaactctcaaatgtccgctctacttactcccagtgaaatacatttcgttttcccgccgctgaagatgtcactcagggtctgccaacacgatgccacaagtacccaagaggagcagctcaaaagcatgatcaggattcaaagcatcagtttaatcttaggcattgagaaatgctaaatgtcacataccattaataaataaatcttaaacagccagacgacctgacagcttattctgaacggtgcatgcatttctttcttgctctgctggtgccagggctcctctcactgccctacacttgcagggaggtggacttccctcccctgggcttccaggtgcgtctcctgctgctttctctatgcttcctccccctccaatgctcccaagtgcccattatccccacagccagccaggtgggctggaagggtcctggaggagaagctgcaggcttctcagaggacgggtcccccacccgcagacctgggctcctctcctcagcacgtcactgcaggaggcctcggggaaacaagggcaccaatgagtcagcaggtgatcttcaggacagcctgtgactcgggaacactgtaagccaaatgactcattaaccaaggcccagctggatc

SEQ ID NO: 58423 - DNA, 671 bp, Homo sapiens
agattacatttccaacactttcattcacataacactgtctgggacccagcaaactctcaaatgtccgctctacttactcccagtgaaatacatttcgttttcccgccgctgaagatgtcactcagggtctgccaacacgatgccacaagtacccaagaggagcagctcaaaagcatgatcaggattcaaagcatyagtttaatcttaggcattgagaaatgctaaatgtcacataccattaataaataaatcttaaacagccagacgacctgacagcttattctgaacggtgcatgcatttctttcttgctctgctggtgccagggctcctctcactgccctacacttgcagggaggtggacttccctcccctgggcttccaggtgcgtctcctgctgctttctctatgcttcctccccctccaatgctcccaagtgcccattatccccacagccagccaggtgggctggaagggtcctggaggagaagctgcaggcttctcagaggacgggtcccccacccgcagacctgggctcctctcctcagcacgtcactgcaggaggcctcggggaaacaagggcaccaatgagtcagcaggtgatcttcaggacagcctgtgactcgggaacactgtaagccaaatgactcattaaccaaggcccagctggatc

SEQ ID NO: 58424 - DNA, 605 bp, Homo sapiens
ttcatttcctctaccattagtggtggattcagttgcataactcacttttcaaggtgattgctattcattcacgtggagatgctgaaaacataactactctatccattatgtgtacataatcaagtatttattggctatgatgtgaaaggtcttctgaggatgaaacttccctgcccacaagaaacatggaattcggttatgaagaaagcagtgtgcatacacaaaaaagcaagaaaaagaaagcgccaagtgaatgggtggttgctgtgggtggagacgactggagaggtggggaccgtctttaggatgaggaggctgtggggcggggaggtccacattgctggctctggagtcagactgagcaggttcccgttttgggctccacctcaaaggctatgtggccttcagtgaggcctggagrttgtacacctggcccacgaggaaggttttgccatcttaccaggcacagggttaagagcaccccacatgttggcccctctgatgatgatgatgagaccgggataagcttattaaagcagctttgcttaaacgctctttacctaggccggtgtgctggctcacgcctgtacactcccactttggga

SEQ ID NO: 58425 - DNA, 596 bp, Homo sapiens
tggcaagaggtaacaattttaaatacactggtcagagaaggcttcattgaggaagtgacatttggagacaggaatgagatggatatttgggggaagaaaattcaagtaaaggcatcggcaaatacaaagtctctgagggggaagagggcttttttgttcaagacaatagcaggctggagaagatgcagaaagtgggagagttatagcagatggagacaaaaaagggaactgctggggatcaaaccttgtaaagtccttctaagtgatatatgaggactttgacttttattcaaagttagaaggctttgaacaaaagaattatttcatttgtkttttacaatggtcacaagtgccgtagcgagaataggctgtgtagagaagagattttgtggttttcttttttgttctctgtattctcttcctgaaaaatctgttttctgcctaatcatatttctgtaaagaacaatagacttgaacgtctgctgttaagtaacaaaggttgacctaaaccacataaggtcagattaacttttaaaatatccaagataatgttaagtgtattaaatatggttcagtatgtaatcaaaatatttgat

SEQ ID NO: 58426 - DNA, 617 bp, Homo sapiens
caccaggctggagtgcaatggcacgatcgtggctcactgcagcctccgcctcctgggttcaagcgattcccctgcctcagcctcccgagtagccrggattacagtcacgtaccaccatgcccggctaattttttgtattttagcagacatggggtttcaccatgttggccaggatggtctagatctcctgacctcatgatccacccaccttggcctcccaaaatgctgggattacagacatgagccaccacgtcaagcctcatttttctttaaatatgccattatgtttaaatcattcaacttaaaagtgtgaatttttattattagaatatgtgtttatgtataccctgtctcattcctaaagtattttgagatagcttaccaaacatgtgctttttttttttttttttttttttttaaagactcaaggtaatgaaaactatgagtagaatagtaaggtgtgacaggggacaaataagtagatataaaactatgctgcaatattctagttattaaagctgggaaatatgcaaatgtaagtagtgcttggaaccagagaaggttctatatttagctgttcttctgtagctaaatctgacaaattgaaaaatatcata

SEQ ID NO: 58427 - DNA, 617 bp, Homo sapiens
caccaggctggagtgcaatggcacgatcgtggctcactgcagcctccgcctcctgggttcaagcgattcccctgcctcagcctcccgagtagccaggattacagtcacgtaccaccatgcccggctaaytttttgtattttagcagacatggggtttcaccatgttggccaggatggtctagatctcctgacctcatgatccacccaccttggcctcccaaaatgctgggattacagacatgagccaccacgtcaagcctcatttttctttaaatatgccattatgtttaaatcattcaacttaaaagtgtgaatttttattattagaatatgtgtttatgtataccctgtctcattcctaaagtattttgagatagcttaccaaacatgtgctttttttttttttttttttttttttaaagactcaaggtaatgaaaactatgagtagaatagtaaggtgtgacaggggacaaataagtagatataaaactatgctgcaatattctagttattaaagctgggaaatatgcaaatgtaagtagtgcttggaaccagagaaggttctatatttagctgttcttctgtagctaaatctgacaaattgaaaaatatcata

SEQ ID NO: 58428 - DNA, 617 bp, Homo sapiens
caccaggctggagtgcaatggcacgatcgtggctcactgcagcctccgcctcctgggttcaagcgattcccctgcctcagcctcccgagtagccaggattacagtcacgtaccaccatgcccggctaattttttgtattttagcagacatggggtttcaccatgttggccaggatggtctagatctcctgacctcatgatccacccaccttggcctcccaaaatgctgggattacagacatgagccaccacgtcaagcctcatttttctttaaatatgccattatgtttaaatcattcaacttaaaagtgtgaatttttattattagaatatgtgtttatgtataccctgtctcattcctaaagtattttgagatagcttaccaaacatgtgctttttttttttttttttttttttttaaagactcaaggtaatgaaaactatgagtagaatagtaaggtgtgacaggggacaaataagtagatataaaactatgctgcaatattctagttattaaagctgggaaatatgcaaatgtaagtagtgcttggarccagagaaggttctatatttagctgttcttctgtagctaaatctgacaaattgaaaaatatcata

SEQ ID NO: 58429 - DNA, 688 bp, Homo sapiens
gatccacccgcctcagcctcccaaagtgctgggattacaggcatgagccactgtgcccagccagcacggtatttttaacaaactcctttagttccatccaatttttacaagttgtgttactatacatgtcataaatcagttgttggagttagttattgttgcctgggacagtgcacattaggcagccaggtaaaatgaacctcctatatacttaaaaacactaaaccaagtttactcttaaaaatcaagttcttttcccaagttcttttcccctaaaattgagagattctcacccttgttgacttctcacttgaaggatgttactactatcatttatatgtccaggaaggagtttatgtgtgcaggaaactgaagagacagcagcagaaatcatttacttkagaattcttggtagttccttggcagaggtatactgtaataatttctggtatttggttccagggtgcttttgactctgagattagatccttgccatcttccctctgctgatggaggccttggctcttctgaagactataatattaaagtgatctcatctctgtagaccttaaattgatattttacagaagtagtctagtccttcaatataatggttaaagttggtgagttcatcttatattcaggatataaggaagaagcgtgacttgcactcagctcctctgtgtgt

SEQ ID NO: 58430 - DNA, 567 bp, Homo sapiens
aagacacaatatgtgatgacaaacaaatgagcgtgattgcttcagccaaagaaagttcatgttctttttgctttttacttgtaccacatggataaaaaataatytatctttaaagcacaaatacttgaaggcaatttagaaacaactttattccgaattatgtgaataattcacaattccatataacatctgcagtatattattttgcagataagaaataaatatgagaaaaaagtttatatgaagggttggaggtgaagccaaaattagtattccagtatctggataaccagatttctcctccagtaaatttacttgaccatataaagttacaagcataattttctgagaaatctaaggagccaggagccctggagacttagattctaatcctcctctgccacttgccatgtgttctgtccaaattgctatgtgtgtatttccctcggcatagcattaaggaagagggtgcagatcaagaccatttaaattgtcttttaaacaaaaattaaaaatcatataaaattgatattattaaataattagtattaccaaataattataata

SEQ ID NO: 58431 - DNA, 753 bp, Homo sapiens
agaggaagagttataaagttactcaattaagccataaactgaccagattatagagcagagtcacaaggttgagtctggagatactcactttaatttataactactaattattaatgaaaaacatttctagaaacaacttattcagagaaggtggtttgtctaagagattaaactatagttctgctacaaaaaaagttgattatttatttatttatttatttttaagagacaagatctcactttctcacccaagctagagtgcatagctcactgcatccttgaactcctgggctcatagaatccttccacctcagcctcccaagtggctgagactacaggtgtgtgccaccatgcctggcytgaaatgactattttcagaaaactaagggacatgtcttgctatagaactgtggatatggtgctcatgtcatgtattttcaaatgtaggctcaatttcaaaaaccttatttaaaactagatttatggaggtttagggtgactgtctgaatctgaatatttttacacgctgtctcaaaaaacataagagcaacaaggaaggcaaataaaatcacatatgacccaagtattcagcattattaaaagtaaaaggatactaaaagagtcagattaggtgtaaataaataaacacccaatttctgacagagttcccatggctgttgcatacctgcaggtatggatgataggagaggggaggcttaagaaagtccatgaaaagaggacagagtaaatata

SEQ ID NO: 58432 - DNA, 603 bp, Homo sapiens
tcctgccttggcctcccaaaatgttaagattacaagtgtgagtcactgtgcctggccagattattctccgtctaattcctcacaagacatacagcagttcattatctcctgtcatcactctatacaaaatattacctttccttgtcacaatcataagccagtcttccttccttgatttttgctttctacctgaaattaagtagttaaatatactaaatttcaccaccattctttttgctaaagttcccctatctttttgttggatgaaataatcttctattttttaaaaaaattcattcagtaatcttgtttgttgtatttttcwttttttaaaatttaattatggacatataatagttgtacagatgtatgggggtacatgtgaacctcatgaaaacagagcaatataaagacccctgttgagaagggataacatgaatgagaaatatgcatgtctctttaagaagaggaacagtcttaattaatggataactatatagaggcaataattcaagcataaaacactttattataatagcatattgggaatagtcttgtctatttgtataaaaatggtgaagaaatagaatatttgggatccat

SEQ ID NO: 58433 - DNA, 1000 bp, Homo sapiens
  misc_feature (1)...(1000): n = A,T,C or G
agcccgtagaaccaagaaagacgttttccanaattgtttcagtgtaaaataactcttacattagtgtctttccattttacatcaggtcggactgaggatgtaaaatatgtgtcaagtaatgcggagctccttgatacctgccagaagtcgcagtaccttaagaatcattacattccattttatgtcaaccttttagggaaatgaatgtgtttttgacaatggcactgctattcaaatgctaccaagcaataaaaatgttggagagaccgtagcattcgttgatttgtgagaagtggttttagttctaggtcacctataagtggccatgtaagcttactacagtaatttagaaaaacttgtttctgagttttctcatttgtaaaatgagytaccaacatcggccacgcggatttaacggggatttcaaagatttccttgcactttaataacagtctgctttacaattaaagatctcttccttccagtaatgcacccacccactctagcttatcgcccaggtaaactcttcttttttattattttctctttattctcatcattttccaacttcccaatttccaagaaataatacttgttttattctcttttatagttcagtggtttttactaaacatgccaattccttactttgagaggttgttttactggcttggtagagatcatgacctgcaattctttaaaaagtcactgatgattctgatgaaaaaaaaaaatctttgtgtagtacaatttaagaaaccctctgatgacagcttctcttatgtatttctattacggtatttccacatgttataatacaactggccaggcgcagtggctcaggcctgtaatcccagtactttgggaggctgaggtgggcggatcacctgaggtcggaagttcgagaccagcctgacattgtgacaatgaatgttattacagtcacaattatataataatgcaatatagatatcaagccaatagatttttaaaaattgga

SEQ ID NO: 58434 - DNA, 1591 bp, Homo sapiens
ttgtagatgttagccatctgagtgacttctcaattgaaagcaagtagaaaagtccttagacttccggaragacgtagtatgaattagtataaaaagtcagaataaagtcttctcttaaaggctgagtctgcctggaaaagaagtagcaacagaaaacacagcaatctttactactccacgtcctaccagcactgcccgcctctctctttgtattttttgctaatacaaatttaaaaattgcaaacttatatcggaaagctgtagatgcaaggcaaaattcatcttgacaatgtctcttactttatctacattaatagagagagggtcagaaagaagagagatcctgattccaactatccaaatgattatcttgccacttcccacttcctatggcaaacaaacagagctgcttcttttttctccttttctcacaagttcctttcttttctacttacccaaatcccacccagccttcttaactgagctcacatctcagtgattctattcttttcttatctagttcacatgttcaagttctacctctttgccaaattctgcgagcatttaaaatctgtagcttacaattcagaacttaatatatcatttactctttgttgttgtttcctgtatcttaatcctctttctcctcttaacaaaattgcaaataatacaaagctgtgtgagacagttaatcacagggaatcaaattacaagaagcaggagtaatgagtccaagataccatgctaaattttgatagcaacaaatgaaaagtctggccttggccaatgacaattgtgtgccatgaactatggagtgtcattaactgaattatgtgcacttcagatctttaaacaacaacaaaacgatacaattccgtgcttaggagcaaaaatggagttgcgtaggtaaaatagtgataaacatattcaaaatagtttgtatttaaaaactaggtctttcatttatttgtcattcagtcattaagcgtttagaatgacctgcaaatttctttacattagaatttaggaatttataggtggagagtgagttgtctctccactcaaggatctcgtacactcctgtgcaaactaaagactggtttacagtacaaggatcacacagtagagacatgttcaaactgctaggtaaaaagcaaaagctcaatattagtcataaatgggcaaattgtagtggataaatgctgtgtgcaaactgaggtggatttcaagatgcatagttctggaaacaataagggagatggtaatcctatggtccttaggcagtcaggccagaaaagggatgcttttagattctaaataacacgtattataaaaggaattaggatatgatgtactctgaaggtggccacatgaaattaaaatgtctggaaaatgaattgtgtaataaaagatgataaaagaagaaaagacataaagaagagataaagatatttaaatacttgaagggctcatgtaggaaaaaatatgtttatacttactctgaaaacatacatgggacaaatgggacttgctggaaaaatggtaaggaggcagaatttggctaaatatgaaggaaattattctaacagaa

SEQ ID NO: 58435 - DNA, 1591 bp, Homo sapiens
ttgtagatgttagccatctgagtgacttctcaattgaaagcaagtagaaaagtccttagacttccggagagacgtagtatgaattagtataaaaagtcagaataaagtcttctcttaaaggctgagtctgcctggaaaagaagtagcaacagaaaacacagcaatctttactactccacgtcctaccagcactgcccgcctctctctttgtattttttgctaatacaaatttaaaaattgcaaacttatatcggaaagctgtagatgcaaggcaaaattcatcttgacaatgtctcttactttatctacattaatagagagagggtcagaaagaagagagatcctgattccaactatccaaatgattatcttgccacttcccacttcctatggcaaacaaacagagctgcttcttttttctccttttytcacaagttcctttcttttctacttacccaaatcccacccagccttcttaactgagctcacatctcagtgattctattcttttcttatctagttcacatgttcaagttctacctctttgccaaattctgcgagcatttaaaatctgtagcttacaattcagaacttaatatatcatttactctttgttgttgtttcctgtatcttaatcctctttctcctcttaacaaaattgcaaataatacaaagctgtgtgagacagttaatcacagggaatcaaattacaagaagcaggagtaatgagtccaagataccatgctaaattttgatagcaacaaatgaaaagtctggccttggccaatgacaattgtgtgccatgaactatggagtgtcattaactgaattatgtgcacttcagatctttaaacaacaacaaaacgatacaattccgtgcttaggagcaaaaatggagttgcgtaggtaaaatagtgataaacatattcaaaatagtttgtatttaaaaactaggtctttcatttatttgtcattcagtcattaagcgtttagaatgacctgcaaatttctttacattagaatttaggaatttataggtggagagtgagttgtctctccactcaaggatctcgtacactcctgtgcaaactaaagactggtttacagtacaaggatcacacagtagagacatgttcaaactgctaggtaaaaagcaaaagctcaatattagtcataaatgggcaaattgtagtggataaatgctgtgtgcaaactgaggtggatttcaagatgcatagttctggaaacaataagggagatggtaatcctatggtccttaggcagtcaggccagaaaagggatgcttttagattctaaataacacgtattataaaaggaattaggatatgatgtactctgaaggtggccacatgaaattaaaatgtctggaaaatgaattgtgtaataaaagatgataaaagaagaaaagacataaagaagagataaagatatttaaatacttgaagggctcatgtaggaaaaaatatgtttatacttactctgaaaacatacatgggacaaatgggacttgctggaaaaatggtaaggaggcagaatttggctaaatatgaaggaaattattctaacagaa

SEQ ID NO: 58436 - DNA, 742 bp, Homo sapiens
ctatcatgagtaaagtggaaatagtggactgccttttctcatttccaaaatcaagtgaaggcttcaacatttatcactaagtataatatttcctataattccatgtagatactcttctcttcctgaagctttttaaaacattacaaatggaaatagattttgtcctatttcaaatttgctgagggctttgaaaaatcacaaattgagatataattttatcaaatactcttsctgcatctattgagataatcacatgatttttctgcttcattttataaatatggtggtttaaatctattgattttttagttgataaaccaatcttatattcctggaataaacccaacttgttcataatgtattatatttgtatgactcattggatttcttttgcttatattttgtttaggattttttaacttatgttcgtgacagagagtttactgatgttttctttttcttgtaatgtctctgacaggtttaaggatcagggttattttagcatcttaaaatatggctctaaaggctaccattatgtctatccatccatccatcgattcactaatcacacaaatattttttgagaggcaatatagcatagtggtttaaaatagagattctagacttcctacatttgaataaaaaaacttactgtaactatatgttatctatttctgtataacaaattttcacaaacttagcaacatgaagcaacacaaagttattatttcacagtttctgt

SEQ ID NO: 58437 - DNA, 1234 bp, Homo sapiens
tgccagggtgtataactacagcactacatgtctttttaaaaatattttttgtttgttttgtattcattacatcagttttttctctctcgctctctcttgtcccaccaccccctcagactcacacacacacagagtaattattgtcctcatgtttttttttcttttatttttttaaagagatgggtctctaatgttgctcaggctggtctcaaactcctgggctcaagcaatcctcccccgatcaacctcccaagtagctgggaccataggcatgagccaccattcctggcatgatcatcrttttaaagataggtagtgtaagtttcaaaaaggctaaatggcttgcttaaggtcacctaattattaagcaatgaagttggaattaaatcccaatcacggaccttatagacccttatcaggctgtctccaaagctgggacatgttttgggacacggatggtggaaagggaggcaaaggccactgcagaaataaaaaaaaaatgaaaaactataccatgcggacaaatgagaaggaagctggcaaggctggaatatagagggtgtagggcacacaaagtttaaaaagttataggacaaattaagaaggatctcaaatgccaaactgtagagctggtttttactctataactacactgtccattacagtccctacgcatggccatgtaggtagtctgaactggcatgggctttgggcataaattgacataggatttctaagacttaatgtgaaaaaaaacctcatgtaaaatacctgattagtaatttttatattaattcacattgacataatattttggatgtactggattagagaaaatatattattaaaattaattttacctttttttagatttattttttaatatggcttctaaaaatttaaaattacatttatggttcacattgtattcctattggtcactgatgggatgcattataaggcatggtgagggtaaggctgggactggctgctgctgggactaaactttccttacacacacacacacacacacacatacacacacacacacactctctctctctttctgtctctttctctctctctctttcttaaccccatattattattttattattattattttcaacctccagcctccttaggaataggccactcaggactctcatcccgctaggaaaaactctgaaataaaaataatttaaccaaactcttttgcaagaaataaggatgg

SEQ ID NO: 58438 - DNA, 1234 bp, Homo sapiens
tgccagggtgtataactacagcactacatgtctttttaaaaatattttttgtttgttttgtattcattacatcagttttttctctctcgctctctcttgtcccaccaccccctcagactcacacacacacagagtaattattgtcctcatgtttttttttcttttatttttttaaagagatgggtctctaatgttgctcaggctggtctcaaactcctgggctcaagcaatcctcccccgatcaacctcccaagtagctgggaccataggcatgagccaccattcctggcatgatcatcattttaaagataggtagtgtaagtttcaaaaaggctaaatggcttgcttaaggtcacctaattattaagcaatgaagttggaattaaatcccaatcacggaccttatagacccttatcaggctgtctccaaagctgggacatgttttgggacacggatggtggaaagggaggcaaaggccactgcagaaataaaaaaaaaatgaaaaactataccatgcggacaaatgagaaggaarctggcaaggctggaatatagagggtgtagggcacacaaagtttaaaaagttataggacaaattaagaaggatctcaaatgccaaactgtagagctggtttttactctataactacactgtccattacagtccctacgcatggccatgtaggtagtctgaactggcatgggctttgggcataaattgacataggatttctaagacttaatgtgaaaaaaaacctcatgtaaaatacctgattagtaatttttatattaattcacattgacataatattttggatgtactggattagagaaaatatattattaaaattaattttacctttttttagatttattttttaatatggcttctaaaaatttaaaattacatttatggttcacattgtattcctattggtcactgatgggatgcattataaggcatggtgagggtaaggctgggactggctgctgctgggactaaactttccttacacacacacacacacacacacatacacacacacacacactctctctctctttctgtctctttctctctctctctttcttaaccccatattattattttattattattattttcaacctccagcctccttaggaataggccactcaggactctcatcccgctaggaaaaactctgaaataaaaataatttaaccaaactcttttgcaagaaataaggatgg

SEQ ID NO: 58439 - DNA, 547 bp, Homo sapiens
tagtaaaagtttgccaaaggcttcatttcctgcatatatgtgccagacgtaaatgtctaagggtcaaatttccgatatggttttaatccagttctgaagagtacatggtttacttatttgaaatcgcctgtaygtataaaagaagaaactacattcacggtgtggagatccttctattgatgaattttagcagtggctatctcttttatttgactagtggtatttgtctggcattgtttgaaaatgcagatgtgaagacttctttcaaacagaagtaactcctctaagggttaaaggaagaaaaggcctcatgtaattccactgtcaccttctctaggatctaaagtacagccagtccccagtttaggatggcttgacttgactttattttatgattggtttatcaggatgtaatcccatcataagtcaaggagcatctgtacagtaaattgtcagaaatgtgccaccgctatttagaatgatggatgagtggcacaaaaataaacattatccaactgccctccacttaatgaaggcaaatttatag

SEQ ID NO: 58440 - DNA, 649 bp, Homo sapiens
aaaaatttttacacttcagtttctttctacgtctggatgtttgaatcagaggagctctaaaatcccctggagtttgaacttgtattgacttcctgtttcagggcctttgaacttaccattaccctggcagaagactccatctctccattatctgtgtggttggctccttcttgccatttaggtctcaatgtaaaagttatttccttagagaacgcttccctgaacactgtttctcatcctcctgtccctttctatcacatcactctattttattttctccattgctcttacatcaagctgatttttccttgtttatattcttgtttatttatttatttattcatttgccctacaaaaatacagtctttataagagaaaatacgttgtctgtcttaatcattgctctttctttcccatccaaaagagtgtctggtatatagtaggtactcaaaaaattattagggaaatgagtaaatgaatcagacctggttcttagatagaaacaaccaacaatgactggctaattaaacagaaactgaacgtattaygtaacacaattgccaatgaagtctggagagccagatttgagaaatggggagaatgaacggaagccatgcagccagaactcctacagccaaaattacgctgt

SEQ ID NO: 58441 - DNA, 1068 bp, Homo sapiens
ttgtgtgtgctttccatgtgacaaacacatcatacacacagtaacagcattcaattctcaaaaaataaaagtcctacaagggagtttctatccttcttataataaagaaaatgactgaataatttgcccaaggctttcaaacaggaatttgaactttggagtttctatctcaaaagcccaagttcttttagctacaccattattttgagttcttatgtctactttttccattttgtcagtaagtccattggttataacttaggatcagagtttggacagagactttacagtgtatctaggacaacatttccttttcatacacgaagaaataaaagcccaggaagtttactgttgacatgtctgaagtcacataatgaatgtcttccatagtcccacactgccamtttttcctctccgatgttggtggcctgcctccaagaggccctcagccctgctcctaatctttttgggccatagagaaaccaatgaccactgcataaatcaagactataaaggctaagagagggctcagagacttccctatgaggcaagctcatgcgttttagcaagtggacttcgttatataaaaagctgagttgctcgggtttctctgctttctggatcacagaggcattatggagacttaaacaaatcaggtgttcatctagtttacaatgctactgtgtctgcgaggaaaactttgccaaacaaggtttttacaaacaaaagctagaatagacacaatttcaccttcaaataaaaggacaggctgacatgaagtttaaacttaaattgccaaaggaaggaagctcacaattaaggtagctgttcctagcacttagtagtctaaggccaacagcatacaagcataacaaaccaacagtccccatgtggacagacaacactgagatttctgatacaattagtttccttttcacgaaagagtcagattcataattaaactctgtcccctcctgttcccattctgctgcacacatatttgattgcttcctaagggcctgagttagaaaccgggagacccaaaccacaagtccactgacctctggg

SEQ ID NO: 58442 - DNA, 1078 bp, Homo sapiens
atgtatagaatacaaacaggaaagcatgccagccagttaggggtttaataacacatgatttttattctcttgctctgaaaacttgtatcaaaaaaaagaatttaaagtaactcaagatttatgggcctcttgtgctttaaataagaaaaaaaaggtacccattaatttgctcagatatagcaggcttaatggttctatattttcaaaagtttttaagaatggtttctaacgtaggagagggaaaacatccaccatcccttttcagaatttaaatggagggcagtaaacattctttacacccaaaacctatggcagcagttcaaatttgaccaaggtaaatgtagaatagagatgttctaaacacagctaggactcagcaagtctaacacactaaaatcatatgattacattttaaaagaaaatgcacaaaaaccaaatagaaattttgagattttttttcatttgaaggtaatcttaatgctattaaattcacaaatgctaatttaaatacccaatcctatttatctaaaacacacattgcaaacacacaaattatctattctctccacatgtcagcgcccattcatatcatggtttggaaatggggagaatagattccccttaaactgcaagtcagcaggtgtttctttacagttaactttagcaaaattcatacaaaatagtaattaacaatgatcttctttacttgttaactcacaaggaaacaccttcgaaactgcattttgttaaagtttctgtactaaaatgtagaaaaactgaactacacaaatattgaaaagttaaaaattccttaattttttattcctggtaccactaccacaatttacagggcaatatacctgatgtaatgaaaagaaaaakaaaaagacaaagctacaacagataaaagacctcaggaatgtacatctaattgacactacattgcattaatcaatagctgcactttttgcaaactgtggctatgacagtcctgaacaagaagggtttcctgtttaagctgcagtaacttttctgactatggatcatcgttccttctgtggcagatttttacagttcc

SEQ ID NO: 58443 - DNA, 1646 bp, Homo sapiens
tgttcagggcaacaaagtcgaagatttgggggtttaaactcaggtctctgtagcttaaagcttactcccattttcactgcactacactgccccctagtatgaaggaatcttggaattttgttgttgttgttttgtttgtttgcttgtttgtttgtttttgagacagttttgctctgtcacccaggctggagtccagtagcatgatcatgactcactgcagccttgacctcctgggctcaagcaatcctcccacctcagccctccaagtagctgggaccacaggtgtgtgccaccacacctggctactttttttggagagatgggggtctcactgtgttgcccatgctggtctcaagctcctgggctcaagtgatcctcccacctgggcctcccaaaatgctggaattacagacacgagccacctcatctggcaaaatcttggattttagtagagagtttcttaaaacccagtacttcccataaatcaatttctaatggaatttcagggatcagcaaaggtaaacctacttggagatgaggagtccacccttccatctttctacacaagtgaccattctcctcacccaccascccacttctgcagagagggaaggagctgggccaaatcgcagaaatgtacccaccacctttgtgaggtctgcatgagttataggacatatggacaaacagaacccttttatattttaggtgggggggaaagggagactgaggaaggacatttattgcctgactgccattccaggaaggttctagatgcattcttaaaatgttttaattattcccaacacagtaaagaaactattatccctactttgtagagcaggaactgaacaccaaaaaaagattaaagaaaatgaaatgtaaagaatctccccaaccctatagcttcacaatagctttctgtcgttataagcagatttcacaaatcctagaaggaagcaagcactggctgaaggaagaagagtatcaaaaacactctttcacaatctaagtttgcagacaacttgaaagcaatgtccctgcactattaatagactgtaacctccccaaagtaagagaccatgtccctggcgtgtctgtactccacagaggagattcacggtgattgtttagttgaactaaggcagcgctggcccatgaactttctatgtaactcttcagagcatcccaggcatttctttgccagtagaggacactcaaagtttctagcaagttgatttccaaagtcataaactttctggacaatgctgtattcattaatcattgaaatgggatccatctttatctaatccctttctcctctcctaccaagtttcttggcagtttaaagcagatctggtaagtactgtacccaccacaaccactggattacatcccccatctggctttttactaagatttgtcatggtcaaatatgtggtattctattgagtgcgttagaaaattaagataaatgacaatagatttactctaacatcttttatactacaaacattatttgtaaaattctgcactagtctctagctaaattttctccagtcttccttatctagtgttaattctaagaaaccatttttcaataaatatttataagcacctactatgagatctgtactattctaagt

SEQ ID NO: 58444 - DNA, 1575 bp, Homo sapiens
atgatgatatacactgggtgctctctagttgtaccgaaaatcttctggtacaaatatggctgtaagctgagtttccccagtcctccccaacctgtgaatacaaacggaatcacactaataataagaacccaaattctattggctcttgtcgccacctagcagaacctcagcaccttataaaagaatttctcaagtgcttctggaagttgaggtgctctctgaagtcagttgctctctaaagtcaggtgaattcaggtgtgctcgtgaatactcccactctggcagggcatctcctatgactctctccagcatccatgtcaccagatactactatcccattacccacatgcactctctgccaggagacactgctggtcttctgccaccagaggtgctaaagatgtgtggtgggatagagacattgcctgagctctgcctaatgttgactaacatggacatgacaacccactcaaaggtaccaaactcatgatgtttctgtgactttgttctacaaaatcttagattttgtttgtggtttaatttttacaggcaacttgctcctcacggtaaccagacctctattactggtcagtggtgcctggctcttcctctcttcagtatctttggaggctcctcagtacctttcacaaatattttactttaggtgctggcccatgcatctattagatgtatgtacacatattcaacgcatactagtttcctctagagaaggtctctttaatcaagatttggggtttattattttgagagagataattttttgattacagcaagtcattatatttcttcactagttatataattttaccaaaataatttaaagtatgaaatcctactctcacatagtaaatgaatacctgaaaccaggcaaacagaaacacttatatttaatggtgtcataagtgatttgcaaaatattttaattcattggtaaccctttgggctcttactcaaaaggaaagaaaaagaaacttagaaattaataacatacacaagagttctgtttcacctgataatttttacctggctaaatgcaagtacaagaagtaattgatagtgggtctcaggctgtttttctctgctgagctctttrtttctatacacttattccccaacatgcacagtggttttctaactggttatcaatcttagcaatggcaggtagcctttccattctgctattgtttgaatgtgtcccccaaagttcacgtgttggaaacttaatccccaatgcaacaatgttgggaagtgggtcccaataagaagtgatttcggtcattatgagggctctgccctcataaatggattaatgttgttattctggcagtcggttagttattatgagagtgagttggatataaaagcaatttttgccccctcttgccctctagaaatctattccccttccaccttgcaccaggggatgacacagcaagaagacccttgcaagatgtcagctcctcaaccttggacttcccagcctccagaactgtaagaaataaatctctgtcctttataaattactcaggtattttgttacagcagcataaaatg

SEQ ID NO: 58445 - DNA, 1317 bp, Homo sapiens
attttcatcaacccctttctggttggggattacctattcctggaccaccccaccagtaaggaaatgcactttagcataattggtccagctgcatctctgagcagtattcaccacccagaaaatttaataaagtaagtcatgtcctcttcttctctctttggaacttctcttaattaaaattatgcctactgcaagataagaacaatggagaggtgagatttgggcagtggcccatcctgtgcatcattttctcattaaaaacttttagggaaaagctcaaatgtcttcacaattcagaattcattgaagcaatttggacatctcaatctcctttcctttgccttcatgggtatcatgcagggagaagaaaaatgagaaaaatgaatgatgagtgaataaacaatgctaaatccaagttaagaagaaggatatttaaacatgaaaggcacaagttgtgatgaaggaacgtgtgtaggtgaaattagccctgacttccaagtgctttgatcagtctgaggattggaaaacttctaagggcatgaaatacctgtgccagagtggcgtcctggaagggagacagtgattcaactccaggctgcctgtcagagatgttccagtctctcctcacttgtgatgcttctatagagttttcacatgagagcaggctgtcaccatttgggaagagaaggcatcctcttgctgactcctcctccctttgatgcctgtagaacttggccattaaaatctgccttgggctaaaactcagcaggcaagtttccagtcagagaacagctttgacaaattttaataaaatttaataaaacctagttctgattggcaatagaggatttgagttagggaaaagtttacctatgtrtttaggtagacatgtgggatggccacactttcactgtggaatgctacatagtagtaactctggcctgttggcattttgttcacaactgctggtgtctttgatccaagaatcacacggggaattgggagttttcttaggcattgttaaggcatttataatgtcctaggtttgggtgaattttgtaaacttcagtattgttctgtaccagctagctaaagaggtttaaaagctttaaacaaaaataaagggcaaaaggtatttcaaagtgtttatttaaagcgaggcatttggttgagtttggttttaaattaatagaataattgcattgtttggaaacacaaaaatgctttcttttaaaaacttaactttgttatatttatctgctctagaagattcttagtagttaaagaaggttggcttacttctgaatatgggtggca

SEQ ID NO: 58446 - DNA, 1570 bp, Homo sapiens
aagttttattaatcaaaatgctcagatccattgaagggaaatttcaacctctcatatttatttatttgaaaactgctctctttctaaagggtttgaggctgacagtttaaagtcctgattttattttaaaaagagtcacttaattaaamtttatcagaagctaagctaatacatttttaaatgttgagcataattgttttcccataattctaaaaatataaaaacaattttttaaaattaagagctttttctactttaaaagctaattagattatatatttggcttaatatcttattattgaaaaatttaattataaaaacctgttaattgctttatagttgtatgaaatataaaaatatgctaatttacattggctgtatttgctctcaataataaggacttagggaaggctaaaattatatttaagtattttagccaggcatggtggctcatgccggtaatccagaacttttggaggtcaaggcagacacatcatttgaggtcagaagttggagaccagcctgggcagcataacaagactttgtctatacaaaaaataaaataaaattttcactgggtgtgatagcatgcacttgtaacctcaggtacttgggaagctgaggagagggaatcacttgagcacaggagtccgaggctgcagtaagcaatgatcacaccactgcactccagcctgggcaatagagcaagatcccatctctaaaaaataaaaataaaataaaatttccaaagatataaagcatctttgaataacattgccttttcattgtacagtcttatagatgtcttaaaattttaaatataattaaagggattaatatctctattgtatcttcctgatcattctctctccgcaacaaaaatggacctacagagacacacagatacatacatatacacacatacactcacacacacacacaagaaaaaacagatgctatttcattgatgcatatattggtagactgtcacatatggtgtggtgtgttaattagttcattaatttggaaaactgccacaatactatgtatccatgtttacaattttacaaatatcttttataaactagattaaaaaacagcaatccattggaatacagaccattggaaggctagatttatgcacataaaagaaaatgtaaatgaaacactatattcaagattactgttaatcctttaccaaatattttcccatttttaaaacatgcaaataggaaaatttaactaaaagaagacaaattgtcataaagtaaaataaaatgagcatgtggctcgaggtaaattgtgccaatgggactaatttgacaagtttatttttatcaatttctgcttcaattactcaagccacatttctaatatgagtcaaataatgtgccagtaatttatgatacttatatcaaataacacatgaataagatatttaatgatcgataaaacataatatatttctactgaggtggatcaaaaactttcttattttttcttttcatatatatagaaattatttacaaagaagttaatgtaatagaaattgtgcataaagtcattagtt

SEQ ID NO: 58447 - DNA, 675 bp, Homo sapiens
ttgggtggatttgagcaacaaaagaatcagactcctagaacctctattttctatgttaacataattataatcatataggtatcatacagttgatagggattgccttaaaccctgcatgtaaattttccaggctgggtgtggtgactcacacctataatctcagcactttgggagggaggcaggaggatcacttgagctcaggagatcgagaccagcctgggcaacatagggagatcctgtctttacaaaatattaaaaattagctgggtgtggtgatgcacacctgtagtcccagttactgaggaggctgaagctgggaggatcattgagcctcaaggtccaggctgcagtgagctgtgatcaccactgtactccagcctgggtgacacagcaagatcctgtctcaaaaaatattttttttccagcacaggattggatttatgaaagacaataaatgtagtcatcatcctctcggccccaccatcctacttgtgaccagccaatttgttcttggaacaaactgaactgctatcsttaaattttgatggtaacagaaaactgtgtagctacagtggtctaggccagggcttccaagcctttcacagatcataaagcacagagacaatgatagtacctataagacacacatgagcctgtaagaaaatggctcgaatt

SEQ ID NO: 58448 - DNA, 1922 bp, Homo sapiens
tcctttgtatctcacacaaagcctatcccacccgaggaggagcctgagagaaagtcacttcaattcaattttggtaatttagagattttgcttggcacgcagtctccttccaatacttgtctctataaacattgatcttctctacctctctgagggtctctacccttggtatgtcgctgttcctcatcatttagtagctgggaaatataaaggcagaagtcctaaatctgtggcaactttagaacttctaaatagtagagccctggaggtagtagcacagttggagggaggtggctggacactctaagttgtgtctacatagtacttaacacaagagtgagaaggtgtcaggtgtgtgaatcaaagaatgggctactgataagtgacttagccctgaggaagggtaatgaatagtgaccaggctccaaagaaaatgtgcccagtgccctaatccttgggtctctgcttaacctcagcatgccttcagacacagaggaattgctttcagtgattgagttatcatcaatattctatctcagatggagggaaccaggatcttgaaaagacagaaaacttttatgactattattcttttgttcatgacatttatgtttctgaaatgcctctacttattctctctctcatgatccattgcaacccaactcaagtgcccccacctccttctataawgaattctctgttgctaccagacatattgagaatgatctcaatatacctggaactgcatagaaagcttggactgctttccttggctgtgtctttttaaataagtcgtatagctatattcttctggccttgagggacaggaaccctattacataacaaaaatgacaaaacaatgccaacaactagcatggcacaagcctatttatttcaatagagagaagcctagtggtttaaggtatacatcatctagcaaactaagctttcagtactgaagctttgaggcttcaagtggtttgaaaagtccagtgtacctagaaactattctgtgcttgggattaattggcttctagctcaagaccaaaaggtaggagacactggttgtaggactggttcgctcatcatcaagacatattctcagttacttcttgcagtcttggttctctcatctgtcagttgacacagagccaatcatacctaaaagaattattgtgaaaacaaaataaaataatggatatgaaaagcctttaaaagttgaaagcactaggcaaacccaaggcattatttggcattattgtaaatatgacaaaccaaatcttacgcagcagaggagattgcaattataaggatgggtggtcaatacttaagattcatgtatgatcaatgaaaccaactatctgtggaaatgacatccaccaaggaaaagcctgagtagttgaggaggtcacagggagatgaggacagctcatattcaatcaagggagaatattcatattgctgaaaaatagaactctgggagtttttttcataaagtgttggctaaagtttgatctgtgaaacaggtttttcagggacaaaaatgggtaaaatagatttgagttagacaaagtcaaatagaattttcactcactgtctttagaatgccaagtgactcttcaaaagggagagaggcagggatctttaatcttttcaagggcagtcacctggcaaaagctgaagctcaacccattgtattagatctaactgcagggagtatgtgtttatgatctgcttggagtttctgagatgagaaccaaaagacgaagacttgaatgatgtttctccagcactatgaaaatgaaagagtcaggtacagtggcatgcacctgcattccctactacttgagagactgaggtgggaggattttgagcccaggagtttgacaccagcacgggcaacatagtgagatgcagtctca

SEQ ID NO: 58449 - DNA, 1100 bp, Homo sapiens
taaaatatttcatatgattttcttaaaagtagatccttgaaatatttctcttaattcaggattgacttagcttcaaaaaagaagtcatttaataagatgttaattgttaaaacaaacaaataacatataatagaatcagagtaaatctaaaaggtaaagggccatttctaagctcccttaattccaacagaaacacaggctagacaatgccagaccagcgtgttagttaagggaaaactgtaaaatgcaaatgccatattcattacagaagaagggtggagactcttggctaaaagcccctaagaacaactttaatccagttgctgggaagtggcatttctaccctctcctggagaaacattgctagagtcaagatcagtcggttttgttctcattgtggtgtgatgtgccacatgttagttctaataacgaactgcctttaattagaaaaacaggacttaagtacccagcaagctcccatctgcagcccctatcaggaaaacagctggcaaacagctgtaacagcatgaagaccacagggaagaggcctcaatgtggctttgggaggcacttacagactgaggttgggaggttgctttacgaggcttcagagcaagaactgagggatcgtagagggatgataaactgagacaggctcctattgtacctgaatctcatgttattgtctctccggcttttgattctgctcaagtgtcctcaaacattatgtgcttttataggctcgtttcaaatggcaacatatttagcaggttaactctgtgcaacatttttagttatattttggccaacggggaaaaagtttcaactgcctttaaagattaaccagacatgtttcttctggctttgctaaagctcattaacaaggaagaaaataggacactyagtctttttgccaaatagaacataaaatgatttagtgagtggaaagtccctcaaattgcagagacaagacacatgcctgagactcaaattacatacagtgatttagacatgtcacctacatacgtcagtccattagcactcaatttgtaatcttggaaagtaccagctttttaaaggagaagttctttggttcatct

SEQ ID NO: 58450 - DNA, 760 bp, Homo sapiens
gcctctaactctaggccacaaatcacaaacattaatccacttgtctttgattaattgtctactttgttattcaggcattccatcaacacaaatcattaagaattctttaacaatttcctccttgtgtttaatctgcttattaaatgtgtttacaattattcttttagtttcatcatattactggcttattgcatttgactttactgatttatggtttcttcctaaagggcttctccctgttcaagacctgttacattaaatgctttcagatataataaacctgttcatacattgggtctttattgaataactttgcagttactatggagtgactggaaatgtgtagtggaaaacacccttctcatattatctgaatatctcattgttgcattacacatattagaggcttaatgattttttttttttttttttttttggatatggagtcctactgtgtttcccagggttgaagacagtggcacgatctcggcttactgcaacctctgactcctgggttcaagcgagtctcctgcctcagcctcctgagttgctgggattacaggcatgggctaccatgtgcccacctaatttttttgtatttttagtagagacggggttttaccatgttggccaggctagtcttgaacttctgacttcgtgatctgcccaccttggcctcccaacgtgctgggattacaggcgtgagccaccrcacctggccaaggcttaataattataagatataatttaagtatactag

SEQ ID NO: 58451 - DNA, 697 bp, Homo sapiens
catcgttgtggtataaattcacacgattatctttcaaaaatttcaagacctgtcacagaagttctaatactcaaaaatcacaaaattatatatccatatgttaaattacgtatacayacacaggatagatacatgagctaatatgtatcatttttatattccattctaagttccaaaagaatctttcaaagcacagattgcttttttggaagcagcaaggagaatttttacttcctgctgaccagcactattttatttaaaggcaactgtttgtggaccttaggaatcagtcttctcttgaccacctagtataataattgctgaaaatgggctgaaacaatcatattacactgtttacatctgtttggatgctcctcttacctttcatctacagaaatgttgtactcttcgctattgctgtgtggaggaggatgtgctgggggaggaggaagcaggtctgcccagttcatgccaccctgttttggtaccttgggtgttcttgcccctttcttgtgcccctgactccctagaaaggaaataaaatagaagccattgatctctggcctttaaactttttccattagtcacaagttaattattttttgtaaatatgattttataattcatttatatatacagagataaacatgctttttcattaattttaaacagaactttgtacaagagaacatgcaag

SEQ ID NO: 58452 - DNA, 659 bp, Homo sapiens
actttatatgctttattttagctgtacacttgttacaaatatttgtgtgcctctgcttctatgctgtattggaaattctttgaggacagagactcttagtgatctttgtgtctccagagggccaagtacaactgawctattaaaaataataacaattggtaaattgtataaaatatacgtggtgtctatcaagatcctgtatttggacacagattgtgaaatttaaactattatagagatatttccaaatatctgtacacgtggcatcatattgactgtgatggttaatactgagtgtcaacttgattggattaaaggatgcaaagtattattcttgggtgtgtctgtgagggtggtgccaaaggagattaacatttgaatcagtggactgggaaaagcagacccaccctcaatctgggtggggacaatctaatcagctgccagcatggccagaataaaagcaggcaggagaacatggagagattagactggcttagcctcccagcctgcatctttctcccatgctggatgcttccttccctcaaacattggaccccaagttcttcagctttggtacttggactggcttccttgctcctcagcttgcagacagcctattgtgggagcttgtgatcgtgtgagttaatgctccttaataa

SEQ ID NO: 58453 - DNA, 659 bp, Homo sapiens
actttatatgctttattttagctgtacacttgttacaaatatttgtgtgcctctgcttctatgctgtattggaaattctttgaggacagagactcttagtgatctttgtgtctccagagggccaagtacaactgaactattaaaaataataacaattggtaaattgtataaaatatacgtggtgtctatcaagatcctgtatttggacmcagattgtgaaatttaaactattatagagatatttccaaatatctgtacacgtggcatcatattgactgtgatggttaatactgagtgtcaacttgattggattaaaggatgcaaagtattattcttgggtgtgtctgtgagggtggtgccaaaggagattaacatttgaatcagtggactgggaaaagcagacccaccctcaatctgggtggggacaatctaatcagctgccagcatggccagaataaaagcaggcaggagaacatggagagattagactggcttagcctcccagcctgcatctttctcccatgctggatgcttccttccctcaaacattggaccccaagttcttcagctttggtacttggactggcttccttgctcctcagcttgcagacagcctattgtgggagcttgtgatcgtgtgagttaatgctccttaataa

SEQ ID NO: 58454 - DNA, 1161 bp, Homo sapiens
tcaggaggggaggacttgatggcagccaagtttagaaactatctccacaccttctaagaaattatttgcctccttgcccaagatgagcaaacatttcagccagacaaaatgacattaacttccttaatttcattagttatcataatggaaaatggtgaaytatgcaactattttgttttgtatagtaaacttttggcccatttttaaattagtcactaatttcatcaatctatatttcttaatttttactctcaaccttacaagatgtttatactttttaaaatgtaaagtaaaactcatctctgaagaatgatttctaacagtgttttccaaaggagctaattggaagcaagaatattgattttaatgttctgaaaaattagtggaactttgggttttagaaaggttagtctatacctctaagaagctaaagagctaatactggagtctttccctttaggcctttttcaagatcagcattcaaagcaattttatcatattgtgaaacacattattctttaagactgttcattgtgtgggttgataaaaccagaattcatttgttttataaaaacatatttgaccttactctgctctcattattctcaacaatacaaggatttaaaattattattctagattgaggtctttccattggaatctcagagccttttatacaggttacgctcaaaatcatgtctaaataaatatacagtttgttttcatgttcatctctgaaacaatttttaatgtttccccaaaagaaggaagccatataacagaatatttctctggcaccagacagagccccctgggtttaaaattctgcttataagttataaggtatatggcctttaccaagataattaagagtaagtcatagtgtactcatttgtagaatgcgaataagctcatccgcatatatggttgttggaataattaaataaatgttgaatgggacataaccatcaatgaatggtggcttctaatattaagctttaagacaagagttttgaataaatggcctatttttaattttttgcttgccaaatatgtaacgttaaacagtaattgtttcaattttattaaatatcaataaaatagaaacttttattttctgtttcattagaagaggtgtactcacagatgactagtttccca

SEQ ID NO: 58455 - DNA, 581 bp, Homo sapiens
agtggacagtagccacatacagaaattgcacccaccttccaactctgtcctataggcattcattaagtgccattagaaaactgaatagggctgggggcctggtgagggctgagggcagggtaggcaattccatcccccacaaaataggaagcagcggctgtcaaggctgctggaggggcaagagatctgggagaaatcacctcctgatgcccaagcatgcagggcctaccaaacctggaggcagggccasagaaatgagagaaacccttcacgaactctccaggccttcaccaagtctaccacttcagccctgctgagctgggcatgtagcagcaggtggaagtaagtccccaaggcacaggaagctaagggcagtactggcaagcaggaaatacccagcctatctaccaggcaggagccccctagaagcatgattagatctcccatggattgaaagctggtagtggactgtaaagcacaaaaggatatctacagtctctgagtgctcagatctccagcctggcagaaaagaaggtcctaattttgacctcacatcacgtgaaggcattggtgaattgaat

SEQ ID NO: 58456 - DNA, 1071 bp, Homo sapiens
gacaagtgagaagacaaggagagaggcctcaggagaagctcaaacctgccaacaccttgatcttagattcagcctccaaaatgctgaaaaaataaacttttgttaaggcacccagtctgtagtattctgttaaatcagctctaacagagtaatacaactaccaaaaatctcccttttatttcaccactcttggattacttatccacagtgcttttaggctgatcttcccaaaaggtaatttgggtaaattctctcctgagctcaaaacatttcatgcctatctctgtctactggataactttcaaagtacctggcatggcacagagagctctatggttcctgcttgtctttccagtgtcatttcttgccaaacataggcacacagtcagtaatctagacagacactcacttgcagttcttctaatctgccatgctgtttcataaaacatatggttgcctcttcatagactaaccccttccccagaccacctaacaaactgctactcatattcagataacgcacacaaaggtcttctcaatgaaacatttgaccttctaggaccacgctaaccatatgatttttaatactattgctgtatagaccttatttatacttccagtacatttgattttaacaatgtgtttacaactactcccttttgaaattgtagtctctttgaagatggatacttttgtatattctcagtgcttgcacatagattgctcaatkattcatagaaataaatagatatgtgaaatatccatttgtccataaccggctccagattatccctaatccattagagaccacattgggaaaaaatacttttttaaaaatgaaagactgctgagattagcatgtttgggaagccaagtaagcaaggagcaaattataggttattataattccatatggatctccctagactctcaatttctgtattaattactataatcacaacacattcatactaaagctcactttattatatctttcatttatttattcattatcatatcaaccatattgctgattcctaaaaagaggacatgttgtgtaatgaagaagca

SEQ ID NO: 58457 - DNA, 540 bp, Homo sapiens
tttcttcacccttcatatggttgtactgatgaactaaagaatataatccatggtaggaaacttcccgtgggcctttgctactaaaattacctaagttacccctgactcctctattggaaaatgtattgccaactcagtgaaaatcttatgtcataggcagttaagcagtttttttttyccctattttatcatgggcagagaccaatttggagatacatacatttgagtcacaaacagcactcccagcctgagttattcatgcccaaattcctcaatgtctaataacaaaaatgtctcttctcattaggaatgtcagaaacagagttttcccctgggagtctaaataaaatcacacatctggattggaaatttaaaaaaattgtccagatacttctacatagttggaagtttagcataatacaaacatttagagtgagcttttcccctccagtcacagagttattcctgttcctttgtagataaatgattaaatgctattacaaggtagaaactccaattgtgaagatgaactctgaacta

SEQ ID NO: 58458 - DNA, 1291 bp, Homo sapiens
tgtagcaaaataattaacccatagtacatgtcttgggctcgataagcaatgaaaaggttgatttttatgtgcataaacacctctgggttgcttttgagtgtgtatgtaagtagagagtcatagaatgtcaggtaatctattctactaaaaaaattttcttttaagtaacaaaaggacccttactgtgcttaggctataaccatctaaatgtgtgctactagtctgggtaatattttagttataatcccatatgttagaattcaatgtctgtcacttgtcagatttttttctgtagaatgcccaagaaatctttaagctgtgaacatgtagcatcagaacgtcagtgttgaatgagcctctgtgtgcaaagccctgccttatatgccatgtgtgaggagtgggcagggcaggagaaagagcagacaccaaatagaccatcacaagaaaggtttttttttgcttcaggagtttaccacattgctgggtgaacaggaaatgcacacaaacccatcatctctcaacacctatggtatatatggttgtttactcattcttagcttttcagtaaccccaaagaaggtgttttgaggctgttactatttgttttcyggaatcaaggaaagataaatgaagtttccttaatggaactggtatctatctgcatgactgtattttacacacacacacacacacacacacacacacacacacgcacacacggttttttttggttaaggtggatcccctttggccttggccttggtttgtcacattctttcacacaaacctgactactaaagatatcaggtttttctgacagctcctggcacccaacagctttcagcaggcgtggtttcaatttatatttagtctcttagacgcccttagcaggcttattcgcaccatgaggtgaatgagggtggaatggccaggccataaatcatcttcctgaacatgttctcaaagagtcacttctaaaggagcaggatcaggcgacctgtgtactactttctactaacaagttcaaagctcttgtagacaaaggccaattgatctcagcacactttctctttggaggaagatagggtatcccatttagagagagggaaactgagacacagaggtgaagttactttcctgaggtcatggggagctcgtggcagaaaggaatagaagcttccatctggctggcttctctgttacagccccctgcctcagcttgggtacagtgaagctaattttgattcagatcggattcccctgatctactctttatccaacaatgggagtg

SEQ ID NO: 58459 - DNA, 1291 bp, Homo sapiens
tgtagcaaaataattaacccatagtacatgtcttgggctcgataagcaatgaaaaggttgatttttatgtgcataaacacctctgggttgcttttgagtgtgtatgtaagtagagagtcatagaatgtcaggtaatctattctactaaaaaaattttcttttaagtaacaaaaggacccttactgtgcttaggctataaccatctaaatgtgtgctactagtctgggtaatattttagttataatcccatatgttagaattcaatgtctgtcacttgtcagatttttttctgtagaatgcccaagaaatctttaagctgtgaacatgtagcatcagaacgtcagtgttgaatgagcctctgtgtgcaaagccctgccttatatgccatgtgtgaggagtgggcagggcaggagaaagagcagacaccaaatagaccatcacaagaaaggtttttttttgcttcaggagtttaccacattgctgggtgaacaggaaatgcacacaaacccatcatctctcaacacctatggtatatatggttgtttactcattcttagcttttcagtaaccccaaagaaggtgttttgaggctgttactatttgttttctggaatcaaggaaagataaatgaagtttccttaatggaactggtatctayctgcatgactgtattttacacacacacacacacacacacacacacacacacacgcacacacggttttttttggttaaggtggatcccctttggccttggccttggtttgtcacattctttcacacaaacctgactactaaagatatcaggtttttctgacagctcctggcacccaacagctttcagcaggcgtggtttcaatttatatttagtctcttagacgcccttagcaggcttattcgcaccatgaggtgaatgagggtggaatggccaggccataaatcatcttcctgaacatgttctcaaagagtcacttctaaaggagcaggatcaggcgacctgtgtactactttctactaacaagttcaaagctcttgtagacaaaggccaattgatctcagcacactttctctttggaggaagatagggtatcccatttagagagagggaaactgagacacagaggtgaagttactttcctgaggtcatggggagctcgtggcagaaaggaatagaagcttccatctggctggcttctctgttacagccccctgcctcagcttgggtacagtgaagctaattttgattcagatcggattcccctgatctactctttatccaacaatgggagtg

SEQ ID NO: 58460 - DNA, 1291 bp, Homo sapiens
tgtagcaaaataattaacccatagtacatgtcttgggctcgataagcaatgaaaaggttgatttttatgtgcataaacacctctgggttgcttttgagtgtgtatgtaagtagagagtcatagaatgtcaggtaatctattctactaaaaaaattttcttttaagtaacaaaaggacccttactgtgcttaggctataaccatctaaatgtgtgctactagtctgggtaatattttagttataatcccatatgttagaattcaatgtctgtcacttgtcagatttttttctgtagaatgcccaagaaatctttaagctgtgaacatgtagcatcagaacgtcagtgttgaatgagcctctgtgtgcaaagccctgccttatatgccatgtgtgaggagtgggcagggcaggagaaagagcagacaccaaatagaccatcacaagaaaggtttttttttgcttcaggagtttaccacattgctgggtgaacaggaaatgcacacaaacccatcatctctcaacacctatggtatatatggttgtttactcattcttagcttttcagtaaccccaaagaaggtgttttgaggctgttactatttgttttctggaatcaaggaaagataaatgaagtttccttaatggaactggtatctatctgcatgactgtattttacacacacacacacacacacacacacacacacacacgcacacamggttttttttggttaaggtggatcccctttggccttggccttggtttgtcacattctttcacacaaacctgactactaaagatatcaggtttttctgacagctcctggcacccaacagctttcagcaggcgtggtttcaatttatatttagtctcttagacgcccttagcaggcttattcgcaccatgaggtgaatgagggtggaatggccaggccataaatcatcttcctgaacatgttctcaaagagtcacttctaaaggagcaggatcaggcgacctgtgtactactttctactaacaagttcaaagctcttgtagacaaaggccaattgatctcagcacactttctctttggaggaagatagggtatcccatttagagagagggaaactgagacacagaggtgaagttactttcctgaggtcatggggagctcgtggcagaaaggaatagaagcttccatctggctggcttctctgttacagccccctgcctcagcttgggtacagtgaagctaattttgattcagatcggattcccctgatctactctttatccaacaatgggagtg

SEQ ID NO: 58461 - DNA, 547 bp, Homo sapiens
cttttttgattactagtgccccayctggtataaagtgtttgcatcttttatactgtattacatgtctgttgagaagcctgatatttatctataaacccatcttaactatgaactaagataacttaaaatggaaaactcaaaatggtttcttgtttaaagctttattttgttccattctgtcgtaacatgcagaggagtaagaagaggaaatagaatgctgctgacaattctgcgagcattgagtgacatgctgagtcaccagagagaacagaatttgcaaagtaatgtgtcacccctgggggctcattgggcattgctactctgccttgggcatcactgactagacagcattatttgacccattttatgataacccgtatttaccttaaataatccattctgtgatctttcaatggaaaacatactgcgatagaagaatgaagacatgcattagtttcagttgggagagggcaacaccttaagtgtttctgcagtttctggtctggtaaatgtgtcatggagtttatttttcaaaaagcgacacata

SEQ ID NO: 58462 - DNA, 791 bp, Homo sapiens
tttcccccttggtgctgttcccatgaaagtgagatctctcatgagatctggtcattcaaaagtgtgtagcacctgcctcctctctctcttggtcttgctcctgccatctaagaagccttctcccactttgcctttgccattagtaaaaggtccctgaggcctccccagaagcagatgtcactatgcttctagtacagcctgcagaagtgtgagccaattggaccttttttctttataaattaccctgtctcrggtatttctttatagcagtgcaagaacagactaatacaattgatacaatatcaattattctatagcatcaaatcctccataataaaacatttttaatgcaattactagctttcctttcctaagaaaacatgcaaaatggttgaaacacattagacacctaaggaaataagaagtttgagttttctcagttaagtgctgttttgtactcaagtatgttctcaatcatcatctaagtaaaggattccttctagctcttgctttttcctaagtcacaaggatgaataactgaaataatattttttaaaagttatttgtatatgtatacatgtatattcatatacatatatgtatacacatgtacatgtatattcatatatatatacacatatatgtatatgtatatatatccaatcctccatgtgatgtgaaggcctgactatagaatgcacctgacttgggcaatgatgattacagagtaccttcattggtgtttcactacaaactacaaagaaaatatacagttttccagaaataacttt

SEQ ID NO: 58463 - DNA, 791 bp, Homo sapiens
tttcccccttggtgctgttcccatgaaagtgagatctctcatgagatctggtcattcaaaagtgtgtagcacctgcctcctctctctcttggtcttgctcctgccatctaagaagccttctcccactttgcctttgccattagtaaaaggtccctgaggcctccccagaagcagatgtcactatgcttctagtacagcctgcagaagtgtgagccaattggaccttttttctttataaattaccctgtctcgggtatttctttatagcagtgcaagaacagactaatacaattgatacaatatcaattattctatagcatcaaatcctccataataaaacatttttaatgcaattactagctttcctttcctaagaaaacatgcaaaatggttgaaacacattagacacctaaggaaataagaagtttgagttttctcagttaagtgctgttttgtactcaagtatgttctcaatcatcatctaagtaaaggattccttctagctcttgctttttcctaagtcacaaggatgaataactgaaataatattttttaaaagttatttgtatatgtatacatgtatattcatatacatatatgtatacacatgtacatgtatattcatatatatatacacrtatatgtatatgtatatatatccaatcctccatgtgatgtgaaggcctgactatagaatgcacctgacttgggcaatgatgattacagagtaccttcattggtgtttcactacaaactacaaagaaaatatacagttttccagaaataacttt

SEQ ID NO: 58464 - DNA, 791 bp, Homo sapiens
tttcccccttggtgctgttcccatgaaagtgagatctctcatgagatctggtcattcaaaagtgtgtagcacctgcctcctctctctcttggtcttgctcctgccatctaagaagccttctcccactttgcctttgccattagtaaaaggtccctgaggcctccccagaagcagatgtcactatgcttctagtacagcctgcagaagtgtgagccaattggaccttttttctttataaattaccctgtctcgggtatttctttatagcagtgcaagaacagactaatacaattgatacaatatcaattattctatagcatcaaatcctccataataaaacatttttaatgcaattactagctttcctttcctaagaaaacatgcaaaatggttgaaacacattagacacctaaggaaataagaagtttgagttttctcagttaagtgctgttttgtactcaagtatgttctcaatcatcatctaagtaaaggattccttctagctcttgctttttcctaagtcacaaggatgaataactgaaataatattttttaaaagttatttgtatatgtatacatgtatattcatatacatatatgtatacacatgtacatgtatattcatatatatatacacatatatgtatatgtatatatatccaatcctccatgtgatgtgaaggcctgactatagaatgcacctgacttgggcaatgatgattacagagtaccttcaytggtgtttcactacaaactacaaagaaaatatacagttttccagaaataacttt

SEQ ID NO: 58465 - DNA, 1202 bp, Homo sapiens
ggattcatgaaatttgtctccctaaacaatgtcatwaatctatgtaagaatctatgtaagaacaatgtcattaatctatgtcattaatctatgtaagaataaaacatgtaagacatgtttcatgaaagaaacagctgtcttctgtgcaaatgataggactgcatacatcactaagagatcctgtttgttaatcagggccagaagtaatcctaacatagcaagaaatgaccaggaaagctttgttggtgatcctagacttctgctttatctgtgccttgaagttgtgtatccttgaaactatagtcatgcatcacttaacgtcagggatacagtctaaggaatgtgttgttaggcaatttcattgttgtgcaaacatcatagagtgcacttacacaaacctagctggtttcgcctacttactacatacctagaatatatggtacagcctattgctcctagactacaaactggtacagtatgaaactatactgaatactgtaggcaattataacaccatggttaagcatttgtgtacctaaacatatctaaacatagaaaaggtactgtaaaaacacagtgtcctaatcttagggggccaccgacatatgtgcggttggacattgactgaactgtcattaggcaatgcatggctatattagtaaaccttgctactgtgtaagatctctgatccatgtgaggctgatttgatcatctgatcctttctgttatccaatgcccttagcaaattagttaatattttggtcatcagtcctctcatctgtaaaatgggaaaagttatggttatctctcataattgttgaaaagaataaaccagataagatacagaaagcacctaatgcacagcaaaggacaataaccgtcatttatattctctacctctgaccctccactaatgaaatgacattttcaactttatatgcggagccaccagtatttatttactttattaataaagtatcttgagagagagagagagagaaaggtgccaattacacaaatgagtggaacaatgtcaactctctttgacaaagagattacaaaaactcagtggagtgccaattataaacattctttttttctctaaagaaaaaaccctgaatcataccaacaagttttaagactttttaaaattattaaagtggatttaaaattattaaagtggatttctggattaaaacttt

SEQ ID NO: 58466 - DNA, 1202 bp, Homo sapiens
ggattcatgaaatttgtctccctaaacaatgtcattaatctatgtaagaatctatgtaagaacaatgtcattaatctatgtcattaatctatgtaagaataaaacatgtaagacatgtttcatgaaagaaacagctgtcttctgtgcaaatgataggactgcatacatcactaagagatcctgtttgttaatcagggccagaagtaatcctaacatagcaagaaatgaccaggaaagctttgttggtgatcctagacttctgctttatctgtgccttgaagttgtgtatccttgaaactatagtcatgcatcacttaacgtcagggatacagtctaaggaatgtgttgttaggcaatttcattgttgtgcaaacatcatagagtgcacttacacaaacctagctggtttcgcctacttactacatacctagaatatatggtacagcctattgctcctagactacaaactggtacagtatgaaactatactgaatactgtaggcaattataacaccatggttaagcatttgtgtacctaaacatatctaaacatagaaaaggtactgtaaaaacacagtgtcctaatcttagggggccaccgacatatgtgcggttggacattgactgaactgtcattaggcaatgcatggctatattagtaaaccttgctactgtgtaagatctctgatccatgtgaggctgatttgatcatctgatcctttctgttatccaatgcccttagcaaattagttaatattttggycatcagtcctctcatctgtaaaatgggaaaagttatggttatctctcataattgttgaaaagaataaaccagataagatacagaaagcacctaatgcacagcaaaggacaataaccgtcatttatattctctacctctgaccctccactaatgaaatgacattttcaactttatatgcggagccaccagtatttatttactttattaataaagtatcttgagagagagagagagagaaaggtgccaattacacaaatgagtggaacaatgtcaactctctttgacaaagagattacaaaaactcagtggagtgccaattataaacattctttttttctctaaagaaaaaaccctgaatcataccaacaagttttaagactttttaaaattattaaagtggatttaaaattattaaagtggatttctggattaaaacttt

SEQ ID NO: 58467 - DNA, 1202 bp, Homo sapiens
ggattcatgaaatttgtctccctaaacaatgtcattaatctatgtaagaatctatgtaagaacaatgtcattaatctatgtcattaatctatgtaagaataaaacatgtaagacatgtttcatgaaagaaacagctgtcttctgtgcaaatgataggactgcatacatcactaagagatcctgtttgttaatcagggccagaagtaatcctaacatagcaagaaatgaccaggaaagctttgttggtgatcctagacttctgctttatctgtgccttgaagttgtgtatccttgaaactatagtcatgcatcacttaacgtcagggatacagtctaaggaatgtgttgttaggcaatttcattgttgtgcaaacatcatagagtgcacttacacaaacctagctggtttcgcctacttactacatacctagaatatatggtacagcctattgctcctagactacaaactggtacagtatgaaactatactgaatactgtaggcaattataacaccatggttaagcatttgtgtacctaaacatatctaaacatagaaaaggtactgtaaaaacacagtgtcctaatcttagggggccaccgacatatgtgcggttggacattgactgaactgtcattaggcaatgcatggctatattagtaaaccttgctactgtgtaagatctctgatccatgtgaggctgatttgatcatctgatcctttctgttatccaatgcccttagcaaattagttaatattttggtcatcagtcctctcatctgtaaaatgggaaaagttatggttatctctcataaytgttgaaaagaataaaccagataagatacagaaagcacctaatgcacagcaaaggacaataaccgtcatttatattctctacctctgaccctccactaatgaaatgacattttcaactttatatgcggagccaccagtatttatttactttattaataaagtatcttgagagagagagagagagaaaggtgccaattacacaaatgagtggaacaatgtcaactctctttgacaaagagattacaaaaactcagtggagtgccaattataaacattctttttttctctaaagaaaaaaccctgaatcataccaacaagttttaagactttttaaaattattaaagtggatttaaaattattaaagtggatttctggattaaaacttt

SEQ ID NO: 58468 - DNA, 748 bp, Homo sapiens
gcatatcttgcagggctaatgagatttcctgagttgtctaggatgtatacatacactactcaggttttcaatagttttggggtaagaggtggcytttagttacatgaaaagttttaatggtaatttctgagacttggagcacctgtcacccaagcagtgtacactgtacccaatgtgtagtcttttatacctaaccccactcccacacttccccgagtccccaaagtccattatatcattcttatgccttttcatcctcatagcttagctcccatttataaatgagaacataggatatttggttttccatttctgagttactttgcttagaataatggtctccaactccatccaggttgctgcaaatgctattattttgttcctttttatggctgagtagtatttcatggttatatatatatatcgcattttctttatccactcattggtagatggggatttaggctggttccatattttggcaattgagatttgtgcttctataaacttgcatgtgcaagtgtcttttttcatataaggacttattttcctctgggtagatacctagtcatgggattgctggatttaatggtagttctactttagttctttaaggaatctccatagtgttttccattgtggttctactagttcacattttcaccagcagtgtagaagtgttcccttttcaccacatccacaccaacatctgttatttttttattttttaattatggtcattcttgca

SEQ ID NO: 58469 - DNA, 748 bp, Homo sapiens
gcatatcttgcagggctaatgagatttcctgagttgtctaggatgtatacatacactactcaggttttcaatagttttggggtaagaggtggcctttagttacatgaaaagttttaatggtaatttctgagacttggagcacctgtcrcccaagcagtgtacactgtacccaatgtgtagtcttttatacctaaccccactcccacacttccccgagtccccaaagtccattatatcattcttatgccttttcatcctcatagcttagctcccatttataaatgagaacataggatatttggttttccatttctgagttactttgcttagaataatggtctccaactccatccaggttgctgcaaatgctattattttgttcctttttatggctgagtagtatttcatggttatatatatatatcgcattttctttatccactcattggtagatggggatttaggctggttccatattttggcaattgagatttgtgcttctataaacttgcatgtgcaagtgtcttttttcatataaggacttattttcctctgggtagatacctagtcatgggattgctggatttaatggtagttctactttagttctttaaggaatctccatagtgttttccattgtggttctactagttcacattttcaccagcagtgtagaagtgttcccttttcaccacatccacaccaacatctgttatttttttattttttaattatggtcattcttgca

SEQ ID NO: 58470 - DNA, 748 bp, Homo sapiens
gcatatcttgcagggctaatgagatttcctgagttgtctaggatgtatacatacactactcaggttttcaatagttttggggtaagaggtggcctttagttacatgaaaagttttaatggtaatttctgagacttggagcacctgtcacccaagcagtgtacactgtacccaatgtgtagtcttttatacctaaccccactcccacacttccccgagtccccaaagtccattatatcattcttatgccttttcatcctcatagcttagctcccatttataaatgagaacataggatatttggttttccatttctgagttactttgcttagaataatggtctccaactccatccaggttgctgcaaatgctattattttgttcctttttatggctgagtagtatttcatggttatatatrtatatcgcattttctttatccactcattggtagatggggatttaggctggttccatattttggcaattgagatttgtgcttctataaacttgcatgtgcaagtgtcttttttcatataaggacttattttcctctgggtagatacctagtcatgggattgctggatttaatggtagttctactttagttctttaaggaatctccatagtgttttccattgtggttctactagttcacattttcaccagcagtgtagaagtgttcccttttcaccacatccacaccaacatctgttatttttttattttttaattatggtcattcttgca

SEQ ID NO: 58471 - DNA, 1677 bp, Homo sapiens
  misc_feature (1)...(1677): n = A,T,C or G
ccttcatatgtataggatgcacttgcagccttggaaactccaggacgtcccagccaacagaaaaggaaaccgagtacgccactctcagaagttattgtcaaaaacttgcaacttgctttggcaaatagctctcgaaatgctgtcgctctttctgccagccctcaactgaaagaggcccagtcagagaaggtaggattagttctcttattaaaaggaagttttagataacatttcaaacaataatgactgatctgtttcttttattttccatggacaggaagaagccccaaagccacttcacaaagtagtggtatgtgttagtaaaaaactcagtaagaagcagagtgaactaaatgggatcgcagcctctctaggagcagattacaggtagttggcacatctttctgtttcatggtgatatgactgaaatttataaggaaacctaaagctattgtgagcatctacaagaatacatttattttgtttcatgcatctttatctacaaaatctctccagttgatttttaatttaccacatctgttgaaaatagcctctcacrtatcaattcactcttatatgtatataatgtatattttttagggtatgcacaacaaatattggagagcctattttatgccactaactattctagaaacctgggatccatgaaggatcagtatagtctaaaagaatccctgtgttcaaggagtttagagtctattaatagtaatacatctggatctgagattaagtttatttttactagtgatttttcagattagagccctctgggagtagtactaagtactctggcagccctcctttattaagatagtcttttttgagcatgttttcattatctttttttttttttaaactttggagacttagatgtcangattttcttcagtcaacctgacagcttaagctgaaaacagatctctagcacaaatggcatcagtatccagaattgagaatctcttacctatttcagccagtcctgagttgactgtactcctccactagctgtaatgcttgctttgttgataacttgtgttcagccattcatagatatcataagaatttgtttaacaaatgatgaaccattgcaggaatatgattagtttcatcttcccctttggtaactcttatttcagtttgttttctatttgataaagaaattaggacaggaaaatataggagtaaaattgatctgtaatacatataagcatcttagtgtttggtacatccatttgaaatagtgaagctcttctacggtatatttgtattacctattataaattgttaggtaatcttatctgttattatctaattacctattatgttacctattgccagttgctgagcattatctcgtttcattctcatagtagccctacaaggggtgtgtgtatatttttttttcctcaaaattgaatgtttccttgtttattctgttttgatgtagacatgatataagactttcaagggaacatataggatgtatgtttttatatgattttaaatgccagtcctctcagtataaaaaatagaatttattactgaaattcctaaacagaatttaaccattgcattgcattaaagtttatattaaatcttttcctgaaatggattggtaattgataaagggaagagccttataatatgcagaggtta

SEQ ID NO: 58472 - DNA, 699 bp, Homo sapiens
tgtctccactggcttggagggactagcagaaaaaagaactagtgtttattgccttgaaaagggatggtgttctctctcctgtcaattaagggccttttttttctttttctacccacttgcaggggggtggtgaggtcctagcatccccagagttctgcatggtacgtgctccagaagatcagtgacaatatggcatcttcctttggcccttattcctctctgctcctttgcagatccacaaacccaccattatgtcattgccatggtgaagagagcaccaacttccagctgagccagctccaaggcaagaagtcctgccacatgggcctgggctggtctgctggatagaacatccccatcaggacactgcttccccctagctcccttgaaaccgatgagccagctggggctgggtgtgcccaggcagggctcctgcactggtcacccgcatgggctgtgctggagtcacactgtcattgtgaagtgtatgtgtccacggcctccaagatggagtgagggtaacctgctttaaatatgyactggctgggtgtgtgcaccagcaactcctgggagctggcagctgagtcttctctgaggaaaggtgtcagtcccaccttcctccttatccctagtcgcttggcttgacaagggccatcactgaggcccactaagaaaagccacctccctcccagcttccca

SEQ ID NO: 58473 - DNA, 658 bp, Homo sapiens
ggagttctaggggcagtaaagtaaatatataagggagggagaaaggattgaggaaatgaaagaaagcatgtttccaactagtgaaaacaatggagtccttaggaaactttataaaggataaatgttcaagtattggcccaaaaaaagtgagcatgtttcaaagaaaatagagtttctattttgataaaggtttattgctaccttaactcatccctaagcttgctgagacagcttatagaasaaaggacattaagctctaagcctagctctgttactaaagagctttctaacctgtagctagtatttaacccagactttagttccctcacttatgaaatatttagatgagattatttctaatatcctttccaactctaaaattgtatgattttctgaggagcaaattttaaagcattggtttagaatttgtaagccaactaatgtcacagtgaaagtgtcctcctttaatgtcttacattacttttgactatcctagaggcttgcatgttcattttttctcttccaagagaaactgtcccatccttctccttttagtgaaaacagttctaggctattccttgtgctgtaatatgaccccaatcctacctctcacaccattagtggtcttttgcccgagtaaggcaaaaagacaatcttt

SEQ ID NO: 58474 - DNA, 1163 bp, Homo sapiens
tgcatataaaatattgaacacctggatttaaacagaaatggcaatgagatgtgatgtcttcattatgccacacaactatatatgtggagacatatgggagagtgagtttttacatttcattggcatgtktacacatccacactaagagcctagaaagaatccatccaatcctataagcttagtgtttttttcttccattttagatattaggaacaatcaggaaaatcatcccataccacaactgtatgagattcagtcagtaacggacacaagcatgtctaaacagccaaatctgaaataggatagtaatactgatgcccaaattggatctatcaatacctatgcaacttatcataaatgtcctccaaaatatcaaatctaagaattatatgagtacaaatttaaagctgggaaggattttggagattatcttgcctgatccatcaattttagtgaagataaaatcaaaatgatgatagtaacacacattcctgtcttcggggggttatcggtttaatgagaagataatccctcaacaggaaattacactatagtgtgatggagggcaaatggatacaaacactgagtattatacagttacacagaaatgatattatctcttgctttgagggctaggtgaggatcaaaaataacctcccagaacagataactctgaagctaaatcaataaagaaagagtaagagttatgcaggtcaagtggagaaaaggcatttcaggaatggaaatagaaatagaacagaaatagaaatagaaatcccctaaggaaagaaaagccatgttgtattgagggagctgcaagcagtccatttgagttggttggcacacagaaatggcagtaagacagaggcttctgggtgtcaggataagaaataaactctacaactacacttagtatgtttatgtatgtatacgtgtttatgtatgtatatatacatatgggtggatgtgtgaatcaaaattccatgccactaatacttagccacttataggcaatgcactctattttctattcttattgtattttatttaaaagtattggtaaacactcactaacataaagaacgtgatcccctaaagtgccatgacctgctgtttgaaagacactcgtgaaagctgaaggacactaagcacgtcatgacaaa

SEQ ID NO: 58475 - DNA, 977 bp, Homo sapiens
tttgcattttctaggcccctaagaaatattttgcacattgctgggtaagaaacttgttgaaggtagcatgcttcctgaattaaaagaacccaaattagaacccattgatgttcatttttgggtttgattgtttaagtgtacaccaagccaccaaggaacaattttcctcaaattctttcagaagagtaattataaataactaaatcaagattcacctttgatggggacaacaatgagaaatgtactaccatcaacagaaaaggaaaagtcagaagggaaagtcagttttaaggggaaggtgataattgttttgggcttcaagtaagcagatgacatctaaccggaaacttttggaaagtagccagaaaggcatcttaagttcactgaagagatcacaagctaaggatcacaaggactctactgtgggaaaactgaattttaacctgattttctgacattggatagccatataaattaacttccaatgtggtcttgtctgagaaatcatgactgaaaactcctgcaatgcttattaagacacggcgtaaatggtaaaatactgtggaatgtaaagttattgttattgtttcataaatccaaatggtaccctgcacttaattacaggtctacaaatgctaacttcatctacctagccctcctgctatgaaaagttgtttgattgtacttgttcattatcggtgaaatcatttaaagacacatatttctaaacacaagaactctgctccaagagagaaacaagtgcagtcttccgcatggagaagcttttctatcagaataggatgaaaagatcacaccttaagccaggcaaatctgaatttccacgctcttctgagatatagatgctgatgttttggggcattttaatttttgccaagacaaycaagtcattgaattttggaaagacaactgtataacatggttttaaaaatcaatttgttctaagagactatttcttt

SEQ ID NO: 58476 - DNA, 622 bp, Homo sapiens
  misc_feature (1)...(622): n = A,T,C or G
tnnnnnnnnnnnnnnnnnnnnnnnnnnnnnnnnnnnnnnnnnnnnnnnnnnnnnnnnnnnnnnnnnnnnnnnnnnnnnnnnnnnnnnnnnnnnnnnnnnnntaaggatcacataataaaagtctttatgaaaatatgcatagcatatgtctagtatcagatttatagactgaatagttcctgtggttttctttttytttttctttcaccaaataagggaaatgaataaacttctcaaacctaggcaattatttaagttcaacagaggttttatctcattcatgaaagattttctatcaacaggtttaaaatcttttaacctttgttttcaaaattagttatcattttcactcttgataaaggtctttcacaaatttttcagtaaggcatgaaccatcaaaaaagtacagttcttatcgacaatgctggaagttctataatgaacccactactaaaaggcaatgagtaagaagcatgcattggaagaacttaatgtggttggagtttgcagaaaagataggaaacccaaagaacagagatatttatagttgcataattcagggcattcctcggaaatttttagacaaatagagcaaagcaaagtatctacattaaacatggct

SEQ ID NO: 58477 - DNA, 662 bp, Homo sapiens
cctccaagttggctattatttccttgtgacatacccactttttctttctttctctttctttttctttccttttaaaactcacttctttacttcctgctccagccctggaatcagccatttctctgaaaaactgtggttctttcaagtggacaaaggtattagagaccaaaatttgggcacaagatatgcactttaacaaggacccactttaagtgcagtttagtgaatttgaatgaatgcatgaacttctgtaactactaccacaatcaagatatagagtttctgtcacctctcaaagcctccttttcttgcttgctcatatgcaattacctctgtccaaaatgaccctttccctttcctctacacactyggcaaagccatgattgaacatttattccttcttagattttgttccattttcctcagcaaaggttctttgtttcctcttcttcatgctcacaaaagagagagtaaaagtgcttgctcaacagttcttcaactgctctaataaagattgattctcttaccagttttgtgtccttgggagttaatcagcctctctctctgtccattgattttccatctgtaaaatgggtcactcttgaactggtcccatatccaacacatgtaaacctgtcaatgtaacctccaaaatatctctt

SEQ ID NO: 58478 - DNA, 588 bp, Homo sapiens
ctggccaggtttcccacttgggccaatgggtagatggtggagacattcactggaatggcaaagcagaggagaagcaggcttagtgttggaagacaagcccaatgtaggatcttttctatttgaaatctacaagacgggcaaataaaactgtcattaggcagaaggctctttgagtctgtagcccaggaaagccrgcttggtgaagctctaaattgaagatctaccaaaatgaagcaagtgaggacctaccattgaggaagagcaggactgtgatgtcatgtgacctactagctgggacttggagatcagcacatggaaaaggcatgtctggcttctgtctctgtagaggagagcacgggcttgctctcatgccacttcccctcatgttcttccatcaaccttgatgctcctggcaatgcagtgtttaaaacgttttgttgaaaagacatcttttttggagaatgtgctgagcggggttggggctattactctcctgactacacggcttctcccactccagcctctgctctgatactgctgagggaatggccatttttgggtctctctggcaaagagggctcaggtact

SEQ ID NO: 58479 - DNA, 708 bp, Homo sapiens
taagaggttcctgaaaaggtttttcaaccttctctggtatttgccagattccccatgaccgatcctcttctgcatatgtctaaattttgaaatgggaaactagcatcataaacaggaaggtgggtggctgcagcagtggctgcaaaactcaggtatgcagtgtgagaagatggtcagtggtgtaatgaaaaaagtactgggttgacagtagaaaactgggttcctaacctggtgctaccactagtaagccgtggaatatttggtaagtaacttctttctgagcctctccctcaacttataaatgtggaataaatcgtctctgctgtcttagttcatttgggctgttataacaaaataccataaactgggtggcttacaaacaacaaacctttatttctcatagttctgaaggctgggaaatccaggatcaaggtgcctgcagattcagtgtctggcgagggcatgttcctcatgaataatgccttctgtgtgtcatggcagcaggggcaaatgggctctctggggtcttttttaaagaacactagtcccattcatgagggctttgcccttaggacctaattatctcccaaaggcctatctttaaataccatcacgtcgyacttagaatttcaacatataaatttggggcagggggacagaaactttcattctgtagttcatgccttagagaattgtggtgaacaatgc

SEQ ID NO: 58480 - DNA, 866 bp, Homo sapiens
ctcagaagctcaggaagctcacatatagggtggaagaatccytccacatatgacttcatagaggcccttatcctgtgcatgctgctctaggcaccctgctgtcccacaggcagggtctatgttagggggcagtgtatgtatgattgcagcaagctcaggactggtaccctagccagctggaggaccctgagcccatgactggacccctttagacagcattctactctttttaaaagaaagagttggcctggcagacctctacagcttcttcctgcctttaagctccagaattccaattcatctatttcctttacaatccaggtcagatttttaccaccagtaaattatgtctgattacgtccatttaactgacatgcttgtgtggctgctgccttggaagctttcagtttttgtcttctcctgtggattctgaaaccttaaccagaccacaaacctcctgaaggcaagaactgggtccctcccccattccccaccccattaatctgcaaattcagccaagagatcatttgaccattccctctgagtttgtgtgtatgtaagaactaaacaagtgtcctgtgtatccacagaattaaatctgaaccaatgtgcaatcttcccaatgcagcactccttcatagtcagagctgcaagagggtgaggaatggtcttgctttcctccaagttcaaaacagggagtttctcttcagccaatgagggtgaagcctgaatttcctgcaaaggaaaacagcttatggtctggagatccaggacattctcttcctgtgtagggaaccagggtggagtgcatcacaggacaaggttcagaccttgtctcaggcaccaggccaaaacctggcacatgc

SEQ ID NO: 58481 - DNA, 866 bp, Homo sapiens
ctcagaagctcaggaagctcacatatagggtggaagaatccctccacatatgacttcatagaggcccttatcctgtgcatgctgctctaggcaccctgctgtcccacaggcagggtctatgttagggggcagtgtatgtrtgattgcagcaagctcaggactggtaccctagccagctggaggaccctgagcccatgactggacccctttagacagcattctactctttttaaaagaaagagttggcctggcagacctctacagcttcttcctgcctttaagctccagaattccaattcatctatttcctttacaatccaggtcagatttttaccaccagtaaattatgtctgattacgtccatttaactgacatgcttgtgtggctgctgccttggaagctttcagtttttgtcttctcctgtggattctgaaaccttaaccagaccacaaacctcctgaaggcaagaactgggtccctcccccattccccaccccattaatctgcaaattcagccaagagatcatttgaccattccctctgagtttgtgtgtatgtaagaactaaacaagtgtcctgtgtatccacagaattaaatctgaaccaatgtgcaatcttcccaatgcagcactccttcatagtcagagctgcaagagggtgaggaatggtcttgctttcctccaagttcaaaacagggagtttctcttcagccaatgagggtgaagcctgaatttcctgcaaaggaaaacagcttatggtctggagatccaggacattctcttcctgtgtagggaaccagggtggagtgcatcacaggacaaggttcagaccttgtctcaggcaccaggccaaaacctggcacatgc

SEQ ID NO: 58482 - DNA, 866 bp, Homo sapiens
ctcagaagctcaggaagctcacatatagggtggaagaatccctccacatatgacttcatagaggcccttatcctgtgcatgctgctctaggcaccctgctgtcccacaggcagggtctatgttagggggcagtgtatgtatgattgcagcaagctcaggactggtaccctagccagctggaggaccctgagcccatgactggacccctttagacagcattctactctttttaaaagaaagagttggcctggcagacctctacagcttcttcctgcctttaagctccagaattccaattcatctatttcctttacaatccaggtcagatttttaccaccagtaaattatgtctgattacgtccatttaactgacatgcttgtgtggctgctgccttggaagctttcagtttttgtcttctcctgtggattctgaaaccttaaccagaccacaaacctcctgaaggcaagaactgggtccctcccccattccccaccccattaatctgcaaattcagccaagagatcatttgaccattccctctgagtttgtgtgtatgtaagaactaaacaagtgtcctgtgtatccacagaattaaatctgaaccaatgtgcaatcttcccaatgsagcactccttcatagtcagagctgcaagagggtgaggaatggtcttgctttcctccaagttcaaaacagggagtttctcttcagccaatgagggtgaagcctgaatttcctgcaaaggaaaacagcttatggtctggagatccaggacattctcttcctgtgtagggaaccagggtggagtgcatcacaggacaaggttcagaccttgtctcaggcaccaggccaaaacctggcacatgc

SEQ ID NO: 58483 - DNA, 1255 bp, Homo sapiens
ataatgtgttgtctgttttagcgaggaggagattgctctgacagaggatgatcaggcaataatgtagaagaaagatcaggaaagaatagaaggtagcatttgaatttaaccctgtggtcagatgataatgggcggtatgcaaggtggttcactcatgtggccaggggagaatccagagagacactctgggatttgctcagacaggaacctggaaagaagttcaggaagaagagattggaagtcaagatgggagaaagtggcatttgtctccctaaggccaaactgtaatgtaggacaaagcttggcctggggttgtcattgacaggtgctcagccctgctgtctgggtccagagagacctgtggcttgaggcactggtaccctaattgccccctgcccctgaagtggaggtaattgagtctcctaaagtgtgaaacagagctgggataatagtagcaactaagacagagaaggcaaatccaaaggccaacaaactggttgtgtaagtttgtaaatgagcggggagtggcttgaagagtggtttttaagccttctccaaagacataaaaactttacagacaacaacaactgtgcctaataaaaccactttgggggattgtcttcaatagtgggctgctaaattgtgatctctgctaggctaccatkagtgaaaacgatcagttgtgacacgcctattcattcattcctcacacacccacccacccacagaagccctctacacctggatctatcagacctggagccagcccagtgggtcaggagatgactctgtgggcatcaggtgtgggcaggacctaacatgcacctagagagacacccaggccttgcccagaagtttgagatgtggctgccaggtcaggtgtacgacaagaagcagaaacctcgcagtgatttcatggcaacttagagaggggagccagggaaagcaaatcttcagtaggtgtctgagcacatgcagcaatactggggagggaaactgccaagctctttagggaaatcctcattaggccaagaggaggagctcagtctttgcaaaaagaaccagacatttactccaatggcagaaatccttccaagcctattcttgcaataaatgactccactggagagaccctgaggccatggagagagaaactaacattttcaacaggcttctgtatggtgtagttgttgttcaccttgcagatgttgttctgacttatttcattgttactctatctatttgtgtgttacct

SEQ ID NO: 58484 - DNA, 1515 bp, Homo sapiens
cgggatccctgggagactctgccctctgtgtaagagatccttgttttccagtattggtgaggggcgcacctctccactctgtttcattagatccctttgtggtcctactctggggtatatccagtggccacctgagatgtggcgtgaagagtctgtgatcatgacatagtggttttctttgtgtaatggccagtgccctgtaaggtcatagttacccttaacttttttcctgtttaacgcccctgagaaacttggttccactttctaagcatagtgtccattaatgaatacattttaaaatcatgtaataaatagtgaatagggtatttggaaagtagaggaaagaaaaagcaacgatccaaaatcctggccttctaatagcaacagaaattgtcattttggtatactccttccagttattttaaatgtgatgtttagaaaacacttgtaatctcagtatgtaygtatgcatttgcagtgattaagaccttgagcattctgatttctgataagattcatgtgctcctctagcaggagtgacaggtggcacctcaggcagacaggcaggggtggttttttggctgtgtaaaaaatacttaatgttttttctatgaatctgaaaacttcccagtaatgctatcctgggatggatgctttgaggtcttctcaccatagtagtcagctcatcacaagcactcccacctcacagaggtctataaagagaagtaaattagaggttaaatttccaaagaacatagcactttccaccagcttgttttctcaataagaacagttatcaccattttcattatcatctcacatttgtagagagctttacttttccaagtgcatccccatgtgccaactcatcagttcttgcaacagccctgtaatgtgcacagtactgttttcatctgccttctacagatgaggcaccagagaagccaaaagacttgcccacggtcatatgtgctacctgcatctagacccccccaccttgtcctaagcagtgaccagatttctctggataccctatttctgtctgatcacccagcactcagacagatttctttttcctctgtggctttcctttctgactggttttcttaaacactcttctcttcctccttcttgcagggggtcgtgataagcgaggcggacccatcctgaccttccctgctcgcagcaatcatgacagaataagacaggaagacctgcggaaactcgtgacgtatttggccagcgtgccaaggtaaggggaaggggaatggcctgcaggggagcgggaggggagctgggctgatgccagttttggaaggagcctccatccctgccagggaccctagtggtttctgctcttccagtggattctaaccattcctggaacaccattgtccattgtctgcctcattcccattgttactgctgagattcatgtgaatggggtgggagctggaagtggcaactccggacactcaactctgtatcactcagctacaggaaacactctatgac

SEQ ID NO: 58485 - DNA, 1515 bp, Homo sapiens
cgggatccctgggagactctgccctctgtgtaagagatccttgttttccagtattggtgaggggcgcacctctccactctgtttcattagatccctttgtggtcctactctggggtatatccagtggccacctgagatgtggcgtgaagagtctgtgatcatgacatagtggttttctttgtgtaatggccagtgccctgtaaggtcatagttacccttaacttttttcctgtttaacgcccctgagaaacttggttccactttctaagcatagtgtccattaatgaatacattttaaaatcatgtaataaatagtgaatagggtatttggaaagtagaggaaagaaaaagcaacgatccaaaatcctggccttctaatagcaacagaaattgtcattttggtatactccttccagttattttaaatgtgatgtttagaaaacacttgtaatctcagtatgtatgtatgcatttgcagtgattaagaccttgagcattctgatttctgataagattcatgtgctcctctagcaggagtgacaggtggcacctcaggcagacaggcaggggtggttttttggctgtgtaaaaaatacttaatgttytttctatgaatctgaaaacttcccagtaatgctatcctgggatggatgctttgaggtcttctcaccatagtagtcagctcatcacaagcactcccacctcacagaggtctataaagagaagtaaattagaggttaaatttccaaagaacatagcactttccaccagcttgttttctcaataagaacagttatcaccattttcattatcatctcacatttgtagagagctttacttttccaagtgcatccccatgtgccaactcatcagttcttgcaacagccctgtaatgtgcacagtactgttttcatctgccttctacagatgaggcaccagagaagccaaaagacttgcccacggtcatatgtgctacctgcatctagacccccccaccttgtcctaagcagtgaccagatttctctggataccctatttctgtctgatcacccagcactcagacagatttctttttcctctgtggctttcctttctgactggttttcttaaacactcttctcttcctccttcttgcagggggtcgtgataagcgaggcggacccatcctgaccttccctgctcgcagcaatcatgacagaataagacaggaagacctgcggaaactcgtgacgtatttggccagcgtgccaaggtaaggggaaggggaatggcctgcaggggagcgggaggggagctgggctgatgccagttttggaaggagcctccatccctgccagggaccctagtggtttctgctcttccagtggattctaaccattcctggaacaccattgtccattgtctgcctcattcccattgttactgctgagattcatgtgaatggggtgggagctggaagtggcaactccggacactcaactctgtatcactcagctacaggaaacactctatgac

SEQ ID NO: 58486 - DNA, 636 bp, Homo sapiens
aatattgcaggcagtgagtgggctcacttgagttttagcaggatctataacaggtgtgtctatactgtaattctgatttaattgtggtcacctgatttactgagcgccaactcttcagagatcaaaagatgatctctgggatacacacatttttgttaggccatctgcaagaatgcaaaatgggtattaaaggctttcatcctccctgcacgtcaaggcttttactaagggatttccatcgtgcctctcaagtgcccctcaggaaaacttattttccacccttcttagcatcccctctctctcacccctctattgcccaggggtctctgttccagtgtctctaaatatcaaggaaactgtcttgaagccaaatcactagatctttagcctggaagaacctgaagtctccactgcttcccaagagactcagatattaaaggacttaggatgcamacactttaatttatttgtttgtttggttggttggttggtatcgattggaggagggagatggaaaaaagccagagggggctcttgtcctagtggtcagatatcatgagcatccaactggagactgactaccctggactttgctttcaagattagaaaggggagtccccggagcacaatgaggca

SEQ ID NO: 58487 - DNA, 636 bp, Homo sapiens
aatattgcaggcagtgagtgggctcacttgagttttagcaggatctataacaggtgtgtctatactgtaattctgatttaattgtggtcacctgatttactgagcgccaactcttcagagatcaaaagatgatctctgggatacacacatttttgttaggccatctgcaagaatgcaaaatgggtattaaaggctttcatcctccctgcacgtcaaggcttttactaagggatttccatcgtgcctctcaagtgcccctcaggaaaacttattttccacccttcttagcatcccctctctctcacccctctattgcccaggggtctctgttccagtgtctctaaatatcaaggaaactgtcttgaagccaaatcactagatctttagcctggaagaacctgaagtctccactgcttcccaagagactcagatattaaaggacttaggatgcacacactttaatttatttgtttgtttggttggttggttggtatcgattggaggagggagatggaaaraagccagagggggctcttgtcctagtggtcagatatcatgagcatccaactggagactgactaccctggactttgctttcaagattagaaaggggagtccccggagcacaatgaggca

SEQ ID NO: 58488 - DNA, 636 bp, Homo sapiens
aatattgcaggcagtgagtgggctcacttgagttttagcaggatctataacaggtgtgtctatactgtaattctgatttaattgtggtcacctgatttactgagcgccaactcttcagagatcaaaagatgatctctgggatacacacatttttgttaggccatctgcaagaatgcaaaatgggtattaaaggctttcatcctccctgcacgtcaaggcttttactaagggatttccatcgtgcctctcaagtgcccctcaggaaaacttattttccacccttcttagcatcccctctctctcacccctctattgcccaggggtctctgttccagtgtctctaaatatcaaggaaactgtcttgaagccaaatcactagatctttagcctggaagaacctgaagtctccactgcttcccaagagactcagatattaaaggacttaggatgcacacactttaatttatttgtttgtttggttggttggttggtatcgattggaggagggagatggaaaaaagccagagggggctsttgtcctagtggtcagatatcatgagcatccaactggagactgactaccctggactttgctttcaagattagaaaggggagtccccggagcacaatgaggca

SEQ ID NO: 58489 - DNA, 636 bp, Homo sapiens
aatattgcaggcagtgagtgggctcacttgagttttagcaggatctataacaggtgtgtctatactgtaattctgatttaattgtggtcacctgatttactgagcgccaactcttcagagatcaaaagatgatctctgggatacacacatttttgttaggccatctgcaagaatgcaaaatgggtattaaaggctttcatcctccctgcacgtcaaggcttttactaagggatttccatcgtgcctctcaagtgcccctcaggaaaacttattttccacccttcttagcatcccctctctctcacccctctattgcccaggggtctctgttccagtgtctctaaatatcaaggaaactgtcttgaagccaaatcactagatctttagcctggaagaacctgaagtctccactgcttcccaagagactcagatattaaaggacttaggatgcacacactttaatttatttgtttgtttggttggttggttggtatcgattggaggagggagatggaaaaaagccagagggggctcttgtcctagtggtcagatatcatgagcatccaactggagactgactaccctggactttgctttcaagattagraaggggagtccccggagcacaatgaggca

SEQ ID NO: 58490 - DNA, 725 bp, Homo sapiens
ctgaaactctgagaggataaataattgtcagacaattaataagtgatagatccacaatttaagcttgttgtgtggaaacttaccttggtatgatggaggtctctaagtacactaccaagcaagctctcccagaagtcacaaacctgaagttcacataccaaattaaaatgctcaaatcacatggcttagtaagcttatttaaagcacagtgagaagtaaggggaaagagatgggttatggtaagacatgggataaagtagcaatatcgtgagatcatgggcaacaggaccacacttctgtatcctgtgttctgcagtgttcgtgtgccctgtctctctcatcctgctgatagtgtggctaaggggactgaggtcccaatgggggccacataataaagattacttgggccaatgataggtacmagctccattggaatgaatgacacaggacaagtacgcctgatcatagcagtagcttgtgattagcctgctgaaattgcaggagttgtgtctgcatttcttggacagagcagatgcaagaggaacaaactggatgacaccaatggctggtcaagttagcagtgacaggtatctcagtcccaaagtgtcaggataatgatttggtcttttcatctctttctaactgtaatgttcttgtttgttcatcatatatatttttaaaaatttattttctgtctttctttggcagatattacaggttactaa

SEQ ID NO: 58491 - DNA, 725 bp, Homo sapiens
ctgaaactctgagaggataaataattgtcagacaattaataagtgatagatccacaatttaagcttgttgtgtggaaacttaccttggtatgatggaggtctctaagtacactaccaagcaagctctcccagaagtcacaaacctgaagttcacataccaaattaaaatgctcaaatcacatggcttagtaagcttatttaaagcacagtgagaagtaaggggaaagagatgggttatggtaagacatgggataaagtagcaatatcgtgagatcatgggcaacaggaccacacttctgtatcctgtgttctgcagtgttcgtgtgccctgtctctctcatcctgctgatagtgtggctaaggggactgaggtcccaatgggggccacataataaagattacttgggccaatgataggtacaagctccrttggaatgaatgacacaggacaagtacgcctgatcatagcagtagcttgtgattagcctgctgaaattgcaggagttgtgtctgcatttcttggacagagcagatgcaagaggaacaaactggatgacaccaatggctggtcaagttagcagtgacaggtatctcagtcccaaagtgtcaggataatgatttggtcttttcatctctttctaactgtaatgttcttgtttgttcatcatatatatttttaaaaatttattttctgtctttctttggcagatattacaggttactaa

SEQ ID NO: 58492 - DNA, 603 bp, Homo sapiens
acatgatacaatttctgcttatttgattcattgcatacataataatctctctgtttcttactattttaataaaacagatttccagcaccatcagtaagatgtatcattatgcactcaataagaatattttaaaaatacagtgtttcataaatggtaaattctgactttgaaaagccctgagactagctgatcatgcatgttgtgtatggtgtttgtctactattaactgaagagaatttggatgagttgtgatatatacatctaagtcacagagcactgmgctttcatgggtatggagaggaggttccaaggttcccagatgaagctctacagattggtagttcctcacaacctcccctaccttaccccaaagattttctgatccttcccatccaataggctcctgtaccataagagatcatgcttgtgtttatcttacattattctgtaagtgcagatcttaaatctattctgcttctgttcacctgcctctatgtggaataacttacctctatatagtctgtccaaggtcagctgatcctgttgctgggtgtgctgctcagatctcctttgagagacagcctccagatgccatctctttgg

SEQ ID NO: 58493 - DNA, 806 bp, Homo sapiens
ggatccaggggtgaaattcagcaccccaaagttggtttgaccctacacttctagctagtgctctactatccagcacaaccaagcttgctaaattatgcatcatcagaagatgagggacattgaataaaaaaaaaatggacaatgccaccctcagagcaatccagtgggccttatcaaccatattctatgatgctcagtgtcttcgtctacctcctgcctaaaacctccagtagcttcctgattacctgaaaacataattcagactccttgccctggctcacaagaccctcagcagcctggcctctrtgtatttctttgaccttcactatagtaatttccccttactcaccacaatgcagctactgtgacatcatttgagttctagaagctgcttgaattctcagtgtatttggctatggctgtcaaataggcattctaatcacttgcttagtgtatagcaaagatactttaaaagaacttcaaaaacaattttgcaaagaatttatttaacaaatgcaataaagttgtgagaaaaaggaaagatttttagatttttagaaacacctattcaatcagaaattttttattacagacctactgagtgccaggtgtcctgttagacatttgagaaatgtaaatgaacaaaaagattgcgaggattccagcatgggagaaagacagtaaacaataaacagaataagtaaattaggtggtactttaaaaatataataagtactatgaaaaaaccaatcaggcagagagaagaaggttgagaaagaggaacccagatgggagggagcagataa

SEQ ID NO: 58494 - DNA, 602 bp, Homo sapiens
tagacatatgcagcataatttttaaatgtaaacaggaaattagttttattaggatagtgagactatgggtattatttgggaggcaatctttaatgttgtgatatttttatgatggaaaaaataaaagaacatacattggcatttatttactgaggtatcacatcaaagtattctgttttccacattatgcagaaaaattaaaagattaattaccgaggaagcattacttctatactcaactgcacatctgtattgatagtgtggttgacccagtagcacctagattatgattaagacagacgcacatagcaaccaggcattatgaggttatgacatgatattccatggagttctccaaacagctccaagagcatttacactttactggcaaaccatgtccttaagatggatagtcatgaagctaaccaaccccagattattgctggktttttttttacaaaaattaaaacatctgctttctttttatctatgtccctccctctactttcattgaaaaaaaagaaaaacaatatgtttatatcttgcctaaacagtttagtagatggataagtgttgatcattatactaataactagaaatgt

SEQ ID NO: 58495 - DNA, 752 bp, Homo sapiens
aatcgatcaaatcacaactatattctttcaagaaaactatgagtaaaatcgctgatttgttattatactaaatcatcttttgctttgctccctttgagtctataatttcatctgtgaaaaagacacttagtaaatatttaccttttcttccattaamcctccccacctttcatgagtgaaaagacagttttcttcctcagccattacaataattaaaaaaatattgttttccttacatttgcataattatgtttagattttacaaatgtctgctatgtgtatgtcttcatctcatgcccataaactatgctttggtgaggatattagacctctttttagagatgaggaaatttaggcttaattggtctctgtgacctgactaaaataacacaactgctaagtggtggaacaaggcatttggcctaatttgttcttcaatgtttgggagatagaatagattaatggtgtcagagaacgttctaaaattaggatgcctgcgatagaatcctggctctctcacttactggctgtatcaccttgaaccggtggattgcctttttgtcttcatctgtaaagagatgattctaaaagtacccatctcctaggattgttgtttagattcaatccattaatatgtgtatggcccttaaagctggcccttattaagtactcagtaaatgccagctgctaataataagagaaagggaaaaattagtgaaactgaaggaataagtctttcacactaatttggt

SEQ ID NO: 58496 - DNA, 2249 bp, Homo sapiens
aacgattgttttcccctgttataaggcatttgatttttggtctggctgctactcaaatactttactgatctttcaagtattgtaattttcttgtgatatgtctttgtgttgctatttcttgtgagttttatctgggctgtaatgtagctttttaaaactatgttgcttaagcttcttcaatttggggtaaatttttttgaggtgtaaacctttaccatttatttctcttattagtttgcttctttagcacactaaaatctaaaatctactaaaattttatatgaaaatgtagatttttcatatattgactctttttttgcttgtcttctacttcatttgttttctttagagctctttttagactttttgattaactcttctcatttttacatccatttctcatattaatttttccccaacagtgtcttttctccttgtgctgcttctttttttcttgttttgaagacggtcttaatttcttcttttcatcccatcccccaagatccacctactgaaactcaagttaaaaatattaagactagattgaataatacccaaagttctgtaagtatataatcccaaattccatagtttgtcatctatatttttattttgttcttgattcatataggataacatatagccagccatttgaccatgattttcatctactgtgaaaaaacagatttctggtatttgcattatttcactttttctttattccttttctcctttactgctttttgtttgtacttttttctagaatgcatgttgattcctttaatttacttatatagtactcataattgaaggactgagtagtttctgtatctagttataggagtcggattgggggaagaatgcaaaacataattataaaagtatttaaggtactgtcctcttcagagccagcttactctgggttcttagcagcaaagatcagtggatgagtactggatccccacactttaaaactgtatatagataagataactttgtcctaaggaagagtggctatgcatttaattttctagtattcaatgcaaggagcaagcaggcttgagaacatcagtttcacaatcaccaagtttaaacttgatgaattttaaagaaacttgaagaatagtatgtttctatggctttgagtgatcttctcatggccactgcacagggacaatgcctatgcaattcctggataagtgagctcacctcaaaataatctcctgcccccaagctgctcctggtgagagacaatctgcattttaatattacccataccaggggaagtggaaattaaatgttgataggtcaagttataatttcaagtggggtaataagaccttatatttactctgcagtttacagtttataaagtaatatctcgtgctcacttcactttactttcaaactctcctgggaagtaggcattattattcatgttttatagttatggaagtctacattcattgatattacgtctccatgcttcaccctaaatgagtgtaagagctcaaatctggattccagacttcgtgtatcttttccttcatagcacagatgattaaaagtaccaaaagaacagtgcaagagaatatgggagagtaataaggtgagagtaatgttttaaaatcawcttttactagaatcggcttatgtccattttttaatgttagctctgtgaaattataaaattatagcttttaatgctgaaagtaactttaagacattgtatttatttttatttttatttttattttattgagacaaagtcacctctgttccccaggctggagtgcagtggcacaatctcagctcactgcaacctcagcctcccgggttcaagtgattctcctgcctcggcctcctgagtagctgggattacaggtgcccgccaccacacccggctaatttttgtatttttaagtagagacggggtttcaccgtgttgaccaggctggtctgaaactcctgacctcaggtgatctacccgcctcgacctcccaaagtgctgggattacaagtgtgagccaccgtgcccagcctaagacattttaaaagacatttttaaatcaagccccatttcttcagaaaaataaggactattatcagaaattaagccacttgataaaactaatgctcaaaggagttaagtaacctggccacaactaagtaagtaaattgagtctagaaacttgggcattttatttcaaaatgaatcaagataaaatatgttgtatctttggaccaaa

SEQ ID NO: 58497 - DNA, 2249 bp, Homo sapiens
aacgattgttttcccctgttataaggcatttgatttttggtctggctgctactcaaatactttactgatctttcaagtattgtaattttcttgtgatatgtctttgtgttgctatttcttgtgagttttatctgggctgtaatgtagctttttaaaactatgttgcttaagcttcttcaatttggggtaaatttttttgaggtgtaaacctttaccatttatttctcttattagtttgcttctttagcacactaaaatctaaaatctactaaaattttatatgaaaatgtagatttttcatatattgactctttttttgcttgtcttctacttcatttgttttctttagagctctttttagactttttgattaactcttctcatttttacatccatttctcatattaatttttccccaacagtgtcttttctccttgtgctgcttctttttttcttgttttgaagacggtcttaatttcttcttttcatcccatcccccaagatccacctactgaaactcaagttaaaaatattaagactagattgaataatacccaaagttctgtaagtatataatcccaaattccatagtttgtcatctatatttttattttgttcttgattcatataggataacatatagccagccatttgaccatgattttcatctactgtgaaaaaacagatttctggtatttgcattatttcactttttctttattccttttctcctttactgctttttgtttgtacttttttctagaatgcatgttgattcctttaatttacttatatagtactcataattgaaggactgagtagtttctgtatctagttataggagtcggattgggggaagaatgcaaaacataattataaaagtatttaaggtactgtcctcttcagagccagcttactctgggttcttagcagcaaagatcagtggatgagtactggatccccacactttaaaactgtatatagataagataactttgtcctaaggaagagtggctatgcatttaattttctagtattcaatgcaaggagcaagcaggcttgagaacatcagtttcacaatcaccaagtttaaacttgatgaattttaaagaaacttgaagaatagtatgtttctatggctttgagtgatcttctcatggccactgcacagggacaatgcctatgcaattcctggataagtgagctcacctcaaaataatctcctgcccccaagctgctcctggtgagagacaatctgcattttaatattacccataccaggggaagtggaaattaaatgttgataggtcaagttataatttcaagtggggtaataagaccttatatttactctgcagtttacagtttataaagtaatatctcgtgctcacttcactttactttcaaactctcctgggaagtaggcattattattcatgttttatagttatggaagtctacattcattgatattacgtctccatgcttcaccctaaatgagtgtaagagctcaaatctggattccagacttcgtgtatcttttccttcatagcacagatgattaaaagtaccaaaagaacagtgcaagagaatatgggagagtaataaggtgagagtaatgttttaaaatcaacttttactagaatcggcttatgtccattttttaatgttagctctgtgaaattataaaattatagcttttaatgctgaaagtaactttaagacattgtatttatttttatttttatttttattttattgagacaaagtcacctctgttccccaggctggagtgcagtggcacaatctcagctcactgcaacctcagcctcccgggttcaagtgattctcctgcctcggcctcctgagtagctgggattacaggtgcccgccaccacacccggctaatttttgtatttttaagtagagacggggtttcaccgtgttgaccaggctggtctgaaactcctgacctcaggtgatctacccgcctcgacctcccaaagtgctgggattacaagtgtgagccaccgtgcccagcctaagacattttaaaagacatttttaaatcaagccccatttcttcagaaaaataaggactattatcagaaattaagccacttgataaaactaatgctcaaaggagttaagtracctggccacaactaagtaagtaaattgagtctagaaacttgggcattttatttcaaaatgaatcaagataaaatatgttgtatctttggaccaaa

SEQ ID NO: 58498 - DNA, 2249 bp, Homo sapiens
aacgattgttttcccctgttataaggcatttgatttttggtctggctgctactcaaatactttactgatctttcaagtattgtaattttcttgtgatatgtctttgtgttgctatttcttgtgagttttatctgggctgtaatgtagctttttaaaactatgttgcttaagcttcttcaatttggggtaaatttttttgaggtgtaaacctttaccatttatttctcttattagtttgcttctttagcacactaaaatctaaaatctactaaaattttatatgaaaatgtagatttttcatatattgactctttttttgcttgtcttctacttcatttgttttctttagagctctttttagactttttgattaactcttctcatttttacatccatttctcatattaatttttccccaacagtgtcttttctccttgtgctgcttctttttttcttgttttgaagacggtcttaatttcttcttttcatcccatcccccaagatccacctactgaaactcaagttaaaaatattaagactagattgaataatacccaaagttctgtaagtatataatcccaaattccatagtttgtcatctatatttttattttgttcttgattcatataggataacatatagccagccatttgaccatgattttcatctactgtgaaaaaacagatttctggtatttgcattatttcactttttctttattccttttctcctttactgctttttgtttgtacttttttctagaatgcatgttgattcctttaatttacttatatagtactcataattgaaggactgagtagtttctgtatctagttataggagtcggattgggggaagaatgcaaaacataattataaaagtatttaaggtactgtcctcttcagagccagcttactctgggttcttagcagcaaagatcagtggatgagtactggatccccacactttaaaactgtatatagataagataactttgtcctaaggaagagtggctatgcatttaattttctagtattcaatgcaaggagcaagcaggcttgagaacatcagtttcacaatcaccaagtttaaacttgatgaattttaaagaaacttgaagaatagtatgtttctatggctttgagtgatcttctcatggccactgcacagggacaatgcctatgcaattcctggataagtgagctcacctcaaaataatctcctgcccccaagctgctcctggtgagagacaatctgcattttaatattacccataccaggggaagtggaaattaaatgttgataggtcaagttataatttcaagtggggtaataagaccttatatttactctgcagtttacagtttataaagtaatatctcgtgctcacttcactttactttcaaactctcctgggaagtaggcattattattcatgttttatagttatggaagtctacattcattgatattacgtctccatgcttcaccctaaatgagtgtaagagctcaaatctggattccagacttcgtgtatcttttccttcatagcacagatgattaaaagtaccaaaagaacagtgcaagagaatatgggagagtaataaggtgagagtaatgttttaaaatcaacttttactagaatcggcttatgtccattttttaatgttagctctgtgaaattataaaattatagcttttaatgctgaaagtaactttaagacattgtatttatttttatttttatttttattttattgagacaaagtcacctctgttccccaggctggagtgcagtggcacaatctcagctcactgcaacctcagcctcccgggttcaagtgattctcctgcctcggcctcctgagtagctgggattacaggtgcccgccaccacacccggctaatttttgtatttttaagtagagacggggtttcaccgtgttgaccaggctggtctgaaactcctgacctcaggtgatctacccgcctcgacctcccaaagtgctgggattacaagtgtgagccaccgtgcccagcctaagacattttaaaagacatttttaaatcaagccccatttcttcagaaaaataaggactattatcagaaattaagccacttgataaaactaatgctcaaaggagttaagtaacctggccacaactaagtaagtaaattgagtctagaaacttgggcattttrtttcaaaatgaatcaagataaaatatgttgtatctttggaccaaa

SEQ ID NO: 58499 - DNA, 597 bp, Homo sapiens
gtcattgggatctgtgctagccattttgcattatgttgggatttaaccccctttcctatttcagtatgcttaagacccttagaaactgaaagggctttaagtcctaagtctttccaggaacacagatgtaattgttttaaatctggggctccacaagcatcctaggatgagaaaggggttgctaaataggttttcttggacagtgggcaagctttcaaatatttaccagtcacatgtaccgtggcatgctgggtataagtctttctaaggcggagaccatacaatctatttcttttgagtctctctcatagtacaattatagtacttcttacacagtgggatgatgaaatatttgtggattgacaggaacrtactttgataactgagtcctttccgtagcagtttgacgggtctaagacatggttgtgccgaaatgtgcatgagagtgtcgggtgtgtgtgcctggcgatagggggccttgagtttccaaaggctcttggctgctgctgcctcacagattctccatgctgtgtggctgtctgctgaggggcacatgtgctgctatttatgtttggtgactttctcagtgattgtttt

SEQ ID NO: 58500 - DNA, 876 bp, Homo sapiens
tatgaagtaagaatcttcttttgctgatcacatgtcatttgtctgaatctgctgaaattagcaaacagttatggtaaagagtagaaaagcagatttcagggaaatattctgaaatctgattcaacaggtcaagcaatcaagacacttttatttttttttaaatctagcctatagttgtacaattgagtcctggggatagaattaaacacgactcttcttgaggaagagtagaaattgtctaaaaatagcagcctaattttacaaagtcctttcatgcagaagtgttcagaataatgttttaagagggtgacttttcatttatcttactggawatgttttacatctttattcttgaaagtggtttcatgagaagatgcaaagaaactgtggcaggctaacatgtaccttgtaagctgcaagcttatatgatgtctacttatcctcttaacagtaaggctgacctactcgttactttctgagagaagaataattttcttttgtttcactgtgtactgtttttataaaataaacaataaaatttgatcatataagtgtcaagtaatcatatatctctgaacagatttgattgtcaaattgcagcacaattaaaacacaaacttaaatttctgctggtcatacttggtgaaagcatatttttattcctgagactttgaattaagtttagaattgctcatatgatagtatcaactgtgtgtgtgtgtgtgtgtgtgtgtgtgtgtgtgtaagagaaagagacagaatccatagaatacgtaggaagaaatccaaaacatgccaacttttttgccgtattagcgcaaacacggcttcacattttcatttaatttttaaattaactgaagggtttgtaagctg

SEQ ID NO: 58501 - DNA, 876 bp, Homo sapiens
tatgaagtaagaatcttcttttgctgatcacatgtcatttgtctgaatctgctgaaattagcaaacagttatggtaaagagtagaaaagcagatttcagggaaatattctgaaatctgattcaacaggtcaagcaatcaagacacttttatttttttttaaatctagcctatagttgtacaattgagtcctggggatagaattaaacacgactcttcttgaggaagagtagaaattgtctaaaaatagcagcctaattttacaaagtcctttcatgcagaagtgttcagaataatgttttaagagggtgacttttcatttatcttactggatatgttttacatctttattcttgaaastggtttcatgagaagatgcaaagaaactgtggcaggctaacatgtaccttgtaagctgcaagcttatatgatgtctacttatcctcttaacagtaaggctgacctactcgttactttctgagagaagaataattttcttttgtttcactgtgtactgtttttataaaataaacaataaaatttgatcatataagtgtcaagtaatcatatatctctgaacagatttgattgtcaaattgcagcacaattaaaacacaaacttaaatttctgctggtcatacttggtgaaagcatatttttattcctgagactttgaattaagtttagaattgctcatatgatagtatcaactgtgtgtgtgtgtgtgtgtgtgtgtgtgtgtgtgtaagagaaagagacagaatccatagaatacgtaggaagaaatccaaaacatgccaacttttttgccgtattagcgcaaacacggcttcacattttcatttaatttttaaattaactgaagggtttgtaagctg

SEQ ID NO: 58502 - DNA, 610 bp, Homo sapiens
actcttaaatcagattggagacaaaggttgtttctttcttccttttcaaaatgacttgggggaaaaaaaaagatgagctacaactattgcaaagactaactttaaatcagattttgacattagggccagtgccccccgcccccactctgccaatacccactcctcaaaaacgaacatagaaccctgcgtaactgttcccctttcttacatgtgagccctcaactcstggagcactgcctccccaaaccacacaccccagttccactgagcagctcaccctttactcagctctcccaacacccactcctcaaaaatgaatgtagaacctggctaactgttcccctttcttacatgtgaggcctcatctgctggagcactggcccccacaaccacacaccccaaccccactgagcagctcacacttccctcagcacactctaagctcacagctttcacacttggtgcatgctgttccctctgcatggaatgcccttccaccctgcagcagatgccattggtgccccacccaatatccccttatccacttggcaagtcccttctcatccatcaagatccatgatggcaaataattttccccctgttgttatat

SEQ ID NO: 58503 - DNA, 1041 bp, Homo sapiens
gactttagttttgttctaaaatgttatgaatttgttccctctcactggatatcctttcagactgaatagtcccttcaaccagacattggcatacagaagaatggccagtttcataatccaaatactttttttatgatttgagaaagggacagagaagaaatttaatttggcctttagacaaggccatctaccaatctaccagttcatccagccagcctcatcctgtaccaagcactcttgttatgaacccctgctctcaacacctgacttcaatcccaccagggactacaccttccccatcttagtccttatcacaccaactggggatctccactcaactcactttaccttgcaaagggaaacacrgaacagtccatatattttttccactgtttatttcccacaatgtcccacagtgagattccagaaagggaaaactgctttgtatgtgatacagcttctggccctaagaaacacatatgtaaataaacatacattttcatttccatctatcagtctcataaagagtatttaaaatttcaggtatccagtttttctaatcagcaattcatgagacactttgcaaatgtaatagtatcctaatgttaaaaaccatatataattcaaattattttcataaaattaactttattaaaaaaggcaaattggaaagaatgggaaagagaattctatttttaatattgttaattttcccttctctttatacatttaagcaattaaaattgaaacattcaatctccaagatacagattgatttttaaataaatgacagtttgttaactctgcaagtctttgcactaaaaaaactgcagaactttcctgtagaagcttcagccttaaggctgaaacacagctgcggattttggacaaatccagactctcttctaacatatttctggttaacagaaagtaagaacatcaaattttagcttggcagctcaggaaaatggtgacaaactagagccatttatcagatgggttttgttgacgtgacaaaaacaacaaagaggtgtctattaa

SEQ ID NO: 58504 - DNA, 805 bp, Homo sapiens
cagtaaactgttttctgagatgactttggacgaaggtaagaagaacccattcgattcctctgtctcatgttgtttgtagaaaaagctacatttaaaagacatttctattactgaacaaagggaaaacttaaagtagaatctgcttcaataatcaattttcaaaactacatatttaaggaggaaaaaaaggctagaagcacatcatgtcatgcttaagagagttttccctgttctatattaatattttgattcaaagagttggtgggcagtggacagtgggcattgtcactggtgactcaaaaggcagaatgcaggaagaaggtgatggctttgctatctgatgctaaagaataaaattttaacggtaaaaatacccagcaaataataagtyctactctgtgctccaccattacctgtatctagataaaggcatttccttgcatacagatatttcggtttgcattacaacatttgggaccactgctccataccatgagtattgttttatttccataaaatctttatgtcaacatgaccagtgagtagaggtagtgtgattggtccagaccccagacttcttaggggttgtactttcatcttgtcttctcttttctctcctcatttcctccatcactccttccccttcccctcctttccccttttcctctcttctctgagttacttcccctctctctgaaaactgcttggtgcctctttccagagagggcattgttactggacttttctgtacttttgtcccctcatctataaaatggaaccaagaatcatctctaggttattgtag

SEQ ID NO: 58505 - DNA, 682 bp, Homo sapiens
cttgagcctgggagattgaggcttcagtaagctgcgattgcaccactgtgcaatctaatttaatctcttaaaaaaaaaaaaaactgtatacccaccacatattatctttctcctgcatagatcagaaataaagcaagacacataaggcagtaattcctagggttaagtgatataaaaagtactattaaaaaatacgtctctgcacaaaattatttttaacacctagtttgcattataaaggcataaaagctttatacactttaatcgcatgaaagtttattaacaaataaccaggataaactactcattgctttttaaagaaatatgtgtttgcttttaagaatatgaagaaacaggctaatttcagtttttaggcagaattgggtgatgagaaaaaatgtattctcacttttgatatatgactttcttwatattttgtaagattttctttgtatattttttctatagatttctctcctattctgtatatggaggaaaataatttgagaaaatgttagtttctaatattttcaacataagattaaaaaataaaagttaaacatgccatttcagtaagttatttagaaatatttcatttttcagaaatgttgcctgcatggatttaatttatagtgaagtgttttgtgtgtgctatttataaaaagagtctttacaatgtaaa

SEQ ID NO: 58506 - DNA, 1304 bp, Homo sapiens
gctctttacccttacatgtgttttagtccaatgggaagcacagacatttcaattcagggtaatacatgtgctgccatggagaaagactcagtgttgtcttgggagtgagtatactgactgaacttgaagcctcagggatgagtaggtcttgaccaggtaaagttggggttagagtgtgttacagattcytccctgtcctctccccgcatgttggcttggaggtgaaaagattgtggtacttttaaagcagttaattgtggctggatcctgggattggagagggaggaggatctggtaagagagggccagggccaaatcatccagagtcctgaagttcctggaatcccctagttcttggtccacaaccctaatgaagccttggattttatcttaggaacagaaattaactgtggtatgattttaagcaagggagattcagggtcaaaattgcatgttagaagaattattttagctaagaatgtcttagttataagtcagaaacttaagcaaaagacaaagaaagtgacccagaggattcagcatatgcagaggtaggaagtgcggctggacttcacaaagatttggaaccagacatggttcagtatcagatgcttcctcttctgttgtatcgcatagtgtcttgtctctcatgtctgcttcattgctctgtgtatactgtcttctcttaactatacagctctaacttaacagcctctgaatttctctcccactttcaagtcctctggagagagtctgactggttccttgtcagttgtctacccttggtttaatcagctgtgctaagagggcagggtcatgtagcataaacatggtgcttcaaagccaacccctctcacagttaaggggtatggtgagttgtgggctaggcagaattcttagaaagaaccaacttcagaagatcattttggctgcagaatgaagaattcaggggaagggaactaaaggaaggggacctctttaagagaatacagtaatccaggcagtaggtaatactgccctgaatcaggggtaagtaagaagagaactgatctgtggtagattaaaggttgaatctccagaagtgtatgtagattggatattggagtataaagagtcaaggatagtgtttgtgtttctggcttgaatacctgaatggatgatgatagcaatccctgagctgaagtagcatcgcagcaaatttagtggggattgaagacgaagaatttatttttgtgcacgtgcagagtttgagatagcctcaagacatctaagtggtaatgattagtagacccttgaatatatgc

SEQ ID NO: 58507 - DNA, 865 bp, Homo sapiens
aaaaattatagaagttggagtcattttgtaagccgttttgactggcctgttctcattgtaaccaaccacatttaaccaaccataaattaaatttaaagaaaatcatattatatagtcagtattaggattctgaaagccagctctctgttcagattttgttttttgttttttgtttttttgtttttttgtttttttttgagacagagtctcactctgtcgcccaggctagagtgcagtggcgtgatcttggctcactgcaagctccgcctcccgggttcacgccattctcccgcctcagcctccggagtagctggggctacaggtgcctgccaccacgcccggctaatttgtgtgtgtgtgtgtgtgtgtgtgtgtgtgtgtgtgtgtgtatttttagtagasacagggtttcaccatgttagccgggatggtctcgatctcctgatctcgtgatctacccgcctcggcctcccaaagtgctgggattacaggcgtgagccactgcgcctggcccttctgtatttattttattgtgtccaaaaggatagaagtaatgtgtttacatagaattattcagcaaatcttttgagtagaatttatatgctttttttttttttgagggagtctaccaggctggagtgcggtggtgcgatcttggctcactgcaacttccgcctcccaggttcaagtgattcccttgccttagcctctcaagtagctgggactacaggtgtgcaccatcacacccagctaatttttttgtattttagtagaggcggagtttcactgtgttggccaggatggtctcgatctcctgacctcatgatccacccaccttgacctcccaaagtgctgggattacagg

SEQ ID NO: 58508 - DNA, 1376 bp, Homo sapiens
aattttaatataactaattgggagggtggagtgggtgcttatggatggtggggggaaagggtgtaaaagaaacaaaatcttcatcttctatagtaagaagttaataaataacacttaaaaggaaaaaatcaagaagtggtaataaataaatactatctggaaacatagaagtaataccaaaagaaccaatgacaaatgttgaaagtggctgcctctgtggggtggggaatggaagtaaagggataggacactcctgggttttgccccaaggctgcaggactacttgaaaagtggttagggaatcacagcccagaggtcaactgacctcatacctgctcagactgggggatccttcagagccctggaagattctgcccttcagggacactcatagggttagcaggcctcctgggattgcttagttatgaatgttgtggctcccaggatgtgcccttggcgatgctgtgatgcccctgcccaggtttgtcaggtaccatgatggctccctatgactctcaccaccttcatggctctgagagtgaagcagctaaggaacagtcacctaattaggtgacacagcatctggctttgcctgattcagagagaggacagaggtctagcagaatggtcagtaagatatgctgargaaggggcgtattagaactgctcatggaagggtgcatccaggctgtgggctggagcttagccagggactagaggcctcagaagagcctgctctggagaaggaggaccaaagggaatcacccagcagtctctacttccaggccaggccctggcaccactgtttgtagctgataaccttccgtgacagcagaggtgcccaagcctggacatcctctgccactagccaggtactccaccccatggagagaaccaagctgtctcttgtcagtccattctaaaaatttgctcagaagtgaaatgaagttgcagaggccctcagatcagcaaagggtccaggacaaaccctggggaacctgattcgaggaaataaaagtttgcaatttggggatctttgaacaagagtggcctcaaatcacactgcagcctgattttttttttttttgaatactcctctgggattttcattgtttatttctaaaatttttaacattttcttattgaggcataatttacagagtaaaatgcacaaatcttaagtgttctctcagtgaccagcctgaagatcaagatataaagcattttccttaagcccagaaagttttctcctgtgtcttcccagtcaccctggctcgtctcccaaccagagtgacacttttctgatttctagcaccctagagtgatctcacctattcttcaattttatataaatgcaatcaaggatatgactttcc

SEQ ID NO: 58509 - DNA, 734 bp, Homo sapiens
tgcatttgtttatttcccctactccaaaaaaaaagaaattatgatctgtaatcagtagcctgattcccctgctgacttcatggggaaaattgaataatcactcaaaatattctattccacttttaagccccaaataaaatggcctagggcaggctataactcacaggtgcactgggcgcttgtggacacgactgaaagactgcttactgttgattgtctcccacagatgatgtttaccactattatacagatactgagaacacaggcccatgaaactagtcgttcattaaatgggtagtttgaccagaatagccgcttacataccagaagagaccattggttaagagcttctattagcctttggacttggctttaaaaagggcataamagagatattactatacacctattggaatggtcaaaatctagaacactgacaacagcaaatgttggtgagcaacagtaactcttttttttttttttttttttgagacgaagtctggctctgtcacccagactggagtgcagtggtgcgacattgactcactgcaacctccacctcctgggttcacgccattctcctgcctcagcctccaaagaggctgggattacaggcatgcaacaccatccccagctaatttttctgtatttttttcagtagagatggggtttcaccatgttggccaggctggtctcgaactcttgacctgaggtgatccgcctgccttggcctc

SEQ ID NO: 58510 - DNA, 601 bp, Homo sapiens
tgtcctgaacctactgattcaagatccacttttaaacaagatccccaggtttttcaaatgcatactaaagtttgcaaagtactggtctaggtaaagtcttttatgaaatttaaatattacaactttttttttccaatctaccatctttctgttaattttacttatgcattcttcatgttctttatyggaaacaaattcttatttgatgaaataatatttaccaaaacttttttattttttcaccttttctgtttcttatttgatagacggagtttttagaagttcctatggtttttcccttgacttaatagccatattcttgttatttacccctttactatttcttaaatatggcattatctcagatcctaacaggacaagttctttagcattctgttggatctcttgttttccataactcattcctctatcatgttgatattgtctggatttttagtttatagtttcacaggtataccttttttattttgtttaattctagctttttaaaaaacaataaactttatcaaaatacttaatcacccttcctttccatgtctccttactgggttacttttattggcgcgatcttggttcactg

SEQ ID NO: 58511 - DNA, 601 bp, Homo sapiens
tgtcctgaacctactgattcaagatccacttttaaacaagatccccaggtttttcaaatgcatactaaagtttgcaaagtactggtctaggtaaagtcttttatgaaatttaaatattacaactttttttttccaatctaccatctttctgttaattttacttatgcattcttcatgttctttatcggaaacaaattcttatttgatgaaataatatttaccaaaacttttttattttttcaccttttctgtttcttatttgatagacggagtttttagaagttcctatggtttttcccttgacttaatagccatattcttgttatttacccctttactatttcttaaatatggcattatctcmgatcctaacaggacaagttctttagcattctgttggatctcttgttttccataactcattcctctatcatgttgatattgtctggatttttagtttatagtttcacaggtataccttttttattttgtttaattctagctttttaaaaaacaataaactttatcaaaatacttaatcacccttcctttccatgtctccttactgggttacttttattggcgcgatcttggttcactg

SEQ ID NO: 58512 - DNA, 978 bp, Homo sapiens
tgaaagactaagaacctcagtctgggaagtgggtgggtggggtggacagtgatttactcttgagccccagacgcttcacctgactttttcacaactccccaccctttttacttttcatccagagatctcaaagctctaaacaagccttgatcctccctgaccccctgagtcatcctctgtttccattttcccagataggagaggttgggcagtggaataccatgttttgggatgggtgcttggtgggtgggtaggggagattgcaggggcaaccatagggatccaggggccccttttcaatcatggggtggggcgaggggcaggcatcaaggtggttctaggtagttgggtttcagcttgtccttttgaggttgttttatgactgaagagactcggataaagagtccgagctggagaaattgaagaacaaacaaagccgtaaaagacgccgataaaatttctcccagcacagaatagtctttggagcctccctcaagaatcttagagtaatctgggaaggctaattaagtctcacagcccacactgggcactggggcaggacgagggaaaggggaagagagcactgagagagatttcccttctccctctcttctctcaagggcgcacaggtgttcaaacattcaatatggagactgaattaagacttggtggggggatgggtgagaatggggaaygaatgatgggaaatatcaatatttttaaagactccttttaataaggaagtgcttgagaatatgcagaacgataggaggaccctgaattgtagaatattaagaatggagagtacctgggtgggaatgagaggctctgggactgtgaacatggtacgtctgcatgcaggtggcatgaagaatgggtctagatggggatgaaggcagctggattcagagcatggcagtctgaggctgaggggggtctgaactgaaggcttttgaagctaaaggacccacatttggg

SEQ ID NO: 58513 - DNA, 647 bp, Homo sapiens
atttctgcagtgtttccttacccaaggaccagctcctctctctctcttgcagatagttataaagtctctgccccattctccctcttcctctcttttcacagtgcccctctgattctagggaagtaaaacgaagaattggactctacattctttgccatcagaacagctaagtkgataaagcagaatgaggagaaaggaggctagctgcattttggggctaagggttttaagactggggagaccaatatttgtattttaaacccagatgatatttaaaaaatggttctgtaattgcaatgaggccctctaggccgtgaattaatgtgtcataactcacgcccaagcactgcgcaaacattctgcgtgtgaattattgcacaataaattcatgccctgttgtgtcttacagcttaattagtacatgaagctacatgagttagacgaacccaaatgggattatgtcatgtggtgcgtaaaaaagcaaaatgttgggaggtatttggagctttttctggggggaaagcagggttgatttttctatgatgtccttcagtgtcagtttctgtgatgtttgggctgcaacaggtgacatgttccctgacatgtgacttctgagctttggttggctggttaaataatggatttag

SEQ ID NO: 58514 - DNA, 787 bp, Homo sapiens
acagagctgacaaaatgagatttcatttttaaaaaattagttactccaggcataatttagaatcacctgtcttctttgatctcatttttaaacacattatatttttagtcttaatgagggtgacatttcataattgctacattttaactgcatattccatgaatttctaaagtttactttccttccaacatttccttcttctgccccttccttctggtctagagagcatctcctatgatcagcctagggcttttcatttctttttccaaaacaattgtttatgtcaaaaaaaatcataatgaaggcctttaggacttggccttgaaatgttaaaactcaagttcttggtcctccaaagccttggttttaaaactgaaaagtttttggtttctaaattaaaacaaaacaaaaaacctgcttgttgttgaatttttcctctgataattgatatggggaaggaaagtattgtgggaggaaaaaatcttagttaatatactaaatattattccttccaataacttttattttcatgcttctgaaatatcttacatgtctgggttttgggtcatatttagtaaagacattactttatgttcttagataccaagaagacccagataggaaaataacctactacacttttcatcagtaagcaatcacttggcatgttgtaagtctctgacattttccacagggraaagaaaattattagtactctcgtggtggcttagatgatagcaggtagtgaggacttttagggaggctaaatgaagtgatgtcgttcttt

SEQ ID NO: 58515 - DNA, 773 bp, Homo sapiens
acgttactttcaaaatccaagttacagtaactttccctttacctttacagagatttttcttggaagctgcttactgctggaactcaaatttcaataagggagtaagcctttctgtttccatgaaattgatctcctgtcttttgacatgtattttgtcttactgatataacttggtaaaaaatttgcttttggttttcagttagtgaaaggggaaactagagagacttctacatgtttctgttattgctgtttttgtatcataatatctctcactcaaaagcttaggaagaaactcacggtaaaaattctaccatttgctaagtatattaactaaatagacagaaggaacttggaatatagccagataaaatggtttcacagtgccactgacctacccatgaagtcaaattgggtaaaaatccctttcattgcactacgtaagcacttgattaatgaacaaaggttatgttctaggactaaggatttatgtctgttcaaagmaattttcaacatttttttttcactagttctctttccctagcacctagttactctggcaaatggccacataacattttgggagagacttaagtggttttctgtacatgtttgtgagatttttcacctgatctttcctcaaaaaagccttctctctttttagtaactctagatgtggaaatagatgaaggtttgagatttaaatagaaagctaagactctcaagtcagacttcagttcaccagattttgttttttaaattagaaaagtcaaata

SEQ ID NO: 58516 - DNA, 556 bp, Homo sapiens
cccagaaagtgtgataacaaggagtgagtctattattcctacttatacattaatacatttttaaattttcaattttacattacaatatggtacgtgtcagtagatataaccaataaacaaaggttattgaggatcctcaataatatttaagagtatataaagatcttgcacctggaatgtttgagaatgaatggactaggagtctggcatctataggatgaccctcataattttaacctgytaattcatacagctttaagtcttacttcctgaattccctcagcttctatatacaatcacaataatttatgttaattctatatttattttcataactatacaatgtatagtattttcagagtgatcagatcaaatacttgggtttggcactctcaaattttatatccattccattccattctatttgaacattggaaaactaaattctaaatttctcactatggtgaagattagtttgttcaaccaaatccattctcccatttttaataggaatataaggcagtaaattgtcatgagaaattaatgaaattgaaaa

SEQ ID NO: 58517 - DNA, 1281 bp, Homo sapiens
tttttgttcataatgatcctgatgagtatttatcagggcatttgtcaaggatgtactcttaactaataatatcttactgtattttacaaatgctgtataaactstctgtgactcagtgtcctcaaccataaaatggcgagaccagttcttacctcattgatgtgttgcaaggattacatgaccaaactatgtaaataacttagaatagagggctctctaataacaatgaaaataatggaatcttaaaatattcgtgatcaggtggcagttcttgaccaccagaagacagtgtctccaattatcatagtgagtgaataggtgggagtggcagctaagaaagttgaccagagagatgcttggagatgcttaaataaaaatggcatccttaagcctaagtaagaatggtataactctatgtatataataaaataaataaagcccatatcttcaaaatcaatggactgtaagtaaatcctggtcaccagcgagaatgacccagcaatgtcacaggaagcctgtaatggaaatgatttgcccagacctcccctctggtgtcatacagctatttaattgagtaaccaaatgatatgaaaacaggaatattttgtcttttttgtacttaaaatatatttttaatgaggtaaatataacataaaaccattttcaatattctatgtgtatagttcactataataaataataatatatataataaataataataataaatataataagtacatttatatttttgtggaatcattattactatccatacccagtactatttcatcttctcaagttaaaattatgtaaccattaaacgataattcccaatttgtccctcctccaatctcctagttaccactatcttactttctgtctctaagatttttgactactacgggtgcaatcataaaaatgaaatcatacactctttgtctttttgtctctggcttattttagcataatatcttcaaggttcatctatgttgtaacaagtgtcaaaatttaattcccatgttaggcttaatactattctgttttttgtacataccagagggttatagaaaattaaaatatatatatatatatttctggcctcacactggggcacttgtccttgtgataaatgaccacatgtccacaactaagcgaccaacagtaatttataaaaagatggaagttgtacatgtaggcttaggcatgaatagcccaaagggcacaagcgagctgtatgataaaatatcctagaccccaaagtcatcatcactgttgcac

SEQ ID NO: 58518 - DNA, 506 bp, Homo sapiens
acaaaatttatgagttatgtgaagaagcagaaaaatgttacataaaaataattcttttagttaaattgatacagactctctgggaactgaaatattgaaattaatggttaaagaatttaaaatrtctattttaaacacgtttaaaactcctaaggaaagataatatgagtgaacagatggggaatttcagaaaacaataaagcaaatataaataaataaattagaaaccagtataaattcaagaagtaagtagtatatatctgaaatgagtatttatgggatagatttaatagcaaaatgtaaattgaaggaaaacaggtcaataaaggttgtcctaatctaacatttgaaaaaaactgataactgaaaatttcctatattggtagaaaacattaatacatttttatagtcagtgaaatctaaataggataacaatgacaaaacacatattatagtttaccttataaaccaggagtaaagagaaaagcttaaatgttgccagaata

SEQ ID NO: 58519 - DNA, 506 bp, Homo sapiens
acaaaatttatgagttatgtgaagaagcagaaaaatgttacataaaaataattcttttagttaaattgatacagactctctgggaactgaaatattgaaattaatggttaaagaatttaaaatatctaytttaaacacgtttaaaactcctaaggaaagataatatgagtgaacagatggggaatttcagaaaacaataaagcaaatataaataaataaattagaaaccagtataaattcaagaagtaagtagtatatatctgaaatgagtatttatgggatagatttaatagcaaaatgtaaattgaaggaaaacaggtcaataaaggttgtcctaatctaacatttgaaaaaaactgataactgaaaatttcctatattggtagaaaacattaatacatttttatagtcagtgaaatctaaataggataacaatgacaaaacacatattatagtttaccttataaaccaggagtaaagagaaaagcttaaatgttgccagaata

SEQ ID NO: 58520 - DNA, 506 bp, Homo sapiens
acaaaatttatgagttatgtgaagaagcagaaaaatgttacataaaaataattcttttagttaaattgatacagactctctgggaactgaaatattgaaattaatggttaaagaatttaaaatatctattttaaacacgtttaaaaytcctaaggaaagataatatgagtgaacagatggggaatttcagaaaacaataaagcaaatataaataaataaattagaaaccagtataaattcaagaagtaagtagtatatatctgaaatgagtatttatgggatagatttaatagcaaaatgtaaattgaaggaaaacaggtcaataaaggttgtcctaatctaacatttgaaaaaaactgataactgaaaatttcctatattggtagaaaacattaatacatttttatagtcagtgaaatctaaataggataacaatgacaaaacacatattatagtttaccttataaaccaggagtaaagagaaaagcttaaatgttgccagaata

SEQ ID NO: 58521 - DNA, 506 bp, Homo sapiens
acaaaatttatgagttatgtgaagaagcagaaaaatgttacataaaaataattcttttagttaaattgatacagactctctgggaactgaaatattgaaattaatggttaaagaatttaaaatatctattttaaacacgtttaaaactcctaaggaaagataatatgagtgaacagatggggaatttcagaaaacaataaagcaaatataaataaataaattagaaaccagtataaattcaagaagtaagtagtatatatctgaaatgagtatttatgggatagatttaatagcaaaatgtaaattgaaggaaaacaggtcaataaaggttgtcctaatctaacatttgaaaaaaactgatractgaaaatttcctatattggtagaaaacattaatacatttttatagtcagtgaaatctaaataggataacaatgacaaaacacatattatagtttaccttataaaccaggagtaaagagaaaagcttaaatgttgccagaata

SEQ ID NO: 58522 - DNA, 853 bp, Homo sapiens
tgcatggctaaattaagggccagcactaattgtcctaaagcataatatcttcacttgtaaagaacgttagaagaaaaattatagagaaattgggcaatttatgttaacttctgccaaggatattactagaccaggcaatatgttactcatcacatattacatgagacatgcttatactaaaaattatttgttgtttatctaaaaaccaagtttaactgaatgtcctgtatttttatttactaaatatggcgaacctaggtcactcaagttctaactgcaagtaccagaactcaagccaggattgcctaagcaaaggtaacattgtgaagcattgtgcgctattgatagaaatatatcgtggcactatattcagtattttcttttcttgtctatggaaaatgcttgtgtaccggtgtgcatttatttgtatgatagttaaaaggccagtgtttgaaattcctaacaccgaggttggaattaatgctcttccacccgtcacttatgcaatgttactcrtatttctctcagaacctcaatgttcttacttgttaaagggggattattttgcctccactgatatgtaggtaaatacaagttgaccaattggcttctgcctgacactgcatgaaaagttaaacttgaatcatttcattatatcttcacatgaaaactctgagggtagacacttgtaataagaattctgactccatcattgttgttgttgttttctttcttttcttttttttttttttttttttttttttttactttaagttcggaaacacatgcccaaaatgtgtaggtttgttactcaaatatacatgtgccatgggggtttgccgcacctatcaac

SEQ ID NO: 58523 - DNA, 720 bp, Homo sapiens
cattcttttctttcgtttcttttctttttcttctggcaaagtcctgaaagttttttttttttttttcttttagagacagagtcttgctctgttgctcaggccggagtgcagtggcaagatcctggctcactgcaagctccgcctcccgggttcatgtcattctcctgcctcagcctccccagtagctgggactacaggcgcccaccaccatgcctggctaattttttgtatttttagtagagatggggtttcactgtgtttgccaggatggtctcgatctcctgacctcgtgatccgcctgcctcggcctcccaaagtgctgggattacaggcgtgagccaccgtgcccggccagtcctgaaagtttttattgactctatacactggagtacttgtatactggacgcttttaagaactcgcctatttaaatagactctctgttgctgcactaaagtttgcccatgctatatatgtatctactatctgtaaggagtaatggttttgtctcctctttttcaaattttgttctttttattttggtttgcttttgtttctgctaagtatattgaatgcaacctccagaacaatgtttaataatagtaccattaaattttagtcatgcttctgattttaattagactacctttactattacactataaaggtaatattggttgttgttttgaaagagattatttyttttttaagaaactatatcc

SEQ ID NO: 58524 - DNA, 990 bp, Homo sapiens
ttacggtgttaggaagataaaatgaggtctttcataggaaatgtttagtccagcactcaacacatgtttaatgycccataaataccacccacatctaggtaaaacggggaggtcagcatgtgtggacattaaagtaggttatcgattcactgttgtgccatctgcacagaactcagagctttcctagaaataaaggtttacatgcgtagcaaacaaccacctgatgcttgcaaacactctatggctcgtttttcaaagcactgaaaatgcacagcttccataagtccaagacaagaagtttattttgcagtctcacatctttcattccccggttgtttgttggctggctgtcaacatggcaaccctcatctgtcatcagtgtatgtgtgccttctatgcacggcctttcatggagacttgtaggatatgtcttctatttgcctgaaaggtggacactctgccaagacacttatgaatcctagtgttctctgcctttctgtgtaaggtacagtcaaacctcccctaatctgagaatgacatctcctgaaacctctgtgatacaccaggaaatcactagggggacaagcatagaccagtagaatgggatggctgggaaagtaatggattctctgtcttagaataattagaaacattattgcaaatacttttgagctaaaaccgtccctctaactctctggtagttggagaacaggtgttctctacaaagaacccctcagattttattttgcgtggcagaaaaatatttgataggtagcaaaattaccattatagctaaaaatacttttcttgaaaatagagtctcatcaaggactaagacatgtatactcacagaatcctagaatattaagctggtctttctttttttttttaattttatgttaagttctgggacacatgtgcagaacgtgcaagtttgttacataggtatacatgtgccatggtggtttgctgcacccatcaacccatcat

SEQ ID NO: 58525 - DNA, 990 bp, Homo sapiens
ttacggtgttaggaagataaaatgaggtctttcataggaaatgtttagtccagcactcaacacatgtttaatgccccataaataccacccacatctaggtaaaacggggaggtcagcatgtgtggacattaaagtaggttatcgattcactgttgtgccatctgcacagaactcagagctttcctagaaataaaggtttacatgcgtagcaaacaaccacctgatgcttgcaaacactctatggctcgtttttcaaagcactgaaaatgcacagcttccataagtccaagacaagaagtttattttgcagtctcacatctttcattccccggttgtttgttggctggctgtcaacatggcaamcctcatctgtcatcagtgtatgtgtgccttctatgcacggcctttcatggagacttgtaggatatgtcttctatttgcctgaaaggtggacactctgccaagacacttatgaatcctagtgttctctgcctttctgtgtaaggtacagtcaaacctcccctaatctgagaatgacatctcctgaaacctctgtgatacaccaggaaatcactagggggacaagcatagaccagtagaatgggatggctgggaaagtaatggattctctgtcttagaataattagaaacattattgcaaatacttttgagctaaaaccgtccctctaactctctggtagttggagaacaggtgttctctacaaagaacccctcagattttattttgcgtggcagaaaaatatttgataggtagcaaaattaccattatagctaaaaatacttttcttgaaaatagagtctcatcaaggactaagacatgtatactcacagaatcctagaatattaagctggtctttctttttttttttaattttatgttaagttctgggacacatgtgcagaacgtgcaagtttgttacataggtatacatgtgccatggtggtttgctgcacccatcaacccatcat

SEQ ID NO: 58526 - DNA, 1279 bp, Homo sapiens
aatggcattctttgtgtgggtattttctgtactcacattggttttattcatttacgtattttaacccttttgattgctgggttatgtgtttttcctagaaaagcctttcccactccaarattataaataattttctactatcccctcagtattttcgggttttattttttaaatatttatgtgttttatcgatctaggatttattttgttataaatgttactacacttttatagttttctaaaatatacatatgaactttccatgtttcaaatttagtcctaggtattgtaaatattttcttgctctggtggatgcctgttttaattattattttatactgaagaggctactcgccgcatgtaagactttttgcagttttttattacttgcattgaactgtacaagcagttgaatgtacacctgaatctttgatcccatagtttgtcagaggaaatgattacattttcttctgctttccagtatctgtacatcttgttttgcttttctgtgtagttgctgtggctaaaactgttaaaataacattggataatgatgttttgttaaaataacattagatgatggtatttcatcatccacctcttgctcctgaatttaatgagaagctcttagtgacccaccaccaagcatgctgctgagagatggtttctattagcaaatctccccatttgctgagcttcataggacacaggacaggagacacagcagggacagcatcttcacatcactgggaggtcccgcagctccatttccctcacacccacatgcggtgttcactgcctgcgtgggggagactctcactgagaagccacagttcacttttccatcagttgtttttataacacttttgtcttcacggaggcccaaggcctgcaggccaccacgctgcttccctgatccaggcgtccttcccagcacatgagatgaccacagccttccatatccatctcaacgctgcagtgtccgagaaaaggaagcagtgacctgagaggacagaacttttgggtcatttttcctggcgcacatgcgtcagcccagacccgatgtgacccttcactcacagtgaggatttacagggaaaaaggttgactaacactggaattttttaacacccttgttttattcctggctttcacaggattgctcctaatgggttaccatgtagagtaatgtctgccatcagcttctgagagatgcctttattaatgggaggtattcgcttccatcctggctttctaagattttttttaatcaagatgc

SEQ ID NO: 58527 - DNA, 1279 bp, Homo sapiens
aatggcattctttgtgtgggtattttctgtactcacattggttttattcatttacgtattttaacccttttgattgctgggttatgtgtttttcctagaaaagcctttcccactccaaaattataaataattttctactatcccctcagtattttcgggttttattttttaaatatttatgtgttttatcgatctaggatttattttgttataaatgttactacacttttatagttttctaaaatatacatatgaactttccatgtttcaaatttagtcctaggtattgtaaatattttcttgctctggtggatgcctgttttarttattattttatactgaagaggctactcgccgcatgtaagactttttgcagttttttattacttgcattgaactgtacaagcagttgaatgtacacctgaatctttgatcccatagtttgtcagaggaaatgattacattttcttctgctttccagtatctgtacatcttgttttgcttttctgtgtagttgctgtggctaaaactgttaaaataacattggataatgatgttttgttaaaataacattagatgatggtatttcatcatccacctcttgctcctgaatttaatgagaagctcttagtgacccaccaccaagcatgctgctgagagatggtttctattagcaaatctccccatttgctgagcttcataggacacaggacaggagacacagcagggacagcatcttcacatcactgggaggtcccgcagctccatttccctcacacccacatgcggtgttcactgcctgcgtgggggagactctcactgagaagccacagttcacttttccatcagttgtttttataacacttttgtcttcacggaggcccaaggcctgcaggccaccacgctgcttccctgatccaggcgtccttcccagcacatgagatgaccacagccttccatatccatctcaacgctgcagtgtccgagaaaaggaagcagtgacctgagaggacagaacttttgggtcatttttcctggcgcacatgcgtcagcccagacccgatgtgacccttcactcacagtgaggatttacagggaaaaaggttgactaacactggaattttttaacacccttgttttattcctggctttcacaggattgctcctaatgggttaccatgtagagtaatgtctgccatcagcttctgagagatgcctttattaatgggaggtattcgcttccatcctggctttctaagattttttttaatcaagatgc

SEQ ID NO: 58528 - DNA, 1321 bp, Homo sapiens
ttcctgttaaatttatcatgagtccaagctgttcattcaacttatcgtcttggtatttgatacaaaaaatccccattcactgactttttaaaaagtagaatgatgctggtgagttaaggaggtatagagtcccatgttttaaaggaagatgcagctcactcacactgcagcaatatcctttgccggctgaagcaaaataaaaatcagttctactgaaagttgataaagtttaagtccattaacagcgagagtactttatattagatttgcaaatgaatgagaaattaatggagaaaagagctctcacaatagcttcaaaatgggcatatttataaccctattctgcttgccaaaaataattacatcccatttttttctgccaaccatttaaactcatttcatagaaaacggaaaaagagggttggtgcaaatgggatgtttcccgcaagaaagaagaacggttttggaacccttgagcaatttgcaaggcgtgtcaattttggaacgctctgtcttgaaatattcgctttttttatgtttatttgtttacctattgtttattctccaaatcaattacacaacatttatttccaaatgccacaataatggaagactggcatcacatttggaattgattctaatgctgcacagccgcctgctgaggatcctgatccggttcatgagctgaggctgatcccagcgaccccagacctgaccaactctgcattacccagggaggagcaggccagtctgagcagactcaaaggggccgcttctactcggagccactttgcatccactccaccctaagcttctaagatacttcggagcccacacgacactccttcacaggggctgggtggcctggcctgccacttgaaatatggggctgctggcacctgctgtatccttctcagccccaggcatagctgctgaaaaggtgacaggaagagtctattttcatgtcatcacttagttcgtatttgtttgcagctatttcagcctkttacatttgtattatgcattctgaacaagttgctatttgttttcttagttgatgtagtcagctgcacagaaatgcttaatgcttttctcagatgattccaaccaaactgactttgatttcagacagatagcccatggccatgctgacacataaaaccaaccatgacactgggttttttttcagccttttattttttttttaggtttagggacacatgttataggggtactttttttaggtttaggggtacactgtcatagagctaaatggcatgttgttgggggttgttgtgcaggttattttgtcacccaggtg

SEQ ID NO: 58529 - DNA, 713 bp, Homo sapiens
catggagggtccagaatagtggacttaggtgctgcctgctcttcagggcccactgttgcccagggcccccctctactctggtatctcccagcaggccctgctctttttccctccaagggctccttccatttgtcaaaatccaatctttaggctgactccagagttgcttctgtgaatcccccactgcccagcccagagccctctcagtgcctctgaaccccttctgcagtttgttgagacctcttataccttctacttcrtagtggtgttgtttatcaataattgatacaatataaaattcttggggacagcttcttgcatccccagcatagagaacagtgtgggtcagataagggtccaggcactgataggtggataggtgacacaaataccatttgaagctgttaaagagcactacaggatggcagaaggaatccaggaatccttttgtgggtgtttttttgctttttttgtttgtttgtgtgttttttgagatgaagtctcactctatcacccaggctggagtgcaggggtgctatttcagctcactgcaacctccatctcccagactcaagtgatcctcccacctcagcctcctgagtagctgggactacaggtgcacaccaccatgtatgcctaattctttgcatttttgatagagatggggcttcgccatgttgcccaggctgttctggaactcctaaactcagggg

SEQ ID NO: 58530 - DNA, 593 bp, Homo sapiens
aagcactctgaagcaatgtgtgacactcatgtgaccagcataactcccggatcaacacaaatgccttgttagagaaagccccagagtggctccctcctagtctttgtttcagatccatgtaagaaagctttccctaataacacccacactggtcttgtcccaattatttgttacaccacactcattttakcatggcaatttgtgaacacctgactcatacgtgccagttttgcataacaggcacaacacctgaaggacaggggagctactgctttttactggttttgtgtctcttgcagctccaagcccagccaaagctgagcaaagaggtgctgcatggttatcaatccgaatgaccacgatctgacctgaatggtcaggaagtgcaaggattctgcattctatggcaagctcaggctcggaagacatattgagggtcaggtgctcgaaagtaccagcctgaaggatctccctgactcacctgccatctcagaaccagggtttttctgttgctgcttctctcaggggagtcacattatatacaaataaaacataaccagcaaaggctaataaacatcatctgcaaatggatc

SEQ ID NO: 58531 - DNA, 593 bp, Homo sapiens
aagcactctgaagcaatgtgtgacactcatgtgaccagcataactcccggatcaacacaaatgccttgttagagaaagccccagagtggctccctcctagtctttgtttcagatccatgtaagaaagctttccctaataacacccacactggtcttgtcccaattatttgttacaccacactcattttagcatggcaatttgtgaacacctgactcatacgtgccagttttgcataacaggcacaacacctgaaggacaggggagctacygctttttactggttttgtgtctcttgcagctccaagcccagccaaagctgagcaaagaggtgctgcatggttatcaatccgaatgaccacgatctgacctgaatggtcaggaagtgcaaggattctgcattctatggcaagctcaggctcggaagacatattgagggtcaggtgctcgaaagtaccagcctgaaggatctccctgactcacctgccatctcagaaccagggtttttctgttgctgcttctctcaggggagtcacattatatacaaataaaacataaccagcaaaggctaataaacatcatctgcaaatggatc

SEQ ID NO: 58532 - DNA, 593 bp, Homo sapiens
aagcactctgaagcaatgtgtgacactcatgtgaccagcataactcccggatcaacacaaatgccttgttagagaaagccccagagtggctccctcctagtctttgtttcagatccatgtaagaaagctttccctaataacacccacactggtcttgtcccaattatttgttacaccacactcattttagcatggcaatttgtgaacacctgactcatacgtgccagttttgcataacaggcacaacacctgaaggacaggggagctactgctttytactggttttgtgtctcttgcagctccaagcccagccaaagctgagcaaagaggtgctgcatggttatcaatccgaatgaccacgatctgacctgaatggtcaggaagtgcaaggattctgcattctatggcaagctcaggctcggaagacatattgagggtcaggtgctcgaaagtaccagcctgaaggatctccctgactcacctgccatctcagaaccagggtttttctgttgctgcttctctcaggggagtcacattatatacaaataaaacataaccagcaaaggctaataaacatcatctgcaaatggatc

SEQ ID NO: 58533 - DNA, 593 bp, Homo sapiens
aagcactctgaagcaatgtgtgacactcatgtgaccagcataactcccggatcaacacaaatgccttgttagagaaagccccagagtggctccctcctagtctttgtttcagatccatgtaagaaagctttccctaataacacccacactggtcttgtcccaattatttgttacaccacactcattttagcatggcaatttgtgaacacctgactcatacgtgccagttttgcataacaggcacaacacctgaaggacaggggagctactgctttttactggttttgtgtctcttgcagctccaagcccagccaaagctgagcaaagaggtgctgcatggttatcaatccgaatgaccaygatctgacctgaatggtcaggaagtgcaaggattctgcattctatggcaagctcaggctcggaagacatattgagggtcaggtgctcgaaagtaccagcctgaaggatctccctgactcacctgccatctcagaaccagggtttttctgttgctgcttctctcaggggagtcacattatatacaaataaaacataaccagcaaaggctaataaacatcatctgcaaatggatc

SEQ ID NO: 58534 - DNA, 708 bp, Homo sapiens
cctccatgctaaatgccctaacagcagcatccaggcagccatgataataacaatccttagttgacatgcatagagctcctccttgctccagatgctgttctagtgccttttttgtattgactcatttaatcctcacgacaagcttatgaagtaggtgctgtaagaatccctgtttgagctgggcgcagtggctcatgcatgtaatcccagcactttgagaggctgaggtgggtggatcacctgaggtcaggagttcaagaccagactggccaacasggagaaaccccctctctactaaaaatataaaaattagccagtcatggtggcaggtgcctgtaatcccagctacttgggaggctgagacaggagaatcacttgaacccaggaggtggaggttgcagtgagttgagatcatgccactgcactccaggctggacgacaagagtgaaactccatctcaaaaaaaaaagaatccctatttgagagatgaggaagtgaagtggttcaggggtttgcctgaggccacgaagctgtggaccaggtagtcgggtccagagctggtgctcaaaaccagtgctgcctcttgcctcaagaagagcatccctaggatgggataatccaaccagttgtggccaaaatatcccttctgaacatattcctccaacaaacaagcacaagccaggaaatatttttaaaaagaatgtgagg

SEQ ID NO: 58535 - DNA, 920 bp, Homo sapiens
atatgcagtatacatatacacaccagcacaggaaatatacacactcatttctaggtagtgatggcttccgatgaggaagagaaatggaatagtgtaggatttggaagagacaaagtggctgttttaggtttctttctttttctttttattctttctcttcttttgagacaaggtctkactctgtcacccaggctggagtgcagtgtcgtagatcataactcattacaacccccaaactcctgggctcaagggatcctcccacctcagtctccctagtagctaagattataggcacatgccactatgcccagctaatttttttaaacttatttttagtagagatgaagtgccactgttgcccaggctggtcttgaacccctgggctcaagcaatcctcctgccttggcctcccaaagtgctgagactacaggtgggccaccatgcccagcctgttttagatttctatgacactttatttatttaataagtacatgaggtaaatacagcaaaatgttactgtatcattttttaaaaaaacctctgggtctgaggtacctgggtttgaagaaactttctgcttatttgcagtattttttcaagtatccactggactcttgattttttagcttgtctttttcatttttacctctttgccacttaggtatttctttgtgcaacacttcaagtgtctactttcctccacattttcttcatttttatttgtccttgcttcctacctactttttttttcctcctctaaccaacacacaattgtgaccacagctactccttacacgactctcattttccatccaccatttctccaaatgacagctaggaaaaatgcaaactccattgcacaagacattctgttaggttagaagccattgcacacagtcattgaatatttatgttcatgc

SEQ ID NO: 58536 - DNA, 738 bp, Homo sapiens
ggatccaattctagtgtttgccacagtactatttcatttggtcaattagagaaactgaacagaccatttgtaaatgtcatcctaggtcagttagagctgcagaaatgcctcagtggttcaagataattatgaggcacacagwtaaaaaatagaaagtatgaattttagtactgtagatttagtactgtagtttcaatcccacatattaagaaaatttacatgatcatgtacatttgacttattccacctcagatatttgcaaacctgctcgtgttcatttgtaaacgtctgaaaatatattacaaaactatttactgaagtcagaaaaatgttactctgctgccttgtttctgatgttttcgtggagaacatcatcattaagtttggcaagtgtaatactgtataggtagtgaacagtaacattggcatactttaagtccagaattaagaaaatagaatgattgcactctttggtgtagttctgctgtcaacagatgcacatttaaaaaaaaaaatcacatattcaggctgggagcggtggctcactcctgtaatcccagcattttgggaggccaaggcgaatggattatctgaggtcaggagttcgagaccagctgggcccacatagtgaaacctggtctctactaaaaatacaaaaaatagccaggtgtggtggcacatgtctgtagacccagctactcaggaggctaacaaaggaaaattgcttgaacgagggag

SEQ ID NO: 58537 - DNA, 693 bp, Homo sapiens
aaagttggtaattaaagggagaaattaaaattcagggtaactaaatcactttagttgttaaggacaaattttcttttacagagtaattctagacaataaattttaagagaaacaataaaattagaaaattaccatcattttgcaacctcaaatgaaataagtgattcatgcaatgattatcaatggatactgtgaataaaccttctctgaaaaggaatttagacactgaaagctgtaactgccaggtttgcaaactgttcactagaagacagaaagtttctgtcttccaaatcccttttcagagaacttttgttcacaatactaaaaccatcaggagaaaagttgataggaaaatttacaattgaacaacctggcctcaagcgtcttcacccttcaacctccaaccaccactaaaatgggacaagcagatgttgcgtctcctgatgtgatacaatattaagtacacagcatcacctttgaaatattttagttaaaaatgatgacactgaatcaaatcaaaccatttgktctatcttctaattttcaggaaatacaatggataaagatacatagtgactaacatcgtaagaaaacacaaaaaattcagaatgtagaaattctatcaattgtttcagtttcttcaataactcgataacgttgggagataaagtgggctgtatatgcaacaaggga

SEQ ID NO: 58538 - DNA, 610 bp, Homo sapiens
tgcacgaaggggagatgggatttgctagaagaaagggaaggatggtgaggctgacagcagaggcaaaggcacagagatggggaaggggcagctgcatgtgagccaggatgaacactaaggcagggtgaccgaaagtaaagcgcgtgtctgcctgctggcacttccaccgggattctgggtagcatatagacttggtattaaatgatgtagaattgtgttgtgagaaaagttattttcttttcaattctcttttaattcatctgattatgtcagggagaaagactcatgtgtgcgctaatatattttttaaagcctcaatattcctctcaacctttttttttaagcaaaaaatgcaagtttttgkttcagagacatcatcaagtaacagtgtctcttaaatttaataactttggcttgttcttgtatttattttgaggtttccttctatttatggcaagtgatataatttttccatttgtatagtaatgtgaggtttcctctttaagtaattttaaatggaaatgtatcattttaaattaaagtactaagtaaataacaatgcaggtggtcgagggcatggaaaagtccagaaatgatgtaggagtgatga

SEQ ID NO: 58539 - DNA, 714 bp, Homo sapiens
tttctgatggttcttaatgtaacattacaaatgacagtgcctgcatactgctcaataaacagttgactgggtccatattgagctgaacttcagcccctaaaatccatagttatctaaaagagggaaggaacactaactaacagaaagaaagatgcactttgtgtgaagagggttggttttctagtccatccaggaacaagtytggggaccttggataaggctattcatgtctttgtttacggtattcatctgaaaaatagggatgataaactgtgctaaagaataagttcaaagagatactgtcgaatgtagggagataatttattataaaatcgttgaacttcttaaaaaaattatcaaataagcaacactgttatctaaaaaataatataagaaatctgatatgcttcacttgcaccaccacccacacacaaatttgaccagtccagttttttctcctgattaattttaccaatgtaagtttctactgtaagttaaaatgacaaaaaataaaataaaacagtatgtgaaatttccctctctcagtagcaacttcttgttaacatagtctgagcatccatagaaatttattttcagctattcattttggattacaaaaacctataattcctctgtccatatatctattcattctatcacatttatttatttagccagtattattattggttgtcaggttacagaatgagcaaa

SEQ ID NO: 58540 - DNA, 714 bp, Homo sapiens
tttctgatggttcttaatgtaacattacaaatgacagtgcctgcatactgctcaataaacagttgactgggtccatattgagctgaacttcagcccctaaaatccatagttatctaaaagagggaaggaacactaactaacagaaagaaagatgcactttgtgtgaagagggttggttttctagtccatccaggaacaagtttggggaccttggataaggctattcatgtctttgtttacggtattcatctgaaaaatagggatgataaactgtgctaaagaataagttcaaagagatactgtcgaatgtagggagataattwattataaaatcgttgaacttcttaaaaaaattatcaaataagcaacactgttatctaaaaaataatataagaaatctgatatgcttcacttgcaccaccacccacacacaaatttgaccagtccagttttttctcctgattaattttaccaatgtaagtttctactgtaagttaaaatgacaaaaaataaaataaaacagtatgtgaaatttccctctctcagtagcaacttcttgttaacatagtctgagcatccatagaaatttattttcagctattcattttggattacaaaaacctataattcctctgtccatatatctattcattctatcacatttatttatttagccagtattattattggttgtcaggttacagaatgagcaaa

SEQ ID NO: 58541 - DNA, 1857 bp, Homo sapiens
tgttagcataagtaacataccgtacagttttggctggaacattttttttcccattttattttattttattttatttttattatacattaagttttagggtacatgtgcacattgtgcaggttagttacattggctggaacattttaaaccttttcagcatcgatcctatttaaatactttgtagtacccttcatgagcaatgattaagactacaaaacaaaggaagaggtataataaggatggttcccatctgcctattttcttaatctatttgtctactctggcttccctagattgtgcctgctttctcagaatgaaaagaaaattaataagtgtttcaaaagtatgtactcaagagccagtttgccagagtacacgtcattcttgccattgcttagactggttccacattgtaaaaaaatgtagtgctaatcctgatcaaatgaatatgcctcccacatccatctcccttttacctgttacaattgtctaagactaattctcatttctttgtttttatttgaaagtttttcaaaagtattgagctgattattatattttatttttgccttaacgaggccaaggaaataatttcagagaaacaaaagtgaatgataaatagacctagggtgatatgtgcttaaaatactatgcattattttagtttttcattgataatttgaattgtgtgcttgccttgatcttgaaatttaggatcactgataaaatttacctatgcatttcagatagttttttatttgcatataaatatgaaagtacaaaaatatgaaggtgaacactgcttgtgtgtgtgcactaatacttatgtaaaataaattcagaaaacaaaacaactatttactaaaaactccatctcattactaaaaccattataacaaaagtcagggtaacaaaagaatttgagttggaatttatcattacactggaactgctagtccttaatgtcatgtgaaatgctgtagatccataatgagccaattggaaaatatgttgacttctaaaatttgctttcttaaaggagtttaaaacctagaacattcatcttctgagggtttttcttaggaatatattatatgacttgaaggcaacttaaaacttcatatatyggccaggtgtggtggctcacgcctataatgccaacactttgggaggcctaggtgggcagattgcctgagctcaggagtttgagagcagcctgggtaacatggcaaaactccgtctctgcaaaaaaattacaaaaattagccaggcatggtggcacacatgtgtggtcccagctacctggggggctgaagggggaagatggcttgagcctgagaggtcaaggcctcagtgagcctagattgtgcctctgcactccagcctgagtgacagagcaagaccctgtctgtttaacaacaacaacaacaaaaaaacccacttcatatattgtatgaaaacttcatattttttgataggtggatatttgaaagtcagacttctttaaatgccacaaaaacagcactgggttaagagtcattgtttttcatttgaatccttgtcttgcactttcgtgcagtgtggtgagttgggtacctctctgggctgacgttttctcatctcaaaaaagaaggcattggatttgaaagtgcttttgcaagattataatttttaaaaaagcaatacttgtaaaacaggagtaaagaaccagttccattttcttgttaacatcaatagattaaatctctgaatctctcaaaaagacacttcgaggcttttgggccaaatctagagattggatggctcaattatttggatgaacataacatgtaagtctaacacattgtgggtccgtcc

SEQ ID NO: 58542 - DNA, 904 bp, Homo sapiens
tattataccattcaacaatattatataaataatcaccaacccagagtctctgcatctcccattatgtggctgtcttcctctctaattgccagtgttattttctggttacaagcatttcaggtagaggattgtttttagaagagcaccaatagatttttatctaaaccatgaaagaggtttttacctactagacttctgcactagcattgctgagatactgtgtctggcccaaagactgggcacaattccagaagttcagcttaaaacctcagtggggagagcaggtacatacaggctgccccactgggaaccttgaatgctgaacagctgaggatcagcctaattgattccaacctgaggtgcagagccttattttatgagggcaaaagaaaaaccatgagaaataattgtatccaaaaccttcagaaagaacaaataaaccctgcattattctatttattctattgccccattttacctaataagttataaagtatacaaaaagtaaaatcatggctcccttatataaagactccaactaaatatgtaatgtggtcaaagcctggcgaaagtttaacaaaataaaaaagcaagcaaacgcagagtatatgctaaatatattgtcttgattcatagtgtaactgtctactgaattccttcagtataggcttgataagaccttaagcactgcatatcagcctgtactgcaagatttattgctgaatagtctttttatactttagagagtattttatttatttcattttccattaataaatcttctgctctttcacgtggacatctatggctttttcttttaaaataacgacaggctctatgactccctactctcttccctctaaatatatagaatggggaragtgtagcaagctaaagcacacat

SEQ ID NO: 58543 - DNA, 421 bp, Homo sapiens
aaaattgtattagtggcttctgaagagggtgcaagagaaaagaatgtaataaaagaggggcacacagagacttacaactgtatctttaatgttttgtttctttaaaaaatatgaggccgggcacggtggctcacgcctgtaatcccagcactttgggaggctgaggtggacaaatcacgagstcaggagttcgagaccagcctggccaacatggtgaaaccccatctctactaaaaatgaaaaaaaaaaaattagctgggtgtagtggccggcacctgtaatcccagctacttcagaggctgaggcagcagaatcacttgaatccgggaggcagaggttgcagcgagccgagatcgcaccactgcatttattccagtccaggtgacagagtgagactccacctcaaaaaaaaaaaaaaaaa

SEQ ID NO: 58544 - DNA, 820 bp, Homo sapiens
ctattcatttcgtctaactgaaaccttgtaccctttaaccaacatctcatttccagtcacctctccccagctcctggcaaccaccattctactctctacttcaatgagtttgactttttttagattccacatataagtgagatcatgtggtatttgtctttctgtgtctggtttatttcacttagcataatgtcctctaggttcatccatgttgtcataaatgacaggattttcctctttttatggattaatagtattccattgtctgtatataccacattttctttagaagaaatgtgttacagatttcatgtgtgatacagatgaaatgaagtgtccatttcatctgtaaatggacacttaggttgattccatatcttggctattgtgaataatgtagcaatgcacacaggagtgcagatatctatttgagatactgattgcaattcctttgaatatatacccaatagtaggattgctggatcatgtggtagtgctatttttatttttttgaggracctctatactgttttccataatggctgtaccaatttttatttccacaatagtgtattagggtttccctttctccacatcctcaccaatacttgttatcttttgtctttttgatattagctattctaacatgcatgaggtggtatctcattgtggttttaatttgtgtttccctaatgattagcaatgttgagcatttttacctgtacctgctggccatttgtatgtcttcttttgagaattatctgttcaggtcatttacccatttttaatgggattgctttcttactgttgagttgtttgg

SEQ ID NO: 58545 - DNA, 698 bp, Homo sapiens
ttcttctgatgtcccagggattggaactatttggcataagattgctcttcccctaagaccaagacgactctggagccaggcagtgagtgatttggatggggccccaccgaattggaaaggcaacaggaaatgtgatgagaggaaaaagacagctataacaatagaaggaggaagtgaagcccgaaaaacaaggcaagaagaaaaagtaacagtgaactacaataatccatgaggaaacgaaaaccacacagaaaacaaaacaacacaacaaaaaacccaaaaggaattgcaacctgctgatttagatgcaggggacccgtttttgaccatttccagaggtagggctcttatttgcagtgatccagttaacgaatggtactgcccaagtttcccttttcctacgcagaatgtgaattaaaacaaagctctttgttttcaggttttacataccacagatcacacagccacatggagctgggaaatgtgatcgacttgaagaagaatgaatacggtgaagatyggaaagaagacatgagctgatcaacttagtaggagtaaggaaaaccctttttttttttttttgagacagagtctcactctgttaccaggctggagtgtgatggcgcaatctccgcttactgcaacctccgccttctaggttcaagagattctcctgcctcagcctcccaagtagctgg

SEQ ID NO: 58546 - DNA, 749 bp, Homo sapiens
cctaggctgcccaaagtgctgagattacaggtgtgagccatgcgcctggccaatttcatatattcccactaaactttcctcttccttccatatatatataatattacatatcttacatatgtacaaaagattatatattccattacatatcttatatacatatgaaacacatatatatgccatatatatgatatgaaatatatatagtaacatatataaactgggagataaggtgataagttgtagtactgtgcctcacctgctcattaccctktggtaagctccttatgtcttcagagaattcctggggcatgaatgtgtctccttgtgtaacaagtgatcaatgcttctttagaataaagaaaaaacccaaactatgaaacagaactggcattttctaaaaggacacaaaagccaaggcaagaacaaaggaagcagtacgggaaagttggggtgtggggacaactctttcagagtgataggagagtgtgcccagaccttggcccgccccggccacactgctccccagactacctgcatccattcccacagtgcgctctttgctatctcccttctagaaaccagactaggctgaaaagccaggataaatggatatagtgcccccgagtctctaatttctgggcacctcagggtcaataatagtaccgcagaagaatattccagaggtcagtatatttggcaaaaactatctttaacccagagaggtgcaacaactttagccttaggtc

SEQ ID NO: 58547 - DNA, 553 bp, Homo sapiens
taagagaaaacagtacctacagcctactggatttgaggggattaaatgagataatgcagacagtgccaacaacagatactcaatgatagcctgctgttaatgttaagcataattttctatgacaaacacaactctttatatactatttaggattttgttattttacaaaaatattcactttaatcctatttaaaatgagatcatttttaaaagaataatttatttacttagatttcttccattaataaagtagctcttggttttttctcatctaaaatagaccaataaaaggagaatcagaccaatatcagatcactaaaataaatcatattaatttcacggtaagagcctttttctgtcatccattcctcacccacttacatggacagagctacatatattttcatctattattcttgcctttacmaatatttcatcagtattttaatatgctatagatttaaagctaattaaaaattaaagctatattcgtaattacaaccatactctttaacacctacaattaccaaaatatttaaaactagaaaaaaaa

SEQ ID NO: 58548 - DNA, 553 bp, Homo sapiens
taagagaaaacagtacctacagcctactggatttgaggggattaaatgagataatgcagacagtgccaacaacagatactcaatgatagcctgctgttaatgttaagcataattttctatgacaaacacaactctttatatactatttaggattttgttattttacaaaaatattcactttaatcctatttaaaatgagatcatttttaaaagaataatttatttacttagatttcttccattaataaagtagctcttggttttttctcatctaaaatagaccaataaaaggagaatcagaccaatatcagatcactaaaataaatcatattaatttcacggtaagagcctttttctgtcatccattcctcacccacttacatggacagagctacatatattttcatctattattcttgcctttaccaatatttcatcagtattttaatatgctatagatttaaagctaattaaaaattaaagctatattcgtaattacaaccatastctttaacacctacaattaccaaaatatttaaaactagaaaaaaaa

SEQ ID NO: 58549 - DNA, 596 bp, Homo sapiens
gtggggtttaatattcgtccgaggatgccctcctactacttactattgaacatttttgtaatctcctccctgcccgagttgctcacaagggctttcctgttacacctgcagggctgtctgtgytggtgtgtgggaggaggtgcaagaggtggacacgagcgaggcgctgtgttctgggttgttccaagaggttcaggcctttacaagtgaggctttgattctattttttgctgaactagctcagccacttcctgtgtttggctgtgcatagtgcctcgcttcactgtcggctacttgagccccgcgagccagccagcgcgctcagcagccagtgagactattttaggtcccctcacaatggccttctcatttcccaggcgaaaatgagcaagttggtcttgcattggccacttgtcagccgatgacaactttgacttgggctcccctccccctcccgaaatccctagctcagcaaatatttgaacctgcccaagttaatcatgaagctgcgatctttatctaagggagacgtgcgagcgcctgggctcctttcctccccgatacagtagcgaaatccagttggcttctcaatgagg

SEQ ID NO: 58550 - DNA, 634 bp, Homo sapiens
tccgagtcagaaaatttagtttgtgccctaattatgctatctaatgcagcactacttttgatgtaatggagtcacctttctgaaattaacatatttttagtttttattcattcttctacaaaacagatttataataatactttcaggattatgtgagattaaactaaaagattttaaaatacattatttttgtgaaaccastttattataattttcaattaaaatctcaattgttattatgctcatctaaatataaaattgtatgaataggtattcaaacaggctaggatttttgcataattaaagttatttttctttaacaattgattaattgaaattgacttgaaattttataaacatctgttgttctcaggcattaataaagctaaaagttcattcaaggacagaatccattctgttccctaagtgttccactctattgaattatattcagaactaaaaagctggtagaatacagactgttaatcagctatgaaggtctagtaactgttatataaaactatttttaaaaacttaggctatctagactttaaaactataaattgtaatttataggttataattgtaagtactttaaaaagtatatataatacatgtaacttattgacttcct

SEQ ID NO: 58551 - DNA, 718 bp, Homo sapiens
tttgactgaaatgtcattacatggkacataactatatatatttacaaagctactcattcaagaggtagcaaaaaaaaaatatgagaacatgctgttattccttcccttcatcaatacttttcttaccagtggtcttatatttttctaatatcaatttgtttataagtcaggaaagagagagagggtaaaaaatggaaaataagaaataacagaggtaaattctctgtgatcttgtaatcagaatgacaatgatgtttaagtctaggggtaaagagcaatgtacaagaaatcccttcatcccctcaacatggccgtattgccaaactgaagctgttaaataattttgaagtgaaaacttttatctattgccaggggaaacgacaaaaaaggaaaatgatgaaaaatgtgttgatgtgttttttttgttttgatttgtttttggtactctctctttatgagtaaggctattctaggaaaggagatatatttcatatatatcttaaattcagtttcatacagaagttcaaatatttgaaaatcagtgacctagggcagaaaaataattctcaattttctacgaccattgtcaaccaaatttttcattgcaaagagtagatataagtttttctgatatatatatttctgatatatatatttttaaaaatatcagaaaaatgtatatctttatacaatttgtatgtatattttataacagtta

SEQ ID NO: 58552 - DNA, 1306 bp, Homo sapiens
tgcatcttcttctgtcaagaaaaaggcaaagcttaagatattcttgggcctcatggcctattgaaaacatattgtgagttgtttcaaaaaagattcaagatgtcttacaaaaatagaaattgaaaatttgttataaagagtggaagctatcagggcaaagaaacaataaaaagaagataattagatgaagctagggataaagtaatattcactattagggtcaatataagtgagccatgcaatatattaattgctatgcttcatttagacaaataaataatcattttgtctcctttattaagatattgctcaaccaatcaattgaaatatacaatcaaaagatgtttcatttcactgggtttgaagaaagagattcctaaataaactgggaggtgatctttatgattacctccaacatcatgattttatgactcaggccaattctaaaggcaagtggaattaacaccagtgagatttgctatgaaggactttctgttccatatggatttcttctactacaaaatctccttctccccagaccttttctacattgtacaatctattataccaggggctggcgaatattttctgtctttacagaaaatgacccaatagtgaatattttggacttcttggggacatacggtcttgccagaattaccgaactctgccactgtatcaaaaacagctatggatgatacattaaaaaatgagtgtgactgtacttcataataaatacaactttatttacaaaagcagacaaaggctgaatttggtccacaggcattgtttgccaacctctgctttagaccaagattgtgtttcacaaaatgttccacagtactccaagcagagatgcccccggaacctacctcgaaatgtctttaataccttgtattttattcttaaaaggcattataattgtgcattctactttataataataaaattcaataataatgtacagrtatttcaagtttttcacattataaactaaaatgtttgctactggtatagtaagaaatttgttcttgccatgagagacggctggcctttcctctcagcttctgggaggtaccttatgtcatacttcgttagaagtgtctttgcttgggtggggactctccaggccaggaagaccagccatgtgatttaggctgggggcttgaggtcacacattctcagttaacttagatactgagttttactgtgtgggcaatcaatcaatcatatctatgtagtgaagcctcaataaaaactctaaactttgaagcttatgtgagtgtccctgtttggcaatactcta

SEQ ID NO: 58553 - DNA, 1306 bp, Homo sapiens
tgcatcttcttctgtcaagaaaaaggcaaagcttaagatattcttgggcctcatggcctattgaaaacatattgtgagttgtttcaaaaaagattcaagatgtcttacaaaaatagaaattgaaaatttgttataaagagtggaagctatcagggcaaagaaacaataaaaagaagataattagatgaagctagggataaagtaatattcactattagggtcaatataagtgagccatgcaatatattaattgctatgcttcatttagacaaataaataatcattttgtctcctttattaagatattgctcaaccaatcaattgaaatatacaatcaaaagatgtttcatttcactgggtttgaagaaagagattcctaaataaactgggaggtgatctttatgattacctccaacatcatgattttatgactcaggccaattctaaaggcaagtggaattaacaccagtgagatttgctatgaaggactttctgttccatatggatttcttctactacaaaatctccttctccccagaccttttctacattgtacaatctattataccaggggctggcgaatattttctgtctttacagaaaatgacccaatagtgaatattttggacttcttggggacatacggtcttgccagaattaccgaactctgccactgtatcaaaaacagctatggatgatacattaaaaaatgagtgtgactgtacttcataataaatacaactttatttacaaaagcagacaaaggctgaatttggtccacaggcattgtttgccaacctctgctttagaccaagattgtgtttcacaaaatgttccacagtactccaagcagagatgcccccggaacctacctcgaaatgtctttaataccttgtattttattcttaaaaggcattataattgtgcattctactttataataataaaattcaataataatgtacaggtatttcaagtttttcacattataaactaaaatgtttgctactggtatagtaagaaatttgttcttgccatgagagacggctggcctttcctctcagcttctgggaggtaccttatgtcatacttcgttagaagtgtctttgcttgggtggggactctccaggccaggaagaccagccatgtgatttaggctgggggcttgaggtcacacattctcagttaacttagatactgagttttactgtgtgggyaatcaatcaatcatatctatgtagtgaagcctcaataaaaactctaaactttgaagcttatgtgagtgtccctgtttggcaatactcta

SEQ ID NO: 58554 - DNA, 478 bp, Homo sapiens
tcccccactttcccggggtgaggcctgctattttgtcstggtgccattgctttcacagtcttctctatgacaagctttgcaagaggcctccaggaatgggagaactactccctgggcctccatgtaaagtaatacaagaattcacacccatcttccttgtctgagagagattaaattgtgggctgagatagtcaaatgtttttcttaaggcagtgaaagcaactgtgttcaccaaaaattggatcaagtgagggtgcagccaatgaaggaaagagtacagaataaatgacctgtggtgggacagggactgatgtggtcaatgacatgaaacagacaaaacctcacccacaagtgatagatggaaacccaacacaatatgggctgtagcgatcaggaccatacgagaggctagctcttcattttggctaaattgtcagaggcttggaggaaaagcaaggtggcatggcagaaaggacaa

SEQ ID NO: 58555 - DNA, 603 bp, Homo sapiens
aacatttaacactttcaaagtagttgggaaatacctgaacccaggatattgaggtctcaagctcactatttacaaaagctttacaaagctaaattgtgagttaatcsgttcattctaggtacaagatagtttcttacttttaataataaattactttacttcgttatatttattaaatgcagagatgtgtgtgagagttggtataaaatagtaagaccacgataggctacatactatgccaggcccactacaaaatgaaaatgcagagacccttgttcaaattcaagagtgcaacagcagcgcgttagtccttttaagtgcgggccctctgtgacttcacagatcgcacgcccgtgaagccagccctgcccagagtcccttttcattcactgggtcctcctccctcgcgtcacagtcctggggtgcggggatgctggcgttgctgtcacactgccgagctttaggtcaaactctcagcaccgcgactagttaccctgaaatcactggggcccggtattacaaaacagaacacactttcctctttcttcccctttatttaaaagagatgataggctttacgagttatttttaatagaaattttt

SEQ ID NO: 58556 - DNA, 2099 bp, Homo sapiens
ggtagcaaaatgtgaagaccatcagctcctaatgctttcataaagcaagaagcatcacattaataagggttctcttcctatctctctaattaattgtggttgtatatttgtatggactttgaatttctgaaagtacaagtaattaaggcatggggttattcccaagctgttggttgtcctttagatgataactacaaacaagcttctaataaagaagttttttttttcttggttctatatgccataatgctgaaattttggttctaagcaagtaacaactgcaataaccaagctaggcgatactatctgaagagactcaacatgaaacataactgtgctatgcagcagaaccaaaagcaggatgccagaaagacttactataataatcttggtgatttgcacctaaaattgaatttacatgtcttcattcacaacccatgagctttgtgtgtgtaggtttgggagaaaaatttcagaaagcactacagctttatatacaaagaatacggctgggygtggtggctcttgcctgtaatcccagcactttgggaggctgaggtgggtggatcacctgaggtcaggagttcgagaccagcctgaccaacatggaggaaccccatctctactaaaaatacaaaattagccaggcgtggtggcgcatgcctgtaatcccggctacttgggaggctgaggcaggagaattgcttgaacccaggaggcgaaggttgtagtgagccaagatcacgccattgcactccagacaagagcaaaactcccatctcaaaaaaaaaatacaagtatcatggtttggggagcaaaatttgttcaaaatatgggcatctggaaaggaaaaaaaactcttatggagaaaacactattaccataggcataacagtactgcagtgtttaagtgataggcctcatctcagatgatcaagtggtctcataagttttctaatgttttgtgtaccatgttataagatagtacatgtagaaatcatattaagataacattgcagttactttcagcatgcagtatgcttgggatctgagatccttcacttaggttgtgcatttttcttggagccagaagttacctgcaagatcactgggccacccatctcatataatttaggggaaaatggggccagtgtagctggctcgttgttaatcagaggccacctaagcaaccagtatgtacaggattcaggatcagaagcgtaacgtcctaaagccaggacaacattatttctacaggtatgtggaagtgttaccagggaagacagagatacttcttagacagtcttttctttaatgtatccctccgttagtgcccaatattcctaattcttacactttctacatgaaaggcactatgcaagataacatctggaaagtgcgtttagccccaagccgctctcttcctccaaacggcagaacttagatgctcttagtgtttactctaaatgcatcagctttctgtgtcctcctctggagtttctcctctcttgcccatcctctcttttgaattttgacagatgagtctcccaggaaacttgtgcatcttttcaagattaccctgtataatttcaatccataaaaatggtgacaaaatcaaccaaccatatcactccatttgaagctcttagaatcactatcttcttttgtgagtatagctcaaatgattatggcatcaatactatattattggttcctttatttcctttttattatgagttttttctttttattgtgagttttaaaattgcaattgtataaagaaaaagatactggatgtttattgtcttgcatataatcatactggccttcatgttttcaagatggaaagaccaaaaggaaaagtaaagaattagagctttatttacatttccttagtcatctagtctccaaaatgtactttttctagattcctctgcttctgcttaagttatgatgattctttacccaagctgggaaacatggaatcctctctgacaatggtgtccttttctctgttaccggttgtcaagttccattgttatttgtgtgtgttttttttctttctggtgtgttctatctgttctttctcattccttcct

SEQ ID NO: 58557 - DNA, 558 bp, Homo sapiens
tgtgtagcattgttgctattggtcactctccatgatttattgctactacggtttcttggtctcctttctatctctttgcacattcatccttagttttttttttttttttttttgaggtggagtctcactctgtcatccaggctggagtgcaatggtgcaatctcggctcactgcaacctctgctttttgggttcaagtgattctcctgcctcatcctcccaagtagctgggattacaggcacatgccaccatgcctggctaatttttgtattttagtagagacagggttttggcacgttggccaggctggtcttgaactcctgacctcaggtgatccacccgccttggcctccaaagtgctgggattacaggcatgagccactgtgcccaacctcatccttagctttctttatttgcacttctttttctccttgctcctgggatactggtggtccccarttttcttcacttttttagtgtgttttcatttcaatatgtttgttagaaaatcatatctgcactcatggtttaaactttgatttattcattcatttgaca

SEQ ID NO: 58558 - DNA, 874 bp, Homo sapiens
gtctggatccagcctagcaaagaggctgctccggatggggaggggatgaaaaccctgcgggtccgacgcccatgcccacgttgcccaggccttcacagacccccaaactggaaccgccgggacgacgactgccaaccggccacacgacccaggcagagacgcggggasacgctgaccagaagaaaggccgacgtgcaagaaacccaccctccggcgcacagggcccatgtgtcccaaggcgcacgcacacacagacggacagagacagaaagagagggcgaccgaaagagcgagaagggagagagacagagagagagagagagagagagagacgtgagagagagacagaagtcggcacacagacacgcactgcgcgcgcacacacacagacacacacacagacgcatccccccaacacacacacacacacacccataacgaacacacacgtacagcagggaacacccacccgcaggcagcccctgaaggtgccgggttctgctctccgcgactaagagccaccggtgagagagcagcccacgggcacacaggcggacctgtgctcgtcatcacaagggctccacttttggggagactcacccgcacaccgtccgcgcacgcctgaggctgggatgccgcgctgcctcgccggcgatctgtctgagttttcttcctcctggggtttcttcctgctggtggaccctccgcgaatcccggcctccggagaccgtcctggtaaatgcctggccaggactgtctcagcccagactcagacgcacgatcacacaggctcctacttcgccaagtgtcagggacccatccccgggcaacggtggctttcactttgacccaagcggcggcttgggcctcgcgc

SEQ ID NO: 58559 - DNA, 1246 bp, Homo sapiens
ctgacgcaacctcccctgcacccagccaaaacccagtcccgttggctccctgacatccgtggcagccaaaagattcggtgctagaaggcactttccccaggagcggaggaaccggttggccctcaagaatcagagaggaagtgcaggtgggatgcaacaccgcctttcctagaaggccaatgtcaggagcggtgggcttgcctccgcctcttcctggaccgagcgtgcagccatcacttgggccatggagaccgagagagcttccctgtcccacacaggtatggaagcccagagctccaggatcaccacagctgcccaatcatccagaaagaggtgtggagagggaaacaatcatgacgcggaccgccacgaggtttctccctgatggacggggaagtcttgtttgtggaagacactgagccacactaagaagccgccaggcttctcagagacggggcagacacagcaagagggaggycagagcagaggccagagcccaggcaggatacgggggggccatgccaccaccaccggcatccggggaggagtgtcaaacgggtgactcggccaggaaggccagcctttgagagacagacatgcttgccccatccccttgccggcttccttctccgtccctgcgtcgagctgtggctacatttctcgatgagggcagagggcgacaggcgtgacaaccaccttcttgaagctctgcgggcaccctcctgcgggtggacaatgagcgcctgggaggccgttgtccttggttggggagcgctcgtctggatccagcctagcaaagaggctgctccggatggggaggggatgaaaacccctgcgggtccgacacccatgcccacgttgcccaggccttcacagacccccaaactggaaccgccgggacgacgactgccaaccggccacacgacccaggcagagacgcggggagacgctgaccagaagaaaggccgacgtgcaagaaatccaccctccggcgcacagggcccatgtgtcccaaggcgcacgcatacacagacggacagagacagaaagagagggcgaccgaaagagcgagaagggagagagacagagagagagagagagagagagagagagagagagagagagagagagagagacagaagtcggcacacagacacgcactgcgcgcgcacacacacagacacacacacagacgcatccccccaacacacacacacacacccataacgaacacacacgtacagca

SEQ ID NO: 58560 - DNA, 1246 bp, Homo sapiens
ctgacgcaacctcccctgcacccagccaaaacccagtcccgttggctccctgacatccgtggcagccaaaagattcggtgctagaaggcactttccccaggagcggaggaaccggttggccctcaagaatcagagaggaagtgcaggtgggatgcaacaccgcctttcctagaaggccaatgtcaggagcggtgggcttgcctccgcctcttcctggaccgagcgtgcagccatcacttgggccatggagaccgagagagcttccctgtcccacacaggtatggaagcccagagctccaggatcaccacagctgcccaatcatccagaaagaggtgtggagagggaaacaatcatgacgcggaccgccacgaggtttctccctgatggacggggaagtcttgtttgtggaagacactgagccacactaagaagccgccaggcttctcagagacggggcagacacagcaagagggaggtcagagcagaggccagagcccaggcaggatacgggggggccatgccaccaccaccggcatccggggaggagtgtcaaacgggtgactcggccrggaaggccagcctttgagagacagacatgcttgccccatccccttgccggcttccttctccgtccctgcgtcgagctgtggctacatttctcgatgagggcagagggcgacaggcgtgacaaccaccttcttgaagctctgcgggcaccctcctgcgggtggacaatgagcgcctgggaggccgttgtccttggttggggagcgctcgtctggatccagcctagcaaagaggctgctccggatggggaggggatgaaaacccctgcgggtccgacacccatgcccacgttgcccaggccttcacagacccccaaactggaaccgccgggacgacgactgccaaccggccacacgacccaggcagagacgcggggagacgctgaccagaagaaaggccgacgtgcaagaaatccaccctccggcgcacagggcccatgtgtcccaaggcgcacgcatacacagacggacagagacagaaagagagggcgaccgaaagagcgagaagggagagagacagagagagagagagagagagagagagagagagagagagagagagagagagacagaagtcggcacacagacacgcactgcgcgcgcacacacacagacacacacacagacgcatccccccaacacacacacacacacccataacgaacacacacgtacagca

SEQ ID NO: 58561 - DNA, 815 bp, Homo sapiens
cccccagcccgccgccggctaggtacccctgacgcaacctcccctgcacccagccaaaacccagtcccgttggctccctgacatccgtggcagccaaaagattcggtgctagaaggcactttccccaggagcggaggaaccggttggccctcaagaatcagagaggaagtgcaggtgggatgcaacaccgcctttcctagaaggccaatgtcaggagcggtgggcttgcctccgcctcttcctggaccgagcgtgcagccatcacttgggccatggagaccgagagagcttccctgtcccacacaggtatggaagcccagagctccaggatcaccacagctgcccaatcatccagaaagaggtgtggagagggaaacaatcatgacgcggaccgccacgaggtttctccctgatggacggggaagtcttctttgtggaagacactgagccacactaagaagccgccaggcttctcagagacggggcagacacagcaagagggaggtcagagcagaggccagagcacaggcaggatacggggggaccatgccaccaccaccggcatccggggaggastgtcaaacgggtgactcggccaggaaggccagcctttgagagacagacatgcttgccgccccatccccttgccggcttccttctccgtccctgcgtcgagctgtggctacatttctcgatgagggcagagggcgacaggcgtgacaaccaccttcttgaagctctgcgggcaccctcctgcgggtggacaatgagcgcctgggaggccgttgtccttggttggggagcgctcgtctgga

SEQ ID NO: 58562 - DNA, 815 bp, Homo sapiens
cccccagcccgccgccggctaggtacccctgacgcaacctcccctgcacccagccaaaacccagtcccgttggctccctgacatccgtggcagccaaaagattcggtgctagaaggcactttccccaggagcggaggaaccggttggccctcaagaatcagagaggaagtgcaggtgggatgcaacaccgcctttcctagaaggccaatgtcaggagcggtgggcttgcctccgcctcttcctggaccgagcgtgcagccatcacttgggccatggagaccgagagagcttccctgtcccacacaggtatggaagcccagagctccaggatcaccacagctgcccaatcatccagaaagaggtgtggagagggaaacaatcatgacgcggaccgccacgaggtttctccctgatggacggggaagtcttctttgtggaagacactgagccacactaagaagccgccaggcttctcagagacggggcagacacagcaagagggaggtcagagcagaggccagagcacaggcaggatacggggggaccatgccaccaccaccggcatccggggaggactgtcaaacgggtgactcggccaggaaggccagcctttgagagacagacatgcttgccgccccatccccttgccggcttccttctccgtccctgcgtcgagctgtggctacatttctcgatgagggcagagggcgacaggcgtgacaaccaccttcttgaagctctgcgggcaccctcctgcgggtggacratgagcgcctgggaggccgttgtccttggttggggagcgctcgtctgga

SEQ ID NO: 58563 - DNA, 1170 bp, Homo sapiens
agaaggcactttccccaggagcggaggaaccggttggccctcaagaatcagagaggaagtgcaggtgggatgcaacaccgcctttcctagaaggccaatgtcaggagcggtgggcttgcctccgcctcttcctggaccgagcgtgcagccatcacttgggccatggagaccgagagagcttccctgtcccacacaggtatggaagcccagagctccaagatcaccacagctgcccaatcatccagaaagaggtgtggagagggaaacaatcatgacgcggaccgccacgaggtttctccctgatggacggggaagtcttctttgtggaagacactgagccacactaagaagccgccaggcttctcagagacggggcagacacagcaagagggaggtcagagcagacgccagagcacaggcaggatacggggggaccatgccaccaccaccggcatccggggaggastgtcaaacgggtgactcggccaggaaggccagcctttgagagacagacatgcttgccgccccatccccttgccggcttccttctccgtccctgcgtctagctgtggctacatttctcgatgagggcagagggcgacaggcgtgacaaccaccttcttgaagctctgcgggcaccctcctgcgggtggacaatgagcgcctgggaggccgttgtccttggttggggagcgctcgtctggatccagcctagcaaagaggctgctccggatggggaggggatgaaaaccctgcgggtccgacgcccatgcccacgttgcccaggccttcacagacccccaaactggaaccgccgggacgacgactgccaaccggccacacgacccaggcagagacgcggggacacgctgaccagaagaaaggccgacgtgcaagaaacccaccctccggcgcacagggcccatgtgtcccaaggcgcacgcacacacagacggacagagacagaaagagagggcgaccgaaagagcgagaagggagagagacagagagagagagagagagagagagacgtgagagagagacagaagtcggcacacagacacgcactgcgcgcgcacacacacagacacacacacagacgcatccccccaacacacacacacacacacccataacgaacacacacgtacagcagggaacacccacccg

SEQ ID NO: 58564 - DNA, 1170 bp, Homo sapiens
agaaggcactttccccaggagcggaggaaccggttggccctcaagaatcagagaggaagtgcaggtgggatgcaacaccgcctttcctagaaggccaatgtcaggagcggtgggcttgcctccgcctcttcctggaccgagcgtgcagccatcacttgggccatggagaccgagagagcttccctgtcccacacaggtatggaagcccagagctccaagatcaccacagctgcccaatcatccagaaagaggtgtggagagggaaacaatcatgacgcggaccgccacgaggtttctccctgatggacggggaagtcttctttgtggaagacactgagccacactaagaagccgccaggcttctcagagacggggcagacacagcaagagggaggtcagagcagacgccagagcacaggcaggatacggggggaccatgccaccaccaccggcatccggggaggagtgtcaaacgggtgactcggccaggaaggccagcctttgagagacagacatgcttgccgccccatccccttgccggcttccttctccgtccctgcgtckagctgtggctacatttctcgatgagggcagagggcgacaggcgtgacaaccaccttcttgaagctctgcgggcaccctcctgcgggtggacaatgagcgcctgggaggccgttgtccttggttggggagcgctcgtctggatccagcctagcaaagaggctgctccggatggggaggggatgaaaaccctgcgggtccgacgcccatgcccacgttgcccaggccttcacagacccccaaactggaaccgccgggacgacgactgccaaccggccacacgacccaggcagagacgcggggacacgctgaccagaagaaaggccgacgtgcaagaaacccaccctccggcgcacagggcccatgtgtcccaaggcgcacgcacacacagacggacagagacagaaagagagggcgaccgaaagagcgagaagggagagagacagagagagagagagagagagagagacgtgagagagagacagaagtcggcacacagacacgcactgcgcgcgcacacacacagacacacacacagacgcatccccccaacacacacacacacacacccataacgaacacacacgtacagcagggaacacccacccg

SEQ ID NO: 58565 - DNA, 1170 bp, Homo sapiens
agaaggcactttccccaggagcggaggaaccggttggccctcaagaatcagagaggaagtgcaggtgggatgcaacaccgcctttcctagaaggccaatgtcaggagcggtgggcttgcctccgcctcttcctggaccgagcgtgcagccatcacttgggccatggagaccgagagagcttccctgtcccacacaggtatggaagcccagagctccaagatcaccacagctgcccaatcatccagaaagaggtgtggagagggaaacaatcatgacgcggaccgccacgaggtttctccctgatggacggggaagtcttctttgtggaagacactgagccacactaagaagccgccaggcttctcagagacggggcagacacagcaagagggaggtcagagcagacgccagagcacaggcaggatacggggggaccatgccaccaccaccggcatccggggaggagtgtcaaacgggtgactcggccaggaaggccagcctttgagagacagacatgcttgccgccccatccccttgccggcttccttctccgtccctgcgtctagctgtggctacatttctcgatgagggcagagggcgacaggcgtgacaaccaccttcttgaagctctgcgggcaccctcctgcgggtggacaatgagcgcctgggaggccgttgtccttggttggggagcgctcgtctggatccagcctagcaaagaggctgctccggatggggaggggatgaaaaccctgcgggtccgacgcccatgcccacgttgcccaggccttcacagacccccaaactggaaccgccgggacgacgactgccaaccggccacacgacccaggcagagacgcggggasacgctgaccagaagaaaggccgacgtgcaagaaacccaccctccggcgcacagggcccatgtgtcccaaggcgcacgcacacacagacggacagagacagaaagagagggcgaccgaaagagcgagaagggagagagacagagagagagagagagagagagagacgtgagagagagacagaagtcggcacacagacacgcactgcgcgcgcacacacacagacacacacacagacgcatccccccaacacacacacacacacacccataacgaacacacacgtacagcagggaacacccacccg

SEQ ID NO: 58566 - DNA, 1170 bp, Homo sapiens
agaaggcactttccccaggagcggaggaaccggttggccctcaagaatcagagaggaagtgcaggtgggatgcaacaccgcctttcctagaaggccaatgtcaggagcggtgggcttgcctccgcctcttcctggaccgagcgtgcagccatcacttgggccatggagaccgagagagcttccctgtcccacacaggtatggaagcccagagctccaagatcaccacagctgcccaatcatccagaaagaggtgtggagagggaaacaatcatgacgcggaccgccacgaggtttctccctgatggacggggaagtcttctttgtggaagacactgagccacactaagaagccgccaggcttctcagagacggggcagacacagcaagagggaggtcagagcagacgccagagcacaggcaggatacggggggaccatgccaccaccaccggcatccggggaggagtgtcaaacgggtgactcggccaggaaggccagcctttgagagacagacatgcttgccgccccatccccttgccggcttccttctccgtccctgcgtctagctgtggctacatttctcgatgagggcagagggcgacaggcgtgacaaccaccttcttgaagctctgcgggcaccctcctgcgggtggacaatgagcgcctgggaggccgttgtccttggttggggagcgctcgtctggatccagcctagcaaagaggctgctccggatggggaggggatgaaaaccctgcgggtccgacgcccatgcccacgttgcccaggccttcacagacccccaaactggaaccgccgggacgacgactgccaaccggccacacgacccaggcagagacgcggggacasgctgaccagaagaaaggccgacgtgcaagaaacccaccctccggcgcacagggcccatgtgtcccaaggcgcacgcacacacagacggacagagacagaaagagagggcgaccgaaagagcgagaagggagagagacagagagagagagagagagagagagacgtgagagagagacagaagtcggcacacagacacgcactgcgcgcgcacacacacagacacacacacagacgcatccccccaacacacacacacacacacccataacgaacacacacgtacagcagggaacacccacccg

SEQ ID NO: 58567 - DNA, 716 bp, Homo sapiens
cctatggacccatgactatagcattttgtggatcagatttttaagtgggccaggcattcaaataaattaacagatacttaggaacatgtgaagttattatttaggttasataccttattcaaaaatttatccaaattattgtttagattaaaaaatttttcatagacacaactgagtaatattaagctggtgcaaaagtaattgcagtctttgccattaaaagtactttctctttactttttttttttttttttttgagacagagtctctctctgttatacaggctggagtgcagtggcacaatctcagctcattgcaacctctgcctcgcaggttcaagcgattctcctgcctcagcctcctgagtagctgggattccaggcgtgcaccaccacacccagctaatttttgtatttttagtagagacaggttttcactatgttggccaagctggtctcgaactcccaacctcaggtgattcgcctgcctcggcctcccaaagtgctgggattataggtttgagccactgtgcccagcctttctttacttttaatggcaaataccacaattacttttgcacctagtaattggcttctgttatttattagtattgctcagaggaaaccaataaaagaggaatctaatggatttattaaaattgttcatttgaatttccaattgatatatttaatactgctttctaaaaacagtcttca

SEQ ID NO: 58568 - DNA, 687 bp, Homo sapiens
tttttactccttcaatatctcggtaacattttttaccttaatttccctctgttaaaacaagtggtgtgttagcagttcctcaaaaggtcaaatagtgttatcatatgacccagcaattccacttctaggtatacaaccaagagaaataaaaacaaacatccaaacaaaaacatgtacatgaacatccatagcagcattattcataatagccgaaaagtaaatacaagccaaatgctgatcaaagaatacatgaataaacaaaatgggtcatatccatacaatggaatatcacttgctcataaaaatgaagttctgacatgttaaaacatgggtgaacctcgaaaacattatgctctgagagaagccagacataaaaggccacataaagtatgattccatttaatgaaatgtccagaataagcaaatccatagagacacaaagcagattastgattgccgggagcttagaggagggggctgatgggtgactactaatgggcatggggtttcttttggttgtgattacattctggtattaaatggtggtgatagctgtacaaccttgtgaatatactaaaaatacctgaattgtatacttttttggtatgtcaattataacttggtaaaggtgtgcttttaaaaaaaggtgatatagtttctacctcctgacagagaatcgcgtaggca

SEQ ID NO: 58569 - DNA, 687 bp, Homo sapiens
tttttactccttcaatatctcggtaacattttttaccttaatttccctctgttaaaacaagtggtgtgttagcagttcctcaaaaggtcaaatagtgttatcatatgacccagcaattccacttctaggtatacaaccaagagaaataaaaacaaacatccaaacaaaaacatgtacatgaacatccatagcagcattattcataatagccgaaaagtaaatacaagccaaatgctgatcaaagaatacatgaataaacaaaatgggtcatatccatacaatggaatatcacttgctcataaaaatgaagttctgacatgttaaaacatgggtgaacctcgaaaacattatgctctgagagaagccagacataaaaggccacataaagtatgattccatttaatgaaatgtccagaataagcaaatccatagagacacaaagcagattagtgattgccgggagcttagaggagggggctgatgggtgactactaatgggcatggggtttcttttggttgtgattacattctggtattaaatggtggtgatagctgtacaaccttgtgaatatactaaaaatacctgaattgtatacttttttggtatgtcaattataacttggtaaaggtgtgcttttaaaaaaargtgatatagtttctacctcctgacagagaatcgcgtaggca

SEQ ID NO: 58570 - DNA, 681 bp, Homo sapiens
ttaatcataatatttaatatgaatattaaytcatttgaatcctctgctttcatttttctgtgtcatttttagtagcaataaaaatttacttgaagattttttttaaatcataatgtctaggatacaatacaaagtgactcaacgtatgagaaaaaaacaggaaaacacaccccattttcttttctttttttttttgtttgagacacattttcactctttgttgcccaggctagagtgcagtggcgccatctcactcactgcaaccaccacctcccgcgttcaagcgattctgctgtctcagcctcccgaggagctgtgattacagtcgcctgccaccatgcccagctaatttttgtagttttagtacagacagggtttcaccatgttggccaggctggtctcgaactcctgaccttagatgatccacccgcctccgcctcccgaagtgctgggattacaggtgtgagccaccacgcccagccaaacacaccccattttcaagaggaaagacaactaacagagagaccagttctaagatgcccagatgtttgaattagtagacagagattttaaagtagctattaaactaagtcaaggatgtgaagggaaataagatcacaatgatgaaaaagtaggaaatattagcagagaactaaaaaccagacatatataaagtacaaa

SEQ ID NO: 58571 - DNA, 681 bp, Homo sapiens
ttaatcataatatttaatatgaatattaactcatttgaatcctctgctttcatttttctgtgtcatttttagtagcaataaaaatttacttgaagattttttttaaatcataatgtctaggatacaatacaaagtgactcaacgtatgagaaaaaaacaggaaaacacaccccattttcttttctttttttttttgtttgagacacattttcactctttgttgcccaggctagagtgcagtggcgccatctcactcactgcaaccaccacctcccgcgttcaagcgattctgctgtctcagcctcccgaggagctgtgattacagtcgcctgccaccatgcccagctaatttttgtagttttagtacagacrgggtttcaccatgttggccaggctggtctcgaactcctgaccttagatgatccacccgcctccgcctcccgaagtgctgggattacaggtgtgagccaccacgcccagccaaacacaccccattttcaagaggaaagacaactaacagagagaccagttctaagatgcccagatgtttgaattagtagacagagattttaaagtagctattaaactaagtcaaggatgtgaagggaaataagatcacaatgatgaaaaagtaggaaatattagcagagaactaaaaaccagacatatataaagtacaaa

SEQ ID NO: 58572 - DNA, 681 bp, Homo sapiens
ttaatcataatatttaatatgaatattaactcatttgaatcctctgctttcatttttctgtgtcatttttagtagcaataaaaatttacttgaagattttttttaaatcataatgtctaggatacaatacaaagtgactcaacgtatgagaaaaaaacaggaaaacacaccccattttcttttctttttttttttgtttgagacacattttcactctttgttgcccaggctagagtgcagtggcgccatctcactcactgcaaccaccacctcccgcgttcaagcgattctgctgtctcagcctcccgaggagctgtgattacagtcgcctgccaccatgcccagctaatttttgtagttttagtacagacagggtttcaccatgttggccaggctgrtctcgaactcctgaccttagatgatccacccgcctccgcctcccgaagtgctgggattacaggtgtgagccaccacgcccagccaaacacaccccattttcaagaggaaagacaactaacagagagaccagttctaagatgcccagatgtttgaattagtagacagagattttaaagtagctattaaactaagtcaaggatgtgaagggaaataagatcacaatgatgaaaaagtaggaaatattagcagagaactaaaaaccagacatatataaagtacaaa

SEQ ID NO: 58573 - DNA, 681 bp, Homo sapiens
ttaatcataatatttaatatgaatattaactcatttgaatcctctgctttcatttttctgtgtcatttttagtagcaataaaaatttacttgaagattttttttaaatcataatgtctaggatacaatacaaagtgactcaacgtatgagaaaaaaacaggaaaacacaccccattttcttttctttttttttttgtttgagacacattttcactctttgttgcccaggctagagtgcagtggcgccatctcactcactgcaaccaccacctcccgcgttcaagcgattctgctgtctcagcctcccgaggagctgtgattacagtcgcctgccaccatgcccagctaatttttgtagttttagtacagacagggtttcaccatgttggccaggctggtctcgaactcctgaccttagatgatccacccgcctccgcctcccgaagtgctgggattacaggtgtragccaccacgcccagccaaacacaccccattttcaagaggaaagacaactaacagagagaccagttctaagatgcccagatgtttgaattagtagacagagattttaaagtagctattaaactaagtcaaggatgtgaagggaaataagatcacaatgatgaaaaagtaggaaatattagcagagaactaaaaaccagacatatataaagtacaaa

SEQ ID NO: 58574 - DNA, 571 bp, Homo sapiens
gtagacttcagcttcttcctttgtgtagtggggctaatggttgtaataacctcagaaggttattgtgaggattaaatgaatgaactcttgtacagtactttgcatagtgcctgtcactcaagaaatgctgtcatcaatgttcttggggttggtagaaaaagtgtttcttggagattgtgaggtagctttaggtgggatggtattatccagaatggaagaaaacaagcacttttcccttagatcatttgaattgaggtaggaatttaacctttttgtccttacttgcatgatgtgggagtagcttgtttctttctttcttatctttactcaaaatgtgccaaccaaactgaaaaatatctttctagaattcttaacttttttgaagggacaaggtgctttcaaatgctatattttaacttttaaatattaggttaagtggcttaattttatgtttctttagtggctgtcttttgacatcgtatacgtttctttcaatggagaaattayatttcatgatgttctataaatattaaaaccaaactatttaaactgtaatatattcaaagagcct

SEQ ID NO: 58575 - DNA, 726 bp, Homo sapiens
tccgctcacctcggcctcccaaagtgttggtattacaggcgtgagccactgtacccagcctaataattattttctactaaaggaaaaaaagatttttcaaattcttcactgagtaaaaatactttgcctttaattttttctattttacattaaattctcccaagtttttttttttttaatctacgttcagttttctttaaaatgaagcatatggrggcagaacaacagtgaggctatagtgggttctctccatcatataaactgtggcatcatgtagcttctgtacctctcaatcatgcccttttccaaaacatgaacaaagaaaatgcaaataaaatacaaataaataaatacaaataaaatatagaaaatgacataggagggaggaaaaagtggattcagattattagaggtttttatatttttaacaagtgagtccttcaaatactgagtgatttctgtattaaggaaaccatttattcctgtaatattaatgcagcattcctaaatgcactctatagttttcctgctcttcctcattaattacctgcctttgggcctacaggggaccgatttctcaaagccgttcttagttcagcttttagtgcacatttcaaaataaggaaaggaaaaaattaaaattctaggcttcaaatgcaacataccttgcccaaaaatatgtctgaatgtttttgagatggtgatcagaaccacagaagttcactg

SEQ ID NO: 58576 - DNA, 735 bp, Homo sapiens
actcagagccaaactagaaacaccttcctactcaaggcagaagcatgaagaaaaaaaaataataatgctttttgaaagaaattgccctatttcactgtgtgtattaacattcagaaaaaaataattggctccactgataaattctaacttgaaggatgcaggtctttcaaacataggcatgtacaaaagaattttgcttttcctccacggatggtttttaaatgggctgctgccttgtaaatatgttcctttaagtaatacaaaaggtagaagagatgaaatattcttcagaatggtttgaacattggttccattttagaatagtgcactacgcacatcgacagacactgaaaggacgttaggcaccagtgctagcattatagtggacctgtaatatggttttggttatcaccataataaccatcatcataatagttatggcaaccacattttacacttattatgtgccagaccytgtttctatgtgttttatatagattaactcatttgctcttcacagcaatcctaggaggcatgtatttattttccttattttaccagtgaagaaactaagaaactgagacacaagttgtccaaaatcacgcagctaataagtggcatattcaaacccaagaaactggcttcaaatcacactcatacgtggtcatgctccactgcttctcatggactaatgattgtgtttttgagcacttactatgctcttagttccataga

SEQ ID NO: 58577 - DNA, 2868 bp, Homo sapiens
aacaaagatcctacctagaatttagtttctaaatattatactatttttccatgaatatggaccagaattccttggagaaatggccgatctcacaggtggaccaggaaaaatatgccaagtttaaaatatcttgttgtgccagaaggtaagaaagtaatcaaataatgatgcaacatagaggacatgggacagccggaaggggtgccagctggcccaatctgggatgatttgtgtgtccaagtaaccacagtattagattatatcccattgattaaaatagattccatgagtctrtcctgatatacaagcaaatgaacacaaaaggaaagagaatgctctttcctaaagtagaatggccagctaatgaatgctgaaaaaattaaggacttagagcaatttgagaaccatagtaattattttaggcaaaatgcatcaatagatttgaaagctggaaggtgaaagttgagtaaagaatgggatgtttacacagtctaggggtatctctccaggaaacacttgttgactgcaaagtaaaaaaaggtaattggtggtaactgggagatacagggtttctttttggagtgatgaagacatagtagaattagatcatggtaatggttgcacaacattatgaatttactaataatcactgaattgtacactttcaaacagtgaattttatgttacatgaacttatctttaaaaaaataaaattaatttgacaaatcagttacatactctaggcctggggaaacaacagtcaagaggtagagttagcagaaccaagtggctcagaggcggacccattgactgagctcaaccccctggagatgggcatcgcctggctgttgctagtgcctgccagggggaatgggaggctggttctggggctactgaaagctggagccaactatgctgctggagcaatactgctgctggagagacactcccagaaagtgcaaagaccaggaaggagggtccctttccttcctcccaacctccagtcacactctaaggcttctgccggcagcatctaaggggaaatgaaccagatggcttaccatatccaagagcagagtatagaaaggtgggcttggatccaagagacaatagataaataaccaacacgcagagaacaatggagaattaacagctcatacaatgaggggagaggattcttttctcatataattattttcttctctaaaagagtgattcgttagatcttaaactaaatgttgcttaattttagaataacttcaggaatatttttataaatcagaaaaaaatcttattcctttatatatgctaattctacatctgaaaacatttttcggttcttacattgctcccacctccttgacccttaggtataatggagagaattctgcatcctagtatgcatacgcattcccacctgggtgcctttgctctgggtgccttcccacccagaggcccttctttcctcttctctgcctgagttctattcttcttccatcaatgaagccttttctgtgcacatcagttaacagtgacattttctttcctgcttctgagtcctcatgggacgaatttccaggttatgcttggacacactgtcttgagtaaccagctaagttttcatagatgtgtgctcatgtctatttattacatggatggttcctgacatgcccagacagtgtgaagcctcaatgaatatccgttcatgactgagcctctatggacatttgagaacagctttaaagtgaataactgtataataattttatggaaaatattcaaattttccaggaaaagggatgatcggatgacaagaacacctctgtttctgtccccattatttctactagtcattcacttttgcatgagccagagttgatactcttattaaatgcttggtgtttggaaaagtttgtgaggccaacatttgccttaggtactggtcagacaaagctgaacctgatgagagagaagaggtcatcagattgcacatacttaaaaagtaaagaaactctaggtagtcttgcctcccacccaggcttaaagagttggcatcaaggtgctcaaatggacccaacacagagactggcgatgctttcaggtttggttctgtttgctgctcttataaactcattttgtgtccaagtggcttgctctgtcagatgaaaccttggaaaggtaaaaaatccttctcaagtcaaattttcatcttcctttgaaatctctgaacccattaactcgggacattaaccagcactttcatgttacccacctgagaccacctcttgttcagcatcaaccatcttttttttttttttttttttttttttttttttttttgtgaaagagcatgctttatttggaagcagagtgctgcacagtgaccgacagatgaaggccacccattgggcactcacacatcgtactccaaaatacacacaggatgctttgctaataaaaatcaatgggaacagggattcctctgggcaactcccccaacctcatccctttcaggggttgggaaatctcccaaccatcttcctgatggcagcggtggttcactagagataaagcccctcagggatgccttcgtgtttcttataaagaacactttctatagattttttgaagtcttcatttgttgctttcattctatgttctcttaaggccatcagaccagcttctgtacagattgccttgatgtcagcaccagagaagtcatctttagccatgatcaagtcgtccagggttacatcattggccagtgtcatcctgcttgtgtgaatctgaaagatgtgcttcttagtcttttcatcaggcaggtggaactcgatcttcttgtcaatgcggcctggtctgataagtact

SEQ ID NO: 58578 - DNA, 757 bp, Homo sapiens
cctcaactggtacatgtggaaagttcggagctatttttccctttaaaatgttagaaagaaactctcttcttctcatatgactgacactttctaaaacactcttatcatctcaggaaatacaccctgagggactggagaagacatgagaaatggtaaaaatgtttctgctcacaaaattactacagcctgctgcacaaggcaaagggtctcgtttaagagcaaggagacacaagtgcctatcaatgtcaaagtagtaatttggataataataacaacaggcacactttgtttttttttttctttaactttcattttaagttcaagggtacatgtgtaggatgtgcaggtttgttacataggtaaatgtgtgccatggttgtttgctgcacagataatcccatcacctaaatattaagctcggcatctattagctcttcttcctgatgctccccctctccccacaccaccccctctgacaggctccagtgtgtgttgttcctctccatgtgtccatgtgttctcatcattcagttcccacttatcagtgagaacaygtggtgtttggttttctgttcctgcattagtttgctgaggataatggcttccaactccatccatgtccctgcaaaggacatgacctcgttcttttttattgctgcatagtattccatggtgcatatgtatcacattttctctatccagtttatcactgatgggcatttaggttgattccatgtttttgctaacagtgaatagt

SEQ ID NO: 58579 - DNA, 549 bp, Homo sapiens
ggtggttttaacatacatatacaaattcttcaatatattccttccttcaaatatggattctaccttcccccttcagtgtgggyaaggctggcctcatgagtgtgcaacctgtccagtcacacagagtcccaagttcagaagaatcccgtgtttcatttaatgctctgttgtcgctgccttgaaatttgtaataattttacaacaaaggaccctgcactttcaattttgcactagttccaataaattataatatagccactcctgagtggggtcaaacttagtgacttgcttcttacaaagagaatgtggcagaaggacaatgtgtgacttctgggactatttcataaaagctattacagcctcctctttgttcttactgatcacttaatctaggggaagccagtgccatttaatcatgcatccctatggagagatccaatgaagccctcagatgactgccttgacatcttgtctggttgacaataaaaccagaattggttgacatctcgtttacaatctcataagaaactcttaactcagaaggaccca

SEQ ID NO: 58580 - DNA, 741 bp, Homo sapiens
ggattacaggcataagccacagtgcccggccggtatttgaatttttagaagctttgagagctgcttagcagtcttgggatagaagtcctgtaggaattgggctgactagaggatcatgaaagagattaatctggatggaatataatgtcatgatttgtccattttaccttatgtattcctggaaaaactttttcctccattgattgttggctaccatttgatttattattttaatcagttataaggcttgaagttactctataagcagtataaagagttatgtgaccaggggggaattatttaaactctctgagtcttggtttcctcttatcttataaagagcaatattaataccaacattttgaggttaaaawtaaaatttccagcattgcaaataaaatatgcacagtggctggtcgagagcaattactcaaatgttgtacttatagagaaagggtgcagcagaatggattaagagaaaaagctccaaagctaggtggtccatacttaaatctgctagccacttcttgtctatgtgaccctgggcaaggtattcacacactctatgcctcagtttactcatttgtaaactaaagacaagaatagcatctatctcacagggtttttgtgaggattagataactcactacctataaaccacacacagctgtatgtggcacattagggatcactgaatgccagattgggggttttttttgtttgtttttttttcagttgagt

SEQ ID NO: 58581 - DNA, 1296 bp, Homo sapiens
ttatctttgtatatcaggccgcatgattcccaactttctgccacacttaaattacgttcctccatttcagttttgtcttttctgtctaaagttcagtcaaagagtatcaaaaaattatgtttcagctagactggtgtaatgtataagtttttgtatcttgtattagaggatttcgtagcttttattagaggctcatttccacctcagcatacaagatcgttagtcttttggcatgtgtgccaattagaatactaaagcaagtccaagcacatttttctcttctcacgtttctaataagtgttagggactttgcctcttttacttaccacgtccccaaaagtgtcaggtagacatgtcacaaatggctctgtagagagccatgggaagagagaggaggtggatgtggaacataaagggttcagaaactccagaagaggagtgggttttggatagaagcatttgaggacagctgctccaaagccttatgtgtatgatgaaacttaaccacggggaagagactcttcagtagcctgttctgtctggtgatttttattttaagtgaacctttggatctatctttaactctctttattgtgagtctaaattcccattctgcagcagatcagtaaactcacagtatttttcctgtggaaatctattcaataaggaaaccaagacaggataataaaatttaaaaaaaaaacaactttgaattcccctgcctaggtcttccagttgttttccagcgcatacctcaggtatgactttgctagcyggggacaaaattagcaccttccgattctctagtccaaatgaactttgtgctaaataaaaaattattatactacataataaagttacagatagcaggaaatgcaagagctaggagattcctagattatatctgccaagcaaataccttaaacatccacctgaaatcctactaccccctcttctgagataatttgcccagcccttctcttcccacacactcactcaatgtcacccccttctaatccccaaaactgtttttgtggtctttgtagcctatagtagttttctcacatctttccccctagacttttctgtttttcagtttcagacaaaaaaactcttcagctttttccagtgtgtctccttaacagtaactttaccacttgaaatcttatttcatagaaaaactaaattggtgtggaaaggctgcacacaataaagttatattattatccatgaaaatgaactcatatttctttcatactttaacgttaaaaccgaaatgcatgagagcaaaagcac

SEQ ID NO: 58582 - DNA, 1296 bp, Homo sapiens
ttatctttgtatatcaggccgcatgattcccaactttctgccacacttaaattacgttcctccatttcagttttgtcttttctgtctaaagttcagtcaaagagtatcaaaaaattatgtttcagctagactggtgtaatgtataagtttttgtatcttgtattagaggatttcgtagcttttattagaggctcatttccacctcagcatacaagatcgttagtcttttggcatgtgtgccaattagaatactaaagcaagtccaagcacatttttctcttctcacgtttctaataagtgttagggactttgcctcttttacttaccacgtccccaaaagtgtcaggtagacatgtcacaaatggctctgtagagagccatgggaagagagaggaggtggatgtggaacataaagggttcagaaactccagaagaggagtgggttttggatagaagcatttgaggacagctgctccaaagccttatgtgtatgatgaaacttaaccacggggaagagactcttcagtagcctgttctgtctggtgatttttattttaagtgaacctttggatctatctttaactctctttattgtgagtctaaattcccattctgcagcagatcagtaaactcacagtatttttcctgtggaaatctattcaataaggaaaccaagacaggataataaaatttaaaaaaaaaacaactttgaattcccctgcctaggtcttccagttgttttccagcgcatacctcaggtatgactttgctagccggggacaaaattagcaccttccgattctctagtccaaatgaactttgtgctaaataaaaaattattatactacataataaagttacagayagcaggaaatgcaagagctaggagattcctagattatatctgccaagcaaataccttaaacatccacctgaaatcctactaccccctcttctgagataatttgcccagcccttctcttcccacacactcactcaatgtcacccccttctaatccccaaaactgtttttgtggtctttgtagcctatagtagttttctcacatctttccccctagacttttctgtttttcagtttcagacaaaaaaactcttcagctttttccagtgtgtctccttaacagtaactttaccacttgaaatcttatttcatagaaaaactaaattggtgtggaaaggctgcacacaataaagttatattattatccatgaaaatgaactcatatttctttcatactttaacgttaaaaccgaaatgcatgagagcaaaagcac

SEQ ID NO: 58583 - DNA, 543 bp, Homo sapiens
tgtaactaaacctaaaactatgtggataagttatttctacacctgcggggggcagatttctacmtgagagtcctttcttagtgtactgagagtttctgcatgaggtaaatgaaagaaacatgttttttgtaaaaaaaaaaaaaaagaaaagaaaaaaattggcaatggagaacgtttctaaagcttctcagcttctccctatgattatgtattgaaacctcggaatttgttcatctggttttcttggggggtctatgaaaagggcagagcaagcagatgtcccatgattgccctgaaattatattagatatgttcgtgtgcatggatacctgcatttttctagggatagagtccttagctttaatcagaagaaattaagaactactgtctttaaaaatgtgctttcaaacatttgttttttgaattcatttcaaagactctaacgtgcccattatgtgtcaggcgctgtgcttggcaatgaggatacaaaaagacaccccagaactggagctgctcacagtggagtggagaaggcaaatgagt

SEQ ID NO: 58584 - DNA, 746 bp, Homo sapiens
tctccttgcggcttgttagctcaatttttttagtgctgaataatagtccagttctggaggtgccacactttgtttatcctttcacctcaaaggacatacaggttccttccaagttttagcaattatgatgaaagctgctataaacacttttgtgtggacataagttttcaacgcatttgggtaaatgccaaggaacaggattatttaattatacggtaagagtatggttggtattataagaaacttccaagctatcttccaacgtggccgtaccactttgcattcctacaggcaatgaataagagttcctgttgcttcccatccttaccagcatttggtggtgttagaatatgtttctagttgttttagtaacaatgtttcttccttcagcaacagctactctcactgctgaagagaaattattttgaggccacaaacctctgaatggcttgataagaaaggaaagtcaaggagaaatgagagtkagacttcctaaaaaatacagtgagtccactttctgtgtcaactgtttatgtgaaaagatatgtgaatatactatcagccattccataagcaggctgtggcatctctgagcaaattagtcatgttagaatgatatctgaaatgctattggcaagggaacattagtaagttgttcttttttcctacttaagtgacttataaattagttgcttacattcactgtaactagtaatttatctgtactaatctgcctaatttacctt

SEQ ID NO: 58585 - DNA, 574 bp, Homo sapiens
ttctggctgataagaaattttcaaatatggttaagtaagcataaatcctacacgttttcaaggtgacccctatagggacctctctatatacagtcctggtataaatgcatgaaaatacagttcatttgaatttatattgacttggggcttaaaaaattacaaactacactcactcttgccaaccttttcaaagatgacttttaaaggagcaggggatgggatattaccaatttatatttgaaaatacagtaaatctttttyaattttcttaaaatattccactagattatgagttatttgaaggaaaaggcttctctctgtatctactacagtacttatacaaattcaagtttgacccttagcagaatagtagttacaatggaaagagggctagactaggattcagaaataatcttagggcttatagttttccgtatctcaattttctcatctgtaaaatgcctacgtgtacctacttcactgtgttgatataagcttaaaaattaagttaacagatacaaaataattttgaaaaattaaatgaaagcatacttattaggctatcccccaaaat

SEQ ID NO: 58586 - DNA, 679 bp, Homo sapiens
gtccttaagcttaattatgccaccctacattttatgatttacggatttcgtattatccttaggaagtttactgtttacttgggaggtctgattttgtttgtttttatactttaagtaagttgtgtcaaatcattcttgaaacataaagggtaaatatctccaaatgggaaaattagacttatacataataaatagagtaatacatgaaatatcacaaagcaacttgtgactaggtgccaaatgtgtgggatgggcagaagagcaatagggacttaggaaagagaaggaatgtcwtgctggtagacttcagggaagtttcataaaaggaagaattttaactcagcgtagaaagatgggtaaattttcctcatgtgaaggtgtactgcctggggtgctgcaggctggagatgagtattaaaataggaggagagtgagtgaaagcacaggaggaggaagggtcaggcaagtttggtgaacacagcaactggctatagaacaggagcagtgggagaaagtccagaaaggtctgctgagcttcagttgtacaaagctgtggagtttggcctttggtcatggctagattaggtctgaaagccttaattaaaaaaaaaaaaaaaaaaggcaggtcttgtaaactgcatttctgcttgagaaattgatctttaaacttctagtctct

SEQ ID NO: 58587 - DNA, 1186 bp, Homo sapiens
ttgggtatttctttacagcaatgcaraaacagcctaatataccaatttatcaagccctcttggaactcacattcaagtaggaaagatagacgctaaacaactgtttatacaattaatgtcttcattacaggggctgggagagtgcacaactagggcctgccctggtaagagtttatgatagggtgttctgaagaattgacgcttgagtcaagattttaaaaatcactaggggctactcagaaaggagagggagagcaggctctgggcagggagaatgaaaatgccaaggctctgaggctgaatggaacttcccagactgagaatagaaagaaggccagcgtggctggagtggagtaagggggagaagtggttgaaggttatgtgatgagtgggaggagtttcctctatgttgccaaaaatgtgcctcatgaaagaaccctgctggaatgaagggcatcacagggcctctcaaccacagccaaggcagaatcttgatgtgagatgttgtttttcgtccctcttcctctaatctcaccaataccagcctggatcctggaagagccagaagagagatgaggtagagagagaataaaattgccaatcaacccctccttcccaactgcatgagcctgagcttcagccgatatcactaactttgatatggaggtgagattgaagtttgacgttaagctgaactggacctttaacactgaaaagaaatctcattatcagaattgaggcttttctagtagttggaagtaatccagaaagccaaggcatctgcatgagatgtctctaaagcacaggaagtagggacctgcctgagcatatctgaagctaggtagaagaaatgtacggcctctttgtgactgtaccccccttgagccagcctattccaccagtagtacataggaacaatgcacatgaccccccagagctgaggctccacaaggcggtgaagttccacaaagataagaaggactcatagatttggatggagaggagggaccaggcattgcaagagaagaatgatgagaacacaggggaatgaagtccattctctattggatgggaagcctcaagaagtctggcctggctagagcagatgttctgagatgtgagaagcagcgttggatagaacatgagctaaagacagatggaaggaagtctttaatgccaggcaata

SEQ ID NO: 58588 - DNA, 980 bp, Homo sapiens
ctctgcagaatattcaagagggagccttggtagatcactggcgttctttctctgtacagctctctcctcttcagtactctatcccaaaaactctggctgtcttggtctccaggaatctcatttccatcttttctcagggagttcactggactcctgtgtctggattccctgcaagagggctggaaagttctcccacggcagtaagttttttggaaagcttattttgtagaggcaattgtttgtttcctatcacttgagaatcactgtttttttgtttcctgacatccagtgtcttgaaaagtgttgctcattattttggttgttccaggaaggaaggcaagactggtccctattattccatgttagccaccagcggaagtatctctacctttaagaaatccaacactacagccgacctttcatttgtagaacatgtcttaggtatcctgccatgtgcaaagattttgtgtgcagaaaccaagctgaatttatcttagtaactccagataactgacacaggcctttgcaaatcggtggtaaattgaattgctataggacaagcaggtgaaattttcacaaagggatattttttgccttatgcgagaaagaaatatctgatagtttagtaatgaaaactttgaaaagayatagtgatctttccattatgagaagcattcaagcagagtgcagatactatttgccaggaatcagcatttctgcatgtctagagaaagcctcagtttggtgccgatttttccttaatgtctctcaatcttattctttgccaaatgtgagctattataaaaagaattagtaagtcctctctagattaattattacttaattatgaatgactctgtctagattaattataaaaagaatattcccctcaaaacttttctacaactatagtcgctacatcaggtaatttcaggtaacaaggaagcctagacactgttatccccagttggctgattggg

SEQ ID NO: 58589 - DNA, 980 bp, Homo sapiens
ctctgcagaatattcaagagggagccttggtagatcactggcgttctttctctgtacagctctctcctcttcagtactctatcccaaaaactctggctgtcttggtctccaggaatctcatttccatcttttctcagggagttcactggactcctgtgtctggattccctgcaagagggctggaaagttctcccacggcagtaagttttttggaaagcttattttgtagaggcaattgtttgtttcctatcacttgagaatcactgtttttttgtttcctgacatccagtgtcttgaaaagtgttgctcattattttggttgttccaggaaggaaggcaagactggtccctattattccatgttagccaccagcggaagtatctctacctttaagaaatccaacactacagccgacctttcatttgtagaacatgtcttaggtatcctgccatgtgcaaagattttgtgtgcagaaaccaagctgaatttatcttagtaactccagataactgacacaggcctttgcaaatcggtggtaaattgaattgctataggacaagcaggtgaaattttcacaaagggatattttttgccttatgcgagaaagaaatatctgatagtttagtaatgaaaactttgaaaagatatagtgatctttccattatgagaagcattcaagcagagtgcagatactatttgccaggaatcagcatttctgcatgtctagagaaagcctcagtttggtgccgatttttccttaaygtctctcaatcttattctttgccaaatgtgagctattataaaaagaattagtaagtcctctctagattaattattacttaattatgaatgactctgtctagattaattataaaaagaatattcccctcaaaacttttctacaactatagtcgctacatcaggtaatttcaggtaacaaggaagcctagacactgttatccccagttggctgattggg

SEQ ID NO: 58590 - DNA, 980 bp, Homo sapiens
ctctgcagaatattcaagagggagccttggtagatcactggcgttctttctctgtacagctctctcctcttcagtactctatcccaaaaactctggctgtcttggtctccaggaatctcatttccatcttttctcagggagttcactggactcctgtgtctggattccctgcaagagggctggaaagttctcccacggcagtaagttttttggaaagcttattttgtagaggcaattgtttgtttcctatcacttgagaatcactgtttttttgtttcctgacatccagtgtcttgaaaagtgttgctcattattttggttgttccaggaaggaaggcaagactggtccctattattccatgttagccaccagcggaagtatctctacctttaagaaatccaacactacagccgacctttcatttgtagaacatgtcttaggtatcctgccatgtgcaaagattttgtgtgcagaaaccaagctgaatttatcttagtaactccagataactgacacaggcctttgcaaatcggtggtaaattgaattgctataggacaagcaggtgaaattttcacaaagggatattttttgccttatgcgagaaagaaatatctgatagtttagtaatgaaaactttgaaaagatatagtgatctttccattatgagaagcattcaagcagagtgcagatactatttgccaggaatcagcatttctgcatgtctagagaaagcctcagtttggtgccgatttttccttaatgtctctcaatcttattctttgccaaatgtgagctattataaaaagaattagtaagtcctctctagattaattattacttaattatgaatgactctgtctagattaattataaaaagaatattcccctcaaaacttttctacaactatagtcsctacatcaggtaatttcaggtaacaaggaagcctagacactgttatccccagttggctgattggg

SEQ ID NO: 58591 - DNA, 1299 bp, Homo sapiens
gcattatgtaatacctaaaaaatatttctctatgcagagctccattaaaattaatgatgcacgaaagtagtctcataaaattacgtgctcatattctcctaaaaagcaatagcaattgtgatcatgtttaccacgcagtttctaagatataacttaagatactatatctgtgggggatttattcagtggaggtctctacactatagcaggatgctaaaattacttttttgtatattaatttttctctttatatcaacaagcaccctccttttaacatgacataaatatgacttacaccaatctataaactcataaaataatttaaaaggtacatttcaaattgttaatgaatgcttgacccttactcagaattagtacagatccaaatcagtggataacaacaaaaaagacgcctaacactcctccccagtatgagatattttatctctcttatctagaraaaaatatgaaatagaattctaatgactggcttatgtcactaatgcctcaagaattcatgtttgcattgtcaccacttattaaatttgtgatcttgtggacgggtaagagggattaattaattgctatccacagaaatagattttcgttttaaatttctaatatgagatgtagtgatttataaacattttttggaaaagtggtcctctggaaaaatctataaattcatcctcgaggacacagtgaaaatatgaaggaggaaaggaaactaatgaaatcatctcttttgaccattaaacttaagaaaaaaaaaggaaaaaggaaatgatgcaacaacatcaaaaatgtctttcctacaaacaaactctttaatttggttcgatgttacacagtgaaaccctgtctctactaaaaatacaaaaaaaaaaaaaaattagtcaggcgtggtggtgggcgcctgcagtcccagctattccagaggctgaggcagtagaatggcgtgaatccgggaggcggagcttgcagtgagcccagatcgcgccactgcactccagcctgggcgacagagctagattccgtctcaaaaaaaaaaaaaaaaaaaaaaaaaaaaaaaaaaatccattcccaccaggttctaacgaccagctgtgattagaacaattcaaatcaggacagcacattttatttacaactcactgtgtaccagtccacacgttagtcagtgagagtaacaagaagatgaagtatttcctccttcattaagtggctcacattctcatagaaaggcctgcttagagcagtgttcccaaagccttgttccattgctattccaggacatgc

SEQ ID NO: 58592 - DNA, 911 bp, Homo sapiens
catatcttaagcccagttactatatatgaccaaaataatgagaaatgtaaacttctgttcatcataacaatttcaaataattgtttttatcaacttcttttttcaaaggaataatcatagttgacctaaccgatcagatattttcaggaaacagccagaatgaaaagtcaatactaccagattttaattggtggttctattattagcttgctgaattccccatggtcaataatttaacatttcgggttcaatttttcctccttaaaatgaaatcagaacacctaatctttacattcagccaggcagtataaaaataaattggaattcatcaactatgaagccctcacacttcttctgggacggtaactctataaatacaagacattattattaattaaaaatcaatagtgaatctatgtggtggggaacacacattcgcactaatcccaaaacaattacagcccgagacaggttcattctgggcaagtcagtgatggagggtgcagsggcacagcttcaccagaggaaactactgactttgcaagatcctattcttttcttattgatttcctttgcaaggccagaaatcagatcacttactagagcttaaagtcactttctgggaatatattcctggtagctcttttctaaatacataaatctaaccaatatgcacaaacaaatcccacaggtctttatagtacattttgaaccaaatttaaagagagagaactacttgaagttttcatgaagacacagtccctttgaatttccagctccctaggctgctttttaattgccgtaggttatgaacgatgtttagattttgttttattccccaagagcattcagaattagtccttggcctctgcaagctcagattttactgaaatgcaatgaattccattccc

SEQ ID NO: 58593 - DNA, 718 bp, Homo sapiens
gatgaggtttcaccatgttggtcaggttggtcttgaactcctgactttgtgatctgcccgccttggcctcccaaagtgctggtattagaggcgtgagccaccgtgcccggcctggtatatttttacccaaggactagattattagttgctagtgggtaaggaaaacaacttaaaattcctttgcaagttgtctttcagcacatggagaggtgggagtgcagcccatacttaccgtaggagataagccagatgtctggcactgaaatgaaacatctgtcagcatttgattgtgtcatagacaatgcccttgccacacccrtacattaatgctcgaagaaaaactgtggcgtgtatataatggaatgtaggtgggccaaatgaaaacaaagatttaaggattctggagatcatatttatacttttgttactatttctttttttgaaatgtgcgtgaaggaattaacaattatatagtaatataaaaattatcctgtgaatgaacccgggtaatatgacatgtaacttgacaacgagcggtgataaataattgctctaggcttcttcagtttttttttttcttagattcccttcctaccaatatgctctgtctgtgagacaccagatcttctataaggctgtggtctatggttgcacttccccagtggattattcttctcagaactctagtgtctcatgaaatgatatgttaatagttatt

SEQ ID NO: 58594 - DNA, 743 bp, Homo sapiens
ctattttatcatgatttaaaaaataagtataaaatattatcacatattttatgcattaattattttcccttggagctcttaagaggcctaagttttttcttttgttttttaaataaaactttgtcagctcttcattcctctacccatttttttgctcagttctacctaatgattgtaaaatctgtcctctcagtagtgacaattagtatcctcatacatattagtcatatatatccccgctcaaaactttcagacatgtgttgtaggctgaaggagaaaagaccatgattaaggtgttagcctgtcaagttataaaaaaccaaatggcatagtatagtaaagcagctgtgatttttttgtctgaggcgccactcagaaatatcctgttttcccgttcattttccctttccatagatgcccttgcagtcaccttccaggatgccccttggctgtctttaggtgtcagaaccttccactttcctactgactgtgaagggcatgtaaatgcctgggcatcattagaaagccagggagagctcatttaacctgatgtgtcagtagaattttgaagcagataatttgaaaatgtgtaataatactcgctaaatcagatcatttgtcatttctagaaaccaccttatgaagcaaattcataagcatccacttttgcttgaaacaggcagctaagtaaaccattagaacaactgtcacaaatcragaaaatgcacaactcaatatacttt

SEQ ID NO: 58595 - DNA, 1118 bp, Homo sapiens
tgctaagttgctgacatgcctaatcatttctacttcgtctcttcaaaaagaagaacatggaacccctgaacgtaaatcgatcactattctgctcatacggagagcgactctgtctccagcaatacgaacttgctaggtgtccctcttatgaacttgcatgactcaagtgtccccaaggctctgctgccatgggaacayatcacaaagcatcccagtgccactcgccccaggtgctgtgactcaagctttgggaacggattctggtgtgggatgcgtacccccacccttataccgctgcccctgtgggacccgatctcttcagtcacagggctgacatgcagcaggaactcaacatatggtgagtgactcggtcagtgaggcaggattgcaacagcaagacagagatttcttaaggccctacccaggccacacacagagtggtgttagctcctgagaagaaacacaaacggcagtgtttgtcccactctcatctagcgcgtggcctatggttctgggtggagaagaaatgcagatcccctgccaacgcctgaagctgcatcttgcccaagtcccctctatcaagttaggatgtgagaaacggcatctggtgcctcgttcccgtgaacttgtgctcaaaggcttccactgagggtactgtcgggatgttcatgggttcccaaggctccaaaggtgctagcttctgctgggctctccgacgccctgggcagatcctgggtcagtgcagatgcaatttgtcagataaccctgctctaccgcctctcagccctggtctactgagccagtatcagtacacgctggagcaggtggcggactgctgtagctggccaaaaggaccagagggaagagacctctggccctcctccatgaggtcaagcctgagaaagccaacaagccagccactgggaattccaggtgccagggctatgaatctagacctgtggtgcatacttaaaaacatggcggtgctgcccagctcctgttctttgtctctgccgtggaggagtctgcttcctgttcttgtccctgtgggtgcccactgtttgcctgtggctcttcagcaaaaaagcgtgctgtacagggaaggctttggcttgtgc

SEQ ID NO: 58596 - DNA, 699 bp, Homo sapiens
ggtatgttccaagatgatttacacatgtaaactctgtgtactcttttagtctgttaaatgcagtggcatttacatgagtgaactagtattggttttcaagccaaagtaactcattttgggattcttaagagacttctggaggaaaacagattactagaaaattttaagagaaaaatttaagctgcctaagtcttcttttttttttttttttttttttttgagatggagtttcactcttgtcgcctgagctggagtgcaatggcgccatctcggatcactgcaacctccgcctcctgggttcaagygattctcctgcctcagcctcccaagtagctgggattactggtgtgtgccaccatgtttggctaattttttgtatttttagtagaaacagggtttcaccatgatagccaggctggtctcaaactcctgacctcaggtgatctgcccacctcatcctcccaaagtgctgggattacaagcatgagccatcatgccccactgttaagctgcctaagtcttaatgagagtcatcatttaaaaaaatctgttaacactttatcattgttttagtcttccacctgtccatgcaaatatccctacagagctcaagtaaagattccaaatatagatgttagagaatgaggttgtcaggagcccctgagttaaaagatagagggctattgtgggttgaataat

SEQ ID NO: 58597 - DNA, 739 bp, Homo sapiens
ggatccacttacccatatcaccctgagcagtacataaagatgaacttctcagggagaggcaaggggggcagggatggcagaggacaacatcttctaagtatagaaatagataaaatgacaagaagactagagttgccatctgctggaggatgraaagaatgacatttgacactatttgcaacagcaaagctaaactcattagtaaaaataataaatctccatgtactgtgtactgccagttaaatgatacaaaattatagcagtgtgttattatttcagcatggcagtttttggataatgtagaaaatatatagaggtagtaaaacaatagcatccactttccctaatttgtactctacctactcttagaagggcttacaaatactgctttattccctttcaaatgccagcaagttccctcaatatgtatttctcactttcaccactgcgactttgaaaatgatgatggggtttcttctatgagtatgcctagtcattgcttccagattttctttctgcttatgtaacatgaccaaatgcatgaagctcactaaggttcaataaaaagaccgctggacggagaatcacaagggtggggtgataatctgtttgcccaccagctaccaatgtaaccataaaccaatcactttactactctgggtcctggcattttaagctgtaaaatgataaatgctagggaggatgggctgcagaatctcagtgatctctaaggtccttt

SEQ ID NO: 58598 - DNA, 739 bp, Homo sapiens
ggatccacttacccatatcaccctgagcagtacataaagatgaacttctcagggagaggcaaggggggcagggatggcagaggacaacatcttctaagtatagaaatagataaaatgacaagaagactagagttgccatctgctggaggatgaaaagaatgacatttgacactatttgcaacagcaaagctaaactcattagtaaaaataataaatctccatgtactgtgtactgccagttaaatgatacaaaattatagcagtgtgttattatttmagcatggcagtttttggataatgtagaaaatatatagaggtagtaaaacaatagcatccactttccctaatttgtactctacctactcttagaagggcttacaaatactgctttattccctttcaaatgccagcaagttccctcaatatgtatttctcactttcaccactgcgactttgaaaatgatgatggggtttcttctatgagtatgcctagtcattgcttccagattttctttctgcttatgtaacatgaccaaatgcatgaagctcactaaggttcaataaaaagaccgctggacggagaatcacaagggtggggtgataatctgtttgcccaccagctaccaatgtaaccataaaccaatcactttactactctgggtcctggcattttaagctgtaaaatgataaatgctagggaggatgggctgcagaatctcagtgatctctaaggtccttt

SEQ ID NO: 58599 - DNA, 704 bp, Homo sapiens
ccttgagtagagttcctggctttgttacttaatagctgtatgaaacatatataaggaatgtattttctttttaccttagtattcatatctgaaaaatagttgatgataatctagtaccatcctcataagactttttgtgatgattaatgatatcataatgtggatgactctcatatgagaaaccataaaatgtaaatgccaattattaatgctgttgatactttagaaattgaaatgtaaatatttatctgcagataggaaagctgtgatatcacaaggaatgctgaaatgtgttggttcttcaatgttcctcaaaagtaaatgggggatcggctaccgcctgaggtatcattcatttttattgacattattctrtattatactcttgctatactgttattatgttggaggcttgctgttatatgctttgaccatcatttatggtactaaatttaatttaaagccttcataatttacttttggctgtttattgtataatcattaattgtgatttttggtattctctagcatgtacatagacaaatattgtgccacagaatctctttcttcactggttaaacaacatatacctggagctactttattacaacagaatgaccaacaacttgtgtatagcttgcctttcaaggacatggacaaattttcaggtattacttactttaagtctcttggtgtttgaactg

SEQ ID NO: 58600 - DNA, 710 bp, Homo sapiens
ggctggcttataaattgcattttgcaggagtactgacaatcacactcataccaacttgagctaaaaggaattttaaagataactgtatgtctcacacccacttgtggttttgttaaatgcttgcatgagttctttggaatgttgaaactgctatttctttttcttaacgctgaaatgtttttgacagcacgcacggggtgttaaataaccttcatgtggacggcaaaatcgctcttccccatggtgaacactaggtggcagcgtggttctgcggctctgcagaacaccgggtgaatttggttacagcatttttggtgcttaccttcgcgatgtaattttccgagaaaggtggggtgatggcttagtaattatgyagaatattgatagctttgattcgtttagaaagtcttgcattcagctcccacttgtccacaacatcggcaactctaaagctgctgcccggtgcctggtttcccaaactaccttgcagaggtgtgtgtctgtctctcttagtggtgtctgtaaggccctttaactgtactttttttttttcttatcactgttctaccccatctcctcttctttttgtgcgtaggtatttctgttatcattactgtcatcttttccagttatgtaactccttttgttcttatactgttagtataacccttgtgtccgagaaccagagattccaaattagcaggggatcc

SEQ ID NO: 58601 - DNA, 710 bp, Homo sapiens
ggctggcttataaattgcattttgcaggagtactgacaatcacactcataccaacttgagctaaaaggaattttaaagataactgtatgtctcacacccacttgtggttttgttaaatgcttgcatgagttctttggaatgttgaaactgctatttctttttcttaacgctgaaatgtttttgacagcacgcacggggtgttaaataaccttcatgtggacggcaaaatcgctcttccccatggtgaacactaggtggcagcgtggttctgcggctctgcagaacaccgggtgaatttggttacagcatttttggtgcttaccttcgcgatgtaattttccgagaaaggtggggtgatggcttagtaattatgcagaatattgatagctttgattcgtttagaaagtcttgcattcagctcccacttgtccacaacatcggcaactctaaagctgctgcccggtgcctggtttcccaaactaccttgcagaggtgtgtgtctgtctctcttagtggtgtctgtaaggccctttaactgtactttttttttttcttatcactgttctacsccatctcctcttctttttgtgcgtaggtatttctgttatcattactgtcatcttttccagttatgtaactccttttgttcttatactgttagtataacccttgtgtccgagaaccagagattccaaattagcaggggatcc

SEQ ID NO: 58602 - DNA, 646 bp, Homo sapiens
taagtgaataaactgtgagcccattgagctaggcttctgcaggatttcttttcttggaggcttctttggctaaagagttctccctggtctcagtgtctagcatgatgtttgacaggtaaaggctgctaagcagctgctggtttggacatgtttaacaggagtatgaagcagtgacagtttccaactgagtcagggtgaggatggcccaaatacccctgrccaccacagcaggagtggaaagctgagagaaagagtaggggtttgcacctgacttaggaaccagaaagtgtatcttggttctagcagcgtgtgttccacagtttaatttcctgatggtgaaaaaccacccccactatgaatatcttttccctatcccttttcctgacccagtcttcccaaactctcaagtattcctgtctacactcctgtacactcatagactgaccaatgaagaaggcacagtgagtgtaacctgggaggaggcagagacacagagtaccaatctccttccactggcatgttatctcagacccttgacaatgtggcctctgtattagagttcttgacagggacagaaccaactggatgcagatacgtatagagagattcatctcaaggatttgtttcatgccactgtgggactggt

SEQ ID NO: 58603 - DNA, 646 bp, Homo sapiens
taagtgaataaactgtgagcccattgagctaggcttctgcaggatttcttttcttggaggcttctttggctaaagagttctccctggtctcagtgtctagcatgatgtttgacaggtaaaggctgctaagcagctgctggtttggacatgtttaacaggagtatgaagcagtgacagtttccaactgagtcagggtgaggatggcccaaatacccctggccaccacagcaggagtggaaagctgagagaaagagtaggggtttgcacctgacttaggaaccagaaagtgtatcttggttctagcagcgtgtgttccacagtttaatttsctgatggtgaaaaaccacccccactatgaatatcttttccctatcccttttcctgacccagtcttcccaaactctcaagtattcctgtctacactcctgtacactcatagactgaccaatgaagaaggcacagtgagtgtaacctgggaggaggcagagacacagagtaccaatctccttccactggcatgttatctcagacccttgacaatgtggcctctgtattagagttcttgacagggacagaaccaactggatgcagatacgtatagagagattcatctcaaggatttgtttcatgccactgtgggactggt

SEQ ID NO: 58604 - DNA, 646 bp, Homo sapiens
taagtgaataaactgtgagcccattgagctaggcttctgcaggatttcttttcttggaggcttctttggctaaagagttctccctggtctcagtgtctagcatgatgtttgacaggtaaaggctgctaagcagctgctggtttggacatgtttaacaggagtatgaagcagtgacagtttccaactgagtcagggtgaggatggcccaaatacccctggccaccacagcaggagtggaaagctgagagaaagagtaggggtttgcacctgacttaggaaccagaaagtgtatcttggttctagcagcgtgtgttccacagtttaatttcctgatggtgaaaaaccacccccactatgaatatcttttccctatcccttttcctgacccagtcttcccaaactctcaagtattcctgtctacactcctgtrcactcatagactgaccaatgaagaaggcacagtgagtgtaacctgggaggaggcagagacacagagtaccaatctccttccactggcatgttatctcagacccttgacaatgtggcctctgtattagagttcttgacagggacagaaccaactggatgcagatacgtatagagagattcatctcaaggatttgtttcatgccactgtgggactggt

SEQ ID NO: 58605 - DNA, 676 bp, Homo sapiens
agtctcgctgtgtcacccaggctggagtgcagtggcacatctccactcactgcaagctccgcctcccaggttcatggcattctcctgcctcagcctcccgattagctgggactacaggcacccaccaccacgcctggctaattatttttttaatttaatattgtaatttatttcataaattatgctgactcaactgattattattctggaaaaaataccactgtaccacatatatttacagaattaaagaaaaaaygaattaacaattttaatagaaaattagaagggaaatgtaggaatattttcttaacctggataggaaacccagaaactataagagaaaagacagatgtaattgaccataaaacatttaagcaactgaagtggagaaaaaaagcttggaaaacaatgtagtacatgaacaatagaattggaagattattttatatgtagatgacaacaacataactttgtatttcatacgaaaggggcaaaattgggcagtcgaaaaataaacaaatgaagctaatcattgggagcaaatccaaatgcccagtaaacataatcagcattgttcaaaaaactggtagtaaagaaactatccatcaaagtgccagtgaaactagcaaaattaaaaatcagtgacccctggtgctagctgggctgtagaggagac

SEQ ID NO: 58606 - DNA, 676 bp, Homo sapiens
agtctcgctgtgtcacccaggctggagtgcagtggcacatctccactcactgcaagctccgcctcccaggttcatggcattctcctgcctcagcctcccgattagctgggactacaggcacccaccaccacgcctggctaattatttttttaatttaatattgtaatttatttcataaattatgctgactcaactgattattattctggaaaaaataccactgtaccacatatatttacagaattaaagaaaaaatraattaacaattttaatagaaaattagaagggaaatgtaggaatattttcttaacctggataggaaacccagaaactataagagaaaagacagatgtaattgaccataaaacatttaagcaactgaagtggagaaaaaaagcttggaaaacaatgtagtacatgaacaatagaattggaagattattttatatgtagatgacaacaacataactttgtatttcatacgaaaggggcaaaattgggcagtcgaaaaataaacaaatgaagctaatcattgggagcaaatccaaatgcccagtaaacataatcagcattgttcaaaaaactggtagtaaagaaactatccatcaaagtgccagtgaaactagcaaaattaaaaatcagtgacccctggtgctagctgggctgtagaggagac

SEQ ID NO: 58607 - DNA, 1401 bp, Homo sapiens
agggctccagcacaggcctcttttaccttaagtaagcaattatgcatctggctctgaagttgcccatgataattatagaagcagaaacttgataaaggcatttgggaataggaataagaaactgaatttttaagctcccaagaggtgattataaacatatctccttgtcatgtactttagcagaagataaagtaataatagcttgaaaaatgaaggctgattgtgaagctaggatccatccactcagtagatgtattcttcccaatgaagtgtaatagttccaataaattcatttgggttgacttggggaatttttaaaaaatcacttaaaatatgtggttacctctatagagtttatttaccttctatttcctttccctttattatatacacccaggggaatgaataagattaacattctcatgtttagatgagaatactgattaactggcttaacgtattcattaagtatctcattcatcattgtatctcactatacaatccttaggattaccattataaatcagcaaaattacaagtaattaatatcttggatttcaggtgactctagaaaaaaggaaaccctctgtttaagactgaaaggtccacagttacatcacttactactataaaactaaaagatgatttgtatcaagaagagagaaagaagatggaaagtcttcaattatttttaagtcaaacgatgtacactccaggatgagagttcctggaaggctgagagtaaaatgagctaatgttgcagctttagagaaagcccaggtatacccgaaaagctccttttgtactcagacgttccaccctttaaccaatatctaaaacttcccccaggactattcctagggtatcatgactcagggattatcctgagatttagttgaattcttctttctagatctgtcagtgattcatagaggcagttagcaggaactgaagataccaggcataatttggatatttgttccctccaaatctcatgttgaaacttgatccctaatgttgaaggtggggcctagtgggaggtgctttggtcatggaggcagatccctcatgaatgacttgctgcccccttgtccccatcccacagtaatgagtgagtactccctccattagatcacctgatagctggctgtttaaaagagcatggcacccctccsccctctctctctttttccttctccctggccacctgatgtttgcccccctttcccttctgccatgcgtggaagcttcctgaagccctcagcagaagcagatgctggtgccatgtttcttgtacatcctgcagaactatgagccaaataaacctcctttctttataaattaccctgccccaggtattcttttatagcgatgcaatacactaagacaatacccaagatt

SEQ ID NO: 58608 - DNA, 1178 bp, Homo sapiens
tgcataaaaatgatacactggcctttggggacttgggtgaaagggcggaatgggggcgagggataaaagactacacattgggcaaagtgtacagtgcttgggtgatgggtgtaccaaaagctgagaaatcaccactaaagaagtcattcatgtaaccaaacatcacctattccccaaaaacctattgaactaaaaaaaaaataaaaaagaagaagaaatgttcacaaaacctttgacactggttgcattaagagatagagcatattttccctccatttgacaatatgctggcctcagtgagtcacttctactatttacartgctgcagaagtgttgctgtgtttttgaagactagttaagaaaatacaataagggttcctctgagctctatctttcgggatactcctcccttgaaaccttgctgttctgctctgaggaagcctgagctacatgtagaaaccatgtgtaagggttctctgcccaatagccgggcctgtgagtgagaaatcttttgataactccagtctcagacactgagtgcagtcatataagagactcagctaacttctgcacagtcaaccctcaaaccatgaagctaatattaataaatgagtgttgtttttgttgtacaccattatgtctgtggtgatttttagtgtagcattaacaatcaaaacaactgccaagagcataagctaagaaatcaaagggactagtacttggatttaagcttaacgatttccagctatatgactttagaattgtcactttaaattatctgtaaattgagaataaaagtatctatttcataaaattggcttgggtataaatgaaatgtacacaaagtatccttcacaggatctggagcataactagcccttgacactttacatagcgctgagtcttattattgtcattattataaaactttgagtgcaccctaattaaaataatttacatatacgtttctactaaaaattcccaagttctgtcattcattaatcaaagttaaatatttcttctaatattaatgttgactcccaaatataggctagattcccattctagttgaatattgacttttcaaatataatttttctatatgtggaaggcacagaactaaaatacattgtgtagattttctgtctgtattttctgcagaatgtttagaaatcttt

SEQ ID NO: 58609 - DNA, 1178 bp, Homo sapiens
tgcataaaaatgatacactggcctttggggacttgggtgaaagggcggaatgggggcgagggataaaagactacacattgggcaaagtgtacagtgcttgggtgatgggtgtaccaaaagctgagaaatcaccactaaagaagtcattcatgtaaccaaacatcacctattccccaaaaacctattgaactaaaaaaaaaataaaaaagaagaagaaatgttcacaaaacctttgacactggttgcattaagagatagagcatattttccctccatttgacaatatgctggcctcagtgagtcacttctactatttacaatgctgcagaagtgttgctgtgtttttgaagactagttaagaaaatacaataagggttcctctgagctctatctttygggatactcctcccttgaaaccttgctgttctgctctgaggaagcctgagctacatgtagaaaccatgtgtaagggttctctgcccaatagccgggcctgtgagtgagaaatcttttgataactccagtctcagacactgagtgcagtcatataagagactcagctaacttctgcacagtcaaccctcaaaccatgaagctaatattaataaatgagtgttgtttttgttgtacaccattatgtctgtggtgatttttagtgtagcattaacaatcaaaacaactgccaagagcataagctaagaaatcaaagggactagtacttggatttaagcttaacgatttccagctatatgactttagaattgtcactttaaattatctgtaaattgagaataaaagtatctatttcataaaattggcttgggtataaatgaaatgtacacaaagtatccttcacaggatctggagcataactagcccttgacactttacatagcgctgagtcttattattgtcattattataaaactttgagtgcaccctaattaaaataatttacatatacgtttctactaaaaattcccaagttctgtcattcattaatcaaagttaaatatttcttctaatattaatgttgactcccaaatataggctagattcccattctagttgaatattgacttttcaaatataatttttctatatgtggaaggcacagaactaaaatacattgtgtagattttctgtctgtattttctgcagaatgtttagaaatcttt

SEQ ID NO: 58610 - DNA, 1178 bp, Homo sapiens
tgcataaaaatgatacactggcctttggggacttgggtgaaagggcggaatgggggcgagggataaaagactacacattgggcaaagtgtacagtgcttgggtgatgggtgtaccaaaagctgagaaatcaccactaaagaagtcattcatgtaaccaaacatcacctattccccaaaaacctattgaactaaaaaaaaaataaaaaagaagaagaaatgttcacaaaacctttgacactggttgcattaagagatagagcatattttccctccatttgacaatatgctggcctcagtgagtcacttctactatttacaatgctgcagaagtgttgctgtgtttttgaagactagttaagaaaatacaataagggttcctctgagctctatctttcgggatactcctcccttgaaaccttgctgttctgctctgaggaagcctgagctacatgtagaaaccatgtgtaagggttctctgcccaatagccgggcctgtgagtgagaaatcttttgataactccagtctcagacactgagtgcagtcatataagagactcagctaacttctgcacagtcaaccctcaaaccatgaagctaatattaataaatgagtgttgtttttgttgtacaccattatgtctgtggtgatttttagtgtagcattaacaatcaaaacaactgccaagagcataagctaagaaatcaaagggactagtacttggatttaagcttaacgatttccagctatatgactttagaattgtcactttaaattatctgtaaattgagaataaaagtatctatttcataaaattggcttgggtataaatgaaatgtacacaaagtatccttcacaggatctggagcataactagcccttgacactttacatagcgctgagtcttattattgtcattattataaaactttgagtgcaccctaattaaaataatttacatatacgtttctactaaaaattcccaagttctgtcattcattaatcaaagttaaatatttcttctaatattaatgttgactcccaaatataggctagattcccattctagttgaatattgacttttcaaatataatttttctatatgtggaaggcayagaactaaaatacattgtgtagattttctgtctgtattttctgcagaatgtttagaaatcttt

SEQ ID NO: 58611 - DNA, 1810 bp, Homo sapiens
catattgcaaactgtttagaattaaaagattatgtttagaaattttattggactttccattcaagtgcattcacatttaagtcacagaaaagttagaagataagcaaatgatatttgatggtataagaattttggacaaaaggcattgattaatgaggttaaattttaaattaacctttaaatatttagtaatttttaatgaaaagatcacattaaactgaactgttttttaatagagaggaaatacttgaataaccctaattttgcaaataaactatctggttttttttagatggtatgaaaaatgtcaagatgcttttattttttagaagttatctccatttgtattttcaatttgttattacaaaattcaatatatgccaagtgactacagatcctcattgcctcatgatggaattatatccttacaaacccatcataacttgaaaatattgtaggttgaaaatgcttttaatacacctagcctaccaaacattacagcttagcctagcctaccttaaatgtgctcagaacacttacattagcttacagttgggaaacatcatctaacacaaaacctgtttcataataaattgtggaatatctcatgtaatttcttgaatactgtattaaaggtgaaaacagaatgatttttgtatacgttgaagaacggtttctactgaatgtgtatgactctcatactattgcaaagttgaaaaaccgcatatatgtctatctatcttaagtcagaaactgcctatattttgtagagcaggatatggtcttactttactaatattttaatatctactttgtgttaaacagttttatttcttgaaatgatttttaatttggggatcagtagtgtagtagttagaggttctgttcagctgcttgcaattagcatttagctacagtgttgtatatttccaggggttcttttccttttattaacttagagggttgctgatgttggttctgcaactcaagaatgtcagaaaaaaaggctttgcaattttctcagcatttccctccgaggctccattatacagagtatgtgctaaactacatgcataaaggaatttgagagtgaagatcagctgaattttggactgactgactcaaaagattcagagaaacaaataycgtgtttcctgggaagcaattggaagcaaaggtcaaaatcagaagcaattaggattaattttcattgaggtgatactggaagttaattgatttccatttcagtggtgaatgagagcagaaaaacttgaagtctgagagggaagtgggcaggtagaaactctttattgggataaaggagactagaacacatttttatgtagagaaagttttgtgtgctaagaaaaggattactgaagtgattggcaacaagttaaggctgcccgggaaagcacactgatcgtaacagtggcaaaggcaagaggaacaggtttgaatagcatgttcttccaatataaagaaatagtagcataggcctgtcttgttattttgagaaaagccttaatgaaaagcttactactccctgggggagctggcactccttttcacagaattctataagaacttatcctcctactattattttaaacgctgtagaatctacagattgaatgtgtcaagccacagtgtttttttttttttttggtgccaagttatgtgaaggtcaaaagtcaactccgtaacttcatcttatatctgaaacagagggactctcaacttctttttgtataaagatctaagcacatactcacattagaagaagttcttagtacatactctctgaaaa

SEQ ID NO: 58612 - DNA, 733 bp, Homo sapiens
caataacagctaatgtggccccactctcacctgtgaatcgtcttattcccacaggaaacatcaaacctccccaaatatcatcctctaggcagaggtcacttaactattaaatttacaaggcaggtgcaaaaaaaaaaaaaggtggggggmccgatgaaataaaggaaaaattctatttactaaaattcaagtagctaaactatcttttaggtgaagtcagtgaaaaccttcacacattgctcatttacccttatttcaatcataatgctaatatacttcccatctggtttctatttttcagcaagtcaaaagaaaaaacaattgagatagatatggtaaagtattagcagagacagaaaaatagctacaaagtggcagctgtcaaggaaaaagggaaacagttataaattcaagtagaactagaaaatagccatgagaatgtggaaaagctaccagcctctcacttttagagacacaaagcaatcagtgtgtaattgtttcttaatgactattccaaactatcaaagttatactgtattcggaataatctaaggtaataaagtatctagtacactttagaaatatttttattcaaaattaattaaaaagcattatgttaaaaaagataagcttttgttagttaatagacttcctcaccaagtcatgttgagcctcattcaacagcacagaataagccaattttatacaagacacaggtatatggaaacacaaa

SEQ ID NO: 58613 - DNA, 712 bp, Homo sapiens
ggtggcatattctggtctcctataattataagatcataattacattttaaattgtcttaatttatagttatgttttccctatatatacatataacaaagtttaggaaggtaaaatctctaagggtaaaatcaaaacatacttctaaaagattgtgtttctttcatataaaaatttagttatttataggatgtttggaaacaggccattcttgactattcagagatcagagtgagttttcataatcaaattcctggatttataaaacataatacaaaactggccacttacaaaattagtcatcaaataacatggactactctctgcctctcattagcctctataattctcattgcttaaagcaccagtacctggacagtatgatataaaatacaatgcaaatcaaattcaaagttcaaaatacaaatattgcacaagatgcaaactttcttaaagtcattgaaagtgatatggagaattattagaatcataagcaaataagaattaaaccactcaacaactaaagagaaatgcaagagccatgatgacaagttaggagcatcaaaagataataatttgagtatcagaagattaagagaggcccttaagaaaatggggattaagaatgtcatgtctwactatcaaaaacattgttttgcccgggtgcagtggctcatgcctgtaatcccagcatttttggaggctgaggcgggt

SEQ ID NO: 58614 - DNA, 675 bp, Homo sapiens
ttgtatcataaaattggggaaaatgaagatatgaggttaatgctccagacataacttattttgtkcccttatcttcattctgtatctgtcttccaaaaatgcaaatccaatacagtaatataatggcagttattgagctgttcatatatgctaggtactgttttaaatgcttttgatgtattcatttgattctggcaacaatcctgtaaaatagatagtgttattatttccatcttataaatgaggaaacaggcacgggatttaagtaattcgtgtaaagtcataagacttttgagtggcagggctgaaatgtaagttcaggcagtcttattcggtaaccccaactcttaactaccatgctacgttgatgccatccctcctgcttacaatgatttaggaagctgttcagggtttcttattgcctttgggaggaagtccaactctttaacacctcctctttgttcttatataatctgaccatagcttacagttcgagagtacctcatattcctgtggtacattccctctctttctctcactctccctttacccccttttttccttttttttggtggttctaaaaagttctaagtgctatctcacttaaagtccttcacacacttttctgtctgctaggatattcttattctgtttgtgtacccgcttttcttcctt

SEQ ID NO: 58615 - DNA, 675 bp, Homo sapiens
ttgtatcataaaattggggaaaatgaagatatgaggttaatgctccagacataacttattttgtgcccttatcttcattctgtatctgtcttccaaaaatgcaaatccaatacagtaatataatggcagttattgagctgttcrtatatgctaggtactgttttaaatgcttttgatgtattcatttgattctggcaacaatcctgtaaaatagatagtgttattatttccatcttataaatgaggaaacaggcacgggatttaagtaattcgtgtaaagtcataagacttttgagtggcagggctgaaatgtaagttcaggcagtcttattcggtaaccccaactcttaactaccatgctacgttgatgccatccctcctgcttacaatgatttaggaagctgttcagggtttcttattgcctttgggaggaagtccaactctttaacacctcctctttgttcttatataatctgaccatagcttacagttcgagagtacctcatattcctgtggtacattccctctctttctctcactctccctttacccccttttttccttttttttggtggttctaaaaagttctaagtgctatctcacttaaagtccttcacacacttttctgtctgctaggatattcttattctgtttgtgtacccgcttttcttcctt

SEQ ID NO: 58616 - DNA, 675 bp, Homo sapiens
ttgtatcataaaattggggaaaatgaagatatgaggttaatgctccagacataacttattttgtgcccttatcttcattctgtatctgtcttccaaaaatgcaaatccaatacagtaatataatggcagttattgagctgttcatatatgctaggtactgttttaaatgcttttgatgtattcatttgattctggcaacaatcctgtaaaatagatagtgttattatttccatcttataaatgaggaaacaggcacgggatttaagtaattcrtgtaaagtcataagacttttgagtggcagggctgaaatgtaagttcaggcagtcttattcggtaaccccaactcttaactaccatgctacgttgatgccatccctcctgcttacaatgatttaggaagctgttcagggtttcttattgcctttgggaggaagtccaactctttaacacctcctctttgttcttatataatctgaccatagcttacagttcgagagtacctcatattcctgtggtacattccctctctttctctcactctccctttacccccttttttccttttttttggtggttctaaaaagttctaagtgctatctcacttaaagtccttcacacacttttctgtctgctaggatattcttattctgtttgtgtacccgcttttcttcctt

SEQ ID NO: 58617 - DNA, 680 bp, Homo sapiens
aatagatcagaaaaattcctctctcttttgtaaggcgaactaagctgttctccaagactctttgatgtaaactggaggataatctctctgaagtcatccctgagccagcttctgagcactatcagctctaagatttaacagcatttcaaagattcacatctgtggtagaggactgaaggtaataaggacaatatctgatcattgcatggcatcacattcactagatacataaaatatttagactactgtctgaattttagtttcattaaatttctatcgctttacaattaaaaaaaatacagttgtgkcctggcccagggaaagaggccttcataagtttggatggtcattaaacagtagattgaagcatctttgtgtaaagttataaagaattatacattatattttagttgttttttcagtgaatttatttgttattcttagacctgagggggtcaggtggttacattattaattatttttactaatagtacatcatcagaaatatatctttaaaaaactgaagtaattctggtgaagcatacgtaatgactgatattccatatatatgtaaattatatatatactaacatatacgtatgtgtctatatatatttatatatatatgtatatatacactaattcttacagttttttttgtttttgtgagagttaggatt

SEQ ID NO: 58618 - DNA, 759 bp, Homo sapiens
taaatcagaatttcaggtcagtagaagtattttctaaattgttttaatatgattcttgctataaactgtggagaataaaagtaagaaagcagcataattaacagggacatttcccagtcatataacctgagtattggtctatgtaaaagaaaagtgctcaaactaaaatatatatgttttatattaaatctgaatttatatttatatacaaattttttaaatatttttatcccaatttttttatcccaattatttttatatttatatcccaatatttattgggatataggcccccccatcaaaatttttaaattcaattttattttaaatgacagcaggacaaaattaagatacaaatgtgtaatacctaattcttctaactgaacaagcttgatttattgaataaataagacacatctaataaacaggtttgagtataactgaaatgaattgwtaaagtatgatagaataaatatttatatggacatttatacccagctaccaacgatcttccttgttatgctgtgttaatttcacacctacttttcgattgaagcaagacttttaaagaaataaataacatagcattgtatctgtggtagaaaccatgtgcacaacaggctaggagtgagagagatgagattaaataaaagtgaaaaattcatcgatctcttacccaaattttaggattgtccatggaaactttggaaatataggtgtgcttaatttcaaaattgtgtgtacttctccctttttaga

SEQ ID NO: 58619 - DNA, 759 bp, Homo sapiens
taaatcagaatttcaggtcagtagaagtattttctaaattgttttaatatgattcttgctataaactgtggagaataaaagtaagaaagcagcataattaacagggacatttcccagtcatataacctgagtattggtctatgtaaaagaaaagtgctcaaactaaaatatatatgttttatattaaatctgaatttatatttatatacaaattttttaaatatttttatcccaatttttttatcccaattatttttatatttatatcccaatatttattgggatataggcccccccatcaaaatttttaaattcaattttattttaaatgacagcaggacaaaattaagatacaaatgtgtaatacctaattcttctaactgaacaagcttgatttattgaataaataagacacatctaataaacaggtttgagtataactgaaatgaattgttaaagtatgatagaataaatatttatatggacatttatacccagctaccaacgatcttccttgttatgctgtgttaatttcacacctacttttcgattgaagcaagacttttaaagaaataaataacatagcattgtatctgtggwagaaaccatgtgcacaacaggctaggagtgagagagatgagattaaataaaagtgaaaaattcatcgatctcttacccaaattttaggattgtccatggaaactttggaaatataggtgtgcttaatttcaaaattgtgtgtacttctccctttttaga

SEQ ID NO: 58620 - DNA, 1212 bp, Homo sapiens
tgcatatatttataagattatattgtccattctttttcattttttccaaatttcttctgtttttacaatttttgcaatcttatatgaaggcaacttatggagtcttttacacataatgattgtttattaagttgaataactggcctactgtatttgtgcaattacctttgaaattagaaagaggttttttttttyttttttcattgacttaataggtcagtgttttctcaaatcttcataaatacctgcatttcccagaatcctatttttaaaaagttccccattgcaataaatcatttcagttggtctgggagtaaacctcctaatttgtatttttatccagcaccccggataattatgagaaggtcctctgatgactacacctttgagaaacatcatattatgtagtattcacaaatgctgatgagcctacatgaaattttggcattctagtgatttagaaaacttggttgtaagcaagctctttccataaagggtttacacttatgtgacacagactggtataacataaagagctataaattgaccatttaaaacattatttattgatgaaaacaattcacacgattcatagaaaagcaaacttcaactgatgtgtcaagggtgaaaacattttcacaattaattgcatagagctacctctactaaagttatcctgggtatattattcaacagtttttcatcatggtaaatgataaatccattaaaacaattattttagaagatagatgatggcagaacaaaaacagttgaaccattattctagtaaagtttggcattcactctgctcatgagatgcaaattttcttctgtgaaaatgaagcactaaatattagcagagggtgtgatgtctgaaaaattattgctgaaatctgtaattatcattaaatattcaggatacatgggggtattctgaggaatatattaccacatcactttcttgtccaaaatccttcaaagattcttttcaagttgcctgcaaaattaagttgattctccttggctttttattttaagcattctgtgatctggcactgattcactctttcgattttatctcttaacatctagtagcactgctcatgcacttttctgcttgtttccaatagagttccccacaggatgtccctaagaacactaatttcaggacactaataggtgttatattttaataaaaaaagtctccaaggt

SEQ ID NO: 58621 - DNA, 1212 bp, Homo sapiens
tgcatatatttataagattatattgtccattctttttcattttttccaaatttcttctgtttttacaatttttgcaatcttatatgaaggcaacttatggagtcttttacacataatgattgtttattaagttgaataactggcctactgtatttgtgcaattacctttgaaattagaaagaggttttttttttcttttttcattgacttaataggtcagtgttttctcaaatcttcataaatacctgcatttcccagaatcctatttttaaaaagttccccattgcaataaatcatttcagttggtctgggagtaaacctcctaatttgtatttttatccagcaccccggataattatgagaaggtcctctgatgactacacctttgagaaacatcatattatgtagtattcacaaatgctgatgagcctacatgaaattttggcattctagtgatttagaaaacttggttgtaagcaagctctttccataaagggtttacacttatgtgacacagactggtataacataaagagctataaattgaccatttaaaacattatttattgatgaaaacaattcacacgattcatagaaaagcaaacttcaactgatgtgtcaagggtgaaaacattttcacaattaattgcatagagctacctctactaaagttatcctgggtatattattcaacagtttttcatcatggtaaatgataaatccattaaaacaattattttagaagatagatgatggcagaacaaaaacagttgaaccaytattctagtaaagtttggcattcactctgctcatgagatgcaaattttcttctgtgaaaatgaagcactaaatattagcagagggtgtgatgtctgaaaaattattgctgaaatctgtaattatcattaaatattcaggatacatgggggtattctgaggaatatattaccacatcactttcttgtccaaaatccttcaaagattcttttcaagttgcctgcaaaattaagttgattctccttggctttttattttaagcattctgtgatctggcactgattcactctttcgattttatctcttaacatctagtagcactgctcatgcacttttctgcttgtttccaatagagttccccacaggatgtccctaagaacactaatttcaggacactaataggtgttatattttaataaaaaaagtctccaaggt

SEQ ID NO: 58622 - DNA, 1125 bp, Homo sapiens
gtttctacaaggattcaaagattcagtttctcactttttaatctctgttgggaattatgaggcaataattattatcacttcaattgccaggtattatcraaaatgaataatcatatggtcataaaacattatctggtaccaaagaatatactattaaatgaaataagtgaagataaaactttttaaaatttttatgtatttttcccagacggggggtctcagcctgtcacccaggctggagtgtagtggcgctgtctccgctcacttcaaacctccacctcccaggctcaagtgatcctcctacctcaaccttccgaacagctgaatagctgggactgcaggtgcgcgccaccttgcccggctaatttttgcaatttttgtagtgatggcatttcaccatattgcccaggctggtctcgagttcctggacacaagcaatgcaccttctttggcctcccaaagtgataggattgcaggcgagagccaccatgcccagccaaaacttattttttaaacaagctataataaaaagaatgtatttgttgagtttatttaatataaaaccttgacttcaaaatttgtaagaataatgtttagagacattaactattatagaaatcgagtttccatagtctgaactccaaaaaaaaacctcacatttcaaaaatcattaaagaaaaactcagaacaaatgatataatgggaatttacatgtatttggttttgtgattgcagtgagtgtatagagaaaaatctgatttatgaatttacaagacctaatcaatagaatttatgctgccaataaagttgtttgcaacatttttaattgaatcctttttatgcctgcatagatcctatggcatctacagaactactaatataaatcttttcagaaaaaaagcaagacagatgtatgcgaatacacaggagtaagaaaagcaaatctttttttttctagctattcagaaatagtttgcaatcatgtgacacatacaaagtaaattattgccagacctgtaatcctagcactttgggaggctgaggctggtgcttgagcccaggagtttgagaccagcctgggcaaaatggtgaaacctcatctccacaaaaaatacaaaaattagc

SEQ ID NO: 58623 - DNA, 942 bp, Homo sapiens
gatttgaatctcccgccagcatcaaaggaaagagcacatgggctttttatcagcccacatgtgggcgacaaggcgaagaaggagggataaggcttaaaagctctcagtagccaaaggtcaaaaaatagtctgatgtcagtgtctttattatactcatatatcgtagaatttcaatgrtgaaaaaatgtacttttcttgactgtagaacttctgagcccttagcattaaaatgattattgtgaatttgccagaaagagaatatagaatctttcaaatggacttgttcataggaccttatttttagataatctttaggggatattgccacataaaacatcgtatgggggaacatgtatgtaatttttaaacgcagatgttaatcacctttaaagttttttgtttttttaacttcttttctagttaagacatagaaggctaaattgtggcttacttcaattaagaaagcaaggaattcttgttgaattgattttagatgacagtgtgggagatgactgaggctttaaaaggatggaatgtggtcagttcaaaaggaaagcaataggattattaaattccaagtgtcttaaatgggccccaggatatatgatggaattctctgtgacaacatactttttctggccctaaaaccttttgattaaagctcgaaacctggttattatccagacaaatcattcattttcagtcttgagctttatactttgatgaaagaagtgctattttatattttccatgggaaaactttgttcttaacaaagttaagatttgatttgattaatttctatattaccataatatgaaaacagattttaacattgatttttactaagtggaaataaatcaattttattatgtgtgtcttttaggtaatgtgctttttttttgtttctttttcttactcctttgaaagctcgttatgaattc

SEQ ID NO: 58624 - DNA, 942 bp, Homo sapiens
gatttgaatctcccgccagcatcaaaggaaagagcacatgggctttttatcagcccacatgtgggcgacaaggcgaagaaggagggataaggcttaaaagctctcagtagccaaaggtcaaaaaatagtctgatgtcagtgtctttattatactcatatatcgtagaatttcaatggtgaaaaaatgtacttttcttgactgtagaacttctgagcccttagcattaaaatgattattgtgaatttgccagaaagagaatatagaatctttcaaatggacttgttcataggaccttatttttagataatctttaggggatattgccacataaaacatcstatgggggaacatgtatgtaatttttaaacgcagatgttaatcacctttaaagttttttgtttttttaacttcttttctagttaagacatagaaggctaaattgtggcttacttcaattaagaaagcaaggaattcttgttgaattgattttagatgacagtgtgggagatgactgaggctttaaaaggatggaatgtggtcagttcaaaaggaaagcaataggattattaaattccaagtgtcttaaatgggccccaggatatatgatggaattctctgtgacaacatactttttctggccctaaaaccttttgattaaagctcgaaacctggttattatccagacaaatcattcattttcagtcttgagctttatactttgatgaaagaagtgctattttatattttccatgggaaaactttgttcttaacaaagttaagatttgatttgattaatttctatattaccataatatgaaaacagattttaacattgatttttactaagtggaaataaatcaattttattatgtgtgtcttttaggtaatgtgctttttttttgtttctttttcttactcctttgaaagctcgttatgaattc

SEQ ID NO: 58625 - DNA, 1595 bp, Homo sapiens
cacacatatttatgaccttatagttctagaagttagaagcctaaaatggtaggccgctcgcattccctgaatcatggccccttcctccaacttcaaagtccatcattgcaatgttggcttctatcatcacatctccttttttctaattgattctcctacctcccccttataaggacttttgtccttataatctccccatcacaagagccttaacttaaacacacctgcgaagtcccttttaccatgtaaagtaacacaataaattcacaggttccaagggtgcagacatctttgggggagctgttattgttcctctcacacccattttgcttccatatttctcttccactggtgttaatccccaaagcaccccctaattaacttcctgcatcctattctccatttcagaggcttctcagggaacatgacctgcacccaacaatcattgggctatatgttttatttttgttttctgagacagggtctcactccatcacccaagctggagtgcagtggtgcaatcatagctcactactcccgggctcaagtgatcctcccatctcagtctccagagtagctgggtctatgggcatgcamcaccatgcctggcttatttttttactttttgcagagacagggtcttactatcttgctcggcctgctcagaaggcctcacgggatccttctgcttccacctcccaaagtgctaggataacagacatgagccactgtgcctggcagctctctgttttatctacttcagtgcaccaggctggggacacagcggttagcaaaacagctgctcacagaaatcatggtctaaattcaggttttctcagcctcagcactgttgacatttggggccagataactcttagttgtgaggggctgtcccgtgtattgtaggatgttaggcagcatccctggcatctgcccacacaatgccagtagcacccccaccccaagtgacaaccaaaatggactccagacattgcccgctgtcccctgggagggggcaaaatcaccaagattgagaaccactggactatgggagaggagatactaagcgcacttgattgtaaaaagtcttgatctacactggttctcatcctaacaaagagggtcatggagtgaatctactcccagctctcgaggagatggatctggacaggacctttggcatcccattggtatttgaaaaaccagctgcaagaatgttggaatattgaatcgagccctgaatctgaggagagaaatgagtgaaaaaaatagcgagccccgacaggtaatgatgccatttgaatacggcctcttgctccgaaccatcaaaccatcgctgctgttttgtttaaagaaaaaaaaaatgaccaacgggaaaattggcaggtgacatagaaggcctcgagggcatctggatttcattatccgcctctcatcttttatttaacaaggaaatgggaaagtttcagagcatttgggagcatggaaataatggaacattcaagtgcattacaaagcaaagtgtgtattagggctgggcagaaagctctgtcctgaggtggattatcacatagtctggggtactcacacctccc

SEQ ID NO: 58626 - DNA, 1595 bp, Homo sapiens
cacacatatttatgaccttatagttctagaagttagaagcctaaaatggtaggccgctcgcattccctgaatcatggccccttcctccaacttcaaagtccatcattgcaatgttggcttctatcatcacatctccttttttctaattgattctcctacctcccccttataaggacttttgtccttataatctccccatcacaagagccttaacttaaacacacctgcgaagtcccttttaccatgtaaagtaacacaataaattcacaggttccaagggtgcagacatctttgggggagctgttattgttcctctcacacccattttgcttccatatttctcttccactggtgttaatccccaaagcaccccctaattaacttcctgcatcctattctccatttcagaggcttctcagggaacatgacctgcacccaacaatcattgggctatatgttttatttttgttttctgagacagggtctcactccatcacccaagctggagtgcagtggtgcaatcatagctcactactcccgggctcaagtgatcctcccatctcagtctccagagtagctgggtctatgggcatgcaccwccatgcctggcttatttttttactttttgcagagacagggtcttactatcttgctcggcctgctcagaaggcctcacgggatccttctgcttccacctcccaaagtgctaggataacagacatgagccactgtgcctggcagctctctgttttatctacttcagtgcaccaggctggggacacagcggttagcaaaacagctgctcacagaaatcatggtctaaattcaggttttctcagcctcagcactgttgacatttggggccagataactcttagttgtgaggggctgtcccgtgtattgtaggatgttaggcagcatccctggcatctgcccacacaatgccagtagcacccccaccccaagtgacaaccaaaatggactccagacattgcccgctgtcccctgggagggggcaaaatcaccaagattgagaaccactggactatgggagaggagatactaagcgcacttgattgtaaaaagtcttgatctacactggttctcatcctaacaaagagggtcatggagtgaatctactcccagctctcgaggagatggatctggacaggacctttggcatcccattggtatttgaaaaaccagctgcaagaatgttggaatattgaatcgagccctgaatctgaggagagaaatgagtgaaaaaaatagcgagccccgacaggtaatgatgccatttgaatacggcctcttgctccgaaccatcaaaccatcgctgctgttttgtttaaagaaaaaaaaaatgaccaacgggaaaattggcaggtgacatagaaggcctcgagggcatctggatttcattatccgcctctcatcttttatttaacaaggaaatgggaaagtttcagagcatttgggagcatggaaataatggaacattcaagtgcattacaaagcaaagtgtgtattagggctgggcagaaagctctgtcctgaggtggattatcacatagtctggggtactcacacctccc

SEQ ID NO: 58627 - DNA, 1595 bp, Homo sapiens
cacacatatttatgaccttatagttctagaagttagaagcctaaaatggtaggccgctcgcattccctgaatcatggccccttcctccaacttcaaagtccatcattgcaatgttggcttctatcatcacatctccttttttctaattgattctcctacctcccccttataaggacttttgtccttataatctccccatcacaagagccttaacttaaacacacctgcgaagtcccttttaccatgtaaagtaacacaataaattcacaggttccaagggtgcagacatctttgggggagctgttattgttcctctcacacccattttgcttccatatttctcttccactggtgttaatccccaaagcaccccctaattaacttcctgcatcctattctccatttcagaggcttctcagggaacatgacctgcacccaacaatcattgggctatatgttttatttttgttttctgagacagggtctcactccatcacccaagctggagtgcagtggtgcaatcatagctcactactcccgggctcaagtgatcctcccatctcagtctccagagtagctgggtctatgggcatgcaccaccatgcctggcttatttttttactttttgcagagacagggtcttactatcttgctcggcstgctcagaaggcctcacgggatccttctgcttccacctcccaaagtgctaggataacagacatgagccactgtgcctggcagctctctgttttatctacttcagtgcaccaggctggggacacagcggttagcaaaacagctgctcacagaaatcatggtctaaattcaggttttctcagcctcagcactgttgacatttggggccagataactcttagttgtgaggggctgtcccgtgtattgtaggatgttaggcagcatccctggcatctgcccacacaatgccagtagcacccccaccccaagtgacaaccaaaatggactccagacattgcccgctgtcccctgggagggggcaaaatcaccaagattgagaaccactggactatgggagaggagatactaagcgcacttgattgtaaaaagtcttgatctacactggttctcatcctaacaaagagggtcatggagtgaatctactcccagctctcgaggagatggatctggacaggacctttggcatcccattggtatttgaaaaaccagctgcaagaatgttggaatattgaatcgagccctgaatctgaggagagaaatgagtgaaaaaaatagcgagccccgacaggtaatgatgccatttgaatacggcctcttgctccgaaccatcaaaccatcgctgctgttttgtttaaagaaaaaaaaaatgaccaacgggaaaattggcaggtgacatagaaggcctcgagggcatctggatttcattatccgcctctcatcttttatttaacaaggaaatgggaaagtttcagagcatttgggagcatggaaataatggaacattcaagtgcattacaaagcaaagtgtgtattagggctgggcagaaagctctgtcctgaggtggattatcacatagtctggggtactcacacctccc

SEQ ID NO: 58628 - DNA, 1343 bp, Homo sapiens
cagatggaaagaggaaggaaggatggaaaagggaagaatggtgggatgaaaagatggagagaaagaagggcagaagagagaatgggagtaaaagaaaacgagagaatacatggctatttgattagagtagggtggaaagaaatcccatattgcttcctacccatcaaggaagccttcatggacaagatgtgggattcacctttccatccaccctcattaccaaggcatggtcagggggaaaaaacagacacaaatgactgtttctaatgactgtgactgtgtacttaagatttagtgaatattttgcaatatatctcacagatgcaattaaaaagaacattctttcccgtgatctttgtaggatattagatatctgtcacacagatgtctcatctggaaataaggccaattcagagaaaatcaacaaaattaggtggcacaaaacattagaaagggaagccaaatcctctggggctatatcagccctgggtgtaccatggtgctttctggatgggccagcaagtcagggctccctgacaaggtaagctgtgcagaggggctgggctaagccaaggctgcacatctgtgttagggaaagacactcagctccaggccatcacctatgcttaggaaaatgcatgtttcccaagtacagcaaaggactcttccagtgttggaatctgggaaaactcttcccacttttctgatgcccaatttacatacagtatcaaaactaaaaggatcccgagaaatcttacattgtctttgaatgagttcattactctccatctctagccccaatgttctggtccaagccaccaccttcttctcacctgggctgccgctgcctcctcgctggaatcgcagactcacttgcatttggttccatttttgcttttttgttatactaaagtgaaattcacagaacgtaaaattcaccattttaaattgaataactctgtagcattaagttcattcatattggaagatcacaacctctatctagttccaaatgctcaccacttcaaaaggaaatcccttacgcattagtcactcccatttcccctttcctccagcccctgcaccaccaatcagctttctcgctctatggatttgcctattctggacattrcatataaatggaatcctacaagatgtggccttttgtgtctggcttcttcactcagtacaatgtttttgagggtcatccatgttctagcatggatcaccactaaatgactttttatggttgagtaattggatcccactttggattctttacaatgtattctctacccagcagtcaaaggcaggctttaaaaagtatacattgtatcatgtca

SEQ ID NO: 58629 - DNA, 2507 bp, Homo sapiens
gcataatatactatgttaagctctatgattgcaaacatgaaaaagataaggtttctgctctggagaagctcaaaatccagaagaggagatgtatagcaattacagatgtgggtgttctcttttgcttaaataagcaaaatctcaaaagaaggccagatgaataaaactaaacatggtctctagagccactctagaaacttgggtaaaaatttaaaggctattcagtactatattgagaggcccttgaccatgccctattgtttgtattatcaggctgtttagttttattctgatgtggctagcacgtaattcctattttaaaactttcagatatattttaacttttttctataaagtcaaaaccaatccactatctgaaataattgtgcttaagtatctttttttttttcttttttctttttctttttgtttttgagacagagtttcgctcttgtcgcccagctggagtgcagtggtgccatctcggcccactgcaacctccgcctcctgggttcaggcgattctcctgcctgagcctacgaagtagctgggattacaggcgtccaccaccacacctggctaatttttgtatttttagtagagatggggtataaccatgttggccacagtggtcttgaactgctgacctcaggtgacccaccctcctctacctcccaaaatgctgggattacaggtgtgagccactgcacccggccgcttgagcatcttttagtaaataggcccagttatcagactcaacaagagtctagtgaaatagaagtaaagcaggaacttccaaaatacatggatagagggcaggctaatgatttagtttccattcaaaacattttctttgagaatatgttctacttttatttaatagggttgaaggaaactcaagtaaggcatgttttgatgttttatcatggtctgttactttctgttctagggaggggagttgatcattttatatttgactagtcatacaaaaattcatatgtagagatctaagttaattggcaataagttttagatttcctgaagtgatattttaataatctttgtagtttggtagctgctcacctggcttgccgttaatgtggctcagaaatgagctatgtatattcttatcttttagactttacctctcctaagagtaaaactatcacgcattagggcacaatcagatttcagtcttatcagtcttatatctcttccactcactcacccttatgaaatgtttactaagccgctataaagtacagtggactacaattaaattaggcttctcttcctttttcttccctcctctcccctccccttcccttctcttcccttcccttccctcctataacgataaatttttatcagagaatatttagaaactacataagaaagtaaaaatttctgaagaaggtaaaggttatattttaatgtatttctttctacttgctatataagtatatatccataggtaagcgtgtatgcataccttctaaaaaatatgactttctactgttttgtaaccttttttgtttgtttaaaatacaagcatctttttaagaaatattttctacaacataatttcttgtgtgaattccagtgcatggctttactaaggctaatttaccaatcctgtggttatttctaaatttacattataaacttttctgggacctcatttaattaagattttataaataatttttttttttttttttttgaaacggagtttccctctgtctcccaggctggagtgcagtgacgcgatttcggctcactgcaaggtccgccttctgggttcacaccattctcctgcctcagcytcccgagtagttgggactacaggcacccgccaccacgcctggctaatgctttttgtgtttttcttatagagacagggtttcaccatgttggccaggatggtattgatctcctgacctcttgacccgcccacctctgcctcccaaagtgctgggattacaggtgtgagccaccgtgcctggcctatataaataattttatttgaatatacattcctataaatggaataactagaacaaagaatattcatatatgaggcctatattgggagtacagatctccaaattctccataaatacacaaatttatacttcttgcatatgtgtgcctgcatcacagtatcaaactcctatttacaaaaggagatgactcatggtgtgtcttatctatttttaaacaaaacatcataaaattcattatagaagaaaaaaattaactcacttttactacaaataagtataacttccctttaataaatatcagtggtctaaaaaggcaatctagttgaagataattattaattataatttcttcaataaggtgaattgatatgaaatgacaaatatgaacaaaaattattaatgttgcaatttcgttgataggaaaactgactatcaaaaatttaaaagttttgcagaacattgcataactttttggcagtggagccagtaagaattcaggag

SEQ ID NO: 58630 - DNA, 1034 bp, Homo sapiens
cttccttacaccttatacaaaaatcaattcaagatggattaaggacttaaacgttagacctaaaaccataaaaaccctagaagaaaacctaggcattaccattcaggacataggcatgggcaaggacttcatgtccaaaacaccaaaagcaatggcaacaaaagacaaaattgacaaatgggatctaattaaactaaagagtttactttttatttctaaatagtgtgtccgagaaaagcctaactacaaaggcagcaatttgagcaaagctctaaagcacrtgaatgattagcctactacatggagaggagcatttaattagagaagaaaacaatactaattcctgaggcaggaatctgcctggaaaatttgagggcttacaaggaaatcccagggttcaagcatgacagcaatgggctatccataggatatgaagggcagggtgataccgtgcatgcagattgcacagttcatcctgatgagctgtcttgacggaggccacaaagagtacaaactatactaggtcattttctttttagtaataccatcagtgcttgtctaaaccagctctacacttgattattgaggatatggtgatttctttctgccttttcggctttgctccaaaatgatatttaacctataagctgagtcttttcttcttttcttctctcttactttgtgtgtgcatgtgtgtacgtgtgtgtgtgtttaagatggcagaaaagggacaaatgtttattatggatttctacatgcaaggcactatcctaggcaattttcatgcatttattttcataaattagaatagttacaaaattatcacaatattagagatgaataagctaggagtccaaaaggtactagtacgcacttgcagagtagagtttcatatgcaaacctttgtatggtactagatgatgctatgattaatttcacctatgatgtatatgatgctaaaaatgttcaaaggcaaaatcagtgaatagagagagctagctttcttaataggtataaaggcgcatattggtggg

SEQ ID NO: 58631 - DNA, 532 bp, Homo sapiens
tgcttctctctcccctttcaactgtaaggtgtgaaaaaataaaagtgagcatcaaaaggaaagaaatgcaacaaaagtgaaagttcacacactttcaaatcatctctacctctctctacccaagcactgtgtatagactactgggagatcgaaagtgatgagtctgacaagtaaggaaaacttctgttttcctccaaagacaacttgttcaagaaccaagaataccatcygtcaagtcactagtgcagagagagagaaggaacaaaatagtacttccatgttacttaccttaggatacggatactgctttcctttgggatacaacgctccagtaaaccgagggataaccatggtgggtaccaaagagtcatttatcatcaggaaggcaagtctttctccatctggtgaccaccagtgggcgatgtgagaatgcaggagttcctctagaataaatgagtgttatttgagaccaactgtagagatgtgggctcagtgacccacaaacatctgtccttgaaatctccattgtaca

SEQ ID NO: 58632 - DNA, 532 bp, Homo sapiens
tgcttctctctcccctttcaactgtaaggtgtgaaaaaataaaagtgagcatcaaaaggaaagaaatgcaacaaaagtgaaagttcacacactttcaaatcatctctacctctctctacccaagcactgtgtatagactactgggagatcgaaagtgatgagtctgacaagtaaggaaaacttctgttttcctccaaagacaacttgttcaagaaccaagaataccatctgtcaagtcactagtgcagagagagagaaggaacaaaatagtacttccaygttacttaccttaggatacggatactgctttcctttgggatacaacgctccagtaaaccgagggataaccatggtgggtaccaaagagtcatttatcatcaggaaggcaagtctttctccatctggtgaccaccagtgggcgatgtgagaatgcaggagttcctctagaataaatgagtgttatttgagaccaactgtagagatgtgggctcagtgacccacaaacatctgtccttgaaatctccattgtaca

SEQ ID NO: 58633 - DNA, 703 bp, Homo sapiens
tttgaatcattcaccattttcaaatttaaaattgtcatgaaaattactcaaatcagtgaaggcagaatagcgtttcagtaatatttcagctaaaacargtctaatgtttaattatgtatcttttattttgtgtttttattttcttttaagatggctaaaattttgtgagagtgctgctattgtaggtttgtatctgccattgtcgcaggttgaatcacttatggtaagctaatttatattgtaactgcattccaactcaagatcttcatagactttaatatcaaattttcatttcttgccacatgttcatcacaagttgtatgtcagtgtggagagaatctgcctaatggctcttcacccagaaatccaggctgctaggtgtccagcatctggtgaatttgctggtagttgtggcagaagagaaggtggcaaattaaaaattgactcttaaagacttctgcccagcagtgatgtatattgggtccaatcatttgttaatgagcaacattgactaacacattgattcgaatatcccttgaaacatttatgacatatttcctaacttgacataatgcagcacatagtatttcaattgttcttctatttttttttgtggtgactttacccattttgaattattttatgggtagagtaagaccattgattttgaaaaactggaagttgactggctctgcaaattgaa

SEQ ID NO: 58634 - DNA, 1239 bp, Homo sapiens
  misc_feature (1)...(1239): n = A,T,C or G
atccctgaaaaagaaccagaccagcctggcctgcttctctgcatcccagggtccccagaaaagtgagggctgtttgggggtcctgggtcagatcctcatccaactcctacccccttgaactcccacctccaaaggcaatctaatagctcctgctgggatctcaagctccaagggagaccttcataccacgcacattctgggacaatctttggttctcctctcagcctggacaagcagtgaaatacagcatccagccactgcctggctcagtcagccatgctatcttgggacagaaaccttgacaggaatcccagctctagccaaggaaaacatgagtcaggcctggctaagccaggtggcttccctctctccaccttcgatcccacaccccaactcacagccannnnnnnnnnnnnnnnnnnnnnnnnnnnnnnnnnnnnnnnnnnnnnnnnnnnnnnnnnnnnnnnnnnnnnnnnnnnnnnnnnnnnnnnnnnnnnnnnnnntgttcttaaaatttgtattgttgggttttaaaaaaaaaaaaaaaaaaaaaaaaaaaaaaagtcttactctgtagcccaggctggagtgcagtggaatgatctcggctcactgcaacctccatctcccaggtttaggtgattctcctgcctcagcctcccaaatagctgggattacaggcgtggtattgttattttttattgtggtttttttttgcaaatattttctatctgcagttggttgaattcatacaaggggagctgcaggtacagaatgttgtcttgtatgttgattgtaatgatgattacacaggtatatacatttaccaaaactcattgaactgtacacttcaaatgtgtgcattttcttatatatgtaaattaaaactaaatatagttgatttaataagtgagataatatgctgaagcccccagcaccattcatggtacacaataaatgcttagcaaatgttatttctcatctcaccagcaccacctctttaatttctctctgtgttcctgctcttttcacacactctcagcgtaatgtgcttctcatacctctctgcctctccraattcctcccatccttcaatgtgcagcttaaatccttctagcctgaatgttttccaggttactccaggtcacagtgcagaacccttaaagcatccaccacttgcttctccaaaattaagcatggttgtgtagtaacatgtgtcattcacaacttgtttgatgc

SEQ ID NO: 58635 - DNA, 1239 bp, Homo sapiens
  misc_feature (1)...(1239): n = A,T,C or G
atccctgaaaaagaaccagaccagcctggcctgcttctctgcatcccagggtccccagaaaagtgagggctgtttgggggtcctgggtcagatcctcatccaactcctacccccttgaactcccacctccaaaggcaatctaatagctcctgctgggatctcaagctccaagggagaccttcataccacgcacattctgggacaatctttggttctcctctcagcctggacaagcagtgaaatacagcatccagccactgcctggctcagtcagccatgctatcttgggacagaaaccttgacaggaatcccagctctagccaaggaaaacatgagtcaggcctggctaagccaggtggcttccctctctccaccttcgatcccacaccccaactcacagccannnnnnnnnnnnnnnnnnnnnnnnnnnnnnnnnnnnnnnnnnnnnnnnnnnnnnnnnnnnnnnnnnnnnnnnnnnnnnnnnnnnnnnnnnnnnnnnnnnntgttcttaaaatttgtattgttgggttttaaaaaaaaaaaaaaaaaaaaaaaaaaaaaaagtcttactctgtagcccaggctggagtgcagtggaatgatctcggctcactgcaacctccatctcccaggtttaggtgattctcctgcctcagcctcccaaatagctgggattacaggcgtggtattgttattttttattgtggtttttttttgcaaatattttctatctgcagttggttgaattcatacaaggggagctgcaggtacagaatgttgtcttgtatgttgattgtaatgatgattacacaggtatatacatttaccaaaactcattgaactgtacacttcaaatgtgtgcattttcttatatatgtaaattaaaactaaatatagttgatttaataagtgagataatatgctgaagcccccagcaccattcatggtacacaataaatgcttagcaaatgttatttctcatctcaccagcaccacctctttaatttctctctgtgttcctgctcttttcacacactctcagcgtaatgtgcttctcatacctctctgcctctccgaattcctcccatccttcaatgtgcagcttaaatccttctagcctgaatgttttccaggttactccaggtcacagtgcrgaacccttaaagcatccaccacttgcttctccaaaattaagcatggttgtgtagtaacatgtgtcattcacaacttgtttgatgc

SEQ ID NO: 58636 - DNA, 672 bp, Homo sapiens
gagcatttgtatattgtttgatcaatcccagtacaacccagagagttatgtattgttaccagatttttcaaatgaggaaaaaaacataaggtcactctgctggtaagtggtagaactggaatttaaactagatctatcaagctctgtagtctatgttctttctactccagaaaaaaaaaatgagataacattttatgcatgcccagatgagttgttttgactcagtgattcccaggtgttttcatccctttcccatctgttgtaatatattttcaaacatcaacccaatgcaacattwttttttcttaaatggagtctcactcttgtcgcccagaatggagtgcaatgacacaatctcagctcactgcaacctctgcctcccaggctcaagtgattctcctgcctccaccttccaagtagctaggattacatgcttcacaggaataaaatagagctcagagagcagcccaggccaaaagggagcaatgtacatggaagtatgagtcaatgctcacaacaatcgaggtcccaggaaactgtgctcatgacacaccttatcttcagggtccctatggcccctctcaactcatgtgaactctgctcactcctagcagatggtattctctctccctgacttcctctcgggatgtttcaggcaaccactaaggtggc

SEQ ID NO: 58637 - DNA, 775 bp, Homo sapiens
ggatcccaaawcattcactcactcaggactaactacatgtatttcagatgagatgtgtacttgcctacatgcaagctagatggggacagggatatggttttatttaccttgttatccctaggacttagcacactaattatgtgcttcaaaatggctagaaatataatgaatgttgcagaatcataaaatctagcccaaccttattctggctgaattccttccacagttccacaattcttctagtataactactgggagtgtgggaatggagtctgaaggccatgtgagtatttatctctatgtatgagaaaactcaggaattaaaccaaaactatataaacttgaggtttaagatatttttacacattttttatgtaaaaagtaactcatactagttgcagaaaatataaatcgtaaaacacaactctaagcacattctttctttcatccattatcaaaagactatgatttggtacagtatcatatcctggttagcccttaatagattaaaaagaactgcagaatacattttcacctttaccgaacaggttcacctaacacaaaacttccaattgcctactgagtagacaaattaagcatgatccctgccctaggtgactttatatggtaatcccttgtcagcctctgggatgtacattcttaaaaaatcgtatttttgtcaaactctagattaacataaatcaaggtctcatataaaataggtctcatataaaattatttaaatagcattaaatatatatttttaaaaataaaa

SEQ ID NO: 58638 - DNA, 1679 bp, Homo sapiens
atgtgaatatatgtatatatatgtatataaagtatagaaatgtatatagcaaatagaaggaaaaattgctcaccaaactgttgacaatggagtggaaaatgagatgaattaatatgggactttcatgttttgttccatttgcttctttttctaaacaattatttttctatagaaatgtattttatcttttttttcctgctccttgtcgagcagagctaccccataggccgtgtgcccagagtagctggaaacrtagttttaaaagacatgcaattttttaatttttcaattttttttttttgagacagagtctcgctctgtcgcccaggctggagtgcagtgtcaaaatatccgctcactgcaagctctgcctcccgggttcatgccattctcctgcctcagtctcctgagtagctgggactacaggcgcatgccaccacgcctggctaattttttgtatgttttagtagagacgggttttcaccgtgttagccaggatggtctagatttcctgaccgcgtgatcctcccacctcagcctcccaaagtgctgggattacaggcgtgagccaccacgcccggccaagacatgtattttaaaaaaaaaaaaagctacagttttttcttaactgaaagttccatgtgggagactatcttgaaggctgtatcttttgcttttttttttttttgagaaagggtctctgtcacccaggctggagtgcagtagcgtgatcacagctcacaccagcctcaacttcctggggtgtttcccccacctcagcctcccaggtagctggaactataggcatgcaccaccgcgtaattttttgtattttttatagaaacggggctttgttatgttgcccaggttggtcttgaacccgtggcacaaccattctcccaccttggcctcccgaagtgctaggattacatgcatgagccaccgtgcctggccaaggctgcatctccacctttgaagggaatgcccagggaaggagcctagctaggtggaaatgaagagctgggatacacgtgttcattcactcactccataaaaatttctttgccagacactggattaggtaatggagatcagtggtatccaagacaccatccctgcactattacaggatcctgggggagaccagtgaataaaaacacaatggaaacagtttgataggtgttagtattcggatatataggaggtattagggacttggatttggggatgcaggcaacatttctggaataagtgacataaactgaaccctgaaggatgtgcaagagttaggaaatgagaatgagaaacagttctggtttaataagggtacagtaagggtgatggctcagtgggggtgggcaagcaagctgagctgtttccctcctcttagagagaaatacttgggctgtgcctttctggaggcaagacaaagtctgtttgtcacatggaatatctaggtgagagccaggaaagggagaaatggcttgggattttatttgctcttaatcttctcctgtctcaaaatgcagaccaggaaggttggtttcccaagacacacttgtagtttgtccactaatcctggacagtatttaaaacatgttgacttgtttgccaacacttaaacattgtgggattttacataaaaatacagattttcagccttttttgaaatacttgat

SEQ ID NO: 58639 - DNA, 1219 bp, Homo sapiens
taagattttaaaatctaagatgcttaagatgttggtggcattgctctttctgaaaagaaagacaaaatactagaccttgctgaaaattggatatcttatttactttgcccatttatgcccgaatggtgtaatgcaagactcaagacttttcaatgtagtatatcaaatgagttgtgcattgattcatttgggggacatgaacaaaaattatcaaccagccagaactgtaatatttaattagttcatctttttctttcattcactctatcacatttgcattagccaaagagataagaacattagtaattcatatgtgtaaacaacccagaagtgaatattaaatcagtgagccaaaaagcaataaacaactcgagcatgggaaatcctgctaacagtggggagtctgatatagaaaaaatatataaaaagcattatcttcaaatatgaaagattaatttgtatctactgtaaatatgtattaccagccttatctgcatttatacacactgtgtgtgtacctcagtgaccttttataaaccggaaaaatggttgatttaataatttgttatgtaaatacaaagttgtctataaattggaaaatttgatgccagatggcttcataawatacaaatgtgttttgtaacatcatgcctttatggattaagtataaatacactggattgtctatgtagaagtgtagcagtttacatttcacctgcatttcaaatggatatttttgtccaaatggttatactaataggaaaagaaaacaacttgaacattttcaatatgaaaaacaaatatggttttgattttaccaaaattcctttccacacccaagaatctgttcagttccatgccgaatgttttgcattatgagatttcctaggagattaattgatccacgacagggatctacctaggaaaactctccaactgaattattctttttgagagacaagctacacatgtttcattctaacattaggcaggggaaaagcccagcctcttactgcttcttaacttattcttgtctttgtttccatgtgtcttagaaagcaccacacagatgaatagggtctagcttttgtgagcaaaggtggctacagagtgttgcctcatccttgggctattgacttgggcaacctaggcttcccagcttaggtactgttgatgttttgggccaggtcattttttgttctggaggctggcccatgca

SEQ ID NO: 58640 - DNA, 487 bp, Homo sapiens
agaaggcctaggctcacacctcttcacgtgtatcctataaaacgctcccaggagatccctagcctctggctgagaatatgtgatctgtaaccacgtgatcactgctgccatgtggtttcgctcctgttagcatcacgtccctcatacattatgttttgatcaaatgatggaatagtctgatgccaactgtcttagactggaggaatgtgttggctcacgtaactggagatccagaagtaggtttggcacaagacgttgttttgttcagctactcaaaaggtgtcaagaacgggctcctctcctctcagcgtggcccttctcgggttggttatttacctcagacaagctccttgtgaaggcaggagggctgytagctgctctggccttataacctccgagtccatcagaaacttagcctccatttctcagctgtttaaatgacgttgtgtgatctgactcttgggtcctagtcgggttccaagtgccc

SEQ ID NO: 58641 - DNA, 1537 bp, Homo sapiens
taccatgtggtgctgtgggtgccggatggtaaaactaagctggatagtcttggctaacagagaagaaaaatctctccatatccatgcatcccatcgctttgtgcttcctcataggtgggtcagcatcatcaacactcccttgtataacatcattctctcccacccagaatgctcaatttccttatccagttgggttagggttcttttggttgccaggaactgaaacccattcaggatcatgaggtcaggtgatctctggaaaatccaataactctaagtacctgagtttaggaaaggttgggtgtcagatggcttcagggatcacttctatctcatctcccttttgagaggtggtaattcatggtggctacaagcaagcacttataaaactaaaaaaaaaaaaaactaaatagggagccagtctatttagtatacatcatggctttcccaagagtcattttgggcacactatgtttatgccttggtttcttatctgtaaaatgaggataatcatagcatccatgtcataagattgctatgagaaataaataaggtaatttaatgtaaaggacttagggacttagtgcagcacttggcatacaggaaatgctagaggtgatcgctctttctcattcccggcttctccactttcttccctgtatctgttgttctctctttcccagctacttcctgtggttccccatgacttatgcatacacacgacctgataacagccactttattctcatcaacttgattttcatctcaaggatccattcctgaagggcatctcctctctgtgcctcttggtttgggcttcctatgagaacgaatctgattgttccatattcatctttttgaggccagtcagtcaggtgacatgtcattggaaacttaggttggccctcctcaaatcaggtgctcatcttggtccaatcacccaaggccaggagattggaataaccgttgggataaccaattccctttccactcagcaggcatgtgggtaggggtagattgtgagaagggagagcaggtagagcagaagcycctgagtatgcctactgcagcatcctgccttaaaacctaatcctggctttcccttgccatgatttcttcactgcacatgttgaaggaacaatctttctagatggctttgtccctctccgcctcctttaccccttgcatctgactgcccgttctacacactcacctgggtgtatttgctagaaatcccctatttatgtcctggaaacaaaattcacagctgtctggtcctttttcttcctgaccccccacaccattgaggctcctctgtgaaatctccccttgtgggttccatgctgctggccatccttccactcctcctgcctcactctccagctacttcaacagacacttgcatgtctaatcttctgacatagattgtgagcttctagaagatagaaacaatattccacagagtgatttaacagtactatgtaagtgaccaatggcagggagaggcttaaaaatattgcactggaggtgtcatggc

SEQ ID NO: 58642 - DNA, 1133 bp, Homo sapiens
ttttgaagattccagaaagcagtaataaaatgccaatttttaaagatttattctcataytaagtaacaagtgtttaaaagatatctgcattttaaaaagtaataaagaagtaattcaacttaaaaaatagctagacactgtcaggaagattataaggtataaacacagtatctcctcttttttttatttcaacttttaaatgcagggggtacatgtgtgggtttgttatatgggtatattgcgtgatgctgggtatctcttcttttagggtttacaaattagttgagaagacaaaggacacagatacaaacagcagaacaataatacaggatatttgataggaaatgtgtgactaaatgccaaataaaaggcactaacaaaaaagctataaatcacttaatacagagaaatcattagggaccagcagtgattagaaacagcttcttggaaggaatagaacctgtgttttgtcagatgagtagcaaacttttagaaaataacagagataagagaatcacacataataaaaaccaaagattgttttcagcgtaaaataaatacaagtgtgtctaaaggtgatttctactaagcagtgaagttaagaaaagttagataggttaccactaaactacagaaggccttgcatgccaaactaagaattatgaaatgaaatttaacctctctgggcctgatggcactgaaggaaaagcatccaacagactcactgacacttggggaaagcaacagtattttttaagtgtttagttctccccacaccactgtaagggggagagaggaagaactgatataaaaataagcttgatttaattttacgagcttttgccaaggaataataaaattacaaatgagtaatgtgaactcttcaactgttaaattccatttatgaaatatgatacaacattttcttttattctctttgaactaatcatttatttcaaggttgtgggaagtatttcccgcccatcctcccgatcctggtacgtgttagagccagttatttttgcagctttgaagttgcttcaagatctgtcatttggttaggtcaggggatgaatgcctgaggtgttttgtcctccaggatgctatttttcctcaattcatctctgtttgga

SEQ ID NO: 58643 - DNA, 1551 bp, Homo sapiens
tgtgaagatccaggttcctttgcagtaggtcagcagaggctgagattctgcatttgtaacctgcttcctggtgggggcgctgagcagctgctctccagcctatgatctgggcagtgaggygggagagaggtggcatggtggtcctgctgcccactgagaaggcaaggctgtctctgccactgcctcttccctgtcccctgcgtcgggggctggccgctgccaggcacaggtaccgccctcaagggacaacagctgacaacttctaaaccagggctctgtggaacaaaccacacctaacgaaggtgttttttcccctttaagagaatacattcctcagcaggatagtggccccaggttctctcccactaccacttggaagccaggcagaaaaattgcctggtgggcaggattacaggattagtcagctttcccaaaacagacccacaggctcttaggtggaaatgagttttggtctgagcccttctttcctggtgacagatgtgtttgctgggccctccccctgtctcactcctcaagtctcgcctcttcctgagtgctcagaactcccatgctccctcactcaggccccgggaattggggggaaacaggtttggtggaaatgagccttagggttcaagcatccaggccctgggaggagggtggcactgcttggaccaaggggctggctttaccgacccctccccatccccaccaaagagcagccctgccgaatctaccctgtgctggaggtgccgagtggagcccaataagccgtgatggtcgcgggattgtctgctcctgccccagattcccatcgtccctctgtccccactgggtcttggggtgtctcggcctccctgagctgggcctgccctgcaatctcagagtctgcagtgtgtgagctggcctgtgccaattccagagctggtgtttcccagaaaccaagggactgaagaccagttgctgagggcaagccaccgtgctgggacactcagatgtctgaggatgtcactgtggctagatccaagatttggacctaagcgagggaggatgtctcataattctctgcatggaaccagcagccttgcttgcatttagaagttccttgcaaagaatcatatactcacagctggtgtcctatacaggggatgttctccttggagcatttttctttttctttagataaagctggcaaaagaaaataaactttggttcttttaatagcccctataatccttggagtcagtgtggtcctcctttcagctctttggctcctcaggaatctgatggggctctcctggcaatctgtctggaagccacgttctgccaccatgtgatagccactgggggctgcctggactggctcctctaggctgttatatcccaggccatgcccagaaaccggagtcctgagctgagggcagatttcagagcatggtaggcccaaggccagagctctcttgaggctaacgtcagagctgactgtgatcaaagacagggctgagctgtcaaactttctcaaagaagggctgatacttcttttaagggtac

SEQ ID NO: 58644 - DNA, 1551 bp, Homo sapiens
tgtgaagatccaggttcctttgcagtaggtcagcagaggctgagattctgcatttgtaacctgcttcctggtgggggcgctgagcagctgctctccagcctatgatctgggcagtgaggtgggagagaggtggcatggtggtcctgctgcccactgagaaggcaaggctgtctctgccactgcctcttccctgtcccctgcgtcgggggctggccgctgccaggcacaggtaccgccctcaagggacaacagctgacaacttctaaaccagggctctgtggaacaaaccacacctaacgaaggtgttttttcccctttaagagaatacattcctcagcaggatagtggccccaggttctctcccactaccacttggaagccaggcagaaaaattgcctggtgggcaggattacaggattagtcagctttcccaaaacagacccacaggctcttaggtggaaatgagttttggtctgagcccttctttcctggtgacagatgtgtttgctgggccctccccctgtctcactcctcaagtctcgcctcttcctgagtgctcagaactcccatgctccctcactcaggccccgggaattggggggaaacaggtttggtggaaatgagccttagggttcaagcatccaggccctgggaggagggtggcactgcttggaccaaggggctggctttaccgacccctccccatccccaccaaagagcagccctgccgaatctaccctgtgctggaggtgccgagtggagcccaataagccgtgatggtcgcgggattgtctgctcctgccccagattcccatcgtccctctgtccccactgggtcttggggtgtctcggcctccctgagctgggcctgccctgcaatctcagagtctgcagtgtgtgagctggcctgtgccaattccagagctggtgtttcccagaaaccaagggactgaagaccagttgctgagggcaagccaccgtgctgggacactcagatgtctgaggatgtcactgtggctagatccaagatttggacctaagcgagggaggatgtctcataattctctgcatggaaccagcagccttgcttgcatttagaagttccttgcaaagaatcatatactcacagctggtgtcctatacaggggatgttctccttggagcatttttctttttctttagataaagctggcaaaagaaaataaactttggttcttttaatagcccctataatccttggagtcagtgtggtcctcctttcagctctttggctcctcaggaatctgatggggctctcctggcaatctgtctggargccacgttctgccaccatgtgatagccactgggggctgcctggactggctcctctaggctgttatatcccaggccatgcccagaaaccggagtcctgagctgagggcagatttcagagcatggtaggcccaaggccagagctctcttgaggctaacgtcagagctgactgtgatcaaagacagggctgagctgtcaaactttctcaaagaagggctgatacttcttttaagggtac

SEQ ID NO: 58645 - DNA, 1551 bp, Homo sapiens
tgtgaagatccaggttcctttgcagtaggtcagcagaggctgagattctgcatttgtaacctgcttcctggtgggggcgctgagcagctgctctccagcctatgatctgggcagtgaggtgggagagaggtggcatggtggtcctgctgcccactgagaaggcaaggctgtctctgccactgcctcttccctgtcccctgcgtcgggggctggccgctgccaggcacaggtaccgccctcaagggacaacagctgacaacttctaaaccagggctctgtggaacaaaccacacctaacgaaggtgttttttcccctttaagagaatacattcctcagcaggatagtggccccaggttctctcccactaccacttggaagccaggcagaaaaattgcctggtgggcaggattacaggattagtcagctttcccaaaacagacccacaggctcttaggtggaaatgagttttggtctgagcccttctttcctggtgacagatgtgtttgctgggccctccccctgtctcactcctcaagtctcgcctcttcctgagtgctcagaactcccatgctccctcactcaggccccgggaattggggggaaacaggtttggtggaaatgagccttagggttcaagcatccaggccctgggaggagggtggcactgcttggaccaaggggctggctttaccgacccctccccatccccaccaaagagcagccctgccgaatctaccctgtgctggaggtgccgagtggagcccaataagccgtgatggtcgcgggattgtctgctcctgccccagattcccatcgtccctctgtccccactgggtcttggggtgtctcggcctccctgagctgggcctgccctgcaatctcagagtctgcagtgtgtgagctggcctgtgccaattccagagctggtgtttcccagaaaccaagggactgaagaccagttgctgagggcaagccaccgtgctgggacactcagatgtctgaggatgtcactgtggctagatccaagatttggacctaagcgagggaggatgtctcataattctctgcatggaaccagcagccttgcttgcatttagaagttccttgcaaagaatcatatactcacagctggtgtcctatacaggggatgttctccttggagcatttttctttttctttagataaagctggcaaaagaaaataaactttggttcttttaatagcccctataatccttggagtcagtgtggtcctcctttcagctctttggctcctcaggaatctgatggggctctcctggcaatctgtctggaagccacgttctgccaccatgtgatagccactgggggctgcctggactggctcctctaggctgttatatcccaggccatgcccagaaaccggagtcctgagctgagggcagatttcagagcayggtaggcccaaggccagagctctcttgaggctaacgtcagagctgactgtgatcaaagacagggctgagctgtcaaactttctcaaagaagggctgatacttcttttaagggtac

SEQ ID NO: 58646 - DNA, 653 bp, Homo sapiens
agaggaagggctggattccaggtatgagggcaaagtggctgtttgatcttgctcaaaggtagactaaagggaagataaattgactgtaacactcaccaagtccccagcatgtaccaggtgttggccctcatgggcattatctcaacttacctttgcaasaaccctctgacacagatttttcaccactctttgtagatgagtactctgaggctcagagagggtgtaagccttatccaaggtcacatgctggtgagtggccagcttttccaattccagagttgaccctttaactcctctgatgggttgcctccagataaggagcagggctggccccagagatgtggcaaggtgggtcaggataaggtaggagagcaaagagccaggctgtcactccccatccactcacctcctcctccagaagccctcccaggcaggaaagggtcccaagacaccctgtcccaaggaccctttccctctgacacctcctcagtctgggatgtgcaccgagcttcccctccgccctgtctcccaagctgtatttctcacccctgagcagttccccaaatcctcccttgtacttccttgaaaccttcccagggcattctcccaattccacctgtcttagccataagctgtgaataattaccaatgta

SEQ ID NO: 58647 - DNA, 653 bp, Homo sapiens
agaggaagggctggattccaggtatgagggcaaagtggctgtttgatcttgctcaaaggtagactaaagggaagataaattgactgtaacactcaccaagtccccagcatgtaccaggtgttggccctcatgggcattatctcaacttacctttgcaagaaccctctgacacagatttttcaccactctttgtagatgagtactctgaggctcagagagggtgtaagccttatccaaggtcacatgctggtgagtggccagcttttccaattccagagttgaccctttaactcctctgatgggttgcctccagataaggagcagggctggccccagagatgtggcaaggtgggtcaggataaggtaggagagcaaagagccaggctgtcactccccatccactcacctcctcctccagaagccctcccaggcaggraagggtcccaagacaccctgtcccaaggaccctttccctctgacacctcctcagtctgggatgtgcaccgagcttcccctccgccctgtctcccaagctgtatttctcacccctgagcagttccccaaatcctcccttgtacttccttgaaaccttcccagggcattctcccaattccacctgtcttagccataagctgtgaataattaccaatgta

SEQ ID NO: 58648 - DNA, 849 bp, Homo sapiens
tggcctcccaaagtgctgggattacaggcgtgagccgggatatttctcttctactttgggtaattatccaatactactgtatttattttattgctcactttgttccagctttagccactggagctctaccagttgtctcctgtgtccctttgacatactcccatcatttcttcctcagatcttccttactttctggcactacaagatgttccaggttcatcttgtacatttcctgttccaatcctagaatcagccatttttacaagaagccctggtttttgtgggggtttttaaaattggagaatgatattagaagccaaaatctgagcactaagtgtgctcacagctactgggctgtcattacttctaggccctcttagctgacagagcatagaaatacatgtgtatctactaacctgtatgtatatcacaacagatatacacaaacatataaatattcctatatgtcactatctgtatctatattaaacttgatttcttttttttttttttttttacttttttttttttttattgatcattcttgggtgtttctcacagagggggacttggcagggtcataggacaatagtggagggaatgtcagcagataaacaagtgaacaaaggtctctggttttcctaggcagaggacccwgcggccttccacagtgtttgtgtccctgggtacttgagattagggagtggtgatgactcttaacgagcatgctgccttcaagcatctgtttaacaaagcacatcttgcaccgcccttaatccatttaactctgagtggacacagcacatgtttcagagagcacagggttgggggtaaggtcacagatcaaca

SEQ ID NO: 58649 - DNA, 849 bp, Homo sapiens
tggcctcccaaagtgctgggattacaggcgtgagccgggatatttctcttctactttgggtaattatccaatactactgtatttattttattgctcactttgttccagctttagccactggagctctaccagttgtctcctgtgtccctttgacatactcccatcatttcttcctcagatcttccttactttctggcactacaagatgttccaggttcatcttgtacatttcctgttccaatcctagaatcagccatttttacaagaagccctggtttttgtgggggtttttaaaattggagaatgatattagaagccaaaatctgagcactaagtgtgctcacagctactgggctgtcattacttctaggccctcttagctgacagagcatagaaatacatgtgtatctactaacctgtatgtatatcacaacagatatacacaaacatataaatattcctatatgtcactatctgtatctatattaaacttgatttcttttttttttttttttttacttttttttttttttattgatcattcttgggtgtttctcacagagggggacttggcagggtcataggacaatagtggagggaatgtcagcagataaacaagtgaacaaaggtctctggttttcctaggcagaggacccagcggccttccacagtgtttgtgtccctgggtacttgagattagggagtggtgatgactcttaacgagcatgctgccttcaagcatctgtttaacaaagcacrtcttgcaccgcccttaatccatttaactctgagtggacacagcacatgtttcagagagcacagggttgggggtaaggtcacagatcaaca

SEQ ID NO: 58650 - DNA, 570 bp, Homo sapiens
tctcctgggctccagcagtcctcmtgccacagcttcctgaatagctgggactacaggcacacgccactacgcccagctctttttttgagaaatgctcttttaaaaattaaaagaaagattaaatgaggctagttaaatgtgcctagcctcagtttcaagatgttttagaaaaaggaagacaataccagaataatgtaaaagattttgaaaaaataatttttcctttgattattaaattaatgtcaagctaaaattaatattaacaaaactttttaaaaaattaattttgaagttcagaatctttttgtctctgaactctttattcagtcttattggtaccaaagataaaacaagttaactagaaaaaatatcaaattctctcaggctactaatttaagtagtgtttttcttctgtattagaataaatatttaataattttacttatgaaaatagtctttttctcttcactttttttaaccctcttattgttggccttttcctttacccattcctacttccatgagaagttttgtgtggtaaattaagagactatgaactctcatttttac

SEQ ID NO: 58651 - DNA, 570 bp, Homo sapiens
tctcctgggctccagcagtcctcctgccacagcttcctgaatagctgggactacaggcacacgccactaygcccagctctttttttgagaaatgctcttttaaaaattaaaagaaagattaaatgaggctagttaaatgtgcctagcctcagtttcaagatgttttagaaaaaggaagacaataccagaataatgtaaaagattttgaaaaaataatttttcctttgattattaaattaatgtcaagctaaaattaatattaacaaaactttttaaaaaattaattttgaagttcagaatctttttgtctctgaactctttattcagtcttattggtaccaaagataaaacaagttaactagaaaaaatatcaaattctctcaggctactaatttaagtagtgtttttcttctgtattagaataaatatttaataattttacttatgaaaatagtctttttctcttcactttttttaaccctcttattgttggccttttcctttacccattcctacttccatgagaagttttgtgtggtaaattaagagactatgaactctcatttttac

SEQ ID NO: 58652 - DNA, 570 bp, Homo sapiens
tctcctgggctccagcagtcctcctgccacagcttcctgaatagctgggactacaggcacacgccactacgcccagctctttttttgagaaatgctcttttaaaaattaaaagaaagattaaatgaggctagttaaatgtgcctagcctcagtttcaagatgttttagaaaaaggaagacaataccagaataatgtaaaagattttgaaaaaataatttttcctttgattattaaattaatgtcaagctaaaattaatattaacaaaactttttaaaaaattaattttgaagttcagaatctttttgtctctgaactctttattcagtcttattggtaccaaagataaaacaagttaactagaaaaaatatcaaattctctcaggctactaatttaagtagtrtttttcttctgtattagaataaatatttaataattttacttatgaaaatagtctttttctcttcactttttttaaccctcttattgttggccttttcctttacccattcctacttccatgagaagttttgtgtggtaaattaagagactatgaactctcatttttac

SEQ ID NO: 58653 - DNA, 655 bp, Homo sapiens
gtaggactcagaccccacactctctggtgtcaaagtctgagcaggtttccactacatgtactgtgcttcagcacatggctgaggtgggactctgccctgtcctagactccaggctgaatgaactactctcacagccgcctctgtgggctgttcctgcagagaaacgaagctccctggatgacctcggcctcgcgctcaccgcctgctccttcccttataacagctttagggctttgctttattttaaacagtggcacttccttttctctattgatttaaaaaatattttaaaattctagcatattaaaaaatctaaacaatattgaaaaagtggggaaaaaatctcccttactgccatctcctgatctcagttccactctacaaatgtaactactattaatcatttagcgaagattttttcagactttttctatatgtgtataaatgtctgtgtatgtttgggaagtttttctgacatctcagagttctgtatctatgtatctttgttctaaatcattgtccattccacattgcaagctgcgaaacggtaagataaatgtatttttaaattaakctacacagcacctgaccaaaggaatacctattcttgatggatttataggagcacttgtgttggagacaggggtgggaggca

SEQ ID NO: 58654 - DNA, 618 bp, Homo sapiens
ctgtaggatgccagtcctccagtcaagccagggatatcaaggcatacctgtcctcctaggctctacaacctgcacctaggcatccttgggtacccatctggactagtttcccctggatggagtgcccgtggtgcagctatattctcaatcaagtgcttattgccgaagcatctgcagcccttggggctttggaaaagataaggctttcacaatcatataggacaaataacaggcctgattttatggtgatgggaatgttggtctataattgaattgattctgtctttattttttgtggggaggtatgggtggccacgcccatttggcttcttaggtttcacaaagggagtattgccaaaagtatgttttayccagcaattaaagtcttttctgtgtaaagacaaaactccatctgccttggccggatgcaggggagtcttgacatacacagttgaaaggatctctaaattatcctggtaagtcagagatgaaagggaggaatgaacaagagtttctgaatacaaatggaccagaaaagtaagaatataattggcatgtccaaagatttctgaaggacaaaaggccctaaagggtaaaggggtctagaaagagaggtcc

SEQ ID NO: 58655 - DNA, 695 bp, Homo sapiens
ggacacttttccttagagaaaagcataaagaaagaggaaggatgaaaaccaagatactttgaaatggacatgcagccatcacatgagataactttcattttcttaatcaggtaaaagacaaaaccatttggtgaaagcagggactgaggagaatgggtctggctggtgacgagagctccttggtgccttgaagcagcaattccaattttgagatagaacattcagacataaaaccaccagtacacaaagttatatgtacaaggayatttattgcagatttatgtgtattggctaaaacctagaaacaacccggatgccttcagtaggtaaatgatagaggaaaactatagcatactccacccatgcaacatggcaggtagtgtctcagtctgagtagaatcaagagagaaaaaccacttagtaattcaaacagagaagtttaacatgaagaattattaactataacagaagattggagtaatgagggattgactagtaagaagtagaattctaaagaatacaggaagcaggctgcgtgcagtagtggctcatgtctgtaatcctagcactttgggaggccgacgcaggtggatcacctgaggtcaggagtttgagaccagcctggccaacatggtgaaaccccatctctactaaaaatacaaaaaactagcggggcatggtggtgcatacctgta

SEQ ID NO: 58656 - DNA, 695 bp, Homo sapiens
ggacacttttccttagagaaaagcataaagaaagaggaaggatgaaaaccaagatactttgaaatggacatgcagccatcacatgagataactttcattttcttaatcaggtaaaagacaaaaccatttggtgaaagcagggactgaggagaatgggtctggctggtgacgagagctccttggtgccttgaagcagcaattccaattttgagatagaacattcagacataaaaccaccagtacacaaagttatatgtacaaggacatttattgcagatttatgtgtattggctaaaacctagaaacaaccyggatgccttcagtaggtaaatgatagaggaaaactatagcatactccacccatgcaacatggcaggtagtgtctcagtctgagtagaatcaagagagaaaaaccacttagtaattcaaacagagaagtttaacatgaagaattattaactataacagaagattggagtaatgagggattgactagtaagaagtagaattctaaagaatacaggaagcaggctgcgtgcagtagtggctcatgtctgtaatcctagcactttgggaggccgacgcaggtggatcacctgaggtcaggagtttgagaccagcctggccaacatggtgaaaccccatctctactaaaaatacaaaaaactagcggggcatggtggtgcatacctgta

SEQ ID NO: 58657 - DNA, 1129 bp, Homo sapiens
tggtctagtcactatgcacactttatgccagagagagtgtgagtgagtgagtgtgtgtgtgtgtatgtagcatttcctttgtggaaggtatactgctaagagttttatgtgctttatctccgttcatcttcataagaccctatgacctggatagaattattacctcaattttactgataagaaaattgaggtgtattgttatattacctattttacttgtttctgaggttctgttgaataagagatgtattaatgatagcttttggggggagaagaaaactacaaaattaaacatacatactgattttaacacacctatttgaaaagaatgtaaatgtgaaatagaggatatgtatataattgtctccattttacagatagggaaaccaaagactaaggttaaattactgcagaagatgatgtcaaagactgtcttcctaaactacatgttatagtgcctctcactgtgggtgaaattgtgatgacactttgtgattaataatagtctaggaaatcagccaggtgtggtggctcatgcctgtaatcccagcactttgggatgcccaggcaggcrtatcatctgaggtcaggagttcgagaccagcctggctaacatggcgaaacctcatctctgctaaaaatacaaaaattagctggatgtggcggcaggtgcctttcatcccagctctttgggaggctgagggagggagaattgcttgaagttgggaggcagaggttacagtgagccgagatcttgccactgtattcagcctgggcaacagagtgagattccatcaaaaaaaaaaaggtctacaaagtctgaattatgtgcttatattgctatgcagttacaagagaaaggctgtgtagtactgaaattggcttttttttttaagcctctcccttgacttccatcctgaccaccaggctaccctcatctcctgaaactggtgctattagatcctataatccagttaggctgaaacattcactcttccccaagtacattgtcttcttccttgcctcataccttagtagctgccaggagtgttttattatacttttgtacctgtctacctccatctccactcctctttctgtcctcagatactgtaaggccctggcaaat

SEQ ID NO: 58658 - DNA, 1129 bp, Homo sapiens
tggtctagtcactatgcacactttatgccagagagagtgtgagtgagtgagtgtgtgtgtgtgtatgtagcatttcctttgtggaaggtatactgctaagagttttatgtgctttatctccgttcatcttcataagaccctatgacctggatagaattattacctcaattttactgataagaaaattgaggtgtattgttatattacctattttacttgtttctgaggttctgttgaataagagatgtattaatgatagcttttggggggagaagaaaactacaaaattaaacatacatactgattttaacacacctatttgaaaagaatgtaaatgtgaaatagaggatatgtatataattgtctccattttacagatagggaaaccaaagactaaggttaaattactgcagaagatgatgtcaaagactgtcttcctaaactacatgttatagtgcctctcactgtgggtgaaattgtgatgacactttgtgattaataatagtctaggaaatcagccaggtgtggtggctcatgcctgtaatcccagcactttgggatgcccaggcaggcgtatcatctgaggtcaggagttcgagaccagcctggctaacatggcgaaacctcatctctgctaaaaatacaaaaattagctggatgtggcggcaggtgcctttcatcccagctctttgggaggctgagggagggagaattgcttgaagttgggaggcagagkttacagtgagccgagatcttgccactgtattcagcctgggcaacagagtgagattccatcaaaaaaaaaaaggtctacaaagtctgaattatgtgcttatattgctatgcagttacaagagaaaggctgtgtagtactgaaattggcttttttttttaagcctctcccttgacttccatcctgaccaccaggctaccctcatctcctgaaactggtgctattagatcctataatccagttaggctgaaacattcactcttccccaagtacattgtcttcttccttgcctcataccttagtagctgccaggagtgttttattatacttttgtacctgtctacctccatctccactcctctttctgtcctcagatactgtaaggccctggcaaat

SEQ ID NO: 58659 - DNA, 3039 bp, Homo sapiens
  misc_feature (1)...(3039): n = A,T,C or G
gtggcagtgaagcggggagtgtgaagaggtggtaaaacttgcagcactaattgcagcactaagatagaggcgagtcacgcaggcgcaggcgaggcacagcaagaggcgaagaagagtcccggggctgggttatgtgacaaagggatgactgggggaccatttgttaagataaggaaccctggagatagtaataaattggagaaggggctcttggcccctcttggatgatcctgaagttgttggggcaggaccaaaggcaagatccatgccaacgctgctgaccaacccccaaaaccaagctggctttgggtctgtgtctggtgccactgggcaatgtggcctagatggaagggtgaaggggtcccactctcagtgttcttcctgtgttcttcctccttccatctcatctctatctctgggctggtttgtgagctgaaagagttcacacatacctggggtgggcctctgtctcctcgacagagtgggactgaggagcgaggcctgaagcattactggttcacatcctggcccgaccagaagaccccagaccgggcccccccactcctgcacctggtgcgggaggtggaggaggcagcccagcaggagggccccactgtgcccccatcatcgtccactgcaggtgggtcctcccagccagccactggagcggcagccccccaccgctgggctgccctgcccctcaccccaccggtcccctcggccctcagtgcagggattgggaggaccggctgcttcattgccaccagcatctgctngccagcagctgcggcaggagggtgtrgtggacatcctgaagaccacgtgccagctccgtcaggacaggtcagcccatgggcgggagtgggacacacaagggagctagagcccccgagcgggtagagggagagacccacatgtgcatgggcggggggtgaggggcagatggaaaacactggcacggactgatgggcagacaaggagtagcgaggacagctgggtagaggggcaggatccagacagtgggggccagatgaagagggaagaaaagcagagctggtggataaaaggacagaggccgaaagtggtaggacatgtcatctgtgtccctgataggaaggggcagagggtaatggttggcaagggttggtctctccaagacgcacaggggcaaggcctggcaagtgattgctactccatggcttttggggcacctcccacagcccatccctccacgaccctgcccccactgtgcatctctgccgggcaggggcggcatgatccagacatgcgagcagtaccagtttgtgcaccacgtcatgagcctctacgaaaagcagctgtcccaccagtccccagaatgactgcgcttctcctacaaggttctctgggcactgcccagcctgagtctcggccctcacccagggccctgcctcgggtcctgggcctgctccccgcttcctccccttcagtcagctccctctgtcctctgtcagcctggcctgacccctaccctccagcattgctcttcctactgtacatattggggagtggggggcagggtcgggaagggacatgccaggccaggcctgggcccggggcctgacccacaccacgcagaccccgggctccagtttttaacgatggttccatcaatacctgatccagaatgtttccgtgctacactttgtgtcctgctgcaatgtgttctgtctgtccatccatctctgccctctgtaccggacactgtgtctcctcagccaggaaggggtaatgagctccagcccctaagcaaccggacttgcctgcctcggcctcacccgcacttctcccaaaaggcagatgacggggagttaggcatggggagctccagaaggtcaccagagagctttcagctgagggagagttctctaggttggagtgggcatcacagccagggtggcctctgggtgtcagatgctctcaggagggtgcccagcctgtgaggcactggcaaggtagggggcagatggggcatggagaacccagaggatctaggccctgttggggaggggaggggagctcaaggtttgggtggggactcagcccagatctacgtgagacatttttctgtgtcactgtgggaaagccttcccagaagtctcactgcgtgttgctctgcgtgtgttcccatgtccatgcgtgtgttgagagcccatcaggagggcatgcatgactctttggcaacatgtattatcttggagccacgtgtttttattgctgactttaaatatttatcccacggcagacagagacatttggtgtctttttataattcgctcgtggtcattgaatagagcaataaacggagcattttgagcaaaactaacctcctgggtctgtgtgatttgcctctcccctccactgccttccttcctgtacttgggtctttgtgcccctccccagcatgagcacagtgagcttggcccttctgctcactggagccccttgtggagactgggagtatggagcgagtccaaatttgtaaagccaaactgggaacattctgcaggattctcacacagcctcagccctggccctgacacatgctctgggccatggggagcctcaaggacaggtgtggaaggcttccagggaaggcacagtggctggcaggtcaccatttccaacagatgtgccagagaagccaaggctagggtaaggagacattcaggtcacacccaggcccctccctgttggccaaactcttatcccatgttagctccacagatcccaacagcagctgcagcccagtaatttcccttgtaaggcctgggctcagagtagctcctcccaaggggcccagggaatctgcatgtgggctgagatcctgagccatcctggacactcctgctctattcttgtcccctgcccccctgggatggagcaaaagtagccatgatgccactgctggcaggtgggggtcaccccagggcagaaggaggggtccagggcaagggtgctgaccaacaagtccttacaagatgccagaaccttgggtgg

SEQ ID NO: 58660 - DNA, 3039 bp, Homo sapiens
  misc_feature (1)...(3039): n = A,T,C or G
gtggcagtgaagcggggagtgtgaagaggtggtaaaacttgcagcactaattgcagcactaagatagaggcgagtcacgcaggcgcaggcgaggcacagcaagaggcgaagaagagtcccggggctgggttatgtgacaaagggatgactgggggaccatttgttaagataaggaaccctggagatagtaataaattggagaaggggctcttggcccctcttggatgatcctgaagttgttggggcaggaccaaaggcaagatccatgccaacgctgctgaccaacccccaaaaccaagctggctttgggtctgtgtctggtgccactgggcaatgtggcctagatggaagggtgaaggggtcccactctcagtgttcttcctgtgttcttcctccttccatctcatctctatctctgggctggtttgtgagctgaaagagttcacacatacctggggtgggcctctgtctcctcgacagagtgggactgaggagcgaggcctgaagcattactggttcacatcctggcccgaccagaagaccccagaccgggcccccccactcctgcacctggtgcgggaggtggaggaggcagcccagcaggagggccccactgtgcccccatcatcgtccactgcaggtgggtcctcccagccagccactggagcggcagccccccaccgctgggctgccctgcccctcaccccaccggtcccctcggccctcagtgcagggattgggaggaccggctgcttcattgccaccagcatctgctngccagcagctgcggcaggagggtgtggtggacatcctgaagaccacgtgccagctccgtcaggacaggtcagcccatgggcgggagtgggacacacaagggagctagagcccccgagcgggtagagggagagacccacatgtgcatgggcggggggtgaggggcagatggaaaacactggyacggactgatgggcagacaaggagtagcgaggacagctgggtagaggggcaggatccagacagtgggggccagatgaagagggaagaaaagcagagctggtggataaaaggacagaggccgaaagtggtaggacatgtcatctgtgtccctgataggaaggggcagagggtaatggttggcaagggttggtctctccaagacgcacaggggcaaggcctggcaagtgattgctactccatggcttttggggcacctcccacagcccatccctccacgaccctgcccccactgtgcatctctgccgggcaggggcggcatgatccagacatgcgagcagtaccagtttgtgcaccacgtcatgagcctctacgaaaagcagctgtcccaccagtccccagaatgactgcgcttctcctacaaggttctctgggcactgcccagcctgagtctcggccctcacccagggccctgcctcgggtcctgggcctgctccccgcttcctccccttcagtcagctccctctgtcctctgtcagcctggcctgacccctaccctccagcattgctcttcctactgtacatattggggagtggggggcagggtcgggaagggacatgccaggccaggcctgggcccggggcctgacccacaccacgcagaccccgggctccagtttttaacgatggttccatcaatacctgatccagaatgtttccgtgctacactttgtgtcctgctgcaatgtgttctgtctgtccatccatctctgccctctgtaccggacactgtgtctcctcagccaggaaggggtaatgagctccagcccctaagcaaccggacttgcctgcctcggcctcacccgcacttctcccaaaaggcagatgacggggagttaggcatggggagctccagaaggtcaccagagagctttcagctgagggagagttctctaggttggagtgggcatcacagccagggtggcctctgggtgtcagatgctctcaggagggtgcccagcctgtgaggcactggcaaggtagggggcagatggggcatggagaacccagaggatctaggccctgttggggaggggaggggagctcaaggtttgggtggggactcagcccagatctacgtgagacatttttctgtgtcactgtgggaaagccttcccagaagtctcactgcgtgttgctctgcgtgtgttcccatgtccatgcgtgtgttgagagcccatcaggagggcatgcatgactctttggcaacatgtattatcttggagccacgtgtttttattgctgactttaaatatttatcccacggcagacagagacatttggtgtctttttataattcgctcgtggtcattgaatagagcaataaacggagcattttgagcaaaactaacctcctgggtctgtgtgatttgcctctcccctccactgccttccttcctgtacttgggtctttgtgcccctccccagcatgagcacagtgagcttggcccttctgctcactggagccccttgtggagactgggagtatggagcgagtccaaatttgtaaagccaaactgggaacattctgcaggattctcacacagcctcagccctggccctgacacatgctctgggccatggggagcctcaaggacaggtgtggaaggcttccagggaaggcacagtggctggcaggtcaccatttccaacagatgtgccagagaagccaaggctagggtaaggagacattcaggtcacacccaggcccctccctgttggccaaactcttatcccatgttagctccacagatcccaacagcagctgcagcccagtaatttcccttgtaaggcctgggctcagagtagctcctcccaaggggcccagggaatctgcatgtgggctgagatcctgagccatcctggacactcctgctctattcttgtcccctgcccccctgggatggagcaaaagtagccatgatgccactgctggcaggtgggggtcaccccagggcagaaggaggggtccagggcaagggtgctgaccaacaagtccttacaagatgccagaaccttgggtgg

SEQ ID NO: 58661 - DNA, 1086 bp, Homo sapiens
agagagtagttctttaatatctttcctgccagactgccaaaggcatgaatttccacctgcaaattgcccttttgcagcacaatattcagtctccatagtctcctgttacaatacaaatctatgactagaagagacaggggccacctggctggcctcactaataccacagcacaaggttgcttagcaaattagctcatctttgatcacatagcctgaaggaaatgcccacaatgaagaccacactagccagaagacagtctrtagaggagtcactcaaaggctttacaagaaacaagggctggagggagactcctagagaggaggtgagagaagacaaactttgtgatctgatagcctgtgtatttcactgtcctcaaccgtctctctcccgattcctaggttctggcacctactccctccattgttggtgcttgaaatttgtttgctctcctaatcccaagttaggttagccacagcctgcctccatgacttcctcaaaattcagcccatgtcccttgccaacagggcagcttgcatttccagaaattcctgtgtgcttaagtgaggtgaaagtggattttacgttaaattgtttgtctttgtgattgtgaaatctaactaatgtactgaaaagtacatggagatgaacctgcatgaaaagaaacccattgaggcctcctgttcctatgcacacttcgtcccccttcctggtcctaacaccctctctcccccctcacagtcaccactgtcctcagcattctggtgctcatttcctctgccttttaaaaatagttttatttcctcattatgcacacctggacaatatgtttaaatgttgtctgttttcggattttatgagtggaattgtgcagtgtgtattattagatgcctaacctcttgctcaatgttgtctttaagaagcatacctgttgtggtgtgaaacggcacctgttttgatagctatgtaggattccactgcttgaacacaccccaactgtttacccattctactattgatagacactcgggctatttccatgttgggacaattacagtgtggctacgaacctcttaaattgtatatac

SEQ ID NO: 58662 - DNA, 733 bp, Homo sapiens
ttttcggcaacatctttccagttcacaatgagacccacaactcccttgtgatggctaattttacgtgtctacttatctgggccacagtgcccagatatttggtacattattctggatgtttccgcaaagatgttttttggatgagatagattttgagtaaagcagattaccctccataatgtgggtgggcctcatccaaacaatggaaggccttaatagaacaaagactggcctcttctccccaagcagaaaggaattctgctagcagactgtctttcaactcaaactgcatctcttctctgagtctgcaacctgccggcctcctcacgtctcccatctaattttggactcaccaagtttccacaatcatgtgagccaattccttaaaatctctccccctctctctatctccatatatttacatatatagcacacatccatcctgttggttttgtttttctgaagagctggagaactctgactaatacattcctcctcgtccacaacagcgtgcctctggttattattgtctmaattccctccttgtatttatttgtgatgttttagcattgatattaactgacaatatggagggagtgtggtgaaatggaatgaacactggaccccattcaactaattagtaggggtaattagttgggcaagtcaccaatcctgagcaagccacttaacttctctgaacctcctcctagactatagtattcctgagggtcct

SEQ ID NO: 58663 - DNA, 607 bp, Homo sapiens
taagacctgtcattaggtcccaggcaccattatgttggccatttctgtctagccagtataacccagatgtggataagattaagtcaaatccattgtccatgccaatggcattctaaagccctccccaagacttctgcatattcctgagggacttacgcgctctaggycacctctgcttctgggctcccatgtctaaggtgctttgttcacaggttattgacccagatataacatccagccctgtcttcagtttccactgaaagcttatgctcaagggcattcatgaaagtaaaacattttactaaagagttggaggtcacagagagaggtaagattatgctccatgaaatatacagattaaaatatgttagacactgataaaagtctgatgtaccagatgctctgaaaaatcctgttggccaattagtcctcagcagctgaactcccttgtttccctccattcaccatccagccttccaccttctccctctcattcccccttcctgtcccatccctctcagaaatggaggtcaaaacttcaaatgctagtaaggattagcaggtattaaacatatgggttgagaggtggagtgtcagaccctagaga

SEQ ID NO: 58664 - DNA, 637 bp, Homo sapiens
ttacttctgagaggtcggggatgaattcctgaggcagtgttattttggctgatgttaaagagaaaaaaaaattcttagttcgaattctgctagataaatttatattaaccaaactctcagaggactaatttatacrataggaaacatttattattttgtagtggaagatagatctgatttaatatttccctagagaatatctccccaaaaatgccaaggggaactatctttggtattactgaaattctgaagagatgagcagtacttagagacctctcagggagcccaattaattatcagaacactaatttagaagaagtttgaattagtaaaatggtaaataaacagattaaagagatattcatacaagtcatttatacaactgacatgaaaccactttcccactccgggcatttcagggcattcctgagtcatcatcacagctctcccgtctttgggttgtgctggggagtcaccttgtcctagattatgagtgaggaactgcatttttatgaaatgccagggccctattattttgcttttgactgtccattacttattctcatcagggcaaggcagtcttctccttcttgagcttgtgcctattttacctttctcctagttcctggcattctct

SEQ ID NO: 58665 - DNA, 628 bp, Homo sapiens
tacctgatgggagccctgcctgatacagtaggacataggacctgcttcctaggactattgtgacaatgaaatgagtgaatacgtgtaaggcaggtgctccatgtagctagcacatggaagggggattagccctctttcccagtgcatttgcaaacgccctctgcagggctatagtgtggccagcaaacactgtgtttggcggggtagtttgtccagtagccccacctccattctctccccagttttggctggcttccaaagggaaacgagcatattcaataatgaagtcgtgatttgtatactgggaaaaagagaaaaaaatccattaagttcactgaaggtgcaaatgaagggtgaagaagcatacacagaagtatgtatatatttatttatcctaagaaaatatattaagcacctgccatgtgcaaatgatttggcaatgaataawatagatgtggccccatgctctcatagagctccaagaggaaagactcacagtgaaacagaggatactgagcaatcttttcccttgggtagatgaggtgtccactgagtttgaaaggtgagttggtaacagccagattggggataggatggtagagaggcaggggagcctcttgggctgagg

SEQ ID NO: 58666 - DNA, 2261 bp, Homo sapiens
catggcctcaaacaggccttcaggcttggggactggagccgactccccagggcagaataggtacaggctgcccagctgtaaaagcagggctctgcccctctgggctccagctccaaggctgtggcacctacctgggaaagaaaagtccctggagaagccgagcagatctggcctcgtcctgtccttgtcctggctggtaggtggggtggatagagcgtccctgactccctccttgaactgtgagcatctccagggcgggaactgtcccccataggacttgctatctcctggcacatgttagcatttactggggccaagcactgttctgagtgttttaagtaaactaatccacttaatcctcacctcaaccctaggaggtgttactcccatttttcagatagagaaactgacacacagaaagattagcttcaaaaagctcataaatggggaattgaatccaggcagcctggctccagaacccaaattattagccattatactgtactgaataagtaaataatacatgaatatatgaagaaaggaatgaacggcttgtagagagaatgacatgaaagttctctgttcaaaagtatttcctctattaacagtttcagggcctgtgaatgcactattgaaatgcacattcagttttaactaatgtgctattctcttcaaaaatgctcctaagaaattggggtgatagcaattattggccatgctctgtggcccccggaatgtctaggggaggcccaagctctgggaagaacttaagctaatacccgaggagggagaaacaaggagttgggtgtttctgcagagaaccctgctagttatgttaatgatgtggcacagggacaggaacacagactgtgaagcctctgagctgggtgtgtctctcactggctttcgggcctggggtgagtcatgcggcctccccgagctccagtggccccatctgccagggaaatgctggtccctacctgatggcttatggttaaataagctattgtagttaatgcatctggcacaggatagatggtcaataaatggtagctgctattgttattaaacaaattataggcaaaaaactcaagtcagtaatgatcaccagtctgagcccccttcttaaagtgatgcttgcactggtgaccctatttctggtctcctggacactccagtcatgatactccaagggcaatagcttcttctcccartgtctttcctggttgtcttcatcccttctcttgccactgccttggcctgggttcccactgcctgtcaccgggactcagtcaagtctgagagattgagagcatctatgataaagccagctggaaggagccctgctaagcagccacctctgctaagcagccacctctgccaaacagtcacctctgccagtgtcctcctctttttctggcttcaactcttggcactctagcttctcttcactccccacccccttttctcactcttctctctctgatcattccatgggtctctttggctttggttgagctctaattaagttccacagcaggtggcaatgaagacagcttctctcctgcaagtgctcatcaaagggttgtgcacaagaaacttggacaagaggtaaaaagaagcctggcccctggggacaaggatggggcagtcggagaactcctcgtgcagccagtgctccgaaggtgcagagtgaagatttgcagacttgctgtgtatcccggcataatgccgtttgtccatctgccacactaggacagaaactcttcattctgagcatatggaagctgagaaggaggtcggaggcaacaggtgcttaatgaaaatgatcatgaaggtcctggtcattcactctcccaaggactaataataataactagcctttaaggagggggtcatagtttactcctctcaaaaactctcatttgaaccttgtgaccaccccattaggtagagagagaaatggtatcattaagcccttttcagatgaggaaagtgaagtcttgagagtttaaatgacttacccagggcccaggccacagggctgagcacctgaaccattttcccatcacttctctcagctcctttccaggttgcacactcagccactgacctacccagcagtcccatgatgcaccatccccttactgggccccggatgctgagcagttctgagaaaatcatgcggccatgaggactgtgaccagcacagactccagcctccagcctcagccctctacttgctccacacctctttccca

SEQ ID NO: 58667 - DNA, 758 bp, Homo sapiens
tattttcttcagagaactggaatagcatttccttagcgtagcatctgccactggtttcccacccacatggcttggcccacctcagcggtcacctgcagacaaaaatgccagggagttgacacttcaggagcaacccacaagcaatgatggacaagggttggtgagcgatgctgcatgttcctccccsaccagggtgcatcaaggtacgctctccaccgtctctcaaaggtccccgacaggttgaaccccagctgccctccccaggttactgtcacaccacttccttctttcctgtcaccctctccctcattccatctctcaaacaaaccacttaaacccaattccttgtctcagggtctgctcttggaaggacccataaagagtcttacactgaagattcctaggtaccgattccaaggtcctgatctttaacaattgagcttctccttttcctcatcattaccaaactcagagaaactgcaacaaacctcatggagatgtaacaaaatctgatttgtttatttagcactgacgacaatgcccttgggtaaatacaggcttaggcatgtctgaatggtctctatttacctggtaacaaacatggacgagggccattaggctgtttgtttaataactaactataggccaggcagggtggctcatgcctgtagtcccagcactttgggaggccaaggcgggcagatcacctgaggttgggagttcaagaccagcctgaccaacatggagaaaccccgtct

SEQ ID NO: 58668 - DNA, 730 bp, Homo sapiens
tctgtgattctagataatgtttttctttagcagaaaggagatctgttgatagtattatcatccatgcactgattcactgaacattccctaagcatcctctatgtagcaagtactgagcaagggataccaaaatgtcaccttgcatgaacagataggcctggtccaggctctgccactgccctgcttctcacctccactattcccttcatcttggcttcctttacttcaggtccaatgtgccaggagccagtgtccaccaggccaagcttaggacatgtgcctacatgtccaacaagatagatggacaaaggatctgacttccatcagctttcatggtggcrggcagccgggagtggctatcaccaggaactgcccacccaccatgatgatacacaatagcaaattgctccaacaggagacgaggccacacaaggaagagggggatttggatgtgagacagcaaaaagaggacacgtgtcatccacatctgcctccttgagctccttgacattcagtgccaatgtgtgactacatctgtgcacttgagggaaagagaggagctttaaacttcatccagctctctaaggatgctgatagaggcagagagaaggtgggcctgaggggtctctcctgctttggggacagattgctttccagttcacttttcataatgttctcacatgagacatggccaggaggaaggccctcaagaatctggaggtggatattg

SEQ ID NO: 58669 - DNA, 662 bp, Homo sapiens
aaaccaaagcttgggccaggagtggtggctcacgcctataatcccagcactttgggaggccgaggcaggcggatcacctgaggtcaggagttcaagaccagcctggccaacatggtaaaaccccatctctactaaaaatacaaaaattagccaggcgtggtggcacatacctgtagtcccagctactcaggaggctgaggcaggagaattgctcaaacccgggaggcagaggttgcagtgacccgagatcatgccactgcactccagactgggtgacagagtgaaactccgtctcaaaaagaaaaagaaaaagccaaagcttgaaagtgtgagcctttccaatttcttacataaataacagataattaaattcmccccagtttcctattctttttaatattgaggttcagtagcaacttacttttcttagtgtgtcacactcattcatttattctcccaggaactgaagtagttgagattcagttctagtacttgagcatgtatgtaatctgctagcaagtttctttttatatacacagtgttaaatcttaaaggagggaaaaaaatacaaaaattaaattaggaagtatctatgtagtaaaaacacatatgaaagatatagtgacagcatgtctgttcacattttatatgtaatttatttt

SEQ ID NO: 58670 - DNA, 662 bp, Homo sapiens
aaaccaaagcttgggccaggagtggtggctcacgcctataatcccagcactttgggaggccgaggcaggcggatcacctgaggtcaggagttcaagaccagcctggccaacatggtaaaaccccatctctactaaaaatacaaaaattagccaggcgtggtggcacatacctgtagtcccagctactcaggaggctgaggcaggagaattgctcaaacccgggaggcagaggttgcagtgacccgagatcatgccactgcactccagactgggtgacagagtgaaactccgtctcaaaaagaaaaagaaaaagccaaagcttgaaagtgtgagcctttccaatttcttacataaataacagataattaaattccccccagtttcctattctttttaatattgaggttcagtagcaacttacttttcttagtgtgtcacactcattcatttattctcccaggaactgaagtagttgagattcagttctagtacttgagcatgtatgtaatctgctagcaagtttctttttatatacacaktgttaaatcttaaaggagggaaaaaaatacaaaaattaaattaggaagtatctatgtagtaaaaacacatatgaaagatatagtgacagcatgtctgttcacattttatatgtaatttatttt

SEQ ID NO: 58671 - DNA, 1192 bp, Homo sapiens
gcatatggaatctccaaggaccccagaccaccaacacaatcttgaaaaaggatataatgagtacagttttaattctgtttttgtggttttagtttcattacaacactcctatatctcatccctctctttttccaccaccttttgcatcttctatccttgtgcacacagcatgctaaacacagcttcccatgtcccattgcaaatgctcagaaatgacaagttggctcaacaaaatgttcctattgggtcataatattttgatcttggcattctgttctctcagttgcagtatagagaggatccaggttggtaaaagcaggtatggagaaagcaaataggataggaaaatcaggaaatgacagtgccatagaattaccccaaaatttaaggcccaaggaagatcctacaagatgctcaagtggccttcttcagatgttacaagtaggctcctgtaaacattcgggataccaaaagattaaagagaagcctcaattttgcctcttcgttgaaattgatagggataaagcctcagatctcactggtaagagggaacgtgaagtaattgcaaaattacttgatctatttgcatatgacttaagtattcttagacttttaagtatatacctaataggctttttattcctagaaagagattaaaagaaagctctctgaaatgcaggatcttgaagaaacaatggcaaaacttcagctggtaagttgatgtcatgttgaattgccagcattttcagtaagaaaatttttatgggagactgaggtgggtttatcacctgaggtcaggagttcgagaccatccagccacatcaacatggcgaaaccccgtctctactaaaaatacaaaaattagctgggagtggtggcgcatgcctgtaatccctgctacttgggaggctgaggcaggagaattgcttgaacctgggaggcagaggttgcagtgagccgaggtcacaccattgcactccagcctgggcaacaagagcgaaactccatctttaaaaaaaaaaaaaaaraaaagaaaagaaaatttgtatgctttgttttattgctcagctcctgacaaccactaatctactttctgtttctgtagatttatctattctggccattccatataaagggaatcatatattttgtgtctggattcttttactaagcataatatttacaaggttca

SEQ ID NO: 58672 - DNA, 734 bp, Homo sapiens
cttgagcccaggaggtcgggctgcagtgagctctgatcatgtcactgcagtccagcctgagagaaagagtgaaaccctgtctagaatgaatgaataaataaataaatgaataagcttcctcattgtttgttcaggcacttcatgacctcatattaataagtttattgcctctctgggcaacatgtcagcctcagtttctttctgttaaaacactgggcctctccattttttaaattcaaatccctgggaatatgtacttggttggactagctcaccccatctaggcagagctcctcaccccaagactcccacaggccatgggcagcccatgagttggctgcttttgagtcaggttcaatcaagtgcagctggaggaagaatgagtctcacggtgcgaaacactgtggctaatggtgcctccatcaggaccatttccttagaaaggcctgtggacacagaaggcactcccagagacagtcctcctcccaagcaccatcagggcaagataccaccatcccctgaacagcayagcattttacccatgaacaaatgaataaataaacaaacagcgagttgaatagcccatagtcaattgtgatggtttgtacaggtttcagtttgaaaagcagtcactaatgagctgcttggtcacattttgtcaattatttagatgtagagatcaaagtcagattataggttgggtacagtggctcacatctgtaatcccagcactt

SEQ ID NO: 58673 - DNA, 734 bp, Homo sapiens
cttgagcccaggaggtcgggctgcagtgagctctgatcatgtcactgcagtccagcctgagagaaagagtgaaaccctgtctagaatgaatgaataaataaataaatgaataagcttcctcattgtttgttcaggcacttcatgacctcatattaataagtttattgcctctctgggcaacatgtcagcctcagtttctttctgttaaaacactgggcctctccattttttaaattcaaatccctgggaatatgtacttggttggactagctcaccccatctaggcagagctcctcaccccaagactcccacaggccatgggcagcccatgagttggctgcttttgagtcaggttcaatcaagtgcagctggaggaagaatgagtctcacggtgcgaaacactgtggctaatggtgcctccatcaggaccatttccttagaaaggcctgtggacacagaaggcactcccagagacagtcctcctcccaagcaccatcagggcaagataccaccatcccctgaacagcacagcattttacccatgaacaaatgaataaataaacaaacagcgagttgaayagcccatagtcaattgtgatggtttgtacaggtttcagtttgaaaagcagtcactaatgagctgcttggtcacattttgtcaattatttagatgtagagatcaaagtcagattataggttgggtacagtggctcacatctgtaatcccagcactt

SEQ ID NO: 58674 - DNA, 700 bp, Homo sapiens
aagccctaaagttatgtccaaaattccaatggtgaagcacaggattgttgtgtcctgactcggctgcaactcatggaccaagaatctgggacttttagtgacggtcatttcaacctgaccctgactagtcctgctcaactcctacccaaatcctccgggccctggtgaaacacrtagggcccacagaaaaagagctgtccatgatcgccctgcctctgtgagcttcaatcctaacttacctgtctcatcagcctcatgtttagctctaccgctgcccattctcttctgtaccccaacatagcctccttaattttatgcacaatttaattttctgggcccctttctcatctctctgcttgttagtcatttcacttgcagtcttctgggtctgcaattcatactaggaactttggaagaaatgaaggatacatttctcttagagaagagactatgggaagcaaaatgggaccttcaaatgaaagctagggtggacaggtcctgtgctgctgcagccaccgctgttagaaccagaagggagacagttgaaaggatcagatgtctgttcaatacaagccacttactgtttcaatgaatatgtgcgagcacttactatctgcaaggtgataggcactttgggccatccaaaggaagtacttgccaacaaatagaatgcattccgttgaattctagtgttgaacgg

SEQ ID NO: 58675 - DNA, 1845 bp, Homo sapiens
  misc_feature (1)...(1845): n = A,T,C or G
ctgcagagaaatgggtcaaagtgcatcagtttttatatcccagacaatgcctagctataattctgcctaaagcctggcttataattccagttaaccctgtgacagtggtttcattaatgtggtgaatccatttaaacacagctaaattcaaaatgcatatatattttaatatgcttgtaatgcacatgaaaatgcctgtacttttagagtaggaggtagatttctgaccctgtcttcccccattctgatttaataaagaatttggagagggtgagtagtgtcagtttaaaatatgtggcaaggttgaggtgggaggaacacttgagcccaggagttcaaggctgctgtgagtaaggaccaaaccattgcattccagcctgggtgacagagcaagaccctatctctaataaaaaaagaaagaaaggaaaaaaaattcatgtcaagaaccaaactagtggttttctatcttttaaatccatattaatagcactaaattgtactttaattgtgatttccaaatgtcacctcaatactctgtgaagtaaaagataaagccacacattctgaaatgttctgtagttacattttattttttaggcattctgaatgtgctttattcctgatggttactcatatgaggattactggaaaccggaagtggcagacaaagcttcttgctcagagctttaaggccggatccagaactggagccagttccacttactgtgattgccacaggccagggggaatggtgccaaggacaggtcttggtgtatggagctgtaagttgtacctgatggcttgaaaatgtaccctgatttcagattggccccatgctgaagtgtagaacaatggttcccaaaggtcaatctctatgcatattcatggcaaaagttgtgaggcttgtaccctttctgcaggcaacagttagaactttcaatacctaaattgagcacataaatgaatataatacaaaaaattaaaactgaaccaaaaaaacattcaagtgagagaggaagctgaagtgcaagaggtgtcctctcattagcagatgaaggggttgttaagttaaaatctttgttccattctggtccaaggtcaaaatagagctacattctataaaggaatatgaaatgactaaagaaagatatttttaatgagctcacataattcatggcctgtccatgctgcctaaagcaccactcctgattgaagggtgccctgaactctgctcccatcttgctagcccccygagggctgagattgatgtgtagagagggaaagtaaaccctgagctttgggagctgtttggggtcaagtcagaatttgtttctgtcctgcctttcaaagctttgttttcttatgaaccatccatactaatgactcagcactactgagccagggagggcccgggaagagccttcaccttcaaggaggtgcagttcatgatggacattacttagaaattaggaaggctggggctttttctaaaaggattgattagagctagaaatnnnnnnnnnnnnnnnnnnnnnnnnnnnnnnnnnnnnnnnnnnnnnnnnnnnnnnnnnnnnnnnnnnnnnnnnnnnnnnnnnnnnnnnnnnnnnnnnnnnnggcaattaagccatggaacctgtgcaaataagattgtgatggaatgctattttgaggcatggtgaaagcatttccaagaattgggtattaattctgaccatagcacataaatgaagtatgggtttttaatatatccatcatggtaatgactaattaatacctttcctttctaaaacattcatagtttacaaaataggttcacatgactcatctctttctattttcagaacc

SEQ ID NO: 58676 - DNA, 1102 bp, Homo sapiens
cacagccaattatttgctccttgttccaaggtacaatgacatgatgggaaggctgaatgtgtattaagtgctaagttctgtcagtaagcaggtggtaaaagtcctctcccaggtacctccgccctccccgccccgcccaaggttgtttattcctgaccttggctgatgatggggaatgggggtcatggcaggagcagcgttctggtccaattagaggactggattaaagaattaattcagggccgggagctggggcttacgcctgtaatcccagcactttgggaggccgaggcaggaggattgcttgagcccaggagttcgagaccagcctgggtaacataatgagccctcttctctaccaaaaagaagaaaaagaaaagaatccggagaaaaaaaccttgggcttgcattgctctttctaatgccaccagcctcgtctggcaggtgagggagtcatttctttgcattgtaaacttgggttaggccacgctagggaggtggtaggtagaatagctaaagttgaccacaaagaaggatgatctggagagccctggctgtgttttaggggactgggtgggagctcatttcagtgaatgcagaaggctttgcttctgggtgtctggaggaaccttactaggtggtgccttttagccagctgtggagtctatacctccactcagccagaaaccttgctccaagcccatttgttcacagagcaaactcttagttccagctctcttttcagccacacaccggtgctrtgtgttatttccccctcaggattacccttcctcttcatttaaatctgatttcacctggatacaaagatgaacgttgagcaacagctgacttgcctcttgaaagagggttacaggaacttttagttcctgggggaaagggcagcccatgagaccaattgtgaagcccatctaaatactaacagggatgagagagatgatggctgctgagttgggagctggagaggaacagtcccaaggtggaggtgggaatggaaatggaggggaaccacttctaactgaaattggtttttctgctgacagctcattggaggtgaagtgctccctgtgtgttgtggggatcc

SEQ ID NO: 58677 - DNA, 725 bp, Homo sapiens
ggatcatatgcatgttgtactaagaaattcctctcaagaatacataaagaaaattatgatctgcttctatccagagctgacttgatcagtggcgtggaaggggagatctagagtcatattccctatagatgcatatgtttgtttaggaaagactagaagacaaatcaagttgcctcaaagagttgtaatgcttcacagattctgatacataaactatacatgcataatgttattggtttccatgtaaagaagcatctagagactaaactacaaggagtaatggccttctatttggattttctgcatcttgtttctttccaatttactctgtaatttttctggtttatcatcttagggtaggtcacttctgaacttaaaattatttctaattcctctctattagataaaataaaatatgatcattgaagccatctagaaattacagaaaaagcaactttgaattwacagagcatacagtacactttttgtaccaaagagtttggcagattttactattccttgttcctggaatgcacatgcatggttttcccacttaattttctgcgcttagaatgctcctgctaccatgtcttatttccatctgataaaacaagctttccttgaagatccagctcaaacatcatcctcttgcagccttctctgacctccctgtcctcctcatccgaagtgtgcaaagcacttctggaatgtgggtttcttgatct

SEQ ID NO: 58678 - DNA, 1087 bp, Homo sapiens
tgctgttctgcctgatcgtggactcataaaatcatggctctggcagggacgttgcgaaaatcatgttcttaccttcaaagaagcctcagaaaattcctaagcaaacagtaaagctatcctaattactaccacaagtaatattatatagcaaaggccatttcttatttcctttcaggtaattctggccaaagctcaacaattttcaatgccagtaactttctcaaattttagatacatataaaaagtttgtattcttgcccacaactaaattcttgaggttccactagttcttggataatgatctgtgaaaytgacccattatgctgtctggtttccgataaccattggaactaacgagagactggcagggcagcctgcaacaagaggctttgtctgggcttaagaactgttcccttttgcctgagttgatcaggtagcttagttggaatgggtaaaagaaccaggagcatctagagatttccatcatgaaaatgtccaaggcaattgtaagcataaataacagcgttttgggttctattcttccattgctaatacagataacaggaataccagatgtttcacaaaccactggaaggttagctaggtgactgagatgcatgaaggtaagcaggaattcctaaacctccaagaaggttcaggcccctgaaagcaatacatttgctagctgtcagagggggccccatacacactctctgactgacactctagaagaatgggtgaactttccaatagactttttgattaatgtcaattaatgtaactgctctgaaatggtggggtctcattagtatcaagaagttctgttagctgggaccaacatggcatcaggcattcagctaaatttctgctttccccaggggcaaccagcccagttcaatttgcctgggggcttttgactctacaatctcttccaacattaaacaagtgaatcctgcgcaccctggtgagttcgcaaaccctgacagatgtttctttccaaaaacatgcaggcccaacatcccttgaaaaccttaaatgtatgatgttctttctctctctctctcctaactttctccacgttgtttat

SEQ ID NO: 58679 - DNA, 1087 bp, Homo sapiens
tgctgttctgcctgatcgtggactcataaaatcatggctctggcagggacgttgcgaaaatcatgttcttaccttcaaagaagcctcagaaaattcctaagcaaacagtaaagctatcctaattactaccacaagtaatattatatagcaaaggccatttcttatttcctttcaggtaattctggccaaagctcaacaattttcaatgccagtaactttctcaaattttagatacatataaaaagtttgtattcttgcccacaactaaattcttgaggttccactagttcttggataatgatctgtgaaattgacccattatgctgtctggtttccgataaccattggaactaacgagagactggcagggcagcctgcaacaagaggctttgtctgggcttaagaactgttcccttttgcctgagttgatcaggtagcttagttggaatgggtaaaagaaccaggagcatctagagatttccatcatgaaaatgtccaaggcaattgtaagcataaataacagcgttttgggttctattcttccattgctaatacagataacaggaataccagatgtttcacaaaccactggaaggttagctaggtgactgagaygcatgaaggtaagcaggaattcctaaacctccaagaaggttcaggcccctgaaagcaatacatttgctagctgtcagagggggccccatacacactctctgactgacactctagaagaatgggtgaactttccaatagactttttgattaatgtcaattaatgtaactgctctgaaatggtggggtctcattagtatcaagaagttctgttagctgggaccaacatggcatcaggcattcagctaaatttctgctttccccaggggcaaccagcccagttcaatttgcctgggggcttttgactctacaatctcttccaacattaaacaagtgaatcctgcgcaccctggtgagttcgcaaaccctgacagatgtttctttccaaaaacatgcaggcccaacatcccttgaaaaccttaaatgtatgatgttctttctctctctctctcctaactttctccacgttgtttat

SEQ ID NO: 58680 - DNA, 1418 bp, Homo sapiens
tgggactacaggcactaccacacccggctaatattttgtattttttagtagagatggggtttcaccgtgttagccagcatggtctcgatctcctgacctcgtgatccacccgccttggcctcccaaagtgctgggattacaggcaggagccactgtgcccggcccataactcttctgtacattttttgtatatttatgtctatccatttaattatctgtctgctccaatataataggaacaaaactgtgtcttatttgtcttggtattatcaatactcataactcataagacatagtaaggactcaataactttttgttgtcgaatgaatataaggggtgaatacataaatatggaaaatgtaattatttcaataattttgcataatctttattttgatcttcattcttcctgagggagacagttacaatcatttccaggtagactgaataaattcaaattaagtttaatcaattaacggttttctgctcttcctctttcaccctgaagtgaccactagttgcaaggatttacgtagatttatgggcctacagccttgagatggcaagtggtgtccatttggtccctggtcaatactaccaatttaaaatagcgtccactgatatgtacactctcttgtctgattatacccctatgtgagaattcaatgaactgtccatatgcccatgtgtccacatgtcctgtctctgacttaaccttaaaacacatttttacctgccaggccagttggtggatcctttaaaggcccagaaaacatatgctcttccatggaaatctcggataatgagaggctgctccaagtcccttatgcctggacactacaacatgatttttaatctactgctttctatcagacaaatgagcacaaatccatttccctaaaatggactcttcccaagaaccagggacacaggactccttctcaaagacccaaatcaacatctgttttgctttctgcttctgccttattccgggacagcagctttcagatttaaaaatgaagaatgtgtcacttttctcctctgcttccacactaaagatttctcccttgggcaacacatttctgttgtctaggggtacaatttggagaaggttagtaacacagtatacagaaaacctaggaactgagtgaggtcgagaaatcatagcacatcaactaatactcaacaatattattacaatacacatgcaatttttaatcaatctcacatcaaaaaatgaaataaatacaatcattttgcctgcattagacacaattacttatattggtttctgctatcaacttttagttttcttacaatscaattgctccaacttggtttcacactctttgaatcttcaaccacaggaagcgcctgtgtttatctgtgctagatttggcccgttggtgtaggacac

SEQ ID NO: 58681 - DNA, 1408 bp, Homo sapiens
aaactgggctactttacattcttatttcaattctgaacaattctccatttgaacataagtccttatcactccttttctgagtatcatggatcttacaagaaggcatacagatgaatttcagcaaagggtgcctattccttattgagtagttggggtaaatgggaagaagaaatgtatatgttaaaggtggctagttcattttttagcagccgaactacagacccagctggtgagggaagtatagggatcggtacccactgggtactcaggtttgtgttccgagttgagtgatgtataggctaagctccttcctacttcttgcttctcattacccagagacattgggtcctcattaaaaatatcaattgcttttcttcatgaactagttgtagcaggcctggtaaacatctagaatgatttttccaactgccactggtgagatagtttggtggcactggctctgctgtttctcaaggtacaggtcacaaagatcccaatgacaaaacrggacgcagtaaagaagacagcccacaccagccacaactaggatggtaacaaaagctacttccagttgtcctcactgctcattataagctaattataatacattagcatactaaaggaaactctcaccagcaccaggacagtttataaatgccatggcaatgtcaggaagttaccctatacggtccgaaagagggaggatccctcagttccaggaattccttgcctttttccagaaaaactaatgaataatccaccctttgtttagcatatgatcaagaaataaccataaatgtagccaactaggctgctctgcctatggtgtggccacccttttgttcctttactttcttaataaacttcctttgaacttctctctgtcccccgactcttaaatctcttcctgttagaagtcaagaacccacgtgtcctcccaggctaaaccgttttgggattcacctggtgacactggaattccaaaatagtacaaatctgtaaagataaaaatagtccctcttttgcatggcatctgttcttccagcactatgagaagtgagagtgcgaaagaatcaaatatttgtcattgatttggcctggcattaacaaagaccccagtttttaatatgtgcaagtatatgtagatgttttatgcataataaatataatataaacatacatatataaagatgaagcctatattctttagagcaagatttcctgataattcaaattccaggtctactacttgctggttgtgggaatttcatgtcatttaacttctttgttcctcatgtcctcaaaggtattacaaagaatgatataacagaatctttctcatggggctcttgtaaggaataaaagagcatatatggtttctataaagtacttggtaagcctggtgcgt

SEQ ID NO: 58682 - DNA, 1733 bp, Homo sapiens
gaaattccatctttcatggagttggggtttrccttgctacaaacctcaaagtccatgctacatacatagaaggaaggtgcactttttctacttaaaaaagaaacaggatgcgagatttagaaaccataactgcattcaaggaattcaggtaatatgcgattaatgacaatatttactgaagaatcattaaaatagataacaaaaggtgtcctagaatatactatataatctatacattattactgtcctcagtttgaaatttcacatggaggaaacagattgagagcatagaactctatcccttttccttactcttcccagcaaagataaccagcatatagtttaaattgagggattcttaattagggaaaaacctttggtaagtacacagtaaggtacaattatgtgtgcaactctctcttttaggtgatgtgtaaaacagaataactaaaatgagaattctaccctcagcaaggagaatatacactgtactccaatgaggaaaatatatatgtgtatatttttatgtgtgtggatgaagataaatagcaaagattcataggagaaatggaaaaagaaccatttgtattgagaacaggaagagattctggtatgttgaaacaggcaaaattttagagaaagcacattcatgctcacctttgaaagaaacagcagttgaggccaggggctgtggctcacgcctgtaatcccagcactttgggaggccgaggggggtggatcacgaggtcaggagatcgagaccatcctggctaacacggtgaaaccctgtctctactaaaaatacaaaaaattagctgagcgtggtggcgggcgcctgtagtcccagctactcgagaggctgaggcaggagaacggcatgaatcagggaggcggagcttgcagtgagtcgagatcgcgccactgcactcgagcctgggcaacagagcaagactccgtctcaaaaaaaaagaaaaagaaaaagaaaaattaaaagaaaaaaaagaaacagaagttgaatacctatcaatgaaagagcgctataaaatgggaaaagtaaagcagaaagaggcacaaagatggggaactggatcatgcatacgagcaagaacaatgtagtttattacaagaccaactactgaaagcattccctatgtgctattgtggcttgaatctctgggcatcagatactatttcaggtttttgaggaagcaattgatacagaaaggacttactccttgagattaatgcagtaagaactgaagaatgaatagacatttcataatagaacaaaaacacaacaaatataagccacctagcatatctgagacaaaatttcagaataagatatattctcatctgcccccccccccaaaaaaaatgaactaacgacccatttccagctccatgattctatttgagtagtttaatatccagtgatattagcacaattatttctttcatgtcaacaagtactaagtttaaaactaagcactgaagaggacaattatcaaacttacagaaagtgctacaaatttctatgaataaagtcaaagatgctataatctttttaaaactcatgctgctaactcaaattcatgttattaccattgactgtctggaaaatggctttaaaaatatttccataattttgaatgtaaaatatcccaaataatgggaattatcttaggaatacaatgtagtttttttaaaattgggtaacaaaatatttaaca

SEQ ID NO: 58683 - DNA, 1733 bp, Homo sapiens
gaaattccatctttcatggagttggggtttaccttgctacaaacctcaaagtccatgctacatacatagaaggaaggtgcactttttctacttaaaaaagaaacaggatgcgagatttagaaaccataactgcattcaaggaattcaggtaatatgcgattaatgacaatatttactgaagaatcattaaaatagataacaaaaggtgtcctagaatatactatataatctatacattattactgtcctcagtttgaaatttcacatggaggaaacagattgagagcatagaactctatcccttttccttactcttcccagcaaagataaccagcatatagtttaaattgagggattcttaattagggaaaaacctttggtaagtacacagtaaggtacaattatgtgtgcaactctctcttttaggtgatgtgtaaaacagaataactaaaatgagaattctaccctcagcaaggagaatatacactgtactccaatgaggaaaatatatatgtgtatatttttatgtgtgtggatgaagataaatagcaaagattcataggagaaatggaaaaagaaccatttgtattgagaacaggaagagattctggtatgttgaaacaggcaaaattttagagaaagcacattcatgctcacctttgaaagaaacagcagttgaggccaggggctgtggctcacgcctgtaatcccagcactttgggaggccgaggggggtggatcacgaggtcaggagatcgagaccatcctggctaacacggtgaaaccctgtctctactaaaaatacaaaaaattagctgagcgtggtggcgggcgcctgtagtcccagctactcgagaggctgaggcaggagaacggcatgaatcagggaggcggagcttgcagtgagtcgagatcscgccactgcactcgagcctgggcaacagagcaagactccgtctcaaaaaaaaagaaaaagaaaaagaaaaattaaaagaaaaaaaagaaacagaagttgaatacctatcaatgaaagagcgctataaaatgggaaaagtaaagcagaaagaggcacaaagatggggaactggatcatgcatacgagcaagaacaatgtagtttattacaagaccaactactgaaagcattccctatgtgctattgtggcttgaatctctgggcatcagatactatttcaggtttttgaggaagcaattgatacagaaaggacttactccttgagattaatgcagtaagaactgaagaatgaatagacatttcataatagaacaaaaacacaacaaatataagccacctagcatatctgagacaaaatttcagaataagatatattctcatctgcccccccccccaaaaaaaatgaactaacgacccatttccagctccatgattctatttgagtagtttaatatccagtgatattagcacaattatttctttcatgtcaacaagtactaagtttaaaactaagcactgaagaggacaattatcaaacttacagaaagtgctacaaatttctatgaataaagtcaaagatgctataatctttttaaaactcatgctgctaactcaaattcatgttattaccattgactgtctggaaaatggctttaaaaatatttccataattttgaatgtaaaatatcccaaataatgggaattatcttaggaatacaatgtagtttttttaaaattgggtaacaaaatatttaaca

SEQ ID NO: 58684 - DNA, 1333 bp, Homo sapiens
tttctaatagttcttttggcattgttaatagttttattttgtctgatgaaccttaccagtaaaagaaaatgttaaggaagatatttcaaactgctttgattggtgggataaaatatcctgatgcagtgggaagaagaactctttgagggaataaacagtttggaggagaatgtgctgttacttccagaaaaaaacctattttccctggaaaaaaataaaatccatagaaagtgcccttggaggcatggcaaatgaatgaagacttggttatgttaaagcagcttcattctgagatggaaaaagtgactctttcaatcttaattctctggttagagtctaatagaatttttggtcttgtctctgtgcctattctgaggcccttagagtccttaaaaggtgaatgaattaaaaaatatgaaggatgtttgtccattaaatgccataatgtctctattatttacctatttctttgtaacaataggaaacttgttgatggtagaagttgttcagcactcatacacacatcgttttctgcattactctaattgtttactttgcaatttaaatgctagcagggaacaccaaacattttgctaaattccccattgctgaaatgaagtttaatagccaaaaaattgctattgtatgtattgctattgtgtgtgtgtatatatatatatgtgtgtgtgcatgtgtgtgtatatacacatacatatacctatatttccaaatttgttgtgtaagtatatttcttcgactagcaaatttcagattacaggtactaatgagagtcagatcaaacaaatttaaaatgtattggcaaaattcatttaagcttttataataaaacttaattaaatcatgttttattaatttactatttgtagtaatttattagtgctaaaatgaggttcacttttgtataagaaaaataaataattttactaacatgatagaatagaaatacaaaacacatattcaaagaaaaaacgacagagctagattccatcccccccccmaaaaaaaaaaaaaacacatttgaaggcaaaaatcacattgcaggaattaattcacaatttatagacaaaagtactatgctaattaaaatgtatatattagattttactttactaggcaacatattatgatttatattatttcaaatgttatttttaatgccttaatgttattttcaataatacttatatttatttaaaatattatataatttcatctgtttctctcagattaatctctctcagttagtagagaattgactaatgttgtctttacttctcatcaaacttttatgagatctgaaagaaatgatgca

SEQ ID NO: 58685 - DNA, 1333 bp, Homo sapiens
tttctaatagttcttttggcattgttaatagttttattttgtctgatgaaccttaccagtaaaagaaaatgttaaggaagatatttcaaactgctttgattggtgggataaaatatcctgatgcagtgggaagaagaactctttgagggaataaacagtttggaggagaatgtgctgttacttccagaaaaaaacctattttccctggaaaaaaataaaatccatagaaagtgcccttggaggcatggcaaatgaatgaagacttggttatgttaaagcagcttcattctgagatggaaaaagtgactctttcaatcttaattctctggttagagtctaatagaatttttggtcttgtctctgtgcctattctgaggcccttagagtccttaaaaggtgaatgaattaaaaaatatgaaggatgtttgtccattaaatgccataatgtctctattatttacctatttctttgtaacaataggaaacttgttgatggtagaagttgttcagcactcatacacacatcgttttctgcattactctaattgtttactttgcaatttaaatgctagcagggaacaccaaacattttgctaaattccccattgctgaaatgaagtttaatagccaaaaaattgctattgtatgtattgctattgtgtgtgtgtatatatatatatgtgtgtgtgcatgtgtgtgtatatacacatacatatacctatatttccaaatttgttgtgtaagtatatttcttcgactagcaaatttcagattacaggtactaatgagagtcagatcaaacaaatttaaaatgtattggcaaaattcatttaagcttttataataaaacttaattaaatcatgttttattaatttactatttgtagtaatttattagtgctaaaatgaggttcacttttgtataagaaaaataaataattttactaacatgatagaatagaaatacaaaacacatattcaaagaaaaaacgacagagctagattccatcccccccccamaaaaaaaaaaaaacacatttgaaggcaaaaatcacattgcaggaattaattcacaatttatagacaaaagtactatgctaattaaaatgtatatattagattttactttactaggcaacatattatgatttatattatttcaaatgttatttttaatgccttaatgttattttcaataatacttatatttatttaaaatattatataatttcatctgtttctctcagattaatctctctcagttagtagagaattgactaatgttgtctttacttctcatcaaacttttatgagatctgaaagaaatgatgca

SEQ ID NO: 58686 - DNA, 1333 bp, Homo sapiens
tttctaatagttcttttggcattgttaatagttttattttgtctgatgaaccttaccagtaaaagaaaatgttaaggaagatatttcaaactgctttgattggtgggataaaatatcctgatgcagtgggaagaagaactctttgagggaataaacagtttggaggagaatgtgctgttacttccagaaaaaaacctattttccctggaaaaaaataaaatccatagaaagtgcccttggaggcatggcaaatgaatgaagacttggttatgttaaagcagcttcattctgagatggaaaaagtgactctttcaatcttaattctctggttagagtctaatagaatttttggtcttgtctctgtgcctattctgaggcccttagagtccttaaaaggtgaatgaattaaaaaatatgaaggatgtttgtccattaaatgccataatgtctctattatttacctatttctttgtaacaataggaaacttgttgatggtagaagttgttcagcactcatacacacatcgttttctgcattactctaattgtttactttgcaatttaaatgctagcagggaacaccaaacattttgctaaattccccattgctgaaatgaagtttaatagccaaaaaattgctattgtatgtattgctattgtgtgtgtgtatatatatatatgtgtgtgtgcatgtgtgtgtatatacacatacatatacctatatttccaaatttgttgtgtaagtatatttcttcgactagcaaatttcagattacaggtactaatgagagtcagatcaaacaaatttaaaatgtattggcaaaattcatttaagcttttataataaaacttaattaaatcatgttttattaatttactatttgtagtaatttattagtgctaaaatgaggttcacttttgtataagaaaaataaataattttactaacatgatagaatagaaatacaaaacacatattcaaagaaaaaacgacagagctagattccatcccccccccaamaaaaaaaaaaaacacatttgaaggcaaaaatcacattgcaggaattaattcacaatttatagacaaaagtactatgctaattaaaatgtatatattagattttactttactaggcaacatattatgatttatattatttcaaatgttatttttaatgccttaatgttattttcaataatacttatatttatttaaaatattatataatttcatctgtttctctcagattaatctctctcagttagtagagaattgactaatgttgtctttacttctcatcaaacttttatgagatctgaaagaaatgatgca

SEQ ID NO: 58687 - DNA, 1088 bp, Homo sapiens
acaatctaaaatggttttgcattcatgtttacacttcatgtctcccaatcaaattactgtatttcaaggtcctttaaagctgtccattgctagattcacaattagatttacttctttaaacattttagattgctttaaaataattttgttttattgtgatatacaaagatttgcatactttgatattccacagtcaactctgcaaaggtaggtataatttgaaggtctcacttctgcttccttctcttctaaactgtttcactttccccctgtaaatactaatttgtagaattgttctggttcattcttgcttttaagaaacagacgcacacatatgtagatatctctatatatagatattagatgtttgtgtcaacccgcctcccaaattgggtaagcagtaatgtgttttaggctctattttttttctatctaatgaattctggagctcattctatagtagcttgctctctttctctttctctctctctcctctttctctggctgtacagcactccacagagtagatggagaggccacagtttattcaatcagtcttccaacccatctattgatgagctctttccagttctttgctataagaaatagtctgacatgaatagccttgtgcgtgtatcctctcacatttttttgcagcagaaggtgacacgtggtgtgcagtgtacactgctcactagtggatgtctgctagaaaaggcatcataagtacaaatgcaagtccatggccttgatttgataattagtcacatatacaaactcatattcattgtaattatcattttaaacagaaatatgcaagttcctatagaaagaggacaattttaatgatttaaattaataaaaccatgtttaaagaaaaattgacagcaattctacacatactcagaaaatagatgggggaatacttcacaagtaatgtgtgaagttataatattctgaggccaaaaccaggtacagacataacaaaaaaaaaatctatgtactaatatctstcataaatatagacacaaaaattcttaatggtagcaaatagaattcaaatatatatgtacgtgtgtatgtgtgtg

SEQ ID NO: 58688 - DNA, 853 bp, Homo sapiens
atactaatgtttccttaagtagtgcaattaactatcaagaggcaattacaaaagtcttttgaaaatagctgaaagtgtctttacacagtcttaagcatwaataacttgcgtaaaatattttatctaaccggtcatcatttctgagacatctttttggaataaatatttgattcaggtatttgatgaccttggggagctggggatttcttcagcttatttacttatatttacaactaacaatttaatgtgaggttaatactattttgattatatggccatcagcaccaccaattttctattacaaatatatcttcccaccagacagtatgttccagctctaagataatcttgcaaaggagacctgaggagtgtccgggttttgcaggtggaacagaaaggtgaaacagggagaacaagaaaattactcctgtcaaattgattataataagagctaagtgccaatcctctccaatatttctttctcctatttatagaacatttgtgctactatgtaatcaaaaatgtctgtagaattggaaagtgcccacaaacagatgaatagattcaagcttttacaaagttactcagtgaagtggaagtgacctcaaaacttcctaaagtgatgctggatgccggggagcaatagagtcacagtatccatgtggggtccaggcagggctgagcctcgcccactgacgcaagccttctgggtgagggagggtggacatcaacatggaacaagccgaccacctatagtttccatacggtcacacggctctggagcacatggaccttcctaactgctacctggacaacagaagaggcttcagaattatggaaacagctcagtatc

SEQ ID NO: 58689 - DNA, 853 bp, Homo sapiens
atactaatgtttccttaagtagtgcaattaactatcaagaggcaattacaaaagtcttttgaaaatagctgaaagtgtctttacacagtcttaagcataaataacttgcgtaaaatattttatctaaccggtcatcatttctgagacatctttttggaataaatatttgmttcaggtatttgatgaccttggggagctggggatttcttcagcttatttacttatatttacaactaacaatttaatgtgaggttaatactattttgattatatggccatcagcaccaccaattttctattacaaatatatcttcccaccagacagtatgttccagctctaagataatcttgcaaaggagacctgaggagtgtccgggttttgcaggtggaacagaaaggtgaaacagggagaacaagaaaattactcctgtcaaattgattataataagagctaagtgccaatcctctccaatatttctttctcctatttatagaacatttgtgctactatgtaatcaaaaatgtctgtagaattggaaagtgcccacaaacagatgaatagattcaagcttttacaaagttactcagtgaagtggaagtgacctcaaaacttcctaaagtgatgctggatgccggggagcaatagagtcacagtatccatgtggggtccaggcagggctgagcctcgcccactgacgcaagccttctgggtgagggagggtggacatcaacatggaacaagccgaccacctatagtttccatacggtcacacggctctggagcacatggaccttcctaactgctacctggacaacagaagaggcttcagaattatggaaacagctcagtatc

SEQ ID NO: 58690 - DNA, 853 bp, Homo sapiens
atactaatgtttccttaagtagtgcaattaactatcaagaggcaattacaaaagtcttttgaaaatagctgaaagtgtctttacacagtcttaagcataaataacttgcgtaaaatattttatctaaccggtcatcatttctgagacatctttttggaataaatatttgattcaggtatttgatgaccttggggagctggggatttcttcagcttatttacttatatttacaactaacaatttaatgtgaggttaatactattttgattatatggccatcagcaccaccaattttctattacaaatatatcttcccaccagacagtatgttccagctctaagataatcttgcaaaggagacctgaggagtgtcygggttttgcaggtggaacagaaaggtgaaacagggagaacaagaaaattactcctgtcaaattgattataataagagctaagtgccaatcctctccaatatttctttctcctatttatagaacatttgtgctactatgtaatcaaaaatgtctgtagaattggaaagtgcccacaaacagatgaatagattcaagcttttacaaagttactcagtgaagtggaagtgacctcaaaacttcctaaagtgatgctggatgccggggagcaatagagtcacagtatccatgtggggtccaggcagggctgagcctcgcccactgacgcaagccttctgggtgagggagggtggacatcaacatggaacaagccgaccacctatagtttccatacggtcacacggctctggagcacatggaccttcctaactgctacctggacaacagaagaggcttcagaattatggaaacagctcagtatc

SEQ ID NO: 58691 - DNA, 1540 bp, Homo sapiens
accgtgcgattcccgtcatattacggccgctgtgttgtgtaccctgtgccccacgtcagccagcagggtgagggacacaccggcctgtctctcctcgcctcaccctgctcactctggtccatgagtcagcctcttcgtgcacctgtggctcccgtgtgccccaccacggtgcagccaccacagagcaagtcactgaatttctgcccctcttccagatcacgtgtcctctcaagagccacagggtgctgtagcacagtgtagcatgctgtgtgcttgccatcctgtgcccatccatcgttctcccccacactggcgctcatgccgcttcccttctctccgggcgggtccttcctacccttgcgggtaggaaacaacccttcccttccccaaggcccagcttgagagctgcacctctctcctggacagctcactgggatggaaattccttccaatgtttccctgtggctaccagcagcagctcctttttagctaaggtaacagttttcctagagtgttttgtgtgtcctcgagtccttgagaaagagccccattttattcaatcctgtttctccagaccattgcagagcacacaatgtcttcatcttggtgagccatttagtaaccaaagatattaagagccatttacaaaccaaatatattaataattaagtgtttgaagctgaaattaatagattatatgtgttcattgttgctattgttttctttaggtgaattaccagctaggccaactagcgttccgttgtcttaacgcaagacgaataagatgaacataggattttactgaaacgatattaaaacaaacaagtaataacaacaaactatatattagaaagatattgagtttccagtcatcacccttttttgttgacagggttggagagtttgtatgaagatatgctgacattcaggacagtcttaactttaagaaaaatatcagaagacccattgactcttgatttccatttttttctgagttatattgcatgaatgaattataagcacagattcctcttaataatgtgagataagccattattaaatatttaaatatatcagcacatatgagccaggagagcaggtggtgccggagaacattaaattctaacgcagaaatttgacatttaaattccagtgttagtggcccgttagctccagctacattscactctcccttcccaacatgtatcctcacagattacatgtcaaagtaaactgagataagatgtagtggaaatgacacggaggttaagcgctgcggggctcacgttagagcaaacttcctgggagacgttctccaatctgtattttagtctcaggtaagaatgaaagttctgataatgatatttgcgaattatgaaagagcttgtgaaattaacaaggtgtacttctaggtgatattttaggctctgtaattggaatgagcttcctatttttttccagccatatggctgccttcctcatttctcatgtgttccatgagtgtgtgaatgtgataacattctcccacatctttaccact

SEQ ID NO: 58692 - DNA, 1540 bp, Homo sapiens
accgtgcgattcccgtcatattacggccgctgtgttgtgtaccctgtgccccacgtcagccagcagggtgagggacacaccggcctgtctctcctcgcctcaccctgctcactctggtccatgagtcagcctcttcgtgcacctgtggctcccgtgtgccccaccacggtgcagccaccacagagcaagtcactgaatttctgcccctcttccagatcacgtgtcctctcaagagccacagggtgctgtagcacagtgtagcatgctgtgtgcttgccatcctgtgcccatccatcgttctcccccacactggcgctcatgccgcttcccttctctccgggcgggtccttcctacccttgcgggtaggaaacaacccttcccttccccaaggcccagcttgagagctgcacctctctcctggacagctcactgggatggaaattccttccaatgtttccctgtggctaccagcagcagctcctttttagctaaggtaacagttttcctagagtgttttgtgtgtcctcgagtccttgagaaagagccccattttattcaatcctgtttctccagaccattgcagagcacacaatgtcttcatcttggtgagccatttagtaaccaaagatattaagagccatttacaaaccaaatatattaataattaagtgtttgaagctgaaattaatagattatatgtgttcattgttgctattgttttctttaggtgaattaccagctaggccaactagcgttccgttgtcttaacgcaagacgaataagatgaacataggattttactgaaacgatattaaaacaaacaagtaataacaacaaactatatattagaaagatattgagtttccagtcatcacccttttttgttgacagggttggagagtttgtatgaagatatgctgacattcaggacagtcttaactttaagaaaaatatcagaagacccattgactcttgatttccatttttttctgagttatattgcatgaatgaattataagcacagattcctcttaataatgtgagataagccattattaaatatttaaatatatcagcacatatgagccaggagagcaggtggtgccggagaacattaaattctaacgcagaaatttgacatttaaattccagtgttagtggcccgttagctccagctacattgcactctcccttcccaacatgtatcctcacagattacatgtcaaagtaaactgagataagatgtagtggaaatgacacggaggttaagcgctgcggggctcacgttagagcaaacttcctgggagacgttctccaatctgtattttagtctcaggtaagartgaaagttctgataatgatatttgcgaattatgaaagagcttgtgaaattaacaaggtgtacttctaggtgatattttaggctctgtaattggaatgagcttcctatttttttccagccatatggctgccttcctcatttctcatgtgttccatgagtgtgtgaatgtgataacattctcccacatctttaccact

SEQ ID NO: 58693 - DNA, 2453 bp, Homo sapiens
atttaaataattatgatagaatatatatttgtgaatttaaataatcatgatagagtatgatatatatggaagtttctagaactgagcttcttaacactttttttatattagtttaggaaacttgtataagtttgcttattttttcttaaacatgccaaaaatggagatatctacaatgataactttgctgtctattttaaaaagatttgaacttggatttaaaaaaataaatgtgaggaaacataatgtaaggggaacctatttgatttgagccctaattctaccacttacctgtgtgattttacataagcagattaaacactctgagcttctgtttcaagtgtaaaatgagaaaaatattattcctactttacaaggactttttgaggttaaattagatagttaaatgcaatcttgtaataaacattgtaggagagaaaagatttctttttcttaaccattgctagattgatagctgaggcacccataacaaaagatagaataataacagcaaagcatgcaaatttatttaatataagttttccatgacatgggagccctcattaaaaaatgaagacccaaagaaataagtaaacatatgtttttatgcttgggtttgatgaagatgtgggtagtcatagaaaagtatgattggacaaaagagatgtggtttaatgtctataaactgaggggaacttagcaaggcctacttgttcagattcttctgtgtggcactgtgtcttcaaagataaggatgttcctttccttcgagtatatggagggcacctctcgaatgagggtcttatgacctgcttcaagggagaagggcaaggggaaggtgagagttggctttcctgctcctgctgttttctcaaatgccaaggtaccatattttggggtggtgtttcttgagccccatcaacatctatacaactgtcacagtaattaataattattgtcatttatggtttttgatatatcatttgcataaattgagaagaacgtgaaataccaaattaccaaccaaaattgtctttctcatagtcctccactttcctaaatcccatgttcactctatgtcctgtctttcatttcaaatggtttcctagtattaaaaaagaaaaaaaaccaataaacttttcaatgttaataataacactggttattcttaaccaatggttcaactcctctattatgcatttatgctctaaaaattaacatcaacttcctgttgttagactatggaaacttaacatcaatttgattttctgggtcatggaccatactctgcgttttatgtcatactttttatttttccctagatttgaacattagacaaggaaaaagataatgaatattcatggaatcattttacgtattgccaattatatgcaaamacattcaacagatacttgtacttaatctacaccaattacatagtgcatgatttagtattgaagcatacctaataaaaataagaagaaaaacagacatctgtttcttttaaaatatatatatttccctgtctgtggttttgaagtttttcagggtcacagataaaggacaggtttattcctatgtgtgggtgtgcagtgtgttcttgtactgaggtctgagttcttttccaattctctgcataattcagttttcttctcctagcactagttacctattgttggccaagaaggtctagagaaggtaaacaatatagcttttatataagtgaacattttactgatttttttaagtaaagttctcagcttaatttagcctctggggtatgaaatggaagctgagtgagacacagagataacctggtagaagctgctcaaggaatgatgtggcttcatctgcatttgtttgtgtatgtgtgtgtgtgtgtgtatgtgtgagagacttgttgcctgagtgatagaacaaatccaggagaaaggttgaaaggcaaagacaaaggccatgtctatacaacttcagctgaattggacttgactgaaagattggtttggtctgatttactagagcatatctcctcagtgtctgtgatctgaaaattgcttccagggccattttaattagctgattcaaatcaaaaccaacacattctggtaacatccagttctactctgacccttaccaaagacaattttcagaatggtgattcctaagtagttgtgtataaactcaataagtgattcaagataggcactttttgtttctaaacatttaatctttaatggtgagaaaagtacctatttcttttggctttagtgacaggtgagtattagtacaccattgcatttgttgagcacatcacagcttaaaccacaaaaatagaagcctgttcttatgtagttaacatatgaaatgagagagtttctgttcctcgataacattttaatacgtggacttcattatgctgcatagcaatatgattaatgtaacatttaaatgca

SEQ ID NO: 58694 - DNA, 1044 bp, Homo sapiens
taattgttatttctcagaaatgaagagaagccttcagaaatgaaggaacagaggtcatgggagaggacaaagatggctctacacttgctcttagataattttcattatcaatgttccttgattttccaaaacaaaacagtacagaatagcaaaagcttatgattggacatgggcaaacagctagatatgggcaaattttacaaagaagagtgacccaaattgagattgtcagatgaagtaacatagaattctaattacaattgcttgaagaagccctccacagccacccctaactccctgaactttccagaagactaatttagaaacaagtttagctgtactattgcttgctcttatttggcaagagaatgtaaaatatttatgaaagtagctgaatagaaacaggaggacaataggagtaatattttctacaaattatttgtgtgtttatgtttcttttcttttactatccaagattttttttaatgatagccattccagggcatctatctggctaggataagattgtgatgctgctgaagataacaagcagaaattcagttctcacattccawgttggaacgtgagccaagctaccatctccagaaattgtcagaatccctttctttcctgcacttttatgtccacaatccgacttcatcacctaagtttagcaacctccaattctcacctggaatataggagcaagaaagtctcattttccactgaaagatgagtggaagtcgttggtggaagtagtcatccagatgctaacttgatggagctgacccaaggaactaaagaaacttctccaacagatttttatcaaaatctctgtgtttagcctcacttttacatccaactctagaggtacctggtgtcacaaaatcttgattccttttggttctgcattggggattccattgccctccaggttttctccctgccagcctagcattcagctttccagtgtttcttaagatggttcccacttttccagctgctcctgtcttgtctcctgttcagttttctccagtttaaaat

SEQ ID NO: 58695 - DNA, 511 bp, Homo sapiens
gaaataccatttccatcattccaaaaatatccattagttccctgttacctgaaggacaggggcctcaatctcgaatttttacaggtaggtaacataaacatacaaattaagtgactgggtaagtggagcctgaagctaaattcaaaattgaggagcaaatgttccctgaccccagacattccagttcrgactttaaacatatataatcaactccaataaaagcaaaaaagaaacacacacacacacacacacacacacactcacactcacacatccatagccatcagtgagtctggcttctaatctgaaacctgggctaaaccaaaccacttggcctggaattggaggcccctgattggcctttctgcccttcactctcaccactctccaccatgggccctcccatctctcctccaccagctcatcatggatggcctccctaacccatagccgtcttcttaccatgccagtctcacaggccactcaagtccacagtgatctttccctttcc

SEQ ID NO: 58696 - DNA, 2305 bp, Homo sapiens
atacacctaacacggaccgactgagacatcaccattgtcctcagtcatggctgggtttttttkttttttttttcatttttacctctctctctctgcttgagctttgcctctcacctacaacctccttctcacctatgcccctccagtcctctctgacagtaccatatatatgcagagagagagggagagaaaggtctcaacaaccctgacgttattccatagatagacagacagatagatagatagatacatacatacatacataaatacatacagatagacaaatacatacatacatacatatagatacatatatgcatacatagatacatagagatagatagatagatatagatagaagatagatagatagatagatagatagatagatagatagatagatagataaacagctacatggagagagagagagatctcagtggctctgaccttatgccagagagagagagatagacagacaggtacatagagagagagagaactcaagagccctgatcttatgccatagatagatacatagatagatatggagagagagagagagagatctcaatagccctgaccttatgcaatagacatagataaatgatagatgatagatagatagatagatagatagatagatagatagatatgataggcaggtacatagagggaaaagagagagagagagagatctcatcagctctgaccttatgccatagaggtaggtaggtaggtaggtaggtaggtaggtaggtagatagatagatagatagatgacagatagacgatagatagataatagatagatagatacatatatatatatatatatatatatatatatatatatatatatatatatacatagatagatacatagagagaaacaaaaagagagagacagatctcaacagccctgaccttatgccatagatagatagagagagattatgctgccgtggtagtaaagctctacatagaataggtgctgaatcactctccatttttaatgaatcaaattcagcaaacagaaaagcaactcgattacagacatcacttttcctactttatcctggcagccattcccgttatctctctctatcctttagtttgatccttttaataagaattctaagggagctgcctacactatgaaaatgcacctctccccaggaagccaaacactcaggatgccagatgtgtgtttttgttgttgttgttttgaggtgggggtctcgcctctcgcccaggctagagtgcagtggcacgatcttggctcactgcaacttctgcctcccaggttcaagtgattctcctgcctcagcccccgagtagctgggattacaggcaaacgccaccatgcccagctaatttttgtatttttagtagagatggggtttcagcatattggccaggctggtctcaaactcctgaccttgtgatctgcctgcctcagcctcccaaagtgctgggattacaggcgtgagccaccgcgcccggccggcaggtattacctctgtgaatgggtcattacttttaggaggggaagtgaatagcctatttactagaggagagtatgaaggcaacaacatataatcacttaatttggagcagacctaggcctgaatctcagcacctttgatttaaagggaaaaagcaattaaaggcagctagctgaatgttctttcaactcaatgaagtcattcaatcagtacataaaaaatgactagcttctgaaagtataatttaatcccaagttgaggatagaataaaatgcaaagattggcctaaatgcatagaaaacacaatccaaacaatagatcattttggaatttccatgatttcattggttttctagctccattttgttttacaatcattctacttctccaacacattggccaatgtgtcattcatcctacatgcccagtatcttttttttcttttctttttttttagacagagtcttgctctgtcacccaggctggagtgcagtggcacgatctcggctcactgcaaactcagcctcccgggttcatgccattctcctgcctcagcctcccaagtagctgggactacaggcgcccgccacctcgcctggctaattttttgtatttttagtagagacggggttttaccatgttagccaggatggtctcgatctcctgaccttgtgatccacccacctcggcctcccaaagtgctgggattacaggtgtgggccaccacgcccagccttgcccagtatcttaacccctcttagcatttgacaagttctcatcttcttggggagttgggg

SEQ ID NO: 58697 - DNA, 2305 bp, Homo sapiens
atacacctaacacggaccgactgagacatcaccattgtcctcagtcatggctgggtttttttgttttttttttcatttttacctctctctctctgcttgagctttgcctctcacctacaacctccttctcacctatgcccctccagtcctctctgacagtaccatatatatgcagagagagagggagagaaaggtctcaacaaccctgacgttattccatagatagacagacagatagatagatagatacatacatrcatacataaatacatacagatagacaaatacatacatacatacatatagatacatatatgcatacatagatacatagagatagatagatagatatagatagaagatagatagatagatagatagatagatagatagatagatagatagataaacagctacatggagagagagagagatctcagtggctctgaccttatgccagagagagagagatagacagacaggtacatagagagagagagaactcaagagccctgatcttatgccatagatagatacatagatagatatggagagagagagagagagatctcaatagccctgaccttatgcaatagacatagataaatgatagatgatagatagatagatagatagatagatagatagatagatatgataggcaggtacatagagggaaaagagagagagagagagatctcatcagctctgaccttatgccatagaggtaggtaggtaggtaggtaggtaggtaggtaggtagatagatagatagatagatgacagatagacgatagatagataatagatagatagatacatatatatatatatatatatatatatatatatatatatatatatatatacatagatagatacatagagagaaacaaaaagagagagacagatctcaacagccctgaccttatgccatagatagatagagagagattatgctgccgtggtagtaaagctctacatagaataggtgctgaatcactctccatttttaatgaatcaaattcagcaaacagaaaagcaactcgattacagacatcacttttcctactttatcctggcagccattcccgttatctctctctatcctttagtttgatccttttaataagaattctaagggagctgcctacactatgaaaatgcacctctccccaggaagccaaacactcaggatgccagatgtgtgtttttgttgttgttgttttgaggtgggggtctcgcctctcgcccaggctagagtgcagtggcacgatcttggctcactgcaacttctgcctcccaggttcaagtgattctcctgcctcagcccccgagtagctgggattacaggcaaacgccaccatgcccagctaatttttgtatttttagtagagatggggtttcagcatattggccaggctggtctcaaactcctgaccttgtgatctgcctgcctcagcctcccaaagtgctgggattacaggcgtgagccaccgcgcccggccggcaggtattacctctgtgaatgggtcattacttttaggaggggaagtgaatagcctatttactagaggagagtatgaaggcaacaacatataatcacttaatttggagcagacctaggcctgaatctcagcacctttgatttaaagggaaaaagcaattaaaggcagctagctgaatgttctttcaactcaatgaagtcattcaatcagtacataaaaaatgactagcttctgaaagtataatttaatcccaagttgaggatagaataaaatgcaaagattggcctaaatgcatagaaaacacaatccaaacaatagatcattttggaatttccatgatttcattggttttctagctccattttgttttacaatcattctacttctccaacacattggccaatgtgtcattcatcctacatgcccagtatcttttttttcttttctttttttttagacagagtcttgctctgtcacccaggctggagtgcagtggcacgatctcggctcactgcaaactcagcctcccgggttcatgccattctcctgcctcagcctcccaagtagctgggactacaggcgcccgccacctcgcctggctaattttttgtatttttagtagagacggggttttaccatgttagccaggatggtctcgatctcctgaccttgtgatccacccacctcggcctcccaaagtgctgggattacaggtgtgggccaccacgcccagccttgcccagtatcttaacccctcttagcatttgacaagttctcatcttcttggggagttgggg

SEQ ID NO: 58698 - DNA, 1102 bp, Homo sapiens
ttcttccaccttcagtgatrtcttctccagtctcatttaaaagacaaataattgaagccaaactcccctgcttttcttcctcttgaatatgctatatttttttctggaaaaggtggaatttgagaaagtaaagacaaatcatataaaactttctaaggcttcctgaaaaagaaataaacagtaaaagaaaagtgatacttttcttcctttgtatagaaaagttgagagaggaaaaatataaaacgattaaagagaagataagtaaatctaattacagtgacttccaagaagctggcaattgaaacttctgtttatgaaggaactggaacaagaggagcaataagcataatgggattgtgagttttgatgaaaaaatgtaaggagaaagaaccaatgtttctttctttttcttttctttttttttttttttggcgtggttttaaatttgatttaacactgtgtcatagttgctgtttcttagaagaatgtctttctggaatttgcttatctttcctttgtgttaataatgcctcgccaagaggttatatggcacactagtgtggggtgggggatttggagtctgatctacgtggaccccgactggttctgacactcactagctatgtgatccctgagaagttacttaacacctctggaacctaccttcttcatccattaaatggggataatatcagtgcttatctcatggggttattatgatgtatcagtgagataatgcaggaacaccttggcacattgcctgacacatagtaggcacttaataagtattagttgtcatcattactattggtgatccatggttatctttcaatattttaatctaggagctttggtttgcagatgactgtatggatgtattgttttaataatgctgcaaagtctttcagaacaggatccatggcttatgccccagggaatataccagttaaattacctttccctgaatctggaatccttcacctctctcctttatttactctgaatgcctaagagaatcttctttttctggcttacttattgcatactaataggagaatataaacagagaaacctagattactctaagtggtgtgggtgattc

SEQ ID NO: 58699 - DNA, 1102 bp, Homo sapiens
ttcttccaccttcagtgatatcttctccagtctcatttaaaagacaaataattgaagccaaactcccctgcttttcttcctcttgaatatgctatatttttttctggaaaaggtggaatttgagaaagtaaagacaaatcatataaaactttctaaggcttcctgaaaaagaaataaacagtaaaagaaaagtgatacttttcttcctttgtatagaaaagttgagagaggaaaaatataaaaygattaaagagaagataagtaaatctaattacagtgacttccaagaagctggcaattgaaacttctgtttatgaaggaactggaacaagaggagcaataagcataatgggattgtgagttttgatgaaaaaatgtaaggagaaagaaccaatgtttctttctttttcttttctttttttttttttttggcgtggttttaaatttgatttaacactgtgtcatagttgctgtttcttagaagaatgtctttctggaatttgcttatctttcctttgtgttaataatgcctcgccaagaggttatatggcacactagtgtggggtgggggatttggagtctgatctacgtggaccccgactggttctgacactcactagctatgtgatccctgagaagttacttaacacctctggaacctaccttcttcatccattaaatggggataatatcagtgcttatctcatggggttattatgatgtatcagtgagataatgcaggaacaccttggcacattgcctgacacatagtaggcacttaataagtattagttgtcatcattactattggtgatccatggttatctttcaatattttaatctaggagctttggtttgcagatgactgtatggatgtattgttttaataatgctgcaaagtctttcagaacaggatccatggcttatgccccagggaatataccagttaaattacctttccctgaatctggaatccttcacctctctcctttatttactctgaatgcctaagagaatcttctttttctggcttacttattgcatactaataggagaatataaacagagaaacctagattactctaagtggtgtgggtgattc

SEQ ID NO: 58700 - DNA, 1102 bp, Homo sapiens
ttcttccaccttcagtgatatcttctccagtctcatttaaaagacaaataattgaagccaaactcccctgcttttcttcctcttgaatatgctatatttttttctggaaaaggtggaatttgagaaagtaaagacaaatcatataaaactttctaaggcttcctgaaaaagaaataaacagtaaaagaaaagtgatacttttcttcctttgtatagaaaagttgagagaggaaaaatataaaacgattaaagagaagataagtaaatctaattacagtgacttccaagaagctggcaattgaaacttctgtttatgaaggaactggaacaagaggagcaataagcataatgggattgtgagttttgatgaaaaaatgtaaggagaaagaaccaatgtttctttctttttcttttctttttttttttttttggcgtggttttaaatttgatttaacactgtgtcatagttgctgtttcttagaagaatgtctttctggaatttrcttatctttcctttgtgttaataatgcctcgccaagaggttatatggcacactagtgtggggtgggggatttggagtctgatctacgtggaccccgactggttctgacactcactagctatgtgatccctgagaagttacttaacacctctggaacctaccttcttcatccattaaatggggataatatcagtgcttatctcatggggttattatgatgtatcagtgagataatgcaggaacaccttggcacattgcctgacacatagtaggcacttaataagtattagttgtcatcattactattggtgatccatggttatctttcaatattttaatctaggagctttggtttgcagatgactgtatggatgtattgttttaataatgctgcaaagtctttcagaacaggatccatggcttatgccccagggaatataccagttaaattacctttccctgaatctggaatccttcacctctctcctttatttactctgaatgcctaagagaatcttctttttctggcttacttattgcatactaataggagaatataaacagagaaacctagattactctaagtggtgtgggtgattc

SEQ ID NO: 58701 - DNA, 1102 bp, Homo sapiens
ttcttccaccttcagtgatatcttctccagtctcatttaaaagacaaataattgaagccaaactcccctgcttttcttcctcttgaatatgctatatttttttctggaaaaggtggaatttgagaaagtaaagacaaatcatataaaactttctaaggcttcctgaaaaagaaataaacagtaaaagaaaagtgatacttttcttcctttgtatagaaaagttgagagaggaaaaatataaaacgattaaagagaagataagtaaatctaattacagtgacttccaagaagctggcaattgaaacttctgtttatgaaggaactggaacaagaggagcaataagcataatgggattgtgagttttgatgaaaaaatgtaaggagaaagaaccaatgtttctttctttttcttttctttttttttttttttggcgtggttttaaatttgatttaacactgtgtcatagttgctgtttcttagaagaatgtctttctggaatttgcttatctttcctttgtgttaataatgcctcrccaagaggttatatggcacactagtgtggggtgggggatttggagtctgatctacgtggaccccgactggttctgacactcactagctatgtgatccctgagaagttacttaacacctctggaacctaccttcttcatccattaaatggggataatatcagtgcttatctcatggggttattatgatgtatcagtgagataatgcaggaacaccttggcacattgcctgacacatagtaggcacttaataagtattagttgtcatcattactattggtgatccatggttatctttcaatattttaatctaggagctttggtttgcagatgactgtatggatgtattgttttaataatgctgcaaagtctttcagaacaggatccatggcttatgccccagggaatataccagttaaattacctttccctgaatctggaatccttcacctctctcctttatttactctgaatgcctaagagaatcttctttttctggcttacttattgcatactaataggagaatataaacagagaaacctagattactctaagtggtgtgggtgattc

SEQ ID NO: 58702 - DNA, 1102 bp, Homo sapiens
ttcttccaccttcagtgatatcttctccagtctcatttaaaagacaaataattgaagccaaactcccctgcttttcttcctcttgaatatgctatatttttttctggaaaaggtggaatttgagaaagtaaagacaaatcatataaaactttctaaggcttcctgaaaaagaaataaacagtaaaagaaaagtgatacttttcttcctttgtatagaaaagttgagagaggaaaaatataaaacgattaaagagaagataagtaaatctaattacagtgacttccaagaagctggcaattgaaacttctgtttatgaaggaactggaacaagaggagcaataagcataatgggattgtgagttttgatgaaaaaatgtaaggagaaagaaccaatgtttctttctttttcttttctttttttttttttttggcgtggttttaaatttgatttaacactgtgtcatagttgctgtttcttagaagaatgtctttctggaatttgcttatctttcctttgtgttaataatgcctcgccaagaggttatatggcacactagtgtggggtgggggatttggagtctgatctacgtggaccccgactggttctgacactcactagctatgtgatccctgagaagttacttaacacctctggaacctaccttcttcatccattaaatggggataatatcagtgcttatctcatggggttattatgatgtatcagtgagataatgcasgaacaccttggcacattgcctgacacatagtaggcacttaataagtattagttgtcatcattactattggtgatccatggttatctttcaatattttaatctaggagctttggtttgcagatgactgtatggatgtattgttttaataatgctgcaaagtctttcagaacaggatccatggcttatgccccagggaatataccagttaaattacctttccctgaatctggaatccttcacctctctcctttatttactctgaatgcctaagagaatcttctttttctggcttacttattgcatactaataggagaatataaacagagaaacctagattactctaagtggtgtgggtgattc

SEQ ID NO: 58703 - DNA, 1102 bp, Homo sapiens
ttcttccaccttcagtgatatcttctccagtctcatttaaaagacaaataattgaagccaaactcccctgcttttcttcctcttgaatatgctatatttttttctggaaaaggtggaatttgagaaagtaaagacaaatcatataaaactttctaaggcttcctgaaaaagaaataaacagtaaaagaaaagtgatacttttcttcctttgtatagaaaagttgagagaggaaaaatataaaacgattaaagagaagataagtaaatctaattacagtgacttccaagaagctggcaattgaaacttctgtttatgaaggaactggaacaagaggagcaataagcataatgggattgtgagttttgatgaaaaaatgtaaggagaaagaaccaatgtttctttctttttcttttctttttttttttttttggcgtggttttaaatttgatttaacactgtgtcatagttgctgtttcttagaagaatgtctttctggaatttgcttatctttcctttgtgttaataatgcctcgccaagaggttatatggcacactagtgtggggtgggggatttggagtctgatctacgtggaccccgactggttctgacactcactagctatgtgatccctgagaagttacttaacacctctggaacctaccttcttcatccattaaatggggataatatcagtgcttatctcatggggttattatgatgtatcagtgagataatgcaggaacaccttggcacattgcctgacacatagtaggcacttaataagtattagttgtcatcattactattggtgatccatggttatctttcaatattttaatctaggagctttggtttgcagatgactgtatggatgtattsttttaataatgctgcaaagtctttcagaacaggatccatggcttatgccccagggaatataccagttaaattacctttccctgaatctggaatccttcacctctctcctttatttactctgaatgcctaagagaatcttctttttctggcttacttattgcatactaataggagaatataaacagagaaacctagattactctaagtggtgtgggtgattc

SEQ ID NO: 58704 - DNA, 715 bp, Homo sapiens
aaattgaattgaattgaccctaaaatgctgaaccaagagaaaatactgtctttctgtggttcctcaaagcagttctgaaagaaacgttcgtttgggatcaaatgtaacttgccacttgctccttgtccaacaccaggctctcagagttaaagtaaaaattcaggattatcccttctgattcccctccatcagcactagacttaattatttataagtaatttgttggaatgtcagtgtttaagttttaaagctagtgatgattagtgatttgatacataataatgtttaataccaacaaaggagtaaaatgtttaagctattcgaccccctgtttttctttttcyttttcttttttctttttttttttttttgagatggagtcttgctctgtttgcccaggctggagtgcagtggcgcgatctcggctcactgcagcctctgcctcccaggttcaagcgattttcttgcctcagcctcccaagtagttgggactacaggtgcatgccagcacacccggctaatttttttgtatttttagtagagacgtggtttcaccgtgttagcccggatggtcttaatctcctgacctcatgatccacccacctcagcctccaaaataaaatttcaaaaatgtcatgtattgtccatgatctcattacaattcactctcttacttttttattcttagtgttaaaatcggcatgaagctggtagg

SEQ ID NO: 58705 - DNA, 715 bp, Homo sapiens
aaattgaattgaattgaccctaaaatgctgaaccaagagaaaatactgtctttctgtggttcctcaaagcagttctgaaagaaacgttcgtttgggatcaaatgtaacttgccacttgctccttgtccaacaccaggctctcagagttaaagtaaaaattcaggattatcccttctgattcccctccatcagcactagacttaattatttataagtaatttgttggaatgtcagtgtttaagttttaaagctagtgatgattagtgatttgatacataataatgtttaataccaacaaaggagtaaaatgtttaagctattcgaccccctgtttttctttttctytttcttttttctttttttttttttttgagatggagtcttgctctgtttgcccaggctggagtgcagtggcgcgatctcggctcactgcagcctctgcctcccaggttcaagcgattttcttgcctcagcctcccaagtagttgggactacaggtgcatgccagcacacccggctaatttttttgtatttttagtagagacgtggtttcaccgtgttagcccggatggtcttaatctcctgacctcatgatccacccacctcagcctccaaaataaaatttcaaaaatgtcatgtattgtccatgatctcattacaattcactctcttacttttttattcttagtgttaaaatcggcatgaagctggtagg

SEQ ID NO: 58706 - DNA, 715 bp, Homo sapiens
aaattgaattgaattgaccctaaaatgctgaaccaagagaaaatactgtctttctgtggttcctcaaagcagttctgaaagaaacgttcgtttgggatcaaatgtaacttgccacttgctccttgtccaacaccaggctctcagagttaaagtaaaaattcaggattatcccttctgattcccctccatcagcactagacttaattatttataagtaatttgttggaatgtcagtgtttaagttttaaagctagtgatgattagtgatttgatacataataatgtttaataccaacaaaggagtaaaatgtttaagctattcgaccccctgtttttctttttcttyttcttttttctttttttttttttttgagatggagtcttgctctgtttgcccaggctggagtgcagtggcgcgatctcggctcactgcagcctctgcctcccaggttcaagcgattttcttgcctcagcctcccaagtagttgggactacaggtgcatgccagcacacccggctaatttttttgtatttttagtagagacgtggtttcaccgtgttagcccggatggtcttaatctcctgacctcatgatccacccacctcagcctccaaaataaaatttcaaaaatgtcatgtattgtccatgatctcattacaattcactctcttacttttttattcttagtgttaaaatcggcatgaagctggtagg

SEQ ID NO: 58707 - DNA, 645 bp, Homo sapiens
tcccacctcagtctcccaaagggctgggattaagggtacaagccagaacatctggcctgcatgacttatatttgaaactgagttctacttaaaggaaatccaatacgtaaaattccaaacctacaaaacaaattgaaagatcaataactttttaagtggatagttcattttccatactgcaggttttcttcataaaatgagytttcctagtacatttactccaagatttgaattaagcaggagtcttgagcagcctggccacatatagccaaataccaagtgcttcctggttcacaaaatgacctgtttgtcctcatgacaaccttatttgatctttatgacaaccctacgattacgagaggaatagatactctttccagaatgttttttgttcaaagaacaaacattcatttaaaaaataggcttacttttagctgagcattaaataaatgtgttcattgtagagaagcagaaagaaaaaaagaaatcctccataccccagagaaaaccaccatgattttaagcttttttttttcagtctttgtgctgtgcacagacatggtaatactcattagacaattttattttcagacgtttttcacctaacattataacatgaatattttctcaggatattcagctact

SEQ ID NO: 58708 - DNA, 1042 bp, Homo sapiens
aggataaaccagaaggtaaaaatgctggctctctatagggaagagaatgaagtaatttgagtaccttgggaaaggcggactcgactttgtaaatctttttgtacttttcaaaatttgtaggacatgaatgccttccctttcaaataaattaaataaacaaacaaacaaataaaagatagtctcagctaaaagctaaaagtttgagtgattgagtagagaaagagacacagtttcatggtgcaggaaattgagatgataaataaggagcaaagtctggtagaagtgggaggagatacataccagagccctggtggaagcagcccaccaggcttcctcccaccagacagaagcagggacactttcctgcacaacagaagagcatataggtttggatatttgayagtgggaggatgagtgtgttttgtttacttggtattcattctgtgagtgaaagaaggggcatcagctaagagttcaggggaatggaagaggtggggaaaatttaatggtctcaaaggatgggctatcctcccttgggaaacaaaatacatgatatctgggtaaaagtggggtggtcacaaatgcaaaaagaaagtagttaggttagttacttactattttcccagtcacactgagctggctaggtgtatgtccaaggaagagaggtgattggggttgtgaacccaaaatctatgaggtctcaatcaatttagaaagtttattttgacaaggttaaggatgtgcctgtgatactgcctcaggaggtcctgacaatatgtacccaagatgactggggtacagcttgcattacacagggagacatgaagcatcaatcaatatgtgtaagatgtacattggttcagtcaagaaaggtggaacactttgacgtgggggtggcttcaggtcacaagtagataagagacagactttcagtgaaaatacaacttacatgtgaggcgggcgggtagaggaacaaccatttatgctttagtctggttcagtgaatctacatttttacataaacaataaggcagaagaagta

SEQ ID NO: 58709 - DNA, 1042 bp, Homo sapiens
aggataaaccagaaggtaaaaatgctggctctctatagggaagagaatgaagtaatttgagtaccttgggaaaggcggactcgactttgtaaatctttttgtacttttcaaaatttgtaggacatgaatgccttccctttcaaataaattaaataaacaaacaaacaaataaaagatagtctcagctaaaagctaaaagtttgagtgattgagtagagaaagagacacagtttcatggtgcaggaaattgagatgataaataaggagcaaagtctggtagaagtgggaggagatacataccagagccctggtggaagcagcccaccaggcttcctcccaccagacagaagcagggacactttcctgcacaacagaagagcatataggtttggatatttgacagtgggaggatgagtgtgttttgtttacttggtattcattctgtgagtgaaagaaggggcatcagctaagagttcaggggratggaagaggtggggaaaatttaatggtctcaaaggatgggctatcctcccttgggaaacaaaatacatgatatctgggtaaaagtggggtggtcacaaatgcaaaaagaaagtagttaggttagttacttactattttcccagtcacactgagctggctaggtgtatgtccaaggaagagaggtgattggggttgtgaacccaaaatctatgaggtctcaatcaatttagaaagtttattttgacaaggttaaggatgtgcctgtgatactgcctcaggaggtcctgacaatatgtacccaagatgactggggtacagcttgcattacacagggagacatgaagcatcaatcaatatgtgtaagatgtacattggttcagtcaagaaaggtggaacactttgacgtgggggtggcttcaggtcacaagtagataagagacagactttcagtgaaaatacaacttacatgtgaggcgggcgggtagaggaacaaccatttatgctttagtctggttcagtgaatctacatttttacataaacaataaggcagaagaagta

SEQ ID NO: 58710 - DNA, 601 bp, Homo sapiens
ctctacactatctcccagactcttcagcacggcatgagtaagcccccagggtccacaggtaacctgttccataaatgacccattactctctcctttcccttccctgtcgtctttccccactcccctcctgatacttcctggcatcatctcccaaaccacttaaactctaatctatgtctcaagttctgcttcacagggaacccaaataagacaaacaaaggcccatgagaacatctcctggaggtcctgctcacctaagctcacctcaggcccgagacgccatttttatatgacgtaagtacacagtattgtgttcccttaactacaaaactgcgataattttgtaaaagctgccactccaagctcaaagtattgttatgaggatcaaatacttaaatgtgcttcacagattgtaaagtttcatacaaatgcctttttwaataacttattattattaagatcaaataatgatgcgtctccaggagcaaagatgagagagatagcgggggaaaacgagcaaggtgaggtgcttttctgaactgcttagtaagtctccgaacatgaatatctggctggatatggcggcttttatgagatgcct

SEQ ID NO: 58711 - DNA, 606 bp, Homo sapiens
attctgctggatgagcaataggtggcaagagggtcctaaaagtcctaatctactgtaggcaacactctcctcacaccagaggccattttctcattgccccgcctccacactttttaggtcattgctgttgagcatcaccttgcactgatagacgatttgccacaaatgttgaaaaatatctcattgatcaggtttcactaactgtccaggcaagagatcacgaaaggacagaccagttgacatgggcctgattactttgcttacaaaagctttttgtagctgtccttatctgggctttgtgcctgtactctacagtgtcaatttcttagagagattgagcagggctgccaagggcattcttctttgtcaaatgtttcacttattgagtttgtacccagggaaacatttatctcttgtggcagcattgctgccatgcttgcttcagacgcaggttcagtcccartgatccttaaggaggtcttgttagagcagaaggaatggatgttgagtgaatgagagtaattagcttgaagatgtgtgatcagagtgttggcatagtacattgccacaagaagtgagaatcagaggccttccacagtggggcat

SEQ ID NO: 58712 - DNA, 657 bp, Homo sapiens
ggatcccatttcagccctaaaaattctagaacttaggtgttatagaactttgtcattggaagaggttatatctggttcaggccaaaggaaaagcttcatggaaagggtaagattcattgtcattatcatttaaggctgtctaactcttctggtggtaatgtctccaattctgtttatttataatttttagtgccaggctttttagggttccttcagactcctctgcatttcttcattgtttaatgctacctccacaattgttcccaaatctgatatgacatgacaggctgagtaaggactgctgtaaaataaatccccaaacatctcctctagtgctcacagttttcttagtggtgatcaatatctccttttgtcccccaaaccaaagctccaaaacctaaatttacattcccttcccagtgaatatattgaaaggccacagctaagtttttttatcgagcattttagagttttggcacagtaaattaaaaytgaacttagaacaattctgaaagaatgactgttagccaggaagtcatattatcttctctcactccacaacccccactcatattcccaagtccctaagaaataagtcacctattgatagtgttaaaaaattagcaatcaacccccaatcatgagtcatgggagtat

SEQ ID NO: 58713 - DNA, 981 bp, Homo sapiens
tgtttgctgcatgtttcaatgaattgctggagtgaatgactggtgaggaacaaagaaagtgaggctttataaaatgggctgttggccaggtacagtggctcatacctgtaatcccagcactttgggaggctgaggcaggcagatcacctgaggtcaggagtttgagaccagcctggtcaacatggtgaagccccatctctactaaaaatacaaaaattagctgggcgtggtggtaccctcctgtaatcccaactacttgggaggctgaggcaggagaacagcttgaacccaggaggcagacattgcagtgagccaagattgtgccactgcactycagcctgggagacagagcaagactctgtctcaaacaaacaaacaaaaacaaacaaaaaaaggctgttacaggaagaaaaggatgtggtggcagcataagtggtcatagacaggtgaatatttgttttagggtgaagtagacgtggttgcatttatagccctggggaggaatccagtagaaaagtagatatcatggataaaagctagaggtgtaattcatggagcaagtcttagaataggttagattaagcaaaaagtggaaagagataaggatggctaaaatgatgggtaagtttgaataggaaaaggaaggttttaaggaagttctgcctgatcgccttttttctgtgaggttggaggtaaggtggtctattgagaatgagagtggcagcatgaagggtacatggctttgagtttcaaggagatattgctgtgaattaaaaggtgaactgactgggtgacctgaaggttgctaagcatgactatgaactcaatgaagttcaagaaccgtacatttccaacagagcccatcagcatggttatacggttgtctctgacagtaatctgaggattagcatggtgggtggaatagagggtgaggaggaccagagaatagagagtatggctgacatgattaacaataccagt

SEQ ID NO: 58714 - DNA, 699 bp, Homo sapiens
gtgtgaacaataatcccacattctcagacaactgtgagctcttccagtgcatcagagaataaataaatgtagctgaaatcaaagcttctggctctgatgacatggatttttatgtccttgttgctctttcttggatcagacccaagccaaactccctaaatccctaatattctgaccagaaaagatgtggtgcctttcaaaaatgactatgaggtataaaactcacattcttccccaaaacaggttaatcaaaaagcttaaacttacttgccttagaaggctgttccctcagctcttcccaaattttctttaccagtttccttcacttgctttcatctgtgtttttgtttttgrggaaaaaaaaaaaaaaaaaaaaaacattgtgagagaagctggtatagtgaccaaaagtcctgctttcatttcttctgaatgttgaaatgatacacagataccctggggtaaggtgggaaatcctgttccccatgggatagagccataaactcatggaatgtcattgtcatggacaaattcagatattatttcaataaactcctttgagcaacctaatctatgagtttattaaaagaccctcaggtttatttggtggactataaataatctatatgctctttcaaacaaaaacattcaaatggcacagcaaaggcattaagttttcccatcaagtacattaggagt

SEQ ID NO: 58715 - DNA, 699 bp, Homo sapiens
gtgtgaacaataatcccacattctcagacaactgtgagctcttccagtgcatcagagaataaataaatgtagctgaaatcaaagcttctggctctgatgacatggatttttatgtccttgttgctctttcttggatcagacccaagccaaactccctaaatccctaatattctgaccagaaaagatgtggtgcctttcaaaaatgactatgaggtataaaactcacattcttccccaaaacaggttaatcaaaaagcttaaacttacttgccttagaaggctgttccctcagctcttcccaaattttctttaccagtttccttcacttgctttcatctgtgtttttgtttttgggraaaaaaaaaaaaaaaaaaaaaacattgtgagagaagctggtatagtgaccaaaagtcctgctttcatttcttctgaatgttgaaatgatacacagataccctggggtaaggtgggaaatcctgttccccatgggatagagccataaactcatggaatgtcattgtcatggacaaattcagatattatttcaataaactcctttgagcaacctaatctatgagtttattaaaagaccctcaggtttatttggtggactataaataatctatatgctctttcaaacaaaaacattcaaatggcacagcaaaggcattaagttttcccatcaagtacattaggagt

SEQ ID NO: 58716 - DNA, 828 bp, Homo sapiens
aaaataaaaacttagttttgatttacagtattgcagatatagttatttctttaagatatggaggtgacagtaagggggcttccattcttttttttttttttaaatagggtcttgctcagttgcccaggctggggtgcagtggtacagtctcagctgactacagcctccgcctcctgggctcaggtgatactcccacctcagttgcaagtagctggaactacaggtgsgtgcctccgtgcccggctaatttttgtattttttgtagaggctgggtttggccatgttgcacaacctagtcttgaactcctgagctcaagtgatccgtccacctcggcctcctgaagtgtataaacattgcctattgctctgcaaatagcggacacacagcatgatttgtactttttagtatttagtttattcattcattcagtagataccaagtgacattactcctactctaaaaatagactaataaaacacattctatactcttcagagattccagggtggaaaacagacagttttcctctagtaagagaagtttactcctctgaaaaaggatagaagtgtgagctagatcctatggaaatacagagcagaaagggactaagttttcctacaagacctagagaaatcttcacacaggagactctgaaagtatggctaagagtttgctgagcaaattaaggtaaagaattctaggggacagctgtgtaaaggcatgcatagtgaagtgcaggtgcatggaataaagtcaagtttggggaaacagggacatctgttaaacattttgagatgaaattggggaaaagaaagtaagctcctaaa

SEQ ID NO: 58717 - DNA, 1710 bp, Homo sapiens
cgttacccctttaaatcagggaacccacttagtggtggcatttcccatggccatacctaggggttgtgacagagaccttagggactgtaaaacctaaaatgtttatctgtggccctttataaataaagtttgccaacccatgtctaggggaacagggacacactgcaaaggggagcaaccacagagcttttcaaggatgaaggtgatcccctcactaatgcatttctttttttgttgttgtttgtttttttttttgtttttttgagacagagtctcactctgtcacccaggctggagtacagtggcacgatcttggctaactgcaacctctgcctcctgggttcaagcaattctcatgcctcagcctcccaagtagctgggattacagttgtgcaccaccacacctggctaatttttgtatttttagtacagtcggggtttcaccatgttggccaggctggtcttgaactcctggcctcaagtgatccacctggctcggcctcccaaagtactgggattacaggtgtgaaccaccatgcccacctcactaatggatttctcaatgcctgagtgaaaggattatcttccgagcttttttktgcaacataggttacacatgaaaaatccattccaacatttctatctccctaagtttttgaattgcctcttctacatcttgctagggaaactttggcatctccacctcattaaacatagtggactcttttttaaagaaagttttatttatttatttagagacaggctctcactcggtcactcaggctggagtgcagtggcgtgatcatagctcactgtaatttcgaactcctaggctcaagtagtcctccttcctcagcctcctgagtagctgggattacaggcatgtgacactgtgcctggttaattttttattttttgtggagatggggtctctgtgtgttgctcattctaggcttgaactcctgggctcaagcctcctaccttggcccccctgctgagattacaggtgtgaactgcacccagtccttttgttgttgttttgtgtttttttttgtaagtttttaaagtcctgtttattgaagcatgaatttacattcagtaaagttcaccctaagatttgacaaatgcatagtcataccatactcaagatgcagaaccattgtaaaatcactctatcaattccctcctgcccctttgcaatcaacccctttttgatcccaaggaactaattgacctgtttttctgtcaaaagtgtcaaatttaatcactaaaatgacctacagtaccatggaaaaatatgtaagcatataaaatacacaaaccaattttttttttgtattttatttattttttgagatggagtcttgctctgtcactcaggctagagtgtaatggtgcgatctcggctcactacaacctctgcctccaaagttcaagcaatttttctgcctcagcctcccgagtagttgggactacaggctcatgccaccacacccgaccaatttttgtattttttagtagagacagagtttcaccatattggccaggctggtctcgaactcctgatctcgcgatctgaccaattttttatttttatttttatttttattttttttttaatttatttatttattttttccatttaaccctgagtggacacagcacatgtttcagagagcacagggttgggggtaaggtcatagatcaaca

SEQ ID NO: 58718 - DNA, 728 bp, Homo sapiens
gatcctagaatgaaatgttgatcttttggtcttaacaatagaggatgaagctcacaggtctattgagctggtgggcaatgacagtccagatgaacgatctgactccaatagtctactactgcagatgtgtctgatgccctcttcaattcagcatttagcttttccatgcaacttaatgaggggaaaagtaaatctgagtcaatgatacatctgctcataaacttccatttgttaaatatgaagcaaaattctgacagccataaaacagggtgaacagttgtgtgtttgtattaaaatatcattgagataagcaataaccagcaatccgagcaaaggaacatctgcgatactatcgtgctatttctggctgagtcagctcatgctgggagaaaacataggaaaatgcagttatcacttgtggtgttcttaattgagttaagaaagggctctaggctttttttttttttcctttttatgttcccagggtaggcyctagagatgcaacagttgtgatttaaaaataaatttgtagcggatgctgaaagttcaccacaaaccacacgctgtcaccacctttaaaataaaatcctgtcctgataattcctagaaaaaaatataagcactcaaagccttataatcaatgcatctgcttatactgtttgcatatttgaaaggactgttttgtttgacatctggaaggaaggtcgtatacaaaaacattcgataat

SEQ ID NO: 58719 - DNA, 706 bp, Homo sapiens
ttcattgcctctcctagcttcaggtggttgccagcaatcctgagtattcattggtttatagacacctcactcaatctattcctccattgtcatgtggcactctcccagggcgtctgtgtgtccaaatcttcctcatcttataaagacactagtggttggatttagggcacaccctaatcaagtatcatcttaaattgactacatcggagaagactacttccaaataaggtcacatttacagataccaagggtcaggattttaaaayatgttttgaaggagacaccattccacccacaacaggaggtaatgaacaacccgattaggtaatgtctgataggaagatcctggctttcagaaggccctcagtaatgataggtaacacaggtaacatatcttgctcactgtttacatataaggccatagatatgtcttgctcaccaaagatcacaaacccattatattggaaactaaaattctggtcaaataactttccacagaaggaaggctctttccaaacactaatgtctccccaaatacgttattcataggccttaatgctcctaagaaattggaaggaattaagtggataatctttacctttaatgagtatgtattaatttgttggaggaactattacaaacacaataaactcatgattttacagataacacttatgatgtgcttaatagagtttaaaatttttta

SEQ ID NO: 58720 - DNA, 706 bp, Homo sapiens
ttcattgcctctcctagcttcaggtggttgccagcaatcctgagtattcattggtttatagacacctcactcaatctattcctccattgtcatgtggcactctcccagggcgtctgtgtgtccaaatcttcctcatcttataaagacactagtggttggatttagggcacaccctaatcaagtatcatcttaaattgactacatcggagaagactacttccaaataaggtcacatttacagataccaagggtcaggattttaaaacrtgttttgaaggagacaccattccacccacaacaggaggtaatgaacaacccgattaggtaatgtctgataggaagatcctggctttcagaaggccctcagtaatgataggtaacacaggtaacatatcttgctcactgtttacatataaggccatagatatgtcttgctcaccaaagatcacaaacccattatattggaaactaaaattctggtcaaataactttccacagaaggaaggctctttccaaacactaatgtctccccaaatacgttattcataggccttaatgctcctaagaaattggaaggaattaagtggataatctttacctttaatgagtatgtattaatttgttggaggaactattacaaacacaataaactcatgattttacagataacacttatgatgtgcttaatagagtttaaaatttttta

SEQ ID NO: 58721 - DNA, 507 bp, Homo sapiens
ctgaacttgcctcagtttgtctataatcagagcccattaactagcaggctacagatttgtggaccttttcttgtgcttctgtttgcttgtttccagagatttgaacttggacactttttgattcagcgtggtctttccagtacccataagccccacaactctttcctttttgtaaatctgttcacttcacccatttcttacctttctgtcccagggctcctagaatatagcaactatttctgacctacaatagcttaaaactgctgctactcctgtttcacatgccacaagtggggttgattcagaaagctttccatggttattggtgggatgaaatcagggcttcatcactttcttggctcattcttaggcatattaagttaataagtatttattaattatgtcctgagtgcctcaaatcagaaggtatgttgaatcatatagaaaacagaaaactcggccgggtgcagtagytcaccctgtaatcccagtgctttgggaggtcaa

SEQ ID NO: 58722 - DNA, 1165 bp, Homo sapiens
atcttttgaagcaggtatcagtgaggcaacttaggtgaagttacatagaatccaacagctagtaagaggtagagctgaaatagactcaagcagtttgactccagagttcattatctcattcctgctgttagattgcctctctgactacattaaaaaataaataaaaggaggaagacccaaagagatatagattaaaatatatatattgctattttcctgtgtttttctactatttctggaaattgtctagttcacataattaaaaactcaagccagacaaaagagaataatcagctatattaacagtaagccaaagacttctattcttcagaaatttacttaaaggcaaatcagatataaacctaggaagtccagaaaagttaataggacttaagcccacaccaagaaaataagatatatgtatgattaycttttttttgtagttaaccactgacactatgtaggatcctatagaaaaagaaaggcattcctgtttttaattttttgtttcatgtagtaaaaaatttactaccacaaaagtaaaatcaaccacaattaacaagcagtgaatggaagttgaatatttcaagaaacaaaagcacaatactttagattggttaagtggattaagagcaccattagaggactgacatgagaaatgtgatattttgaggaaaaaataataaaatatgaaaaatacaatgaaaaatcataaaacataaaaaacatatattaaacaaaaaaaattaaacaaaaaaaaccatatattaaattacaattttttaaaaaaaacaacagcaccaaataggcatgtttggaaaagtgttagaagtatgtacacttaaatgtgaatactggtaacatttgtgtgataggttatagatgacttttaaaatttttagtttagatcttatctaccttttaacatatgaatacgttattttatacgtaggaagaaattataaaacatatcaaagtcctttagtcctaaaagtacatatgaaagctttgctagccttagtcaacattataattatgccctcaatattcattctccttttcccattattatcctaattctcctttaagtgccaccctcccccactgcatgcatctcttttgggggatgctctcctgagttagggatgtggcatgtactgtagtt

SEQ ID NO: 58723 - DNA, 1165 bp, Homo sapiens
atcttttgaagcaggtatcagtgaggcaacttaggtgaagttacatagaatccaacagctagtaagaggtagagctgaaatagactcaagcagtttgactccagagttcattatctcattcctgctgttagattgcctctctgactacattaaaaaataaataaaaggaggaagacccaaagagatatagattaaaatatatatattgctattttcctgtgtttttctactatttctggaaattgtctagttcacataattaaaaactcaagccagacaaaagagaataatcagctatattaacagtaagccaaagacttctattcttcagaaatttacttaaaggcaaatcagatataaacctaggaagtccagaaaagttaataggacttaagcccacaccaagaaaataagatatatgtatgattaccttttttttgtagttaaccactgacactatgtaggatcctatagaaaaagaaaggcattcctgtttttaattttttgtttcatgtagtaaaaaatttactaccacaaaagtaaaatcaaccacaattaacaagcagtgaatggawgttgaatatttcaagaaacaaaagcacaatactttagattggttaagtggattaagagcaccattagaggactgacatgagaaatgtgatattttgaggaaaaaataataaaatatgaaaaatacaatgaaaaatcataaaacataaaaaacatatattaaacaaaaaaaattaaacaaaaaaaaccatatattaaattacaattttttaaaaaaaacaacagcaccaaataggcatgtttggaaaagtgttagaagtatgtacacttaaatgtgaatactggtaacatttgtgtgataggttatagatgacttttaaaatttttagtttagatcttatctaccttttaacatatgaatacgttattttatacgtaggaagaaattataaaacatatcaaagtcctttagtcctaaaagtacatatgaaagctttgctagccttagtcaacattataattatgccctcaatattcattctccttttcccattattatcctaattctcctttaagtgccaccctcccccactgcatgcatctcttttgggggatgctctcctgagttagggatgtggcatgtactgtagtt

SEQ ID NO: 58724 - DNA, 1165 bp, Homo sapiens
atcttttgaagcaggtatcagtgaggcaacttaggtgaagttacatagaatccaacagctagtaagaggtagagctgaaatagactcaagcagtttgactccagagttcattatctcattcctgctgttagattgcctctctgactacattaaaaaataaataaaaggaggaagacccaaagagatatagattaaaatatatatattgctattttcctgtgtttttctactatttctggaaattgtctagttcacataattaaaaactcaagccagacaaaagagaataatcagctatattaacagtaagccaaagacttctattcttcagaaatttacttaaaggcaaatcagatataaacctaggaagtccagaaaagttaataggacttaagcccacaccaagaaaataagatatatgtatgattaccttttttttgtagttaaccactgacactatgtaggatcctatagaaaaagaaaggcattcctgtttttaattttttgtttcatgtagtaaaaaatttactaccacaaaagtaaaatcaaccacaattaacaagcagtgaatggaagttgaatatttcaagaaacaaaagyacaatactttagattggttaagtggattaagagcaccattagaggactgacatgagaaatgtgatattttgaggaaaaaataataaaatatgaaaaatacaatgaaaaatcataaaacataaaaaacatatattaaacaaaaaaaattaaacaaaaaaaaccatatattaaattacaattttttaaaaaaaacaacagcaccaaataggcatgtttggaaaagtgttagaagtatgtacacttaaatgtgaatactggtaacatttgtgtgataggttatagatgacttttaaaatttttagtttagatcttatctaccttttaacatatgaatacgttattttatacgtaggaagaaattataaaacatatcaaagtcctttagtcctaaaagtacatatgaaagctttgctagccttagtcaacattataattatgccctcaatattcattctccttttcccattattatcctaattctcctttaagtgccaccctcccccactgcatgcatctcttttgggggatgctctcctgagttagggatgtggcatgtactgtagtt

SEQ ID NO: 58725 - DNA, 675 bp, Homo sapiens
tcttttttttttttttgagatcgagtttctcatcactcaggctggagtgcaatggtgatctcggctcactgcaacctctgcctctggggttcaagcaattctcctgtttcagcctccygagtagttggaattacaggcacctgccaccatacccagataattttcatatttttagtagagacagggtttcaccatgttttccaggcttgtcttgaactcctgacctcaggccatctgcccgcctcggcctcccaaagtgctgggattctaggcgtgagccaccgtgcctggtcaaagctacttatttctgtaaaggcagctcattatgcatgccatcctgatggtgaattagtattttatttttgattcatttattattattcatttagtcattcaagcattttattgtctactatatgccaggcagtatgttagactctgaagatgcagcagtgaccaatatgcttgtcctccttgccctcatggtgattgttataaggagataaagcaggcattaaacaaataattccagaaatagctattaacacttgtatttaagattctagaggtgctgtaacaagggatataaggggacatagcacaatgacctgatcttgtctggagtactagagaaggctttgggaagaaagtttctccatcctattcaaggatcca

SEQ ID NO: 58726 - DNA, 1027 bp, Homo sapiens
ctggccatgcataaacatataaagcaaaccatgaaagttttccttcaacttttcctgctccaattctgttccccagaggtaatctctgtcattattttggggtacatatttccaagcccccttttctgtgcatgtataccacatatttagatattacataggtatcttatttttaacataaatggcatcatattatatatgctattctgtaacctgcttttttttcaccaataatgtatcttggagatctttatttcartgtgtataggtccacttcattcttttgaacagacttcatagaatgaatgtaccacgattcgttcaagcgttcttctaaatgataagtatttaagctggttccagtttttcactattataatgttgctatgaatgcccgtaggcatcccatttatatccacctgtgcaagtgtttccaaagataagagtccaagaaaaaggactgctgagtcaaaagccctgtccactttttatttttacaaatactgctaaattaacttttatgaaagctccatccatttatgctctcaccaactgtatattcaaaggccataataaccaatagactactatcaatattttaagcatttttttgccaatcttgttttaatttacaatttcccaacttctagagagcttgagatctcttcaaatatttactggacttttgcattcttttctgtgcaaatctgtttaaattctcttcaatattttgaatacttcatttgtctattccttattgattcatgagaacactatatatatcctggatattaatgctgtcgtttgtcttttgaatagcttacataaatttttctcagttttatttttttaactccatgacatattttgttatatagaaatctttaatctttatatatttcttttttcagtttttgcttagaacaagattatttttcaatgatagttcccaactttcgattctataatattagaaggtaagcttatatatactgatgtatatattattttggtgtcaaaattgttt

SEQ ID NO: 58727 - DNA, 1027 bp, Homo sapiens
ctggccatgcataaacatataaagcaaaccatgaaagttttccttcaacttttcctgctccaattctgttccccagaggtaatctctgtcattattttggggtacatatttccaagcccccttttctgtgcatgtataccacatatttagatattacataggtatcttatttttaacataaatggcatcatattatatatgctattctgtaacctgcttttttttcaccaataatgtatcttggagatctttatttcagtgtgtataggtccacttcattcttttgaacagacttcatagaatgaatgtaccacgattcgttcaagcgttcttctaaatgataagtatttaagctggttccagtttttcactattataatgttgctatgaatgcccgtaggcatcccatttatatccacctgtgcaagtgtttccaaagataagagtccaagaaaaaggactgctgagtcaaaagccctgtccactttttatttttacaaatactgctaaattaacttttatgaaagctccatccatttatgctctcaccaactgtatattcaaaggccataataaccaatagactactatcaatattttaagcatttttttgccaatcttgttttaatttacaatttcccaacttctagagagcttgagatctcttcaaatatttactggacttttgcattcttttctgtgcaaatctgtttaaattctcttcaatattttgaatacttcatttgtctattccttattgattcatgagaacactatatatatcctggatattaatgctgtcgtttgtcttttgaatagcttacataaatttttctcagttttatttttttaactccatgacatattttgttatatagaaatctttaatctttatatatttcttttttcagtttttgcttagaacaagattatttttcaatgatagttsccaactttcgattctataatattagaaggtaagcttatatatactgatgtatatattattttggtgtcaaaattgttt

SEQ ID NO: 58728 - DNA, 1027 bp, Homo sapiens
ctggccatgcataaacatataaagcaaaccatgaaagttttccttcaacttttcctgctccaattctgttccccagaggtaatctctgtcattattttggggtacatatttccaagcccccttttctgtgcatgtataccacatatttagatattacataggtatcttatttttaacataaatggcatcatattatatatgctattctgtaacctgcttttttttcaccaataatgtatcttggagatctttatttcagtgtgtataggtccacttcattcttttgaacagacttcatagaatgaatgtaccacgattcgttcaagcgttcttctaaatgataagtatttaagctggttccagtttttcactattataatgttgctatgaatgcccgtaggcatcccatttatatccacctgtgcaagtgtttccaaagataagagtccaagaaaaaggactgctgagtcaaaagccctgtccactttttatttttacaaatactgctaaattaacttttatgaaagctccatccatttatgctctcaccaactgtatattcaaaggccataataaccaatagactactatcaatattttaagcatttttttgccaatcttgttttaatttacaatttcccaacttctagagagcttgagatctcttcaaatatttactggacttttgcattcttttctgtgcaaatctgtttaaattctcttcaatattttgaatacttcatttgtctattccttattgattcatgagaacactatatatatcctggatattaatgctgtcgtttgtcttttgaatagcttacataaatttttctcagttttatttttttaactccatgacatattttgttatatagaaatctttaatctttatatatttcttttttcagtttttgcttagaacaagattatttttcaatgatagttcccaactttygattctataatattagaaggtaagcttatatatactgatgtatatattattttggtgtcaaaattgttt

SEQ ID NO: 58729 - DNA, 1059 bp, Homo sapiens
atcgtcacagaggatttcaaatgcttttttttttctaaccagaatacttgaaagaaactgagatttccttgttatgagttcaactgttcattttatatgccctataattgaccattctccagaagtcagcataggcaacagagatgtaaggcaactgcaaacacacacacacacacacacacacacacacacacacacacacacacacacacacacagctttggcacagtgaaaaattaaaatgcaatgccaggcttgggactattttgaagcctcaggctaggaaagcaataccctcacctttctcagctgcctactatgtacctaaccttccaattatttatggctgagatgcttaagatgtactggagaaacagccatggctgagagatacacaaagctgaaatattatagagagttataacttcatgaatgaaaaacctataaaaatcacttaagggtcctaatctttcagttaatctcacctcagtgccactcaagggtttaaaggagtttcactgattggtttttaaaggacaacgataaaaatgctttgaaataactaattataatttcaggtatctatgtaaaggtccagacacaaatatttgaaaatggactgytcctagaatcagggattgacacagatctttaaaactttctagcccaaacatccatgtgacatttgtatccctttggccatattgctttcaaggcttcaatgctctaggaaagaggatcttactgcagtactgctagatttaggtggagatcaaaattaccaatgtttgaaagtgatatttttacattaacttgatcaagagttagaacttggacttattactcagacagtctgatccttcattgacaagctgtgctgagaaaccattctgtgggctaaagaggatatggactcccaggattgctctggcattgcggttgagaagatatactggaataacctcttttgaaaacagtttagcattacctcctaaagttgacatctacaacaatatgactgccaggtatattaccaagagaaattctcatatgtgtaca

SEQ ID NO: 58730 - DNA, 764 bp, Homo sapiens
aataacagagcacaactcaatgaatcgaattgcagaaggaagaacaggtgggctttcccaagatgtcataatagatggaaggagaacaagagagaatgaacctgctctataaaggccaaagacaggaaatgagaatcattctggggaaaagatacaacctttatccaggaggaaaagcatgggaatatgataataatttttaaaaaagacaattctccaagaatatctcctggaatagatccaacggaaagcttgacaccagataaagaagggaggtcaggttcattgagggcctattacatttggggtatgtttgagggtgaaaccccccatagagtgttgtgaagtagaagctatcgcctcccactttgcagatggggaaataaagttctaagcaattaaataattactaaagggcagctactccttggcccagcaaatcactggaaatgctgacatggaagaacagcaggaagggttgtcctaagaagaattactttccttcttcagactagtagtgtctctatgtctgtggggaacgtgcacaagctcacactcaagacacagacttctcrtcataaaaaaatttcacaaattacctctaagttgctctaaaacgggagtgcttatcatttttaggcatgtcagcactttttagaatctgatcaaagctatgtatgactcctttccctagaaaaatgtgtgcacacacataaatgcatacactttacttgaaatttctagaaggtttgtacaccctcagg

SEQ ID NO: 58731 - DNA, 929 bp, Homo sapiens
tgcataattcacaaaaggcccagaaagtgagtgttcttggtagaaaaaccagtctcctcattttcactgagatttactggtgtcaaactcattgtatgacatctttctatagatctctttcctttttctctctccctcttttactatatatgctttttcttytttcttaacattttgatatcttcccttaaatgagagggtttttttatgtttaatgatatttattatatagttttaaattccttattacaaaatttaacagatgagtgcaatagttacactaaatttagcctctttttatttaatgtagccttgcaggatttttctacaggttatttatgctttatataaaactatctcttcatctggcacaaatacatgtaccttaaataaaatccctttcttcttccatacattgaggagaacacaaattgtaagccctctcttgcgggcattttggcaatatgtggcaaaattgaaagcacatgcaccatttaactcaagtactcctattccagaaaggtatccaacatgcgtgttcatgtgttcaaaggtgttcattgcagcactgtttatattgaaaaaaaacgtctgtaaagagtttaaatatcctttaatatggtgctggttaaataaagtatggtacatatatgcagtgagagatcatgtagttatttaaaagaatgagacagctctgcagctcagatcaatcagctggagtccaggagagagatcatgtagcataagcttagcttccagggacccaagccaggggtggtatgtgtgtgtgtgtgtgtgtgtgtgtgtgtgtgtgtgtgtgtgtgtgtttataattttagtctacttcatcctttagctagataggaatagaaattgggcaactcacttgtcaaaacttgccaatctttagaaggtcagattaatatcaa

SEQ ID NO: 58732 - DNA, 929 bp, Homo sapiens
tgcataattcacaaaaggcccagaaagtgagtgttcttggtagaaaaaccagtctcctcattttcactgagatttactggtgtcaaactcattgtatgacatctttctatagatctctttcctttttctctctccctcttttactatatatgctttttcttctttcttaacattttgatatcytcccttaaatgagagggtttttttatgtttaatgatatttattatatagttttaaattccttattacaaaatttaacagatgagtgcaatagttacactaaatttagcctctttttatttaatgtagccttgcaggatttttctacaggttatttatgctttatataaaactatctcttcatctggcacaaatacatgtaccttaaataaaatccctttcttcttccatacattgaggagaacacaaattgtaagccctctcttgcgggcattttggcaatatgtggcaaaattgaaagcacatgcaccatttaactcaagtactcctattccagaaaggtatccaacatgcgtgttcatgtgttcaaaggtgttcattgcagcactgtttatattgaaaaaaaacgtctgtaaagagtttaaatatcctttaatatggtgctggttaaataaagtatggtacatatatgcagtgagagatcatgtagttatttaaaagaatgagacagctctgcagctcagatcaatcagctggagtccaggagagagatcatgtagcataagcttagcttccagggacccaagccaggggtggtatgtgtgtgtgtgtgtgtgtgtgtgtgtgtgtgtgtgtgtgtgtgtgtttataattttagtctacttcatcctttagctagataggaatagaaattgggcaactcacttgtcaaaacttgccaatctttagaaggtcagattaatatcaa

SEQ ID NO: 58733 - DNA, 1905 bp, Homo sapiens
tgaatttcatagactctaaatgagatgagaattctctaagtggaaatttagaacccacgattcattcagatcacagtgatcagaaaagggttcctgagtacaagttaccacactttctccttcctggtgctgtgtctcccacccaaactgatgagtcaagattctcttgtacatgtcagagttccctgaagatctgatgtgagtacattccctgtccacatgtgtacactcacacttgcacaggcactcacacagacaccatgagcatttcaggcattcttctgggtaatttaaagttcaggagcaaaagtgaaaaggtgacaacttgctatgatccagccatctctaggaatgtactgggatgtcatttaacctgaatggcactttgtttttatttttttcagacagattccaccctgaagcctgttctgttttgtgcaccttcccatagtaggagttctaaaagcctaaaagaaaggaattatatttgcatcttgtccctatagcacactttactgtttcttgcacatagatgatgttcactaagtgtttatttgcacgagtgaggaaaaggaagtagatacaaaagttctcagatgcattgagtttcacttcttatagatccgtaatgccttctgaatacacgttcttgtctttgcatgccatctttaccaatataatagacagaaaatagatacactttggatgagacaggaaaaagaaaggactaacacatatgagttggtgatgatagtcttcatcagggggctggccaaaagttagttccttgaagatacttactgctgactgtcctcggaaatatcatctctaggccgggcgcggcagggctcacgcctgtaatcccagcactttgggaggccaaggcgggtgcatcactaggtcaggagatcgagaccaacctggctaacacggtgaaaccccgtctctactaaaaatacaaaaaattagccgggagtggtggcgggcgcctgtagtcccagctacttgggaggctgaggcaggagaatggcgtgaacccgggaggcggagcttgcagtgagccgagatcgcgccactgcactccagcctgggcgacaaagacagactccgtctctaaaaaaaaaaaaaaaaaaaaaaaaaatcatctctaggagtggaagagaggggatgggtgttgcttactgaagttgagamatcaagggtgatattaatatggtttgcattcaatgagataaatggcaaaagaaatcttgagagatacgagcaaacttccagagaccaggagatccatttgggggaacaatgcaatagggatccttacacatattcttcattatatttaaaagtatacccccattactaagtgaaagtttgacatctttatttaacgtacattcaaatgatatgaggatttgaattttctctctatcttgctctctttctctcaagtactacactttagtgtttgttttctattactaggtaagcttctcttaaaagtattttgtattccaagaaaaaagagatatattctatgtttttcactaaatatcctttagcaagaccaaatcgatgtatgcttttcagctttgactgcccattcatatttttactgctgaaaagattttggttggagtctttgaattcttatctccaggctgtttactgaatttatagtcagttttctcaggattagactatctttcactttcaaagataggtgctgttaaccagagtttccacaaaatgtcgctctaaggtcgttggttgcaccagcagcaaccaaaatcaatgtacaatttgcttttaaatttttatcttccattaggtaatgaatgtgctcacctgaaaagacatggaaaagcacaacactatgtagaaaagagcaaatcctccttctctgcc

SEQ ID NO: 58734 - DNA, 1905 bp, Homo sapiens
tgaatttcatagactctaaatgagatgagaattctctaagtggaaatttagaacccacgattcattcagatcacagtgatcagaaaagggttcctgagtacaagttaccacactttctccttcctggtgctgtgtctcccacccaaactgatgagtcaagattctcttgtacatgtcagagttccctgaagatctgatgtgagtacattccctgtccacatgtgtacactcacacttgcacaggcactcacacagacaccatgagcatttcaggcattcttctgggtaatttaaagttcaggagcaaaagtgaaaaggtgacaacttgctatgatccagccatctctaggaatgtactgggatgtcatttaacctgaatggcactttgtttttatttttttcagacagattccaccctgaagcctgttctgttttgtgcaccttcccatagtaggagttctaaaagcctaaaagaaaggaattatatttgcatcttgtccctatagcacactttactgtttcttgcacatagatgatgttcactaagtgtttatttgcacgagtgaggaaaaggaagtagatacaaaagttctcagatgcattgagtttcacttcttatagatccgtaatgccttctgaatacacgttcttgtctttgcatgccatctttaccaatataatagacagaaaatagatacactttggatgagacaggaaaaagaaaggactaacacatatgagttggtgatgatagtcttcatcagggggctggccaaaagttagttccttgaagatacttactgctgactgtcctcggaaatatcatctctaggccgggcgcggcagggctcacgcctgtaatcccagcactttgggaggccaaggcgggtgcatcactaggtcaggagatcgagaccaacctggctaacacggtgaaaccccgtctctactaaaaatacaaaaaattagccgggagtggtggcgggcgcctgtagtcccagctacttgggaggctgaggcaggagaatggcgtgaacccgggaggcggagcttgcagtgagccgagatcgcgccactgcactccagcctgggcgacaaagacagactccgtctctaaaaaaaaaaaaaaaaaaaaaaaaaatcatctctaggagtggaagagaggggatgggtgttgcttactgaagttgagacatcaagggtgatattaatatggtttgcattcaatgagataaatggcaaaagaaatcttgagagatacgagcaaacttccagagaccaggagatccatttgggggaacaatgcaatagggatccttacacatattcttcattatatttaaaagtatacccccattactaagtgaaagtttgacatctttatttaacgtacattcaaatgatatgaggatttgaattttctctctatcttgctctctttctctcaagtactacactttagtgtttgttttctattactaggtaagcttctcttaaaagtattttgtattccaagaaaaaagagatatattctatgtttttcactaaatatcctttagcaagaccaaatcgatgtakgcttttcagctttgactgcccattcatatttttactgctgaaaagattttggttggagtctttgaattcttatctccaggctgtttactgaatttatagtcagttttctcaggattagactatctttcactttcaaagataggtgctgttaaccagagtttccacaaaatgtcgctctaaggtcgttggttgcaccagcagcaaccaaaatcaatgtacaatttgcttttaaatttttatcttccattaggtaatgaatgtgctcacctgaaaagacatggaaaagcacaacactatgtagaaaagagcaaatcctccttctctgcc

SEQ ID NO: 58735 - DNA, 837 bp, Homo sapiens
ccgcatcccccaagtgatgggaacaagggcccgcccaggcagccgctgtcgccgcaccgccccctcgctcgctctctgcgcgcggagtcacccagtcacactcccggcaccccgagcccttcctccggagctgctgcttctactttggctgctatcgccgccgccgcgggtggcccgctgctgactgggctcgccgggagacggagaagcactttttggccctccctcagcagctctcacaccccaactttgccgccgccgccgcgcctgccctcgcagcggcgctcggccgcacattgtgrgggcgcacgccgggaggctccgcaagaccgtggaggcaggaaacggcactactgcgcttctgcctcggctctttgttgttcgctttggatggttcttgaaagtgtctgagcctcctcggaaatcctggggccggagaagacaaaccttggaattcttcctctgcaaaagtctctgagatactgacaagcgtccggaaaggtcgacgagtaattgccctgaaaactcttggctaattgacccacgttgcttatattaagcctttgtgtgtggtgtgtggcttcatacatttggggaccctatttccactccctcctcttggcatgagactgtatacaggatccacccgaggacaatgattgcggagcccgctcacttttacctgtttggattaatatgtctctgttcaggtaaccccgcgtcttctttcttcacccttgatcctccctgttcgccccctctccactttgcacgatcaaacccagaagtgtattttggttacccctccctcctaaggccggaggggctcgattcctg

SEQ ID NO: 58736 - DNA, 1299 bp, Homo sapiens
gcattttcatctacttacagtgctgtcgtttgtgacacaaggaacaagagtatgtcagggactcagaagatctgtcagaactgggtactaacccacagctgtgggcagtggcccatccaccagtgggcattcaaatatctgccctgaactatacatagtgaaaggtccagagaccttcatgccctttggatgcaagacacagagtacagattcaatcatgaactgactgtcatttagatggaagaggtcttctcaaaccggctggcctttccctcaggagaagctgaatttccttagatgtattttcttgacacttcagtttacaaagacgcttcacttcatactccctttcgagtttgatagctgaaaaagaaaatacacaaaacaatctgacatacatttttcatcaggcataactaagtcaaaactgaatatcatacagcaaaatccatatgcctgaataataaacaagatgacagagctacaaagataggaggtatgggtgtaaatacacagatttaaacatttctctgataagcaaatggcacactgaatttataacttattaaagcagaacttaaggaacttacattctgcagaagggagcagtccatctttaatggtggtacattttgtgagctgcacagaaccaccaaatgaaatttcttccaagaaaggcaacttgatattggctaggtttgtgkaccaggtctttgcaagcaatgcaatatcccaaggttcctgtctggggcaaaaattcattaatccattcaataaatattgattaagcacctactatgtgagatgtagaagacattaattctcagttccatttgccactagacattttggtttatgggtggagggggagatgttcagaattttccagagttgtagttccagacaggagagggagatttatattaactaatatagagataatactgaacaatgaccagaaattacaccaggaactttgattcagcctccatgaagtcaatccattctttccatgtaagaggatgtagataagaactgtaagctccagagtcttttatagctcataaaaatgtggtcatattgaagaaggaaagaagggcataatcatacattgagcagggtgcttggcacagactaaggttttgagtgtgcaatctgggaatggggatgaaattccaaactacaaattcaaaataaccactatgaacctttaaaaattgttctctttcacctaattctgaaatttgaaaatatcagctacatgtttctcatctgcagtcaatatgagttcagcctcat

SEQ ID NO: 58737 - DNA, 998 bp, Homo sapiens
acaatagcaaagacttggaaccaacccaaaagcccatcagtgatagacgggataaagaaaatacggcacgtatataccatggaatactatgcagacataaaaaaggatcagttcatgtcctttgcagggaaatggatgaagctggaaactatcattctcagcaaactatcacaaggacagaaaaccaaacaccacatgttctcactcatcagtgggaattgaacagtgagaacacatggacacagggaggggaacatcacacaccagggcctgtcagggaatgggagactaggggagggatagcattaggagaaatacccaatgtagatgacaggtcgatgggtgcagcaaacaaccttagcacatgtatacctatgtaacctgcacgttctgcmcatgtattccagaacttaaattataataataataataataataatagactgaaactggccaggtggggtggcttatgcttgtaattccagcattttgggaggctgaggcaggagaattgcttgaagccaggagttggagaccagtctgggaagtatagtgagaccttgtccctatttaaaaaaaaaaaaaaaaaagactgcctaacttgtgggagacagagcaagatgccttcaggaggaatctctggccgtcttctttggtaatatccaaagagctttggtcagcgttgatatcaaagcggtgtgaagaaaacataaggccataagactaatctctggagagctgcacactgaaggggaacctaagttcttgagtccctggagtaccccaagtgtggtttcagagagggtgccattcatgagcaacactgctagccattagtggccagcaagaaggggagtgaaaggagtatcttgtagatggtgacttgggtaatatgaaattgctgtcatcaaggtttatcaaaaaaccaaaggttaaatattacatgtaggcaatgtgaggctgccccaaatggtgtgtttcccaggaacttgattcaa

SEQ ID NO: 58738 - DNA, 545 bp, Homo sapiens
tttgcatgcwcagctctgatgaatcccctaatgattttggtaaaaatcattaagttaaggtggatacacatcttgtcatatgatcaaatggtttcgcgaaaaatcaataatcagacaacaagatgtgcgaactcgatattttacacgactctctttaccaattctgccccgaattacacttaaaacgactcaacagcttaacgttggcttgccacgcattacttgactgtaaaactctcactcttaccgaacttggccgtaacctgccaaccaaagcgagaacaaaacataacatcaaacgaatcgaccgattgttaggtaatcgtcacctccacaaagagcgactcgctgtataccgttggcatgctagctttatctgttcgggcaatacgatgcccattgtacttgttgactggtctgatattcgtgagcaaaaacgacttatggtattgcgagcttcagtcgcactacacggtcgttctgttactctttatgagaaagcgttcccgctttcagagcaatgttcaaagaaagctcatgaccaa

SEQ ID NO: 58739 - DNA, 1001 bp, Homo sapiens
taagaatatgtttcttgtatcttgaaaaggagaaattatatgtaaaacataaataaactcacaagcatgagagcactcactatgactggcctaattaaatgcaatatttaggttatccgtaaagtgaggggacattggtaatacagttagtatcttatcatacaaactgagaacagatccacatccagaatatgttatttttggaaattataagggaaaatcacagcattgacattgtaaatgacttttaaagggcagaaaacttaatatccacccctcttagagtctatagttcacactgcaaaatatttttaaggaaatgaccaagttaaccttggttctcaaggtctctttgtttttattttcttttctactttcacattatacttgtagttcaaacaatgagtttcagagcaacatgatagtgtacacatcctcaatttaatgcatttagaagtcattactaatagttttgttgttgttgttctgaaaatgttgaaataaccccaaaagctatggggttacaaagatcacttactgttctatgtctcaatttatgtgattataaggtgagaacaatgtgycccatctattttggtccttgggactttaagatttaataagtgcaaaaaatttctaaggactttacaagaaagtaggcatgtaaataatattaatgacatgtctgctagatagtaatggaaaatgtgagaaacagtatttccaatatcaaaaaagttaaaagattcacttttatcaggtcttaatactaacctctaagaagattaaagatgcttttcttctgtgtaataatctctgtaagctatttagctcaaatttttaaaaaagaatatgcccaaatgcatcaaagaaggtctgcagcattaaggaaaaaatatattaaaaaaaattatagacgtatataaataatgtcagataacatgataaataatgctttaaggaaaaaaactaccacaccccttaacaataagatgaaaatg

SEQ ID NO: 58740 - DNA, 2170 bp, Homo sapiens
ctactgactcagggcacactatccaggtcctacaaggctacatttgtttcctgttagtgtttcctcatcacagtgcatttgacagcaggcccagatttgtgacacaagctacacattaatgggctcagacatgggacatactatgaaccttcaatgcttcatatcacccccaagacacaggattatcacatgtcgtaatgaaaaattaaattacaggtgtacgtgtctgataggtgaggacaaaataacccaaacttggactgcccatcttctgtaggccatctaagatctcaatgcagcaattcctcaaaagggtatttctcatgttcagtctggttatctatcccctttccttcaaacttacactcttcttttataattattgacaccgtagtctcacgggggatcctataagggctttgctttcccttcaatttctttctgaagcctcaaatcaatgagagctcacaatggctattaagcaagggatgggagatatgtaaactcattttgaaatcttttaaaacttcaggattttatactaaccaattcayaaccataatgtgtctgtgattaatttgtagaaattttttttttcatacaaatgcttttgtccttctcacatatctctcagttgaaaggtctaaataagagtaggtgatgacttttggctgggcacagtagctcacacctgtaattccagcactttaggaggccaaggagggcagatcacttgaggtcaggagtttgagaccagcctggccaccatgatgaaaccctgtctatactaaaaatagaaaaattagctgggcatggtggcatgtgcctgtaatcccagctacttgggaggctgaagcatgagaatcacttgaactcaagatgcagaggttgcagtgggctgagatctcgcctttgtactccagcctaggagacagagcaagactccatccatacacaacccacccctgcccctgaaaaaatagttggtaacttttttaaataataaagtttttattactagatggaaaacactgatgatagcagtaaataaaacaaaactaaaaccttgacgcctggggaggcaacagggaggatgttaatgatctttatcttactcctcctaaaagcttttttgtcctccaaagaaatgaacagactaaaaaactcattctccctgctacctttctaagctgttgtgggcacttcagattcaaactgacggtgatattatgaccatgcctatgacagcaagagcatcagagaatgacctcatctcctgaatgcctgtgagacagtagagggtcacggcttcagccgctgcacaccccatgcataaccctctagatgttgttcatacttgtgaggctgaaaaacagatactatgaataagcaaaactgtttgaaaactactgccactggtggctcttctaaaaccaaggattcaactgagttttttggactgacctgggaatcctagggttggaggcctgatgaccataggctactctggagatcctgctaacctgatgttaacaggtgtatatatgccctgcttgggtgccccaacattgtaaatggtttgcttccagaaggaccagctatgcccttggggtgtgtactctatcagggcactacctctgcttggaaggcttcaggtcagccttaacttactggccagagctatgctgtgtctgaattgatacctctggccagggatagggctatgacacatattttcctgactcgataactgtattagtcagggttctctagggagacagaaataggtgagtttattaagtattaacttacatggccacaaggtcccacaataggctgtctgcaagcttgaggagcaaggagatccagtccgagtctcaaaacggaagaacttggagtccgatgactaagatgccattataaatatcagtactcctctttcaataacttatagttcaaggatacaacagaaaaaagtaatatgataaatttgaatattattctgaactggatctaataaacatataaaaaacattaggtccaataaatggagaatacctatatgctatagtttggatatttgtccccacaaaccccatgttgaaatttgtttcccaatgttgaaggtgagagtctaatggaagatgtttgggtcatggtggtggatccc

SEQ ID NO: 58741 - DNA, 2170 bp, Homo sapiens
ctactgactcagggcacactatccaggtcctacaaggctacatttgtttcctgttagtgtttcctcatcacagtgcatttgacagcaggcccagatttgtgacacaagctacacattaatgggctcagacatgggacatactatgaaccttcaatgcttcatatcacccccaagacacaggattatcacatgtcgtaatgaaaaattaaattacaggtgtacgtgtctgataggtgaggacaaaataacccaaacttggactgcccatcttctgtaggccatctaagatctcaatgcagcaattcctcaaaagggtatttctcatgttcagtctggttatctatcccctttccttcaaacttacactcttcttttataattattgacaccgtagtctcacgggggatcctataagggctttgctttcccttcaatttctttctgaagcctcaaatcaatgagagctcacaatggctattaagcaagggatgggagatatgtaaactcattttgaaatcttttaaaacttcaggattttatactaaccaattcataaccataatgtgtctgtgattaatttgtagaawttttttttttcatacaaatgcttttgtccttctcacatatctctcagttgaaaggtctaaataagagtaggtgatgacttttggctgggcacagtagctcacacctgtaattccagcactttaggaggccaaggagggcagatcacttgaggtcaggagtttgagaccagcctggccaccatgatgaaaccctgtctatactaaaaatagaaaaattagctgggcatggtggcatgtgcctgtaatcccagctacttgggaggctgaagcatgagaatcacttgaactcaagatgcagaggttgcagtgggctgagatctcgcctttgtactccagcctaggagacagagcaagactccatccatacacaacccacccctgcccctgaaaaaatagttggtaacttttttaaataataaagtttttattactagatggaaaacactgatgatagcagtaaataaaacaaaactaaaaccttgacgcctggggaggcaacagggaggatgttaatgatctttatcttactcctcctaaaagcttttttgtcctccaaagaaatgaacagactaaaaaactcattctccctgctacctttctaagctgttgtgggcacttcagattcaaactgacggtgatattatgaccatgcctatgacagcaagagcatcagagaatgacctcatctcctgaatgcctgtgagacagtagagggtcacggcttcagccgctgcacaccccatgcataaccctctagatgttgttcatacttgtgaggctgaaaaacagatactatgaataagcaaaactgtttgaaaactactgccactggtggctcttctaaaaccaaggattcaactgagttttttggactgacctgggaatcctagggttggaggcctgatgaccataggctactctggagatcctgctaacctgatgttaacaggtgtatatatgccctgcttgggtgccccaacattgtaaatggtttgcttccagaaggaccagctatgcccttggggtgtgtactctatcagggcactacctctgcttggaaggcttcaggtcagccttaacttactggccagagctatgctgtgtctgaattgatacctctggccagggatagggctatgacacatattttcctgactcgataactgtattagtcagggttctctagggagacagaaataggtgagtttattaagtattaacttacatggccacaaggtcccacaataggctgtctgcaagcttgaggagcaaggagatccagtccgagtctcaaaacggaagaacttggagtccgatgactaagatgccattataaatatcagtactcctctttcaataacttatagttcaaggatacaacagaaaaaagtaatatgataaatttgaatattattctgaactggatctaataaacatataaaaaacattaggtccaataaatggagaatacctatatgctatagtttggatatttgtccccacaaaccccatgttgaaatttgtttcccaatgttgaaggtgagagtctaatggaagatgtttgggtcatggtggtggatccc

SEQ ID NO: 58742 - DNA, 2170 bp, Homo sapiens
ctactgactcagggcacactatccaggtcctacaaggctacatttgtttcctgttagtgtttcctcatcacagtgcatttgacagcaggcccagatttgtgacacaagctacacattaatgggctcagacatgggacatactatgaaccttcaatgcttcatatcacccccaagacacaggattatcacatgtcgtaatgaaaaattaaattacaggtgtacgtgtctgataggtgaggacaaaataacccaaacttggactgcccatcttctgtaggccatctaagatctcaatgcagcaattcctcaaaagggtatttctcatgttcagtctggttatctatcccctttccttcaaacttacactcttcttttataattattgacaccgtagtctcacgggggatcctataagggctttgctttcccttcaatttctttctgaagcctcaaatcaatgagagctcacaatggctattaagcaagggatgggagatatgtaaactcattttgaaatcttttaaaacttcaggattttatactaaccaattcataaccataatgtgtctgtgattaatttgtagaaattttttttttcatacaaatgcttttgtccttctcacatatctctcagttgaaaggtctaaataagagtaggtgatgacttttggctgggcacagtagctcacacctgtaattccagcactttaggaggccaaggagggcagatcacttgaggtcaggagtttgagaccagcctggccaccatgatgaaaccctgtctatactaaaaatagaaaaattagctgggcatggtggcatgtgcctgtaatcccagctacttgggaggctgaagcatgagaatcacttgaactcaagatgcagaggttgcagtgggctgagatctcgcctttgtactccagcctaggagacagagcaagactccatccatacacaacccacccctgcccctgaaaaaatagttggtaacttttttaaataataaagtttttattactagatggaaaacactgatgatagcagtaaataaaacaaaactaaaaccttgacgcctggggaggcaacagggaggatgttaatgatctttatcttactcctcctaaaagcttttttgtcctccaaagaaatgaacagactaaaaaactcattctccctgctacctttctaagctgttgtgggcacttcagattcaaactgacggtgatattatgaccatgcctatgacagcaagagcatcagagaatgacctcatctcctgaatgcctgtgagacagtagagggtcacggcttcagccgctgcacaccccatgcataaccctctagatgttgttcatacttgtgaggctgaaaaacagatactatgaataagcaaaactgtttgaaaactactgccactggtggctcttctaaaaccaaggattcaactgagttttttggactgacctgggaatcctagggttggaggcctgatgaccataggctactctggagatcctgctaacctgatgttaacaggtgtatatatgccctgcttgggtgccccaacattgtaaatggtttgcttccagaaggaccagctatgcccttggggtgtgtactctatcagggcactacctctgcttggaaggcttcaggtcagccttaacttactggccagagctatgctgtgtctgaattgatacctctggccagggatagggctatgacacatattttcctgactcgataactgtattagtcagggttctctagrgagacagaaataggtgagtttattaagtattaacttacatggccacaaggtcccacaataggctgtctgcaagcttgaggagcaaggagatccagtccgagtctcaaaacggaagaacttggagtccgatgactaagatgccattataaatatcagtactcctctttcaataacttatagttcaaggatacaacagaaaaaagtaatatgataaatttgaatattattctgaactggatctaataaacatataaaaaacattaggtccaataaatggagaatacctatatgctatagtttggatatttgtccccacaaaccccatgttgaaatttgtttcccaatgttgaaggtgagagtctaatggaagatgtttgggtcatggtggtggatccc

SEQ ID NO: 58743 - DNA, 2170 bp, Homo sapiens
ctactgactcagggcacactatccaggtcctacaaggctacatttgtttcctgttagtgtttcctcatcacagtgcatttgacagcaggcccagatttgtgacacaagctacacattaatgggctcagacatgggacatactatgaaccttcaatgcttcatatcacccccaagacacaggattatcacatgtcgtaatgaaaaattaaattacaggtgtacgtgtctgataggtgaggacaaaataacccaaacttggactgcccatcttctgtaggccatctaagatctcaatgcagcaattcctcaaaagggtatttctcatgttcagtctggttatctatcccctttccttcaaacttacactcttcttttataattattgacaccgtagtctcacgggggatcctataagggctttgctttcccttcaatttctttctgaagcctcaaatcaatgagagctcacaatggctattaagcaagggatgggagatatgtaaactcattttgaaatcttttaaaacttcaggattttatactaaccaattcataaccataatgtgtctgtgattaatttgtagaaattttttttttcatacaaatgcttttgtccttctcacatatctctcagttgaaaggtctaaataagagtaggtgatgacttttggctgggcacagtagctcacacctgtaattccagcactttaggaggccaaggagggcagatcacttgaggtcaggagtttgagaccagcctggccaccatgatgaaaccctgtctatactaaaaatagaaaaattagctgggcatggtggcatgtgcctgtaatcccagctacttgggaggctgaagcatgagaatcacttgaactcaagatgcagaggttgcagtgggctgagatctcgcctttgtactccagcctaggagacagagcaagactccatccatacacaacccacccctgcccctgaaaaaatagttggtaacttttttaaataataaagtttttattactagatggaaaacactgatgatagcagtaaataaaacaaaactaaaaccttgacgcctggggaggcaacagggaggatgttaatgatctttatcttactcctcctaaaagcttttttgtcctccaaagaaatgaacagactaaaaaactcattctccctgctacctttctaagctgttgtgggcacttcagattcaaactgacggtgatattatgaccatgcctatgacagcaagagcatcagagaatgacctcatctcctgaatgcctgtgagacagtagagggtcacggcttcagccgctgcacaccccatgcataaccctctagatgttgttcatacttgtgaggctgaaaaacagatactatgaataagcaaaactgtttgaaaactactgccactggtggctcttctaaaaccaaggattcaactgagttttttggactgacctgggaatcctagggttggaggcctgatgaccataggctactctggagatcctgctaacctgatgttaacaggtgtatatatgccctgcttgggtgccccaacattgtaaatggtttgcttccagaaggaccagctatgcccttggggtgtgtactctatcagggcactacctctgcttggaaggcttcaggtcagccttaacttactggccagagctatgctgtgtctgaattgatacctctggccagggatagggctatgacacatattttcctgactcgataactgtattagtcagggttctctagggagacagaaataggtgagtttattaagtattaacttacatggccacaaggtcccacaatagrctgtctgcaagcttgaggagcaaggagatccagtccgagtctcaaaacggaagaacttggagtccgatgactaagatgccattataaatatcagtactcctctttcaataacttatagttcaaggatacaacagaaaaaagtaatatgataaatttgaatattattctgaactggatctaataaacatataaaaaacattaggtccaataaatggagaatacctatatgctatagtttggatatttgtccccacaaaccccatgttgaaatttgtttcccaatgttgaaggtgagagtctaatggaagatgtttgggtcatggtggtggatccc

SEQ ID NO: 58744 - DNA, 746 bp, Homo sapiens
tcttccaatccctgcctcctaggtactaatggttcagactttcattttctctcccaagtattagagcaagttgtatctccaaagggatctaaggaagcgctatgctgtgtccttaggcatctaggctatgaacccaaggagtcttgtcccttgtgtccctcccaatttaggcatacagstcttgacatgggcagttatgtgggacctgttccccaccacccttgccagggccccaagtttgtaaatggctaagcaggattgctatcccattgtgtaagatgctctcctcccccaatttttacccagcttacccctctgcaatacaatctccaagccttggctctttggccagggccttagaactgatgaccaagtactttaacaactggaactgggtctatgacaacgtaataaatcacgatgaaagtgaattgagtaagtcaaggagagaagagacagagagagagagacagagaaacaacagagagaaaagagagggagagagagaaaaagagagatagaagtagtaaaaaaaaaacagtgtgctctattcctttaaaagccagggtaaatttaaaacctataattgataactgaaggtcttctccattaccctataacactccaatactaccttgttgtcagagtaaacaagggcataacctgaaaacactgataccactgacaactaatagccttactatcaacaatccttaacctaggaacccacagatggcccaaatgca

SEQ ID NO: 58745 - DNA, 746 bp, Homo sapiens
tcttccaatccctgcctcctaggtactaatggttcagactttcattttctctcccaagtattagagcaagttgtatctccaaagggatctaaggaagcgctatgctgtgtccttaggcatctaggctatgaacccaaggagtcttgtcccttgtgtccctcccaatttaggcatacaggtcttgacatgggcagttatgtgggacctgttccccaccacccttgccagggccccaagtttgtaartggctaagcaggattgctatcccattgtgtaagatgctctcctcccccaatttttacccagcttacccctctgcaatacaatctccaagccttggctctttggccagggccttagaactgatgaccaagtactttaacaactggaactgggtctatgacaacgtaataaatcacgatgaaagtgaattgagtaagtcaaggagagaagagacagagagagagagacagagaaacaacagagagaaaagagagggagagagagaaaaagagagatagaagtagtaaaaaaaaaacagtgtgctctattcctttaaaagccagggtaaatttaaaacctataattgataactgaaggtcttctccattaccctataacactccaatactaccttgttgtcagagtaaacaagggcataacctgaaaacactgataccactgacaactaatagccttactatcaacaatccttaacctaggaacccacagatggcccaaatgca

SEQ ID NO: 58746 - DNA, 909 bp, Homo sapiens
aataaagtgttaggtagatcagctaataaaattacttattttagacttagataagttgaatttaggtttaattcactacccaatggggacaaagtgagttgrttttctgataaactgaaacatacccaactttttgttgataacagagtgtaagagcctttagatattacccacgggaaccactccctttcagtgggaaaagcctgccattctcaactgaattgctaatggtcatctatttaattgattttgattctcaaatttgttaaaatgcagttggcaaagaatattttttattgcccctgttggctgacctatggactatgagctggaatagagttggtgaaagtttaggaatggagctggaattaaatgcttagattcccatcatttatttcctaagggaaattgtaacaatttcacctcgctctttttcctgacactaagaattgtatgaccaacactctcttgttaaagtattagtggatcaagtcttttgggaaaagctgcaatgtactttgaacatttgacccacagtaccacttaggataatttatctgaatttattttatttataagatgcagaataggaaactgaatcatgacgctttaaatataaatacactctgttctcagcatattcctgcagagtcatatgaaagaggtcctctcttccacgctgcattgtattttacttttatcattttagttttgtttaagtattgcggaaaaatatggaccattatattctccctgtttttattttaccttctgtgcactaacaattagtcttcctttgttttgcactatgagtctgaaacgtttgttagttctctgctttcttagtaaatggtaccatttaaaatagattgtaaatatatattgcatagatatttaaatatatattat

SEQ ID NO: 58747 - DNA, 909 bp, Homo sapiens
aataaagtgttaggtagatcagctaataaaattacttattttagacttagataagttgaatttaggtttaattcactacccaatggggacaaagtgagttggttttctgataaactgaaacatacccaactttttgttgataacwgagtgtaagagcctttagatattacccacgggaaccactccctttcagtgggaaaagcctgccattctcaactgaattgctaatggtcatctatttaattgattttgattctcaaatttgttaaaatgcagttggcaaagaatattttttattgcccctgttggctgacctatggactatgagctggaatagagttggtgaaagtttaggaatggagctggaattaaatgcttagattcccatcatttatttcctaagggaaattgtaacaatttcacctcgctctttttcctgacactaagaattgtatgaccaacactctcttgttaaagtattagtggatcaagtcttttgggaaaagctgcaatgtactttgaacatttgacccacagtaccacttaggataatttatctgaatttattttatttataagatgcagaataggaaactgaatcatgacgctttaaatataaatacactctgttctcagcatattcctgcagagtcatatgaaagaggtcctctcttccacgctgcattgtattttacttttatcattttagttttgtttaagtattgcggaaaaatatggaccattatattctccctgtttttattttaccttctgtgcactaacaattagtcttcctttgttttgcactatgagtctgaaacgtttgttagttctctgctttcttagtaaatggtaccatttaaaatagattgtaaatatatattgcatagatatttaaatatatattat

SEQ ID NO: 58748 - DNA, 909 bp, Homo sapiens
aataaagtgttaggtagatcagctaataaaattacttattttagacttagataagttgaatttaggtttaattcactacccaatggggacaaagtgagttggttttctgataaactgaaacatacccaactttttgttgataacagagtgtaagagcctttagatattacccacgggaaccactccctttcagtgggaaaagcctgccattctcaactgaattgctaatggtcatctatttaattgattttgattctcaaatttgttaaaatgcagttggcaaagaatattttttattgcccctgttggctgacctatggactatgagctggaatagagttggtgaaagtttaggaatggagctggaattaaatgcttagattcccatcatttatttcctaagggaaattgtaacaatttcacctcgctctttttcctgacactaagaattgtatgaccaacactctcttgttaaagtattagtggatcaagtcttttgggaaaagctgcaatgtactttgaacatttgacccacagtaccacttaggataatttatctgaatttattttatttataagaygcagaataggaaactgaatcatgacgctttaaatataaatacactctgttctcagcatattcctgcagagtcatatgaaagaggtcctctcttccacgctgcattgtattttacttttatcattttagttttgtttaagtattgcggaaaaatatggaccattatattctccctgtttttattttaccttctgtgcactaacaattagtcttcctttgttttgcactatgagtctgaaacgtttgttagttctctgctttcttagtaaatggtaccatttaaaatagattgtaaatatatattgcatagatatttaaatatatattat

SEQ ID NO: 58749 - DNA, 909 bp, Homo sapiens
aataaagtgttaggtagatcagctaataaaattacttattttagacttagataagttgaatttaggtttaattcactacccaatggggacaaagtgagttggttttctgataaactgaaacatacccaactttttgttgataacagagtgtaagagcctttagatattacccacgggaaccactccctttcagtgggaaaagcctgccattctcaactgaattgctaatggtcatctatttaattgattttgattctcaaatttgttaaaatgcagttggcaaagaatattttttattgcccctgttggctgacctatggactatgagctggaatagagttggtgaaagtttaggaatggagctggaattaaatgcttagattcccatcatttatttcctaagggaaattgtaacaatttcacctcgctctttttcctgacactaagaattgtatgaccaacactctcttgttaaagtattagtggatcaagtcttttgggaaaagctgcaatgtactttgaacatttgacccacagtaccacttaggataatttatctgaatttattttatttataagatgcagaataggaaactgaatcatgacgctttaaatataaatacactctgttctcagcatattcctgcagagtcatatgaaagaggtcctctcttccacgctgcattgtattttacttttatcattttagttttgtttaagtattgcggaaaaatatggaccattatattctccctgtttttattttaccttctgtgcactaacaattagtcttcctttgttttgcactatgagtctgaaacgtttgttagttctctgctttcttagtaaatggtaccatttaaaatagattgtaaatatatattgcatagatatttwaatatatattat

SEQ ID NO: 58750 - DNA, 745 bp, Homo sapiens
aatatgtgaattgtggggactatggttgactagaatgcccatatcctatctaaacaggcaaagagatattcattcccagcaatttttgtccccaatgaatgcagacctaacaatgcctgatcattttttatcaaaagatagaaatttaatttgattttaaatgtgaaaactcctaaatcctaattattagctcaattaaaagttgcagraagcaagtccaaatagtatgctacattgattggagagaccaatagttttcagtttgtgtttgagaaaaatattcaattcagtagttgtatattcagtatatttagtagcagttcttttgaaatagctggttaaaaatagcagacatcaagaatgatttttttatagtgttaggagtaagccaaccatgtctgtttactccactgttactctggagatttagtcaaaacaacatccaagaaacaaagcaatacatgaataaaaatccagacaataccattcaggacataggcatgggcatagacttcaagactaaaacaccaaaagcaattgcaacaaaagccaaaatagacaaatgcagtctaattaaactaaagagcttctgtacagcgaaagaagctatcatcagagttaagaggccaccaacagaatggtagaaaatttttgcaatctacccatctgacaaaggtctaatatccagaatctacagggaacttaaacaaatttacaagaaaaaaaaaaccaaacaaccccatca

SEQ ID NO: 58751 - DNA, 661 bp, Homo sapiens
aaggatgaagggaggtagtgagatcaatggcccaacaatcttgggctgacacacacctctggggtctcaggtatgattccaaatctcagagaccccaccagactgtatccccatccgcatgggatacgattcctgcacacagcctccttcaggaatggaatcaaaagagcagtttccagtgcccacctcacagtctccaagcaactattcctctggcgggacctggtcaaggagttagcccgaggaggccctatggtcaagacatttagggtcccacattggttgttgcaggcagcctttttctcaagaccaggccagtctgcctccactattttcctctgcttaggcagcctgacagccctgaaagacaagagcccaagcctgtctcacaaatgcacatgtgccactctctgggcaccagggatgagtggtaagccagggctcacctcacagtgaacaccactgttgcctggcaatgggtccctgtggcttggtggagcaggaaacctctgtggacatgcgacggcattggactctctcctgtcttctctagggaatccacagaatagtcccaggattctaggagtgggcagggccgagccagtctgaagacacatcaaaaggagccacagkgatgcacagcaaaatcactaaggatcca

SEQ ID NO: 58752 - DNA, 946 bp, Homo sapiens
tgcacagaggaaaggccacgtgaacatgcagtaaccatctgcaagctgagaagaggccctcacctgcccctggccatgctggtatcctgatacgagacttccagcccccagacctgtgagaaaataactgttgtttaagccacacagtatgtggtattttgttatggcagctggaacgaagacacattccaaatggattgttgacaaaagtgcaaaagaaattctgtgcagagccaggcttggtgattcacacctgtaatcccatcctttggggaggctgagatgggcagatagcttgagctcatggcgaaaccttgtctctactaaaaatacaaaaaattagctaggtgtggtggcctgtgcctatggacacagctactcaggaggctgaggtgggaggatcacttgaagccaagaggtggaggttgcagtgagccaaggtgatgccactgccctccagcctgggcagcagagtgagactctgtctgaaaaaaaaaaattaaaaaataaaagaaagaaaaagaaattaattgcaggaattcaacaaatgatgctgaaacattttgaccatatctttttttttctatcatggtaaaacacacataacatgcgattcagtgccattaattgcactcacaatgttgtgcaaccatctttgctgtctgtttccaaagccttttcgtaactccaaacagaaagtctataatcattaagcaataagtattcattttcctctctcaccagcctgtggtaacttctgatctactttttctctataaatgtgacttttgtaagtatttcatgtcagtagcattatgataatatttgttcttttgtctgtcttattttacttaccatagtggcttcatgtttcgcctatatgtagaaagtgtcaraactttttctttcctgactgaataatatttcattgtattttgtttatttt

SEQ ID NO: 58753 - DNA, 869 bp, Homo sapiens
aggcatatctttccttctgttagatctttctttagcacaagggttttgtgttaatctaattgagctggatatgagaatttttgtttctgtggttatactctgtgaaccacaggcctcaaattcctctcctggagctggtttaccagagaatttttcttaatatcttctccttgttcaggcttagactttcccactgtgatgaaattcagaaattacatctcttgtagcttgccagcactatttcatgtttacctttactggacacttgttagcctgctgaagtggaatataggagtcatagcacaaaactccattaggaccctttatctcctattcccaacaattctacagattcctttttccctcatagtgggaatagggcaggaattcactctgtcaaccagggtggagtgcagtggtgygatctcagctcactggaacctctacttcccaggctcaagcaatcctcttgcctcagcctcccaagtagggaggcactacaggcatgccaccatgcctggctaatatttgggtttgtttgtttgtttgtttgtagggcaggctttcaccatgttgcccaggctggtctcaaactcctaggctcaagagatccacccaatgccttggcctcccacagtgctgggattacaggtagcatgagcaacacacaaggccccagtatttttcactagtgaagttcatgtgaggtgaaaggaaagaggaaacaggaagattgctccctggtgtttggattggcataagacttacctgatgtcaatttaatttccacattcactatatatgcctaatggtaggggtgaggtataactcttccttgatttgcttttcagtggcagctatctccccct

SEQ ID NO: 58754 - DNA, 869 bp, Homo sapiens
aggcatatctttccttctgttagatctttctttagcacaagggttttgtgttaatctaattgagctggatatgagaatttttgtttctgtggttatactctgtgaaccacaggcctcaaattcctctcctggagctggtttaccagagaatttttcttaatatcttctccttgttcaggcttagactttcccactgtgatgaaattcagaaattacatctcttgtagcttgccagcactatttcatgtttacctttactggacacttgttagcctgctgaagtggaatataggagtcatagcacaaaactccattaggaccctttatctcctattcccaacaattctacagattcctttttccctcatagtgggaatagggcaggaattcactctgtcaaccagggtggagtgcagtggtgtgatctcagytcactggaacctctacttcccaggctcaagcaatcctcttgcctcagcctcccaagtagggaggcactacaggcatgccaccatgcctggctaatatttgggtttgtttgtttgtttgtttgtagggcaggctttcaccatgttgcccaggctggtctcaaactcctaggctcaagagatccacccaatgccttggcctcccacagtgctgggattacaggtagcatgagcaacacacaaggccccagtatttttcactagtgaagttcatgtgaggtgaaaggaaagaggaaacaggaagattgctccctggtgtttggattggcataagacttacctgatgtcaatttaatttccacattcactatatatgcctaatggtaggggtgaggtataactcttccttgatttgcttttcagtggcagctatctccccct

SEQ ID NO: 58755 - DNA, 869 bp, Homo sapiens
aggcatatctttccttctgttagatctttctttagcacaagggttttgtgttaatctaattgagctggatatgagaatttttgtttctgtggttatactctgtgaaccacaggcctcaaattcctctcctggagctggtttaccagagaatttttcttaatatcttctccttgttcaggcttagactttcccactgtgatgaaattcagaaattacatctcttgtagcttgccagcactatttcatgtttacctttactggacacttgttagcctgctgaagtggaatataggagtcatagcacaaaactccattaggaccctttatctcctattcccaacaattctacagattcctttttccctcatagtgggaatagggcaggaattcactctgtcaaccagggtggagtgcagtggtgtgatctcagctyactggaacctctacttcccaggctcaagcaatcctcttgcctcagcctcccaagtagggaggcactacaggcatgccaccatgcctggctaatatttgggtttgtttgtttgtttgtttgtagggcaggctttcaccatgttgcccaggctggtctcaaactcctaggctcaagagatccacccaatgccttggcctcccacagtgctgggattacaggtagcatgagcaacacacaaggccccagtatttttcactagtgaagttcatgtgaggtgaaaggaaagaggaaacaggaagattgctccctggtgtttggattggcataagacttacctgatgtcaatttaatttccacattcactatatatgcctaatggtaggggtgaggtataactcttccttgatttgcttttcagtggcagctatctccccct

SEQ ID NO: 58756 - DNA, 869 bp, Homo sapiens
aggcatatctttccttctgttagatctttctttagcacaagggttttgtgttaatctaattgagctggatatgagaatttttgtttctgtggttatactctgtgaaccacaggcctcaaattcctctcctggagctggtttaccagagaatttttcttaatatcttctccttgttcaggcttagactttcccactgtgatgaaattcagaaattacatctcttgtagcttgccagcactatttcatgtttacctttactggacacttgttagcctgctgaagtggaatataggagtcatagcacaaaactccattaggaccctttatctcctattcccaacaattctacagattcctttttccctcatagtgggaatagggcaggaattcactctgtcaaccagggtggagtgcagtggtgtgatctcagctcactggaacctctacttcccaggctcaagcaatcctcttgcctcagcctcccaagtaggraggcactacaggcatgccaccatgcctggctaatatttgggtttgtttgtttgtttgtttgtagggcaggctttcaccatgttgcccaggctggtctcaaactcctaggctcaagagatccacccaatgccttggcctcccacagtgctgggattacaggtagcatgagcaacacacaaggccccagtatttttcactagtgaagttcatgtgaggtgaaaggaaagaggaaacaggaagattgctccctggtgtttggattggcataagacttacctgatgtcaatttaatttccacattcactatatatgcctaatggtaggggtgaggtataactcttccttgatttgcttttcagtggcagctatctccccct

SEQ ID NO: 58757 - DNA, 654 bp, Homo sapiens
ctctccattttgctcagaatggcctctagctcatgttatcctgtttgctttccctctccaaacatgacatcaacagaccttaatattcacaccactgttgaacttctttttagtcttttttagcctcttgtaagtacaatcagaacatggacctcattgttcgtcagaatttctccatcctcacgatcttggattctaacactctcctctgtgctctcacttgctgcttctaacactgctcttccctctaggtcttattttttgggggcgttgttttggttttatttttcatcaaaagcaatacattcacgttgtaataaatcaaacagtgcagaagagttagaagggaaagcaaaagcctcttgtcccaatatttccaatcccccaaagcaacttctttcttactatttctgctttttagttttgctggaggctacatctgtaacacttgctttgcacatcgtgacttaccagcttaaattactagctttcaaatattaacataaaagataaatatttagttaatttataccaactcattccctttccattgttgtatgatcagtcattaattcagcaagtatrcaatgagcaacaactatgcaaaggtaaaggtattggggatatggtactaagaaagaagaggcaaagaat

SEQ ID NO: 58758 - DNA, 547 bp, Homo sapiens
taatraattttaaaagtgatctcatgctccaattagagaaattgacatcagtcttgcataatacaatttgataatgtagttaatcatgagccaaaccttttgaagactaatcaatttaagctacgatcttcatttccaaagataaaagatgacagaatagaaggttaccatacttacgaagattccttggtgaaaattgtaaatacactttattaataaatgaaaaagttattttctgaaatactgtagaaatcattcaaatccaaattcaacaactgaagctgacagagagaaatgcacaattaatctcatacttgagatacattgtcttacatgtcactgaaccttgacattccagcatcaatgtttgctccatgttctttctatagtaaaggtgtgcatcctcatctgcttgtacacagacatgcctataatattgacaactttttaattacaaatacctaagtataactaatatgatgttgagaatcgatgtcaaaataaaattacaatacatgtagttgctaatcttatccattccttagat

SEQ ID NO: 58759 - DNA, 547 bp, Homo sapiens
taatgaattttaaaagtgatctcatgctccaattagagaaattgacatcagtcttgcataatacaatttgataatgtagttaatcatgagccaaaccttttgaagactaatcaatttaagctacgatcttcatttccaaagataaaagatgacagaatagaaggttaccatacttacraagattccttggtgaaaattgtaaatacactttattaataaatgaaaaagttattttctgaaatactgtagaaatcattcaaatccaaattcaacaactgaagctgacagagagaaatgcacaattaatctcatacttgagatacattgtcttacatgtcactgaaccttgacattccagcatcaatgtttgctccatgttctttctatagtaaaggtgtgcatcctcatctgcttgtacacagacatgcctataatattgacaactttttaattacaaatacctaagtataactaatatgatgttgagaatcgatgtcaaaataaaattacaatacatgtagttgctaatcttatccattccttagat

SEQ ID NO: 58760 - DNA, 649 bp, Homo sapiens
ggatcctagcaatactacaaaagacagctcaaaagatcagtttggatgttggtwtcaactagaactaaaccaccccacttgtttatttttagctcctccacagtccacaaaaatataagcccatcactgtaatttttaaaatttattgtcaggcctctattatcatgtagtttttggaaagaagcagatttcagcatccaactactttcctgattctgaattacatacctttgaaaagtatattattatttcaagttatgacatgagtattaaatcacagtttctcagaactgagcaatgcaatagatcaaagaaggaataagcttcatgtttgttcataccaaattcaattgaaaatattaaaacattgagggaaagttaagaattcatgcaagttgtgtatattctaatatattccagactgaaaataaaagaaatgctgagtttatttactcataaaaggattgttgtgaaaacctgagagagaaaatagccccttcatcagaataggttctgtattgtaaaggttctgtgcttcctggtgcaaacctctggcacactggacattttataaacatattagtgtttcagtaattaagagcctcattttcctggaaacagttcccacagtggagtctcttcttaagca

SEQ ID NO: 58761 - DNA, 1083 bp, Homo sapiens
gtaaccagcattacagtttggtggaaatcctttcagattgtgctttcttagcagagctaaaattgcagtccagctcaatttgctctggtctttccattaaatatgataacgtatataacatactaacaaatgcctggcatagagaaagcagtgaatattagatgtaacttttatttttattttgttaatactgttcaatgaagagaattgatcaattagtgaatatttatttggcaaatactttgttcttacactacagcagacatggtatagtcatagaagaatgtatatgagaaggtttacagaaggtaggcaagggtatagaatgttatattaacatactcttacagtttcaggtagtgcagagagaaatttgggtggatacaaatataaattttaatgtatcaggatatgaaggttgatttttaaggccatattgatcttaaagttcacagattacctgaactgtccagatattattgattgtttccttgatattaataaaaaccactttcaggggagtggaagtttctatgtgagtctcactttaacttggtgaatataaccactaggtgtagggagcacagtctctgttggacactcatgcccyccatggtccataggtgtctgaggaatgagcaccatggcaaaacataacccacctcattgatttcaaagtctgagaggaggggactggcccacctagcccattggggctaccaccacgtgggaaccagagggttgtccctccactactactgccattgcccatgtcatgcttgctaccaggggcccaaggacctacccactcccctggcccaccactgtcaccactggcacctaagcaagccacctggaggacgaagaattggctcacgtagaccggctaacgtcagcgccagcagaagctgccctggcaaggacaggcatgcctgacctgctgctgccaccactggggcctgaggactggctgacctggtgtccctgtctccagcaaaactctaccacagcctccactaacaattgcaccctaagccactgaggaaatcacagataccactgacactatttatagccaaagaa

SEQ ID NO: 58762 - DNA, 1083 bp, Homo sapiens
gtaaccagcattacagtttggtggaaatcctttcagattgtgctttcttagcagagctaaaattgcagtccagctcaatttgctctggtctttccattaaatatgataacgtatataacatactaacaaatgcctggcatagagaaagcagtgaatattagatgtaacttttatttttattttgttaatactgttcaatgaagagaattgatcaattagtgaatatttatttggcaaatactttgttcttacactacagcagacatggtatagtcatagaagaatgtatatgagaaggtttacagaaggtaggcaagggtatagaatgttatattaacatactcttacagtttcaggtagtgcagagagaaatttgggtggatacaaatataaattttaatgtatcaggatatgaaggttgatttttaaggccatattgatcttaaagttcacagattacctgaactgtccagatattattgattgtttccttgatattaataaaaaccactttcaggggagtggaagtttctatgtgagtctcactttaacttggtgaatataaccactaggtgtagggagcacagtctctgttggacactcatgccctccatggtccataggtgtctgaggaatgagcaccatggcaaaacataacccacctcattgatttcaaagtctgagaggaggggactggcccacctagcccattggggctaccaccacgtgggaaccagagggttgtccctccactactactgccattgcccatgtcatgcttgctaccaggggcccaaggacctacccactcccctggcccaccactgtcaccactggcacctaagcaagccacctggaggacgaagaattggctcacgtagaccggctaacgtcagcrccagcagaagctgccctggcaaggacaggcatgcctgacctgctgctgccaccactggggcctgaggactggctgacctggtgtccctgtctccagcaaaactctaccacagcctccactaacaattgcaccctaagccactgaggaaatcacagataccactgacactatttatagccaaagaa

SEQ ID NO: 58763 - DNA, 1389 bp, Homo sapiens
ccatttattttttgtttttattaaaaaacctttttagagacagggtcctgctctgtcacccagactggaatgcagtggcatgatcagggctcagtacaacctccaactcctgggctcaagtgatcctcctgcctcagtctcccgaagtgctgggttgtaggccactgcacccagccattgtgacaacttagtgatttttcccttagtggctctgacacaagaagcagacaggacaggatggggtggaggctcatggtcacagtttgagttttttctccctttaaagtattttccattcctgaggccagtgggatgaaggaagggaaacaaatcacacttaatcctcagatagtggttaattctcataattaaccaggtgtatttcaatttggctttttcgagatgggggggttgacaagcatttcagtttttaaatttttttatgatgaaaaataaaatctatgcaaaagtatgtagtacaatggacatccataaactcagctactgcgattcaataatggttgtatttgtcatatttgctttgtgtgtccatacatatatttaaccatttaaaagtaaattacggacaccgtatcacccccaagtacttcaacatatatttctaaaaaaaaaaaatgatgctgcctgcataagtaaatatgattggcacacctaacaaaattaatttcctgtatcatctaatacatatatatatgttcccaattgtctggaatgtaccttttagctgttttttcccaaaaccatgatcgtgcatcatatatggctgttctatctctgaaatcttttgatgttggaaacaggagccccctgtctcccttccctcgcagcttttcctgaacacactgctgtttgaggtgttcaactcactcctccatccttagcactgcctacaaacaagaaattggatctaaaggctcggttaatccaagctgctgcttcctttcggggcagctcctgggcccctgtgcacagcagggccacatagtgtctgacatccaccattagtggtaacattaggctcaggtggtaacaactggatctttaacctggctccccttattccttaagcatctctcagttgtgccctctctacgcttctcgagggctgtgtcctggcacctcttctgcaagcagagagccagggatgtggcccgccacctgggacaggtacctgctgtactccctctcagatccagaaaagaggtcatagcagtgaaaatgcaggtgagaccatttgattccaccccmcaacccgcctgcaaatgtaagcagctttgtgggaggaactagtaaaaaaatttgcatgggaattggaaacatcctaaccaccttgagatcagacgacactgctctgtttccatgctacag

SEQ ID NO: 58764 - DNA, 863 bp, Homo sapiens
tcctgttaaaggrtaaatattgttttccataatattgaagatgtgtaaaatttctcttctgtttttataaaactagaacaagcaatcccaatgaagaaacataatccatgactactgcgaaccgaaatccagactgcaggtgcaggaaggttgctagaaatacctcagacgggaacttaacccatggccaggagccaatgtcagcctccatcaacttccagccatttcccatgaaggccatgaagatctccagccacagcagcaggaacgcatggccaacagaaaccaatgccatctgtcagtgcttcactgaggctttagattgagaactgtaagaaaaatgattactctcacagcccaggcttgtgtataccagaagagaaatcgtgagctgctgtgtaaacaccctccgatgaacatgaaaaactctcaaactgcagggtccagaggcagccacacaaaccctcaaatcacacgcaaagtcagcacgtaggcagacacacaaaccctcaaatcacacccaaagtcggcacgtagatatcaacttgctagcttcacccagtgccagccaggacagggtccctaagcagcagggtagtgggagctatctggaaatgtgggcatggacatcactgtggcctaatggctgggggtctgggtgtcctctttctcctcacccattcagccatggccgctttccactgccacaaagacagaggggcagagccacatgaacactattttttcaagaaacgaatactccagatttccctgtttttgctgtaagaaaattgaaattatttaaacaacaaaaaacacacataggatctctggaaatgctcccaagggcacatagtaagtga

SEQ ID NO: 58765 - DNA, 684 bp, Homo sapiens
gcttgccttgtgtccccatccccagctccagagtcttggctgagagatgtccctggtggagaagcaggacataaagcagacagctatggaccagcactaaccttcagagctgtggaagacaaaatctctttccaaaggagcccacttcatttgcacagagtgtagagaagcttaaacataagggagctcttaggaacactggagtctgtggtgaagtgcaatggggaggtattagtycattctcacactgctataaagaataatacctgggactgggtaattataaaggaaagaggtttaattgactcacagttctgcaagcttaacaggaagcatggctgggaagctttgggaaacttacaatcatggcggaaggcaaaggggaggcaggcaccttcttcacaaggcagcaggagggagtatgagcatgcacaggaagaactgccactttaaaaccatcagatctcatgagactcactcactatcatgagaacagtgtaggggagactgcccccataatccaatcacttccttccctcaacacatggggattgcaattctagatgagatttgcatggggacacagagccaagccatatcagaaggagatttgagacaagcctaagatttgagacctgaggctgctggctttcagggaagaactagggaataagacagctggaa

SEQ ID NO: 58766 - DNA, 699 bp, Homo sapiens
aggtgtgcaccaccacacccagctaattttttgtatttttagtagagatggggtttcaccatgttggccaagctgatctagaactcctgacctcaggtgatctgcccaccttggcctcccaaagtgctgggattacaagtatgagccaccacacctagccggaaacagtatttttttttttttctaaaatgaggcctcactttgtagcccaggctagagtgccgtggcccagtcatagctcactgcagttttgaactcctgagctcaagtgatcctcctgcctcagcctcctgagtagctgagacagtaggtgtgctccaccaggcccagttcattttttaattttttgtagagataggagtctctctatgttgctcaggctgrtcttgaactcctggcttcaagcaactcctgtctctcagcctcccaaagtgcggggattataggcatgcgccaccacacccggccctaaagtccttttcagtcagtgaaattatagcctgtccacctgcgtcagccacatgcagggcagtcacccatgttcctctgggagggactccatgggcatcagacccatgagaacgccacctccttgatgaggtcaagtcctgcattttctaagagaatctcatttttaatgggcaaggatctttcgaaaagaccttgggacatgttgaggtgagttgctttgtgaatgga

SEQ ID NO: 58767 - DNA, 1124 bp, Homo sapiens
acatgtgtgtcgtcgatgtgcaggtgtcatgtatctgtgtggraccattcccttgtgccctcgttgctgcgctggtctccaaggaaatttctctcacctcttttctcttctcgacgccatgtcccggagttgaggatcttccagcgtgaccccaaggaggcttttcgagctctgtgtcccgggctccagtgtcttcgaggggacaacactggctttgtgttttctcatctatggcctttcttctacacagtattgcagtaacgctctcctttatctctttccagcatctggtgtgttttccattagtcggcatgaatcctgccatatcgcggggcgtggtgtttgccgggaaacttgtcctgtggcacagctcatggagaggacattggctgcacatagctgcagacgaagagcaagcatcacttttctcttgtacattcagggatgtgcttcattggcttagaaaacgtcctctgtaaataaactccgtgaggctgggatttaaatgcaggaagcagctggcagctgaagctacctattggactatcatctgcttaaacacgcgagaagcctcttgtgaagtctaaagcaaatacaacggcttatttgagccgtatatacaagagacttaaacaaacctcgtgtaatcctcttaaatgttgcatctccccccacggaaacacaacctgccaattagctcaacgtcctgacaaaacctcccagggctgcactgtaggggagaaaggtgtttatttaataagatctttcagagggaagccagctgcgtgtctgaacatcttgggagcaacaaatgaagacagtacagtctaaagggaggacagtgccagcaagagccccaggagctcggcagacaaagacaggaaaagctggaagtggaaaagctgaacgttcacgtgtaaggaaacccactggtcccttagtacaatcacaactgcctctttcgccaagttcctgagtacagttggtcttagttgtgaaagatcagtctcaactggcaagtgctggtgctggatttgagtccaggtggttagaaccctgctgccaggtttgtattccatggaatcctacaggtgtccattctatggaaggttcccagcaccagt

SEQ ID NO: 58768 - DNA, 1124 bp, Homo sapiens
acatgtgtgtcgtcgatgtgcaggtgtcatgtatctgtgtgggaccattcccttgtgccctcgttgctgcgctggtctccaaggaaatttctctcacctcttttctcttctcgacgccatgtcccggagttgaggatcttccagcgtgaccccaaggaggcttttcgagctctgtgtcccgggctccagtgtcttcgaggggwcaacactggctttgtgttttctcatctatggcctttcttctacacagtattgcagtaacgctctcctttatctctttccagcatctggtgtgttttccattagtcggcatgaatcctgccatatcgcggggcgtggtgtttgccgggaaacttgtcctgtggcacagctcatggagaggacattggctgcacatagctgcagacgaagagcaagcatcacttttctcttgtacattcagggatgtgcttcattggcttagaaaacgtcctctgtaaataaactccgtgaggctgggatttaaatgcaggaagcagctggcagctgaagctacctattggactatcatctgcttaaacacgcgagaagcctcttgtgaagtctaaagcaaatacaacggcttatttgagccgtatatacaagagacttaaacaaacctcgtgtaatcctcttaaatgttgcatctccccccacggaaacacaacctgccaattagctcaacgtcctgacaaaacctcccagggctgcactgtaggggagaaaggtgtttatttaataagatctttcagagggaagccagctgcgtgtctgaacatcttgggagcaacaaatgaagacagtacagtctaaagggaggacagtgccagcaagagccccaggagctcggcagacaaagacaggaaaagctggaagtggaaaagctgaacgttcacgtgtaaggaaacccactggtcccttagtacaatcacaactgcctctttcgccaagttcctgagtacagttggtcttagttgtgaaagatcagtctcaactggcaagtgctggtgctggatttgagtccaggtggttagaaccctgctgccaggtttgtattccatggaatcctacaggtgtccattctatggaaggttcccagcaccagt

SEQ ID NO: 58769 - DNA, 1124 bp, Homo sapiens
acatgtgtgtcgtcgatgtgcaggtgtcatgtatctgtgtgggaccattcccttgtgccctcgttgctgcgctggtctccaaggaaatttctctcacctcttttctcttctcgacgccatgtcccggagttgaggatcttccagcgtgaccccaaggaggcttttcgagctctgtgtcccgggctccagtgtcttcgaggggacaacactggctttgtgttttctcatctatggcctttcttctacacagtattgcagtaacgctctcctttatctctttccagcatctggtgtgttttccattagtcggcatgaatcctgccatatcgcggggcgtggtgtttgccgggaaacttgtcctgtggcacagctcatggagaggacattggctgcacatagctgcagacgaagagcaagcatcacttttctcttgtacattcagggatgtgcttcattggcttagaaaacgtcctctgtaaataaactccgtgaggctgggatttaaatgcaggaagcagctggcagctgaagctacctattggactatcatctgcttaaacacgcgagaagcctcttgtgaagtctaaagcaaatacaacggcttatttgagccgtatatacaagagacttaaacaaacctcgtgtaatcctcttaaatgttgcatctccccccacggaaacacaacctgccaattagctcaacgtcctgacaaaacctcccagggctgcactgtaggggagaaaggtgtttatttaataagatctttcagagggaagccagctgcgtgtctgaacatcttgggagcaacaaatgaagacagtacagtctaaagggaggacagtgccagcaagagccccaggagctcggcagacaaagacaggaaaagctggaagtggaaaagctgaacgttcacgtgtaaggaaacccactggtcccttagtacaatcacaactgcctctttcgccaagttcctgagtayagttggtcttagttgtgaaagatcagtctcaactggcaagtgctggtgctggatttgagtccaggtggttagaaccctgctgccaggtttgtattccatggaatcctacaggtgtccattctatggaaggttcccagcaccagt

SEQ ID NO: 58770 - DNA, 701 bp, Homo sapiens
aaaccatatcaaagcccaatacaaataagtttaattaaaatggggctttattggaaggatagtggaacatccacacacatacctgggytcccagtaactagaatccagcctcagtgccatgatgatccctctttctctgtctctcctctctcattctctccagtagagatgagttttctctgtgtgaccacaaacatagcctctgggagctctagattcccatccctccagattcccatccctccagactccctgagccaaaaagccctcaccaccaacttcttttaaaacaatcctaggaaagcctctgattggtccagattccgccatgtgcccatccctgaaccaatcactgtagccagagggatggacacatgttctccccatggccaggatgcagagttctgggattggcagctccttccgggccatcagcaaggacaccgggaggaagtagttccgtgaagaaagaagggcttctgttagattgatggcaaacagcacaggttcttaatattttgatagagactctcttggaaactcctatagccgaaaagatgccttaaccaaaaagattgtacctttgacttcagaatcaaagtaactgtaactgaattccataactaagaatttagtcctcctgtccagttctctctattgctcttgcaagaaccagctcaaatgcaacccctcaaggcctt

SEQ ID NO: 58771 - DNA, 701 bp, Homo sapiens
aaaccatatcaaagcccaatacaaataagtttaattaaaatggggctttattggaaggatagtggaacatccacacacatacctgggctcccagtaactagaatccagcctcagtgccatgatgatccctctttctctgtctctcctctctcattctctccagtagagatgagttttctctgtgtgaccacaaacatagcctctgggagctctagattcccatccctccagattcccatccctccagactccctgagccaaaaagccctcaccaccaacttcttttaaaacaatcctaggaaagcctctgattggtccagattccgccatgtgcccatccctgaaccaatcactgtagccagagggatggacacatgttctccccatggccaggatgcagagttctgggattggcagctccttccgggccatcagcaaggacaccggraggaagtagttccgtgaagaaagaagggcttctgttagattgatggcaaacagcacaggttcttaatattttgatagagactctcttggaaactcctatagccgaaaagatgccttaaccaaaaagattgtacctttgacttcagaatcaaagtaactgtaactgaattccataactaagaatttagtcctcctgtccagttctctctattgctcttgcaagaaccagctcaaatgcaacccctcaaggcctt

SEQ ID NO: 58772 - DNA, 1391 bp, Homo sapiens
cacttcagccctttctgcctcataaattttcctgacactgggaatgttttcctagaaaagaggaggttcttctcagatcctgccacacaaagcctgaggccacttagaaaatgatccagctgcacagcctaacaggtcaaaccaccatatccttaggcacaatgtcatcacctaactctgtgaatttcaaactcactccagcaacccatagggcagtcagagtgggagggtagtagtgtgtgaggccaagaaattgaccatcctttactgataggaagggagagaccaaagctgcctgaacctgagggcccacaggcccattataagagtctttggtaccatttgaaccaaaagagttgatagatcactgctatggatattcayaggttgaaggaaagataccaatgagatcgcacttgttttgacgttggaaacctagcttcattttcagaaccataacaaccaaaggttatctcaggctaggaagggactttttcttctcaataaactttctgttttggaataatttgagaagtacagaaaagttgcaaatatagtacagagagttcccatatgcctttgacccagttcccactagtgttaacatctttcattactatgctacatttgtcaaaactaagaaatgaacattggtacagtaccatcaattaaactgcagacgtgattcagatttcatcaatttttccactaatgttccaggatctcatccaggatcccacattgaatttagtcaacatgtctctttcatttcctctgagctgtgatagttttttagtttttcctcatttatcatgaccttcacaattttgaaggatactagtcagatattttgtagaatgtccctcaatttgggtttgtctcatgttgtctcctggttagactagggttatagggtttgaggaagaaaagccaaaggtgaagtgcctggaagagattttttaaaagaagaacaggtagatcagaacttacaaactgacttatcttcaagccaaatcctgttttgtttgtttcatcctatgtttcttagaaatgttgtattaattttgtactgaatttttctaattcacatttccagtgtctcttaaaaaatagaaagagctagtgattccaggcctccgaggtagtcagaggtgggcactgagaaatggttggcccctccagggctgtgtcttctttgggtcgcaccagtcctgtggcctactcagcgtggaggtccagcatcagctactattgatcatgtccataatgctggttttcttacggtaaaaagaattatctatatttctatcataacagaaacagaccctgtattagtccgttttcatgctgccaataaagacatacccaagactgggtaatttataaagaaa

SEQ ID NO: 58773 - DNA, 746 bp, Homo sapiens
gctgatttaggtttagcctatagctctcctcttcttgagccctcaccagcatagcccttaacactctgttaatagcaatctaggcttttttctagcctgatcctctaaactcttctgccctctgcccattactcagttccaaatctgacacacatttttaggtgttttttatagtaacaaccccacttctggtacaaatttctatcttagtccattttctacaactagaagaaaacacttgagactggataatttataataaacagaaatttattttctgacagttccagagacttaaaagttcattatcaagaagctggaatctttcaagggccttcctgctgtttcrtgacatggcaaaaggctgaagggcaaagaagcaaaagggaatgaaactagccattttataatggtattaacttcacctatgagaacagagccttcatggctcaatcacttcttaaaggtccatgtaaaaatgattacaatgttcaattaaatgtcgacatgagtttagagaagataaacttgataatttttccttgattttcttactatcttcattcttctgaaacctggttaatattcatctcctcaattggcataatgacatttgtttaaaggttatatggttatctgtcttacactttttgtcatttcatagccagaaatacgttatcggtttaatttagatttgtgaatttaccttgccttggagacatgtcgttgatcctctgaggaaagga

SEQ ID NO: 58774 - DNA, 681 bp, Homo sapiens
ctctcttcctcctctttatcctcaaggtatctggyaacagttctgaagaggcattagagttgatttattactttggggaagtgagatgtaaggtgcagtccccagaaaccttcagcttcttccatgggagtttctctttccacaggctcctttcaggacatgcctagtcagtagaggaggcctccatggtaaatgacgttaacattccacgaacttctgtctctcccattccccactgccccaagcaggatggttcacatcttgtcctgctgctgcccttgtcccttgtcccacagatggtcctgctcaaggcttacaccactcactgcccctcctcccagagtcctcccttcacacccatcatcactattcctggaaggtctctgcttcttcctgggctgctcagggccatgagaactggacatctggttgctgctgggaaaggacaaagcccatctttgacttgcacagtttgccaagctgtttgtgaaagaggactttatatgtgaccactcccagggtgtgtcaggaagagttccccctgatgccagaattcccttgtgtcagagccatttgtaaggtctctgagtttctaccgttgccctctgcttggaattcaaatttaaagctctctttacagtaggagggatccacaggaaaatagcttctgttgtggatttg

SEQ ID NO: 58775 - DNA, 657 bp, Homo sapiens
ctcccacctcagcctcctgagtagctgggactacaggtgtgtaccaccactccaggctaatttttaaattttttttagggatggggtttcgccatgttgctcaggctgagagagttttaagtaagagagagaacattctgcttgctctatagaggacaactggaagctgttgctgtagtccaggagacaagtgatgatggtagcctgtgctagagtttaggagtagtgacaatcttttgaatattaaacctttgttaactctatagattttggaaggaacaatttgtcrgtgaggccacatttcgcacttcacttagctcatattataagaaatagtggcaaaagatcactgtatggggggtgttggtaggtacctgaacagtgctatttttaaattgccagttaattttagctagagagatcagcaaaattccaagaaactaaatacaaaaagacactttttttttttttttatgatggagtctcaaagtctactatttttagtagagatggggtttcaccatgttggctggccaggctggtcttgatctcctgacctcaaatgatccgcccacctcggcctcccaaagtgctgagattacaggtgcaagccaccaccactggcgagaattcactttctttgtctactttaactgc

SEQ ID NO: 58776 - DNA, 745 bp, Homo sapiens
aagtatatgagaaaatacagttggaaaaaatataaacaaaccaaaaagagcaaatactttaaataatagatgaccaattaaattatagtagaataaaatgctatgtggttgttaaaaagaataagccaactgtatactttggtttatcaaaaagtcatgagggaaacttctttgtagaacaattccaagtaataagtataaacagaatgtaagaatttaaaaatcgttttgtaatccctaatggaataatggactcagtcattaataatcactgcatgccaaaaacatcaagtgaaatgtcgatggtagatgaggctgacaccacccaaatcctctcctaaatcttagtatcactcaaagtgaaacatgagaaatatgggtttcctgagatgatacagcaggaagagcagagcaagcaccccctatgaaggagtcttggcaaatatactgaacctaaatctaatcaagactcaaatataagggatagaggaacaagttgaaccacacctggaggaaacgaccagtcaaatccagaaggtggggccttctacagaatagatgagccagtttctcaaagamacaagtgtctgttttttaaagatctgattttttaaaatatctgattattaaagatcaagaaagacctaagacatgccatatgtggacctaatttgactcttaaacaatccaactgcaaaaagacatttttgagaaaatcagagcaattggaaaatggactggatat

SEQ ID NO: 58777 - DNA, 865 bp, Homo sapiens
atccatgggggatgcttgtctcttgtggctgccttacaccaaccctcttccaccagtatgagactcccagggagcggacaggactcttcctcccactatagaaacccagcaaggattctcctgctctctcctggcagccagggcgtggaactacaccagccgattgaatgcacctaggtggaagtttcattcttgagcagtgataggaagacaagatcactgaaagaagagattcctggscgggcatggtgactcatgcctgtaatctcagcactttgggaggccgaggcaggcagatcacttgaggtcaggaattcgagaccagtctgaccaacatgatgaaaccccgtctctactaaaaatacaaaaattagctgggggtggtggtgcatggcctgtagtccctgctactcaggaggctgaggcaggagaatcgcttgaacctgggaggtggaggttgcacatgcctgtagtccctgctactcgggaggctgaggcaggagaatcgcttgaacctgggaagtggaggttgcagtgagctgagatcgcatcactgcactccagcctgggtgaaagagtgagcctctgtctcaaaaaaaaaaaaaaaagaccagattccaggtggtatatgtggcagggcaggggttcttctagaaggtccccaatctcctgctcctcagtttccctttgactcactgagtaccccctggcatccttctgtggcagatcctcctgggtgcttccttaatttcattctctccaatttttttttctaatttgtgatttgctggctaaaagacttcatttcccatcctctcttaaagctggtgtggccgtgtgagcggcttcctgcttaaggaatgta

SEQ ID NO: 58778 - DNA, 859 bp, Homo sapiens
tgtggttgaggagaatggggtcagtgggggaaagagtagaatgtggaaatggatctttggacagtgccagcaggactaggctgaggcatttgtcttgacataatatctaaagagtcaccaaaaccctcagtaattaagataaacaataatttaatgcagcttttttttttttttttttttttttttgagactgggtctctgtcgcccaggctggagtgcagtggcccaatcatggctcattatagcctccaccttctgggctcaaacagccctcccacctcagcctcccaggctgggactataggtgtgtgccaccacaaccagctattttaaaatttttttgtagagatgggggtctcactatgttgcctaggctggtctcgaactcctgggctcaagtgatcctcctgccttggcctcccaaagtgctgggtttacaggcatgagtcatcacgcctggcctacagtatttttaagaatcaaaaatttatgcaagaaaatctatagtgaacaatatacttttatttttatttaaaaattttttttaaaaccacaaggtcttgttctgtcacctaggctgatgtgcattggcacaatcatggctcattgcagcctcagcctcctccgtctcaagcaatcctcccacctcagcctcctgagcagctgggactacaggcaggcaccaccatgcccagctaattgtttkgtatttttttatagagttggggtttcatcttgttgcctaggctgaagatatattttaaagtaagttttaagaaggtatagaagagtatgtagaacacattatattggtgtaatgcaaaagaaactgtatttgcatatgtgcattcttgtatat

SEQ ID NO: 58779 - DNA, 1089 bp, Homo sapiens
aaaacccaaccctctggcttaaccaagaggagatcatttcttacctaacaagttctccagagatcagcattccaggactggtgtagtgactcaacaaccttgtgagagaccggacccagattcttactgcctttccattctgccgtctgtggtgtgctggcttttgttatcatgctggttgctttgaggtcacaagatgacaactccatctccaaccccagcttcatctgataaataagaacratgtccacaggcaccactagcagcaaagagattttggaggagcatgtcaggtgggcacattaccatcccacacaaaattaggatgtgttggtagtgaagaaggggagaatggaccctgggagagaaaccagcagtttcagccgaactatacgatggatatgatcttcctcttacaaatgaagctcagtggctgggggcggtggctcacgcctgtaatcccagcactttgggaggccgaggcaggtggatcacaaggtcaggagttcgagaccagcctggccaatatggtggaaccccgtcattactaaaaatacaaaaattagctgggtgtggtggtgggtgcctatagtcccagctgctccggaggctgaggcagaagaatctcttgaacccgggaggcggaggttgcagtgaactgagatcgggctactgcactccagcctgagccacagagcgagactccatctcaaaaaaaaaaaaaattttctagtcagtttctactactgtcttgaagctactctaaatggcgtccaggaaataaatattactgatttaagactgtgcctctaataaatgaatgaatatatatttaacaacctgcctgcaatactggcctcacagacttttacatagctggctcattcttgtcattctgggctttgctcaaaagttatcttttcaaagaggcctttcctgacctccactgagtccctcaccattacaaggttctattttgttttcttatagcacgttgtagtgtctgaaatgatctacacactctccattagtatgtatgtaacacgtatgtatctccacaaccagttcagttcctggatcattgtaggc

SEQ ID NO: 58780 - DNA, 681 bp, Homo sapiens
atttcctgccatgaggcactgctgtccctcatccattccaaacactggttcgattttgaatggatgatgtgaggcttgaaggtgtttgggacattaacaatgtccctaaaagcaacagaataaagtaatggattattactcaaagcaaaataaataagtatccatccctactgatataaatgactgaacaaatcaacaaatatgggagaagacaaatctcttatgcagaagaatcccaaattatttatgtggataccccgccctcacggtgggggagcatcactcttcattcgtgaagtatggctgcacatagtggcttcttccmaaagtgtacagttttcaagggagggtgaggagggtcactataagttggagaaacctgacagacactacttagtgaactaggtcaacaccaacagtcacaattcaggtcgatagtatgtgcccttgataagatatgagaataatggcatttacttcggtggtcctcctcctgataacctataattccagactttcaatggaaaaaatcagacagattccaatggtggctcatcctacaataacatccaaccagtagtccttgacactgtcaaaaaaaaaacaacaagaaaattctgctgggtgcagtagcatgcacctgtagtcctagctacttgagaggctgaagtgagtggatcc

SEQ ID NO: 58781 - DNA, 1212 bp, Homo sapiens
aatatgaagagtgtcggcctgggcattaggaaacctgatttctattgtttagaaaaaaacactattacttttaaagaaaacaaaatccaaactctttattatgacccttacttgtcaagccaagtctaactctctagtctaaagtctctcagcactgtctcttatgaatcctacactctggcaaaactaaactattgtcagtttacagagcaacttgtactttctctcacatctctatgccatctgctgctccttctacctagatcttcttcccattgcttaacttgatgtacatgtggtaggggctgttctgtctcaccccaggttagatgcccctctcctgcactmcacagcatttcttcactcaatataggttattcagtgacagacacaagccatgcactgcacaaggtattggacatgcacggtaccagagacatgaccctaccccaaaggaatcttgtggtgaagcttactagagaggccattaaaattttgccttttctgtcagtctcttcctcctccaagtaaacaacaatattctaggccaggcgtggtggctcacgcctgtaattccagcactttgggaggctagggcaggtggatcacctgagatcaggagttcgagaccagcctggcgcaacatggcaaaaccccgtctctactaaaaatacaaaaattagccaggcatggtggcacacacctggaatcccagctacttgggaggctgagacaggagaatcactcgaatccaggaggaaggggttgcagtgagccaagaacgcgccactgcactccagcctgggtgacagagcaagactccatctcaaaaagagaaagattctagggacagtgacaacctctttcagctctgcagcctcaggacctaaacaccaggtaaacaacttaagcactattaattaaaaccaaagtaaaggtcagaaaagctccagttggttgcagttggaagcatttcttctttccatgcactctgcctttcctgcctttctattaggagtgtaaacctaaaaacatcacttgttgaattattctgacactcttggaactggctttcttctcttcattaaatatgaagacaaaccatcccagttactccccacatctactttttgttcaccattgtatacccaacagtatgcaccattatctaaaacagcatctagagcgcatgattatcgataaacatttata

SEQ ID NO: 58782 - DNA, 1098 bp, Homo sapiens
tgataggttgagcggtgcagcaaaccaytatggcaaatgtctacctaggtaacaaacctatgttctgtacatgtatcccagaacttaaaattaaatagaaatttttaaaaaggaaatagaaccatggaagcttaagcaaaatgaagcaaaggggaattacttcagttaagttttactttagagcagatgctaaagcaagaaactggggggacatggtttagttggaaggtgatcacaggaagtgtggtgaggaagtagaaaaataagacaggaaaggaaaagaagccagcagcagggaaattcatgggaaggttacttctggggataacagggatttaaccccacaagggccctccaataacagtgtaggacacacctcattactgtctccctgagcagcaaagaagccagggtatgccaacttctatccctcatcattaaagacagttctggggggcatttatttatcccctgccacttcaggtctgccatatgcaggagccaaacacaatcgtatggccagagaacattcttaggcagagagatgcctgtgcttgaggtgagaagccatcactgtgttgggaactgtccatctaagcttcaggtgaccctcagggtgggccaagaggatatgagtggggcatcaacaacatagctacagggaatattctagctcaagtgactgaaaaaaaaaaaaaaagtagctaagcttactccatgcacaggtgaattcaggacccaaaatctgtcatctggatttcgtgttcctccttcttgctgttctgctgccacacagttggctctagttgttggctccaattcttggctccaagtggaagcaagatggtagcagtgattttattccctacatcttttcaggttcacttttaatagaaaataccaagtcttttcccccaggagctcttatctttagagacgcatattgaaaagtatagagatgaaatgataggatgttgggaatttgctccaaaataatctactgtgggtggcgataaaatgaattaagattgtccatgagttgataaatgctgaagctggatggtgagtataggagagttatctctgcttatgattaga

SEQ ID NO: 58783 - DNA, 1098 bp, Homo sapiens
tgataggttgagcggtgcagcaaaccactatggcaaatgtctacctaggtaacaaacctatgttctgtacatgtatcccagaacttaaaattaaatagaaatttttaaaaaggaaatagaaccatggaagcttaagcaaaatgaagcaaaggggaattacttcagttaagttttactttagagcagatgctaaagcaagaaactggggggacatggtttagttggraggtgatcacaggaagtgtggtgaggaagtagaaaaataagacaggaaaggaaaagaagccagcagcagggaaattcatgggaaggttacttctggggataacagggatttaaccccacaagggccctccaataacagtgtaggacacacctcattactgtctccctgagcagcaaagaagccagggtatgccaacttctatccctcatcattaaagacagttctggggggcatttatttatcccctgccacttcaggtctgccatatgcaggagccaaacacaatcgtatggccagagaacattcttaggcagagagatgcctgtgcttgaggtgagaagccatcactgtgttgggaactgtccatctaagcttcaggtgaccctcagggtgggccaagaggatatgagtggggcatcaacaacatagctacagggaatattctagctcaagtgactgaaaaaaaaaaaaaaagtagctaagcttactccatgcacaggtgaattcaggacccaaaatctgtcatctggatttcgtgttcctccttcttgctgttctgctgccacacagttggctctagttgttggctccaattcttggctccaagtggaagcaagatggtagcagtgattttattccctacatcttttcaggttcacttttaatagaaaataccaagtcttttcccccaggagctcttatctttagagacgcatattgaaaagtatagagatgaaatgataggatgttgggaatttgctccaaaataatctactgtgggtggcgataaaatgaattaagattgtccatgagttgataaatgctgaagctggatggtgagtataggagagttatctctgcttatgattaga

SEQ ID NO: 58784 - DNA, 1098 bp, Homo sapiens
tgataggttgagcggtgcagcaaaccactatggcaaatgtctacctaggtaacaaacctatgttctgtacatgtatcccagaacttaaaattaaatagaaatttttaaaaaggaaatagaaccatggaagcttaagcaaaatgaagcaaaggggaattacttcagttaagttttactttagagcagatgctaaagcaagaaactggggggacatggtttagttggaaggtgatcacaggaagtgtggtgaggaagtagaaaaataagacaggaaaggaaaagaagccagcagcagggaaattcatgggaaggttacttctggggataacagggatttaaccccacaagggccctccaataacagtgtaggacacacctcattactgtctccctgagcagcaaagaagccagggtatgccaacttctatccctcatcattaaagacagttctggggggcatttatttatcccctgccacttcaggtctgccatatgcaggagccaaacacaatcgtatggccagagaacattcttaggcagagagatgcctgtgcttgaggtgagaagccatcactgtgttgggaactgtccatctaagcttcaggtgaccctcagggtgggccaagaggatatgagtggggcatcaacaacatagctacagggaatattctagctcaagtgactgaaaaaaaaaaaaaaagtagctaagcttactccatgcacaggtgaattcaggacccaaaatctgtcatctggatttcgtgttcctccttcttgctgttctgctgccacacagttggctctagttgttggctccaattsttggctccaagtggaagcaagatggtagcagtgattttattccctacatcttttcaggttcacttttaatagaaaataccaagtcttttcccccaggagctcttatctttagagacgcatattgaaaagtatagagatgaaatgataggatgttgggaatttgctccaaaataatctactgtgggtggcgataaaatgaattaagattgtccatgagttgataaatgctgaagctggatggtgagtataggagagttatctctgcttatgattaga

SEQ ID NO: 58785 - DNA, 1345 bp, Homo sapiens
acttctttgccagcacttattttaaataactattgatataaaaagtgacagcgaagatttagatatcagaagctacttatattctgggccaatgtacccttaaaagttgatttctctcctgctttctctcagacaactgctgtttatatttgtaagcttgtgcaattccacaaattaacaaacatgagtataacattttttattactcacattaactgctatttttcaatccaaaggaaaatgaaggagaaatttcagagcgatggtcacaaaaccaaattttataggggccaagtgtgtaccatgagtgagtgaagtggtccagatacgtaaagaggtaaactgggggggtccacgccctacctggagaaaaagatattactcacttccatctgaatactgccatttcaacagacagtatcactggagcttttaaatctttaagagaagtcaaatatccagaatttcatgtaacatctcctgatttgtcaatgttggagactaagtcaaagcaccatgtgggctgaataaaactcattcatcctgtggcctgtcactttgcaaattccattataaattctattaagtacttttcactttttaaacctaagacaaaaaggggaagttttcatccagtgaaatgacatgatcacatttgtgttgaatttatttctaatgcaaccacatatacacagtgacacacacatttacacaaacctctgagtgtatgaataaactacctttgaaaccataagttcttaagggatagctttttacctcaatattacagctttggccagcactgagcaaagactgttttcctttcagtgaagatctatgtaaggatgtaggctgttgtaataataacctacttcatataagagaaaataagctcccaaatacaatgtgattagcctcagtggtcaatctaagcacaattgtcccaggaacctggacaccatcctaactgcagtcgtagaagtcaccaactgtgctctcctggcccttggtcaggactgcaatgaaatcgtctcaggcaaaggtgcatgcacccagatttttaaacccagtttttttacaatgcaacttcaacatctgcatcaataaataaaccacgtgaacaaccaaaacgacttttttagacagtgagaagagctgtgtgcaagacaaaatgggccatgagatagagagtgctaagggggagcggtcaaggaggatctatcactcctaaagagatgacattctggctgtggctagaagaacccaatcatgtaaatttcattttatttcttaaaaaatgttatgggtacatagtrggtgtatatatttatggagtacatgagat

SEQ ID NO: 58786 - DNA, 659 bp, Homo sapiens
ctcaggttcccttccatggaggtggctatgttacccatttcaggagggaaaatattaattggaatggaaatttctttctgtttgtgatttttttttgctgaagtcggcatatggaaaggatcttctcttaaactacaatccctgacttgaaaactacaatccctgacttgaaaaagsttaattgtttccattggtccctaacagtgactcttttgccaaaacaaaaataaactcactctaaaatgtaagttgtgatttccaaaaatcactgacaccttgaagcttggctcacaaactcactcaaagaatttaagataatttggggtgattttggggggagttggggaccactttaaaatctaatgaaggctacggacccttccagaggagtgcgtgttcataaacatgcagtcaaaattatgtgcaatttcaggggatcacagaccctctgaaaccctttcatagacttccttggatttgatttatttattggtttattaaacacagttgatccttgaataatgcaggcgctagttgcattaacccccatgcagtttaaaatccatgtataacttttgattcccataaactatagcccactgttgatcagaagccttaccaataacatagacagtcaattaatacaaattttctatgct

SEQ ID NO: 58787 - DNA, 161 bp, Homo sapiens
ggtgttggtactaacactgaccatgatgagtctctgtgcaatgagtgcctgccctggacartgaaggctgttctaaattcttctaatactagcacctacaagagaatcaggtaaaaagaaagcaggtcagtaatttttttttttcctctctgcttgcacta

SEQ ID NO: 58788 - DNA, 1065 bp, Homo sapiens
ttattttcctttgggtatatacccaataatgagattgctgggttgaatgatagttctattttaagttgtttgagaaatctccaaactgctttccacagtggttgaattaatttacgttccctgcaacagcgtataagcattctcttttctctgaaatctcaccagcatctattatttttttactttttagccattctttcttgtgtgagacaatatctcattgtagttttgatttgcatctctctgaaatgcaatgatgagcatttttttcatatattcattggacttatgtatgtcttcttttgagaaatttctgttcatgtcttttacgcattttttttaaatgacattgttttttgtttgttgattgaagttccttgtagattctggatattagatctttgttggatgyataatttgtgaatattttctcccattctgtaagttttctgtttattatgttggtagtttcttttgctgtgcagaatctctttagtttaattaggtctcacttgtaaacttttttgttgcaattgcttttggggacttagccataaattctttgcaaaatgggtaaagaatgtcaagatgggtaactcatgtcaagaagaatgtcaggaagaatacttcctagattttcttctggaatttttgtaattcaatgtctgaaaattaaatctttaatctaccctgtgtgaattttttatatggtgaaagagagggatccactttcattcttctgcctatggctagcctgttaatctagcaccatttgttgagtagggagtcctttccccattgcttattttgatcaactttattgaagatcagataattgtaggtgtgtggctttatttctggattctgtatttgattccattggtctatgtgtctgtttttgtacaagtactgtgctgttttgatttctgtggctttatattatagtttgcaatctggtaatgtgatgcctcctgcttggatccttttgcttcatattcctttggctattcaggctctttctaggttccacatagatttcataaatgttttctaattctgtgaaaa

SEQ ID NO: 58789 - DNA, 2426 bp, Homo sapiens
gggaaacagggcaatactgtgtctgccctcctgtgcttccatatcaatgccatgtagcttggtgctgtggggctgcaacacattagtggtggtgcctgttgaaaacattggaaatgcctggaagaagcaatggcacctgatggatgtggagtattcagcagagaaaagatgaagagaaggaaaaatagtgggtgtcacatagtctgtgattggaatagcttggcagttcatggaagaaatttcttagagccttccagtaaattttaggggttctttgtagaaagctgtggttctgaacatggagagaaaggtcaggaaaatatggctaagtgatggaatttttgtggcataatttcaaactggaagctggtaggatcctttggaaatagggattatgtacacacgtatttatgaataactttatagagccattcattccttcaacatttattcagtgttttgtaaatgcggaaaatcatgctagaagtattttttaaaaacagtagtttcacaatgaaaagtgttgaaaataaacctctatcagattttctttgctggtgaaacaggatagacgtatcttttcctcaggaagctagtggagttaccttttaaatggtaacttttgggaaactgtacagagagctatctaagattgcaggccctggagtcaggctgccttctttgaagcaagctctgtccccatacttgctgtgtggtcatgggtaagttactcaatgtttctgggcctcaatgttctcatcctttgaaggggaaattaatagagaagttaaattggatcacctggtgtagatgctgtagatgtaccacctaaagccattgagtctgcctatttcatgtctgcagatcaactcccactaatccctgtctatatctctttgtcaggctttatccaaagctgttgaaggctgcacctttgaggtgctagggaatgaatgsccaaggagcatctcccaaataatgaccgaagggaattggtagataaatacccatgttttatgtgggattaagcttcagtttcctggagtgataactggcttgataatgcacacactcgttcttggcttccttcccttccctgtctcatctctctacctcttttctagttttcactatatcttgcaaattaacaacttgcccttgaatctttgttagagtctttttctgaggaactcaaaccaagatataattcacgtaaaggatttagcacatagcaaacactaaaaaatacaacaaagcaaacactatgttattactattggataacctcttacttttcctgtttcatctcaaaagttctggattgttgaatatcatgaagcaatgcactgcccttttgaatgcttaatctttttttccaagctcttaattgtcatggtatacataagaaaaaaaattatttgagataaaatcatagcgcctgtgagaggttgttccccaagccacagtttttgttacataatgttttccctgtggatctctggatatttcagtgagtaaccaatgaactccatcctatttatatatctgtataaatttagctgtttacaggatgtttgcctgattaatgaatggagaaggatgaataacggaaatataccaataataatatgataatgacatcaaagtatacttgtgttatgacatgaatattaaaggtcaggcagttctaggaattctaaattcatcttaaaggacatttcagtctttaactaatggaaaggtgaacttcaaacatactgaccttgggtttttgttttgactattagttttgatgtggatgcatttgaaattcacaggaacagaggttcttctttgtcattgattagtgcttctccaagtgaagactcttttggatggattttatttgtgttttcttcttgaaagaaatataaagaaataagcatcatgcattagggtatttgaaatataagacttgtgacgcttgtctatatattttatttaacaaattggttaagattatgggctctggagtcaggcagtctgagatcaaattgtggttctacaactagcaaaatacttgattttggtcaagttgctccatgtgtctactaagccttcaatctaaaattaaaattgtgccagcatcatgaggccatcgtgatggtgtgtctggcacacggttagcactccattagtcttacctactgctattccttttaaagggattctttttcttctaccttttctcctttgaaatggagaaaaatcaatggtgtgaagggtttacaaatcttctaaagttttgtgcacataaaacaatgtgttaatgtctgtctccaaatgtaagtccttatattttttgtgtcaatgttgattgaggaggtaccacattttatttcctcatggaagagctttttgtacacaaggagccacatttagaatct

SEQ ID NO: 58790 - DNA, 746 bp, Homo sapiens
cccaagcagctgggattacaggtgcctgccacctcgcctggctaatttgtgtatttttagtagagacaaggtttcatcatgttagccaggctggtcttgaactcctgacctcaggtgatctgcccacctcagcctcccaaagggatgaggtgacaaggtgtgagccaccatgcccggcctggagacatgtttggttgtcacacccgggaggtagggattaatcagtggcgcctaaggatgctgcctgacatcctgcaatgcacaggatggctcccacaacagggaattatccaggcccaggtgtcaatgatgctgagttgggaaaccctaatatagatgagtaccataaagtcatgttccacgtgccaggcattcgggctttgcaagcattaactcatttaatcctccctaaattctatagatgatattattatccctagtttgctgattacaaaactgatgctggcatgatgagaggttaattaacttgctgtcatgaaccctggtgttttgactcagagactttgtttgaagcctatcccacacggatatcccagcaggtcagtggattgaaccccagaacaaatgtcccctctctccataactcaytttatcccagggaccacctcctgaagctcccactgttcagtctagaaactctgaaaatgtgtattataaccttctttgtcacgctgtttccagcatgttctgtctggcaaaagggattgggactaaatggaatcagg

SEQ ID NO: 58791 - DNA, 715 bp, Homo sapiens
tcacatatagctaaatacaagtatgttgttcacatttttcaaatatagtttttttattttgaattttgtgtgcctttttaaattttctaattacaatggcattattttataatgaaaggtgtattttttttwaaaaaaaatggctatttcagacataactctctgataattctcataacagaaatatggctgagtaaataatatttccacatgaacaggtatttcaatacatctattttgaatttgtaaagtagcatattcgttgtgtgtggttaaaattacttaacgccccttcgaagggaggggcgttaaggaattttaaggatatgtgcaaaaattctcttatctttacctaacaagttttattagataaactaacaagttttcaagttttcttgaaactgtgattgaccagtagttttcaacagaaatggcactctgccatgttctaaacccagaccatataaaatggcagcttgcatatcctgtcttttgggactatcgctcttgtgagaaagcccaagttgtctgtggagtgggctaggaggaggggatttggggtcctcaatctcacaaccaaggctgagctcctagctgacagccagcaccaaccgtaggtcacatgagtgaaccatcctgaaagcagatgctctgtcccctatatgagccaccccaggggacacaaggtgaagaaaagaagagcagtccacactga

SEQ ID NO: 58792 - DNA, 1758 bp, Homo sapiens
tgtaccaagtagcttccagtatctccacagagaggtaaacttgtatactctacttccttgcagcagcagcttttctatttcacagagaaaacgggagccagcagacaagaactccctcagctttccactctcaaacctatgcactgataagtgcaggcacctttacctcctctccttcagtccgtgagaaagacaagttttttgttgttgttgttgttgttgttttgtttttgtttgtttttctcttgttcaaggctaattccttgattccatttttgttgttgtcttctgtttgtttgtttgttttttggtttgatcatgcaatggcatgatctcagctcactgcaacctccacctcccaggttcaagcarttctcctgccccagcctcccaagcagccgggattacaagcacccgccaccatgcccagctaatttttttatttttagtagagacagggtttcaccacgttggccaggctagtcttgaactcctgatctcaggcgatccatctgtctcggcctcccaaagtgctggtattacaagcgtgagccattgcgctcagcgattccaatcttttcttttctcttttgtacattttttttctaatgttctgatgttttcaaacatgccctcaagctctttagtctcagcattcaaataggatgaattgatgcactggctgaaagaacattaacaacaatgaagaaaacctctctttttgatccaagtcattctctggctatcctaccattgatagaccaatttcctaactgccatctctacttcctcatatctcttcagctgctaaaatgtgtctgaaatactctggcaaaggtcaccacagacttgaaaatttcgagtcccaacagttctctccagacttcaagtggcatgcattttcactggcattggaaactcctggttccccctccttgggcttcagtgatacccatctcaactggttctctcaaaccacaacaatgaagatggggatgaaaacgaaggagtgcatttgaaagctacttccttggtaagacaattgtttggttattaggggtggcagagaaaaataatgtttcgcttttgtggttctttaaatgggacagagaatatgaaagtaagagagaagggaattttaagaaactagaagtagtcatctacagcatctactacaacatctactactgcaggaagataaaggaagaaaagatacctatatggaggcgggagggaaggaaggtaaaatagggaatgcaggtacatggggtcctaacatctaccattatttttgtttcttattgcaaaagaaggatgtattctgcatagaaaaaatatatagataaattttaaagacactggccgggcgcagtgactcacgcctgtaatcccagcacttcaggaggctgaggtgggtggatcacctgaggtcaggagtttaagaccagcctgaccaacacggagaaaccccatctctcctaaaaatacaaaattacccgtgtatggtggcgtatgcctgtaatcccagctctctggaggctgaggcaggagaatcgcttgaaactgggaggcagaggttgtggtgagctgagatcacaccattgcactccagcctgggcaacaagagcgaaactctgactcaaaaataaaataaaataaaataaaatttaaaaacactaaaacatacgcaaaccacatccacctctacattattaatgccttagtataaaatcttctcattcttattacgtaggtatt

SEQ ID NO: 58793 - DNA, 726 bp, Homo sapiens
ataagtgagtttattgaggatatgatgggaaaaggccaatatcaaaatcaattgtatttctatatagcatagaaataaattacaaattacaaattccaatatgttccaaataaacattcagaaaatagtattttaataaaaattttaaaaaatasctcagggtaaaatttgagaaaagatttccatgatttctacactgaaaatagtaaaatattgctgagaaattgaagaggatctaataaagtatgagacatgccatgtacattaattggaaatctcaatattgttgacacgtcaatcctccccaaagttatagattcaatgcaatcctaataaaaattcagttagtctttctttttaaaaattgataagataatctaatattttaatgggaaagatatggaatactagatttttttttaaagaagaacagttgaagtcagtgtagtattggcagtaggatagacatgtagatcaatggaacaaaataatccagaaatagtcacattaaggttaaataaatgtttactcaagtgctactgtaattcaatgggaaagaatggtcttttcaacaaatggtgggggaagaactgaattatctatagaaaaaaaatgagcctcaatttctgcctcctatcataaaaacaaatataatgtacctgttgagtgaccgctgttgctaaattgcccccagaactgtctcccgcaatgcagattcgggtggga

SEQ ID NO: 58794 - DNA, 726 bp, Homo sapiens
ataagtgagtttattgaggatatgatgggaaaaggccaatatcaaaatcaattgtatttctatatagcatagaaataaattacaaattacaaattccaatatgttccaaataaacattcagaaaatagtattttaataaaaattttaaaaaatacctcagggtaaaatttgagaaaagatttccatgatttctacactgaaaatagtaaaatattgctgagaaattgaagaggatctaataaagtatgagacatgccatgtacattaattggaaatctcaatattgttgacacgtcaatcctccccaaagttatagattcaatgcaatcctaataaaaattcagttagtctttctttttaaaaattgataagataatctaatattttaatgggaaagatatggaatactagatttttttttaaagaagaacagttgaagtcagtgtagtattggcagtaggatagacatgtagatcaatggaacaaaataatccagaaatagtcacattaaggttaaataaatgtttactcaagtgctactgtaattcaatgggaaagaatggtcttttcaacaaatggtgggggaagaactgaattatctatagaaaaaaaatgagcctcaatttctgcctccyatcataaaaacaaatataatgtacctgttgagtgaccgctgttgctaaattgcccccagaactgtctcccgcaatgcagattcgggtggga

SEQ ID NO: 58795 - DNA, 726 bp, Homo sapiens
ataagtgagtttattgaggatatgatgggaaaaggccaatatcaaaatcaattgtatttctatatagcatagaaataaattacaaattacaaattccaatatgttccaaataaacattcagaaaatagtattttaataaaaattttaaaaaatacctcagggtaaaatttgagaaaagatttccatgatttctacactgaaaatagtaaaatattgctgagaaattgaagaggatctaataaagtatgagacatgccatgtacattaattggaaatctcaatattgttgacacgtcaatcctccccaaagttatagattcaatgcaatcctaataaaaattcagttagtctttctttttaaaaattgataagataatctaatattttaatgggaaagatatggaatactagatttttttttaaagaagaacagttgaagtcagtgtagtattggcagtaggatagacatgtagatcaatggaacaaaataatccagaaatagtcacattaaggttaaataaatgtttactcaagtgctactgtaattcaatgggaaagaatggtcttttcaacaaatggtgggggaagaactgaattatctatagaaaaaaaatgagcctcaatttctgcctcctatcataaaaacaaatataatgtacctgttgagtgaccgctgttgctaaattgcccccagaactgtctcccgmaatgcagattcgggtggga

SEQ ID NO: 58796 - DNA, 1038 bp, Homo sapiens
atgatggagtttaactggtgtctaaccctcctttgggaatactcaactagtaagggaaaaatgccttagatgagcatgcacacaacttcagtaaacgtactgcacatgcagctcctcctaagtgctagcaggccactgcacatgyggacagcccatctcaagagaagaatcagggagaagaaatgcaaagcccagaatcttgccaatgtataaaaccccaagtcgaaggttggacagagcacttggatctcgctagtctcctgcttggcccttttccaagtgtactttacttccttttgttcctgctctaaaagtttttaataaactttcactcttgctctaaaccttgtctgtctctcaccctgccttatgctccttggctgaactcttccttctgagaaggcaaaaatcgagttgctgcagacctgtacagattcaccactgctaaaacaacaaatattcatcatttaatatagcttagcaaaattctgagggtatagttattaaaaatatttgaaaaaccattttaagcaaacgtattataaaacataattattgttaaaagttaatttataacttttattcattcttgacagttgtttggaaattttcatgttagacaaatacagccattatctcaagttaaatttcctatttgccatttttatgttactgtttgttaggcaagtatgaaaaaagcgagaactttgaagttaaatatgtatattttctggataactcagaggacgtagttgttttattaaaataacaatactaaactactttagtttaatagcaaccgtatttaccaaaagagttattcaactcacgtgaacctgaaaagcatttgggcatattaatttatgagtgcttatttatttataagtcaatttagtaccatactggtaataaaccattgcagatgctgaccatgggtgaaaatgcaaccttcactcacgaagcgggaaggcatagctggcaggaatattcactctcctacatagtgccaaagcctcccactgtcattaacctttgagt

SEQ ID NO: 58797 - DNA, 1038 bp, Homo sapiens
atgatggagtttaactggtgtctaaccctcctttgggaatactcaactagtaagggaaaaatgccttagatgagcatgcacacaacttcagtaaacgtactgcacatgcagctcctcctaagtgctagcaggccactgcacatgcggacagcccatctcaagagaagaatcagggagaagaaatgcaaagcccagaatcttgccaatgtataaaaccccaagtcgaaggttggacagagcacttggatctcgctagtctcctgcttggcccttttccaagtgtactttacttccttttgttcctgctctaaaagtttttaataaactttcactcttgctctaaamcttgtctgtctctcaccctgccttatgctccttggctgaactcttccttctgagaaggcaaaaatcgagttgctgcagacctgtacagattcaccactgctaaaacaacaaatattcatcatttaatatagcttagcaaaattctgagggtatagttattaaaaatatttgaaaaaccattttaagcaaacgtattataaaacataattattgttaaaagttaatttataacttttattcattcttgacagttgtttggaaattttcatgttagacaaatacagccattatctcaagttaaatttcctatttgccatttttatgttactgtttgttaggcaagtatgaaaaaagcgagaactttgaagttaaatatgtatattttctggataactcagaggacgtagttgttttattaaaataacaatactaaactactttagtttaatagcaaccgtatttaccaaaagagttattcaactcacgtgaacctgaaaagcatttgggcatattaatttatgagtgcttatttatttataagtcaatttagtaccatactggtaataaaccattgcagatgctgaccatgggtgaaaatgcaaccttcactcacgaagcgggaaggcatagctggcaggaatattcactctcctacatagtgccaaagcctcccactgtcattaacctttgagt

SEQ ID NO: 58798 - DNA, 1038 bp, Homo sapiens
atgatggagtttaactggtgtctaaccctcctttgggaatactcaactagtaagggaaaaatgccttagatgagcatgcacacaacttcagtaaacgtactgcacatgcagctcctcctaagtgctagcaggccactgcacatgcggacagcccatctcaagagaagaatcagggagaagaaatgcaaagcccagaatcttgccaatgtataaaaccccaagtcgaaggttggacagagcacttggatctcgctagtctcctgcttggcccttttccaagtgtactttacttccttttgttcctgctctaaaagtttttaataaactttcactcttgctctaaaccttgtctgtctctcaccctgccttatgctccttggctgaactcttccttctgagaaggcaaaaatcgagttgctgcagacctgtacagattcaccactgctaaaacaacaaatattcatcatttaatatagcttagcaaaattctgagggtatagttattaaaaatatttgaaaaaccattttaagcaaacgtattatraaacataattattgttaaaagttaatttataacttttattcattcttgacagttgtttggaaattttcatgttagacaaatacagccattatctcaagttaaatttcctatttgccatttttatgttactgtttgttaggcaagtatgaaaaaagcgagaactttgaagttaaatatgtatattttctggataactcagaggacgtagttgttttattaaaataacaatactaaactactttagtttaatagcaaccgtatttaccaaaagagttattcaactcacgtgaacctgaaaagcatttgggcatattaatttatgagtgcttatttatttataagtcaatttagtaccatactggtaataaaccattgcagatgctgaccatgggtgaaaatgcaaccttcactcacgaagcgggaaggcatagctggcaggaatattcactctcctacatagtgccaaagcctcccactgtcattaacctttgagt

SEQ ID NO: 58799 - DNA, 1011 bp, Homo sapiens
ttgacccctgctccacacccccatcagggtaggagtgtcccctctcctcaacaacaacctttacctgtgatggttcgtgggtccccccatgtatgagcctctgagagcagtgctccgccaggggtctgcaaagtaagatccagcccccaactatgcatcaggtgcagagtctcaaargcattgcaaacccaacacgtacaagcccaagatcataaactctctgcatcctccaaacccagctcttctccagtctcctcaccctgtaaataacacctccatctgtccatgcagtggccccggccaggagcctgggtgctgtcctaggcacctcctctcctccctcactgaacctggcagccaagcctgtccattgacccctaatgcctctgagcccatcctctcctctccatctttgcagtaggatcctttgttacagacactactaggaccccactctccccttcagagccgattgtgagtgattcacactcagtccttcgatccagactctaagatgtctaaggacaaagcatccagcttttcttcaccaccaagttctcactcccctgagcagggtctggcacgcagcaggtgctcactaaacatctgcttactgaatgcataaataagagctactgctcagtaagcacctactatgtgccagacattgtgctgaacacttaattgcatcaactggtttgttcctcccaaatcctaacataatcttcattacatagagtagaaaactgatcagatcacttgaaccacttgaactgaggctcagatcacttgggaggtggaagttgcagtgagccaagatcaccgcactccagcctgggtgacagagcaaaactctgtctcaaaaaaaaaagaaagctgaggctcagcaccgtaagtcacttacccagaatcccacagccagtcagtggcacagccgggtctcagagcccaagagcctctgacatttaactgcgtcatttctatgctgccgaaatacaaacccacactgac

SEQ ID NO: 58800 - DNA, 1011 bp, Homo sapiens
ttgacccctgctccacacccccatcagggtaggagtgtcccctctcctcaacaacaacctttacctgtgatggttcgtgggtccccccatgtatgagcctctgagagcagtgctccgccaggggtctgcaaagtaagatccagcccccaactatgcatcaggtgcagagtctcaaaagcattgcaaacccaacacgtacaagcccaagatcataaactctctgcatcctccaaacccagctcttctccagtctcctcaccctgtaaataacacctccatctgtccatgcagtggccccggccaggagcctgggtgctgtcctaggcacctcctctcctccctcactgaacctggcagccaagcctgtccattgacccctaatgcctctgagcccatcctctcctctccatctttgcagtaggatcctttgttacagacactactaggaccccactctccccttcagagccgattgtgagtgwttcacactcagtccttcgatccagactctaagatgtctaaggacaaagcatccagcttttcttcaccaccaagttctcactcccctgagcagggtctggcacgcagcaggtgctcactaaacatctgcttactgaatgcataaataagagctactgctcagtaagcacctactatgtgccagacattgtgctgaacacttaattgcatcaactggtttgttcctcccaaatcctaacataatcttcattacatagagtagaaaactgatcagatcacttgaaccacttgaactgaggctcagatcacttgggaggtggaagttgcagtgagccaagatcaccgcactccagcctgggtgacagagcaaaactctgtctcaaaaaaaaaagaaagctgaggctcagcaccgtaagtcacttacccagaatcccacagccagtcagtggcacagccgggtctcagagcccaagagcctctgacatttaactgcgtcatttctatgctgccgaaatacaaacccacactgac

SEQ ID NO: 58801 - DNA, 1011 bp, Homo sapiens
ttgacccctgctccacacccccatcagggtaggagtgtcccctctcctcaacaacaacctttacctgtgatggttcgtgggtccccccatgtatgagcctctgagagcagtgctccgccaggggtctgcaaagtaagatccagcccccaactatgcatcaggtgcagagtctcaaaagcattgcaaacccaacacgtacaagcccaagatcataaactctctgcatcctccaaacccagctcttctccagtctcctcaccctgtaaataacacctccatctgtccatgcagtggccccggccaggagcctgggtgctgtcctaggcacctcctctcctccctcactgaacctggcagccaagcctgtccattgacccctaatgcctctgagcccatcctctcctctccatctttgcagtaggatcctttgttacagacactactaggaccccactctccccttcagagccgattgtgagtgattcacactcagtccttcgatccagactctaagatgtctaaggacaaagcatccagcttttcttcaccaccaagttctcactcccctgagcagggtctggcacgcagcaggtgctcactaaacatctgcttactgaatgcataaataagagctactgctcagtaagcacctactatgtgccagacattgtgctgaacacttaattgcatcaactggtttgttcctcccaaatcctaacataatcttcattacatagagtagaaaactgatcagatcacttgaaccacttgaactgaggctcagatcacttgggaggtggaagttgcagtgagccaagatcaccgcactccagcctgggtgacagagcaaaactctgtctcaaaaaaaaaagaaagctgaggctcagcaccgtaagtcacttacccagaatcccacagmcagtcagtggcacagccgggtctcagagcccaagagcctctgacatttaactgcgtcatttctatgctgccgaaatacaaacccacactgac

SEQ ID NO: 58802 - DNA, 675 bp, Homo sapiens
caacttgaaagtggtgtcagcaatataagtgataaaccactgcccctcctctccaggctgcaggaatgtgctgacctggtctggtcagagaagccagaaaggcagagaattaaaatagaagagagaggcagacaaagaaggcaacagcacagattttggagaccaattgggtgctctggggctagcccagagtactagctcagctagtacttcactgtggggcccctgccatgcactcaacctctcactgcctgctcaggacagccaacaagactgtgagtggatccaatgaggtagcaagcatgaaaatgagatgtcaagtatcaggacagagactgtggcactcacattaaccttcttttactttttttccagcagaacccctgtttcattgggaacaatttcctctgcttaaaaacattacatttcccrcctggctgcagcagtcatgtgacacagctctggccaatgaaatgggaaaacactacatttctccacccctactttaggcagtcatgtgacacacctccaaccaatgagaggggagtggaggttgccacagggcattctgggaaagctccccggaagagatgggaacctgctggacttggttgtggacccatggctgccagtcctggcagtggactcgaggcccagtggggaggggcagccacc

SEQ ID NO: 58803 - DNA, 675 bp, Homo sapiens
caacttgaaagtggtgtcagcaatataagtgataaaccactgcccctcctctccaggctgcaggaatgtgctgacctggtctggtcagagaagccagaaaggcagagaattaaaatagaagagagaggcagacaaagaaggcaacagcacagattttggagaccaattgggtgctctggggctagcccagagtactagctcagctagtacttcactgtggggcccctgccatgcactcaacctctcactgcctgctcaggacagccaacaagactgtgagtggatccaatgaggtagcaagcatgaaaatgagatgtcaagtatcaggacagagactgtggcactcacattaaccttcttttactttttttccagcagaacccctgtttcattgggaacaatttcctctgcttaaaaacattacatttcccacctggctgcagcagtcatgtgacacagctctggccaatgaaatgggaaaacactacatttctccacccctactttaggcagtcatgtgacacacctccaaccaatgagaggggagtggaggttgccacrgggcattctgggaaagctccccggaagagatgggaacctgctggacttggttgtggacccatggctgccagtcctggcagtggactcgaggcccagtggggaggggcagccacc

SEQ ID NO: 58804 - DNA, 2016 bp, Homo sapiens
catcagataagcaagtggatttgaagtgtaggaggaaggagtaaaattagccatctgcaatgacttcctgcatgctgacgtcttgatttatactggtatacattccttggaagggcgggagagggaaaagtgctctcatacaatttcctgcccagatagttgtctagaagtgctcaggttctgtatgatttggagcggggaggatggcccaatttactttgaaagatgcttgttaatttgggggattctgagatttgcccaagaaatttgtcacagagcagattccagaaggactttgccgcttctgattttctacttaatttgcgcctgatcaaaaactaatggctcccttaaagactcaggtacgtgacatacatttctcaatctaacactgacttccaagcacctggttccagtggtaatattctgtaatcagactgaagatgggaaaccttgtggggaggagatacacattcagaccccggcaagggtgtgatggagaatctggcagaggaggaagaaggcaggcagcagattgaagttggccaggcatcaagttctgaaatattctgaaacattcaaatgtgactgttctcagatgtcccagctatccctgcaacagcctatcagaatcctgagctctcctgtgctcagacaaaataaaccacaccccttcccttcctccatcaggcaaagtagacgggatgcctacatcaagttaactacgttgtggacaaaatgcagggctcagatttgaacttgcaaactctcagtgttattccatccacggattcttcacgggcttgtgctcctgaccactgcctactcacaggacatcagaacagttaatatctccagagagcatgtaaatcccccaataattayggaagtaaaatgcatttacaggcacaacccttattagcaaggcagccaccataacaaagttacgaggaaaaggaaaatcctcatgtgtattcataagaagaaaatagctaaccccaaataatcacaatgctaaatatgcatctccctaggctaaggtgggtagttcttaataaagatatgtaggttagtcagcagttgctttgtttaaaatttgaggtggagcatgggaagcatgaaccaggtaggatataggagacagttctgagaaagggagagtctaaatcttgacccacgtcacctccccgtcatctcctccatgggcccttagggaaaccggctggaactgcatatgcagtagcttcctataaatgagtcctaattaagcccctgttcctggatgcctttctggagggttaccagatcattagtcttggtatcaaaaaaagagtctatgtgggaaaaggtcaaaggatccaaaggaaccttcagcatccctctgatgcctcctctccccccaggcagggctgcacaccggcctccaggcaggagaagggccatgtgcaggcgggattggaaatcttcttagatgcctctgtcctctcttgcacaggtgaaccctgtcgcttcacagaaaaaatattagccaagggcctttggtcatccagggcaagaagcatgagagtcagccattccctaggctccaggggaggaggcagattgcagccagatacaggacatactgatctcaggtcaaatgcgtgatttcttgaagtaaagttgcagttaataagatggcatgcttctccctccgggtcgaattctcttcaagcttccagcccatctcacacccgcaggggcctgcgtgctggactccaggtctaagggtacacactccatctgcttgggatgaagaaagactggagaaagagatgagagggcaagggagaaaggccaaggctagagaatgggtgggaagctccagagtgtggtctgcgtgaagcagaggaggcattacatcatggaggagaaccagaccaggcatttgccaacaaatgctggttctaaagacatgacactctcaccattgttccctagactgactaaaatggacttttataaaaaatgaaaaag

SEQ ID NO: 58805 - DNA, 2016 bp, Homo sapiens
catcagataagcaagtggatttgaagtgtaggaggaaggagtaaaattagccatctgcaatgacttcctgcatgctgacgtcttgatttatactggtatacattccttggaagggcgggagagggaaaagtgctctcatacaatttcctgcccagatagttgtctagaagtgctcaggttctgtatgatttggagcggggaggatggcccaatttactttgaaagatgcttgttaatttgggggattctgagatttgcccaagaaatttgtcacagagcagattccagaaggactttgccgcttctgattttctacttaatttgcgcctgatcaaaaactaatggctcccttaaagactcaggtacgtgacatacatttctcaatctaacactgacttccaagcacctggttccagtggtaatattctgtaatcagactgaagatgggaaaccttgtggggaggagatacacattcagaccccggcaagggtgtgatggagaatctggcagaggaggaagaaggcaggcagcagattgaagttggccaggcatcaagttctgaaatattctgaaacattcaaatgtgactgttctcagatgtcccagctatccctgcaacagcctatcagaatcctgagctctcctgtgctcagacaaaataaaccacaccccttcccttcctccatcaggcaaagtagacgggatgcctacatcaagttaactacgttgtggacaaaatgcagggctcagatttgaacttgcaaactctcagtgttattccatccacggattcttcacgggcttgtgctcctgaccactgcctactcacaggacatcagaacagttaatatctccagagagcatgtaaatcccccaataattatggaagtaaaatgcatttacaggcacaacccttattagcaaggcagccaccataacaaagttacgaggaaaaggaaaatccycatgtgtattcataagaagaaaatagctaaccccaaataatcacaatgctaaatatgcatctccctaggctaaggtgggtagttcttaataaagatatgtaggttagtcagcagttgctttgtttaaaatttgaggtggagcatgggaagcatgaaccaggtaggatataggagacagttctgagaaagggagagtctaaatcttgacccacgtcacctccccgtcatctcctccatgggcccttagggaaaccggctggaactgcatatgcagtagcttcctataaatgagtcctaattaagcccctgttcctggatgcctttctggagggttaccagatcattagtcttggtatcaaaaaaagagtctatgtgggaaaaggtcaaaggatccaaaggaaccttcagcatccctctgatgcctcctctccccccaggcagggctgcacaccggcctccaggcaggagaagggccatgtgcaggcgggattggaaatcttcttagatgcctctgtcctctcttgcacaggtgaaccctgtcgcttcacagaaaaaatattagccaagggcctttggtcatccagggcaagaagcatgagagtcagccattccctaggctccaggggaggaggcagattgcagccagatacaggacatactgatctcaggtcaaatgcgtgatttcttgaagtaaagttgcagttaataagatggcatgcttctccctccgggtcgaattctcttcaagcttccagcccatctcacacccgcaggggcctgcgtgctggactccaggtctaagggtacacactccatctgcttgggatgaagaaagactggagaaagagatgagagggcaagggagaaaggccaaggctagagaatgggtgggaagctccagagtgtggtctgcgtgaagcagaggaggcattacatcatggaggagaaccagaccaggcatttgccaacaaatgctggttctaaagacatgacactctcaccattgttccctagactgactaaaatggacttttataaaaaatgaaaaag

SEQ ID NO: 58806 - DNA, 2016 bp, Homo sapiens
catcagataagcaagtggatttgaagtgtaggaggaaggagtaaaattagccatctgcaatgacttcctgcatgctgacgtcttgatttatactggtatacattccttggaagggcgggagagggaaaagtgctctcatacaatttcctgcccagatagttgtctagaagtgctcaggttctgtatgatttggagcggggaggatggcccaatttactttgaaagatgcttgttaatttgggggattctgagatttgcccaagaaatttgtcacagagcagattccagaaggactttgccgcttctgattttctacttaatttgcgcctgatcaaaaactaatggctcccttaaagactcaggtacgtgacatacatttctcaatctaacactgacttccaagcacctggttccagtggtaatattctgtaatcagactgaagatgggaaaccttgtggggaggagatacacattcagaccccggcaagggtgtgatggagaatctggcagaggaggaagaaggcaggcagcagattgaagttggccaggcatcaagttctgaaatattctgaaacattcaaatgtgactgttctcagatgtcccagctatccctgcaacagcctatcagaatcctgagctctcctgtgctcagacaaaataaaccacaccccttcccttcctccatcaggcaaagtagacgggatgcctacatcaagttaactacgttgtggacaaaatgcagggctcagatttgaacttgcaaactctcagtgttattccatccacggattcttcacgggcttgtgctcctgaccactgcctactcacaggacatcagaacagttaatatctccagagagcatgtaaatcccccaataattatggaagtaaaatgcatttacaggcacaacccttattagcaaggcagccaccataacaaagttacgaggaaaaggaaaatcctcatgtgtattcataagaagaaaatagctaaccccaaataatcacaatgctaaatatgcatctccctaggctaaggtgggtagttcttaataaagatatgtaggttagtcagcagttgctttgtttaaaatttgaggtggagcatgggaagcatgaaccaggtaggatataggagacagttctgagaaagggagagtctaaatcttgacccacgtcacctccccgtcatctcctccatgggcccttagggaaaccggctggaactgcatatgcagtagcttcctataaatgagtcctaattaagcccctgttcctggatgcctttytggagggttaccagatcattagtcttggtatcaaaaaaagagtctatgtgggaaaaggtcaaaggatccaaaggaaccttcagcatccctctgatgcctcctctccccccaggcagggctgcacaccggcctccaggcaggagaagggccatgtgcaggcgggattggaaatcttcttagatgcctctgtcctctcttgcacaggtgaaccctgtcgcttcacagaaaaaatattagccaagggcctttggtcatccagggcaagaagcatgagagtcagccattccctaggctccaggggaggaggcagattgcagccagatacaggacatactgatctcaggtcaaatgcgtgatttcttgaagtaaagttgcagttaataagatggcatgcttctccctccgggtcgaattctcttcaagcttccagcccatctcacacccgcaggggcctgcgtgctggactccaggtctaagggtacacactccatctgcttgggatgaagaaagactggagaaagagatgagagggcaagggagaaaggccaaggctagagaatgggtgggaagctccagagtgtggtctgcgtgaagcagaggaggcattacatcatggaggagaaccagaccaggcatttgccaacaaatgctggttctaaagacatgacactctcaccattgttccctagactgactaaaatggacttttataaaaaatgaaaaag

SEQ ID NO: 58807 - DNA, 660 bp, Homo sapiens
cttaggggataaaggcctgcaggctcttttccttatttttaaagcaaattgctctattccctctcatggcttcagcacgtgggtgttggggaggagttcggctgtgcaggtgtgggagctagacgcccagtgtggtgtctggggagggttgatggacagcagctctaacgtgcttagagagtcaaggctggctcggcctttggaaatccaaataatctttaaatgccaactttatgcttcatagttatagtgaaccattcaggggtggctgcaattcaggaaatgatatcactgcactccccagtccagttagtgacccattagctaaaagctgccctgagtgtccacaagcccccattctcaaagccccctcaggtgccccactccctttaattctttcaacatctaggaaaaaggcgttgttcatactctattttacagaggmataaattgagacccagatggtggtgatgtgacttgtcccaggttatgcagtgtgtgaggggctttcagagtcccaggcctaaggtatccccactgggctacactgacacactcaagaaatgcaaactagagtgtgtgtatgtgcttgagtgtgtgtgtgtgtgtgtgtgtgtgtctacacatgcacctttacattcacttaggtagggatggctg

SEQ ID NO: 58808 - DNA, 757 bp, Homo sapiens
ttgcctgcagagggattatgctgtagggaggagagtgcctgtgatggctgcacagccagatggtgattccagcaccggccagatctgtgctgcgttcatctctctcatcaaaccctctcttctaattcctccgtgctctctctgttcttgtggtaatttccaccagctggcccttcagagaagcgtgtgtgtgtccagaagcatggaggccgcaggtgtactagctgatcctgtcctccccatgcaggactggagaggccttggaagcccagctcatgtcccacctgtgcactgcctgtgcagaagcctgtccctacgaacaggctccactgtcaacccactctgcttgccagatgaaaactgggtgagtcaagaaaaggcagcttctacctactcactccacttgttcgttccaggcaatgtccccatgtttactcacgcacgcattggattaggagacctggaatctgagatgtcccagcaagctttagctaaggtcatggttacctccatgaaactgctgctgtaagtgccacagctggagttataacgatttctctcctttcctgcaggtccctgcaggtaggctgctttcttttgtctcttaagtcactgccacttactttgtcctgcaaaataacttcccaaagactacactcccatgygggccagtcttcccaggtcccaccttccctccttgtatttgctaactcctttcttggtcctcagcttcattgctattcatccagtagatgag

SEQ ID NO: 58809 - DNA, 751 bp, Homo sapiens
tttttggaactcaaaaggcagacaaaagagtgaatgctgacaacattttgtctagatcccctttagccacccgttgccctcatgtctaacttctttgggttagtctctaacagctcacagctgctctctcttctgaagaattttccttgactgtatggtaggttcctcacccaggaggtgaaattcaccattcaggggaaacctacaaccaatgactgactgatggaggtataaacagaacagccctcttgtccaaaggggtattttttcccccagagtttgccatgaaattttaatggagctgaacgcactcccactgaaataataattttgtttagtttttattctacttcccttactcttttattccttggattattctctataaattatgcacacctgaatttctgtctcagccctcgctgctgtagaacctgacctaaaataattaacctatctctctttcactatgagagagaagctgacttaaccgaatttgataaatcatcttggttggtccaaacagctatgascggaaatgttaagtggtagtgcaataaagcaggtttgaaaggaataaaggacattttgaaaaaatatttcaaggtatattttgaaaaaattcagatcaaattatattatgttttgtccattaaggagataagatactctgatttgagcataagtcatgctttctctttattgatcaattattaattgtattgctaacctactttattcctatgggtct

SEQ ID NO: 58810 - DNA, 1247 bp, Homo sapiens
tgcaccacctagatcctacaaatcatatttgcatctttgcttgatcaaatttctatacattcaggaatccatcgatccatcttatttttaatccatttttaaagtaagttcaagcacctgattttgtcactataaccgtacagaaaaaaaaaggaagccctgtttagacagaatcttagaaaactaatgtttttatcataccacaaatgggcacttatttttaatagtctatttaatagattctaggttctaacagactctattagataccagttaatgtctaaatctatatcttgcctccaaaatgcagttatgatgatttaatgaggaaaagatatacaacacttagtactgtactctgcctagagtaagccggtgttcaataaagtatggccaaaataatgatgctactgagaaaagcaaaagcaaccaatccattggcttatactgcatagaatcagttattatactggagggcttagaacaaggcagaataagaaaatccttaaaagagagagaagagagtattcatccaatattttatatctgtatccagaaatttttgaaaaattttaggctattaaaattaatcaactaaaaaaagatgaaaatacagatcagaagctatttagaataaagagagatgaagtcaccagggaatgcagaaatattatcacatgaacatgtttacctaattctctctataatgtgttttttgtaaacagtacttttctcgagtccttaaggacatcaactaaaagttatacatgagcttaaattgcaaagaaacaattatttaccacaaatattttagcacctcagataaacaggtaataagtataaccttctcttgtgaaaattgaggcatttaataaatttcttattccaaaatttaccacatcctcacacagaaaaaaatgtcacaaatatgattataagcaaggtcaaccatatccttaaaagcaaatttggatttctaytgatgtaggtgtaatcagccatgacaccacagcacaagccagaaagaaaaaacaagagtcattttagcctgaataactttaaaaagcaagtgaaagagttcactcagttgaaaataaaataacagagaatcaaaaatatgtgattttggtattggaggaaagaaaaggaaagaatattgccttaaggtgggtttaccagaatgaattggctgcaaaatacccctaaacacttgaatggtggaattatttataatcttcattttgatg

SEQ ID NO: 58811 - DNA, 1340 bp, Homo sapiens
atgggaactattaaatgagtgtggaggagttctcacttcaactgccagactgttgcattgtatcctgaaaaaattggctgtggtatccttgaggtcatactgtttgtacaacatgccatttaattctcagagagcaaaatttttgtttccaaagagtgaatacatagcaaagagtctacctttgggactttgggaatgaagcaagacaacaggtttacaaaagatatttcagttatactaagaaagtatggattcccaattttagaaagatagactttttctatatcaaggaaggcatatcagtatgtatcactggagctggcyctgagttgtattaggccattcttgcattgctataaagaaatacctgagactgagtaatttataaagaaaagaggtttgattgtctcgtggttctgcaggttttacaggaagcatgatgctggcatctgcttggcttctggggaggcctcgggaacttaaaatcatgacagaaggagaagtgggagcaggcatgtcacataccaagagcaggaggaagtgagagagtagggggagagctgccacacatttttaaatgaccagatcttgggagaactcaccatcatgaaaacagcactgagccatgagggatccgcccccatgatccaaacctctcaccaggccccacctccagcatcagggattacatttcaacatgagatttgggcagggacaaatatacaaactatatcagagtggagcaaaagttccatgcccctttcatttgactagagacatagggacagccattttctacatctcccatgagtttggagaaaatatatgccaggatggcaactgtctcaaaagagtctttcctccttttaccacctcagctcttttatatcactcacttaaacaatgtgccgatgcctgcagaaccaatttgggtccaatccctctccagatcatccagcacctgaatttagaatatggggttttggcatttgttgtttaggcctttggagtctgtggccaaactccatttgacagaaaatgttacttgcaacatccagtccagcccatgttttcaaggataggtctaacccacagaatgctcactgaaaaacttctaattatagacattatgggtacaggtcacatccatctcaacaggtgaggaaataggtctggaacaactgcaaagcagtggtggctgcatactgctgtgtgatctgattcacattccagaaaatgttcacttgcgagaagaacacgtggctggcacctccacctggcctgaaatctccaattcatcctgctgaagagtagaagcttggaatctgcctcttttgggt

SEQ ID NO: 58812 - DNA, 1340 bp, Homo sapiens
atgggaactattaaatgagtgtggaggagttctcacttcaactgccagactgttgcattgtatcctgaaaaaattggctgtggtatccttgaggtcatactgtttgtacaacatgccatttaattctcagagagcaaaatttttgtttccaaagagtgaatacatagcaaagagtctacctttgggactttgggaatgaagcaagacaacaggtttacaaaagatatttcagttatactaagaaagtatggattcccaattttagaaagatagactttttctatatcaaggaaggcatatcagtatgtatcactggagctggccytgagttgtattaggccattcttgcattgctataaagaaatacctgagactgagtaatttataaagaaaagaggtttgattgtctcgtggttctgcaggttttacaggaagcatgatgctggcatctgcttggcttctggggaggcctcgggaacttaaaatcatgacagaaggagaagtgggagcaggcatgtcacataccaagagcaggaggaagtgagagagtagggggagagctgccacacatttttaaatgaccagatcttgggagaactcaccatcatgaaaacagcactgagccatgagggatccgcccccatgatccaaacctctcaccaggccccacctccagcatcagggattacatttcaacatgagatttgggcagggacaaatatacaaactatatcagagtggagcaaaagttccatgcccctttcatttgactagagacatagggacagccattttctacatctcccatgagtttggagaaaatatatgccaggatggcaactgtctcaaaagagtctttcctccttttaccacctcagctcttttatatcactcacttaaacaatgtgccgatgcctgcagaaccaatttgggtccaatccctctccagatcatccagcacctgaatttagaatatggggttttggcatttgttgtttaggcctttggagtctgtggccaaactccatttgacagaaaatgttacttgcaacatccagtccagcccatgttttcaaggataggtctaacccacagaatgctcactgaaaaacttctaattatagacattatgggtacaggtcacatccatctcaacaggtgaggaaataggtctggaacaactgcaaagcagtggtggctgcatactgctgtgtgatctgattcacattccagaaaatgttcacttgcgagaagaacacgtggctggcacctccacctggcctgaaatctccaattcatcctgctgaagagtagaagcttggaatctgcctcttttgggt

SEQ ID NO: 58813 - DNA, 1340 bp, Homo sapiens
atgggaactattaaatgagtgtggaggagttctcacttcaactgccagactgttgcattgtatcctgaaaaaattggctgtggtatccttgaggtcatactgtttgtacaacatgccatttaattctcagagagcaaaatttttgtttccaaagagtgaatacatagcaaagagtctacctttgggactttgggaatgaagcaagacaacaggtttacaaaagatatttcagttatactaagaaagtatggattcccaattttagaaagatagactttttctatatcaaggaaggcatatcagtatgtatcactggagctggccctgagttgtattaggccattcttgcattgctataaagaaatacctgagactgagtaatttataaagaaaagaggtttgattgtctcgtggttctgcaggttttacaggaagcatgatgctggcatctgcttggcttctggggaggcctcgggaacttaaaatcatgacagaaggagaagtgggagcaggcatgtcacataccaagagcaggaggaagtgagagagtagggggagagctgccacacatttttaaatgaccagatcttgggagaactcaccatcatgaaaacagcactgagccatgagggatccgcccccatgatccaaacctctcaccaggccccacctccagcatcagggattacatttcaacatgagatttgggcagggacaratatacaaactatatcagagtggagcaaaagttccatgcccctttcatttgactagagacatagggacagccattttctacatctcccatgagtttggagaaaatatatgccaggatggcaactgtctcaaaagagtctttcctccttttaccacctcagctcttttatatcactcacttaaacaatgtgccgatgcctgcagaaccaatttgggtccaatccctctccagatcatccagcacctgaatttagaatatggggttttggcatttgttgtttaggcctttggagtctgtggccaaactccatttgacagaaaatgttacttgcaacatccagtccagcccatgttttcaaggataggtctaacccacagaatgctcactgaaaaacttctaattatagacattatgggtacaggtcacatccatctcaacaggtgaggaaataggtctggaacaactgcaaagcagtggtggctgcatactgctgtgtgatctgattcacattccagaaaatgttcacttgcgagaagaacacgtggctggcacctccacctggcctgaaatctccaattcatcctgctgaagagtagaagcttggaatctgcctcttttgggt

SEQ ID NO: 58814 - DNA, 718 bp, Homo sapiens
gcatgtatttaagttagttgtgtcaaatacagtcctagaagtagaattaacatgcaaaaggcatgcaaattttaaaactttgctggatcatcaaatttatttccagaaagagagtaatattttaaactcctttcatactctgatactagggtaaaaatataaaatttatcttaatcatatttaatacacttatcattcttttatactttttgtatctatctttgatgctttttactaatatcatttgttaacttggctatgaattcattatttgaaatagcaaaattgttacatgttaagcatacatatatgtatattttgtttttactctcayttatgtactataagttatttctgtattgattcagatttgaactgtcttatataaagtatataaaatactttgccaaagctgaatgttattaaatattacataattattgtagatataagttttttgccatagttaatacaaatggcacttcattttctttatggaagattttgggtgctcttatataatttctcatccaggtcaacattaccatcatcaccatttataagaaaaaaaggttaatattttgatattttgttcagaactatgcttatatttttaaattttttatataatttgttcaaatctgtattataataagaaagaaacctggatttctttggcttctgttacttttatgctagcttttcctctgcttaattt

SEQ ID NO: 58815 - DNA, 1518 bp, Homo sapiens
gtattgctttaatgatcagtgatgttgagctattttttatatgtttgttggctgcatgaatgtcttcttttgagaagtgtcggttcatgttctttgcccaccttttaatgtggttgtttgttttgttcttgtaaatttgtttaagttccttgtagattctggatattagccatttgtcagatgggtagattgcaaaaattttctcccactctgtaggttgcctgttcactctgatgatagtttcttttgctgtgcagaagctctttagtttaattagattccatttgtcagttttggcttttgttgtaattgtttttggtgattttgtcatgaaatctttttctgtgtcctgaatggtattgcctaaattttcttctaggcttttttatatttgggttttacatttaagtctttaatccatcttgagttaatttttgtataagttgtaaggaaagggtccagtttcaattttgtgcatatggctagccagttctcccagcaccatttactaaatagagaatcctttcccctttgcttgtttttgtcagcattgtcaaagatcagatggttgtatatgtgcatagattattttgaaaaatgaagagtatgatgaggattttactctcagatataaaacatattttgaagcttcaatgcatacaactgaggtagaaatatatagaaacaagcaatgggacagaatagagatgacagaaatacgccatccctacaacacccatctgaaacaaataatactggtagagacacaacataagtcctgkttgaagcctgaaggcaagaaaatgtgcctactgggtatttgctaaagagatacagggcttgaaagagaagagaaattccagagttaattcaacttgttaaaaaactaaacactagatggagatttatttcttcttagccaaagtgtcgaggtttttttcttttctttttttttagaaaagttgtctccataattgagatacattttaaaaattaattattttttattgacaaaagaaaaattatagatagatagatagatagatagatagatagatagatagatagatagagacagggtctattctgtcacctgggctggagttcagtgatgtgatcatggctcactgtagccttgacctcctaatctcaagtgattctcctgcctgagcctcccaaagtgctaggattacaggcatgagccaatgccatctggccagtgctgggattacacgtgtgaaccaccatgaccggagtaaatatttattctgtacagaatgatgttttgaaatatgtatacgttgtggaatggctacatcaagctaaataacgtgcatattactctataggatcttcacaaagttcatcaaaaatgtatgatgattcatttgtcatacatttcagaaatgtatgacatttctcatacattgtcaaatgtatgacaaatctgctcagacaagagcagaccttgtcaaatgtatgacaaatctgctcagacaagagcagattcatttttca

SEQ ID NO: 58816 - DNA, 1530 bp, Homo sapiens
  misc_feature (1)...(1530): n = A,T,C or G
aaaattagtggggcatggtggcgccctccggtagtcccagctacttgggaggctgaggcagcagaatcgcttgaaccttgaaggcggaggttgcagtgagctaagttggcaccactgcatccagcctgagtgacgcagtgagactctgtctcttaaaaagaattaaaaaataaaaataaaaatyttaaaagtttgtgataaacacctctgttagcctctgatctttataataattatcacacacacacaaaccaaacaccacacatagaggaaacagtaaaagattaaaggacacagctaaaaatacatttgtattgttacttcccaaagttctaaaattatgagaagggactagtgaatctttaaaaaatattgattatccaacactttgtaataatgactgtaattgcattgaaggctactgaacatgcacatattcctaaaatttttctgttatggtatctggtttgcgaaaggaacaaaattaaacacagttccttggcaatttttctctcttccactctactcattggcatatgtgccacatgtgtttattgtaaaataggaataagattcagaggtcaagaatcaaagtgagtcagagtaggaaaagccagactcaagcggaacagaagggcagcaaaccccaaaattaaagggtaaatttaaacacaagtagaagtggttcaaaagctaaggggatcctcatagttcatgaaaaacaagtattcacgcaggtaacagactctaatctgctgcaagccaatgtgctattctcttcatgttatttatatccctcagaatacctcaaagttcccgagagcagtcagtatttaactctaaactatatcatatatatgatatatttattatatataagttgggagaaagaagtantgagtgtttttgagatggagttttgctcttgttgcccaggttggagtgcaatggcactatttcagctcaccacaacctctgcctcccgggctcaagtgattctcttgcctcagtgtcctgagtagctgggattacaggcatgtgccaccacgcctggttaattttgtatttttaatagagacggggtttctccatgttggtcaggctggtctggaacacccatcctcaggagatccacctgcctcggcctcccaaagtgctgggattataggtgtgagccaacgtgcccagccaactatatcatattttaattgtgtagtgataaccctcatcaaaagaagtattcattatggtcagtgtactctgcttacttaccactgaagcttaacacaaaattgttgaaataaacatgcatattgaagtactcagctagctattgaggcaatacaggtttctagatttactcattttttttcactgtacacaaatgtcatgtgtgtcatgataaacccatgtgtgtgcatatattgattaaatattatatttctttttacttttattactattattgagaaagggtctcactctgtcgcccaggctggagtgcagtggcacgatctcagctgactgcag

SEQ ID NO: 58817 - DNA, 1044 bp, Homo sapiens
aatcattcttctaagagcttgtcatatattagttcatttaattctcataactctttgaggtaggttttatgatcttcattttacagatgaggaaactgagtcacaggaaatttacaaaactttttcaaagtcacacaggttgtaagtgatggtactgggatgagaagaatattgcctcttatgtccatgctcttaattagacacattagtaggttattaacatgagttggagataggggtagaagcctggagagctgaaagactggttgaacaaagaaaacaggattataacatcatcacagttatgcacttgtaaaattattatatacatataaagccatttgtaataataagaaagtgaaattctatgagtgaatatatatgaaatttttaattggcttagcttatacaaagagtaagttgtcttaattataatgaattcactgtagtttctatttttattcaattttactcattcaacaagtatttagtcagcacctactatatgtcagaacaaatagtgtgcatatttgtattacgtgctgagggaaacagcaggaaggcatagcttctcaactcaaggggctgtcagtagtagaagatggaaatcagcaaatttgccatataattaaattatgtgaccctcctcacacctgtaattccaacaggacagacataattagttttcaagtagcacttaaaaataataattaagtgtatgctgatatctgcaaatcaactatgccaaccaaccacctatgctaacaaaacaactatgctaaccattctcaattcctcctagccaactatttcatgtgtctaggctaaaataatatagatgtacctagcattacctcatagactcaagtgatcataaaacctraaccaaaaagcaataaaaatgagaagtaaataatatttgatttgtaggtctttttatttcaaaaattcagtgtataatcaaggctttggacatagcaaaagaaagtcatatatatcttttgatctaggatttgttagagtagtttagatttatatgctgat

SEQ ID NO: 58818 - DNA, 547 bp, Homo sapiens
atacgtagttgacagacargggaaacagaggctcgggaaggcaaaacgtgaggtcactcgcccagggtcccctggctctttcagctcataaatgggaacagggctgggcgcagtagctcacacccggaatcccagcactttgggaggccgaggcaagtggatcacctgaggtcaggagttggagaccagcctgggtgacatggtgaaaccccgtctttactacaaatacaaaaaaaatagccgggcgtggtggcaggcgcctgtaatcccagctacttaggagcctgaggcaggagaatcacttgaacccgggaggcagaggttgcagtgagccaaggtcatgccattgcactccagcctgggcaacaagagcaaaactccatctcaaaaaataaataaataaataggagagggactattcaaactcacgttcctggttccaagcctacatgttccagtaagacctggatgccccctatggctatgaacacccgtcctgcaggacataagaatcaaggcctctcccacctgtgagacacttgtccca

SEQ ID NO: 58819 - DNA, 547 bp, Homo sapiens
atacgtagttgacagacaggggaaacagaggctcgggaaggcaaaacgtgaggtcactcgcccagggtcccctggctctttcagctcataaatgggaacagggctgggcgcagtagctcacacccggaatcccagcactttgggaggccgaggcaagtggatcacctgaggtcaggagttggagaccagcctgggtgacatggtgaaaccccgtctttactacaaatacaaaaaaaatagccgggcgtggtggcaggcgcctgtaatcccagctacttaggagcctgaggcaggagaatcacttgaacccgggaggcagaggttgcagtgagccaaggtcatgccattgcactccagcctgggcaacaagagcaaaactccatctcaaaaaataaataaataaatargagagggactattcaaactcacgttcctggttccaagcctacatgttccagtaagacctggatgccccctatggctatgaacacccgtcctgcaggacataagaatcaaggcctctcccacctgtgagacacttgtccca

SEQ ID NO: 58820 - DNA, 547 bp, Homo sapiens
atacgtagttgacagacaggggaaacagaggctcgggaaggcaaaacgtgaggtcactcgcccagggtcccctggctctttcagctcataaatgggaacagggctgggcgcagtagctcacacccggaatcccagcactttgggaggccgaggcaagtggatcacctgaggtcaggagttggagaccagcctgggtgacatggtgaaaccccgtctttactacaaatacaaaaaaaatagccgggcgtggtggcaggcgcctgtaatcccagctacttaggagcctgaggcaggagaatcacttgaacccgggaggcagaggttgcagtgagccaaggtcatgccattgcactccagcctgggcaacaagagcaaaactccatctcaaaaaataaataaataaataggagagggactattcaaactcacgttcctggttccaagcctacatgttccagtaagacctggatgccccctatkgctatgaacacccgtcctgcaggacataagaatcaaggcctctcccacctgtgagacacttgtccca

SEQ ID NO: 58821 - DNA, 528 bp, Homo sapiens
tcagggctgagaacagagcctgacactgactgactgactgactgactgamtgaatgaatgaatgaatttttgcatttcactccttcctctgcttcttcccccataactcaattttcaccattgattaagtcagaaatcagaactgagacattactgggccactccaaaggctctctgaggtgccacctgccccccgacaccccttcattgcagctcagcccagctgggccccaactccaggatcctaaggctaaaaatacctcagtgcagccttaacagctcccagcatcctggctatttttaggatacaggaaaggatgagggataaatgtgactgagggtcacctccagggaggaacatctccttccaccatccagaaatggccacacctgggaaagactcaaatccaagaagtagatgatcacacgatatgctttccttcaattctggattttgaatgcctgccgggcagctggcatgctctgctggagatgaaaggaaacagtgttgcagagtcaaatcagaga

SEQ ID NO: 58822 - DNA, 969 bp, Homo sapiens
tggatctgcagcaccagtcaagctctctaatacttagggcctctgtgttcaactggggccctggggtggcactgcaggaaagtaagagttaatctatcctggagggcaagcaaacttaccccaaaacccaggcctgcagtcacttgacttcatcttggggacaatgagagaaggatccccaggccaaacttgagggcttctgtcctcagcacataaaagcagtctgttctgtagacaggctgatcagagagaaagggggcaggcgttttcatcctccatgacttctcctaaatttgccaatgggataagtcactctgcttcctttagggaggagggagtgagggtagagagaggccaaaaatttcttcttttagcaaaacttgaggtttgaggaagaggtatttcatgttgcatcactgtatgccatcttgtgcatatagcacgatgacaaaatcagtccctattgaaataccattgctcaaatactaccctaaccctggaccctggacatgtgtccactagttcttgaactccccatgggccttagaaaccatctgccaccctgacatcaatgcctgccctttctccagcctaatgtgcatctctgtggcccatttggttccttgtgcctgctgcagcttgtaagtaaaaatgactcccttccttagtgtgccatatgccagtgtggtttcatattagtagttaagtagaggtcaggcacctgattttgttcaaataaatcctgccaagggtgtttttgcttttttttttttttttaaagtatttgtgaattatgaccactaatcacarttaactataaaacacgttgtgtttctagaccagtacaatccaacagaaatataatacaagccatatatgtaatttttgtggtaaaatttatcattttaattgtttttaaatgtacttaaattggtattaagtacattcacattattgtgtaaccatcat

SEQ ID NO: 58823 - DNA, 633 bp, Homo sapiens
cagcaaagaggtctgtcaaattgaaaagtaatgccatctttcacatttttgttgttgttctgggaaatattttccataaaaattggttgttttcattaacatgaaatgggtctattactattaggtttaaataagtttaaaatatcttttaaatttctcagttttaatttctagaacagtaaataccaataaatacacactacaaaaacaaaagctctttgaagctaccaataatttttgagggtataaaggggtcctgagaccaaaaagtttgagactgcaactgcagaaaaacttgaacggaaaggcatcagtaatgacagtatccattctcaggtggaaaggttacgaggtagcaagcacaatataatcccattttgtaaaaagcargcaggtatgtgtgtgtgaataattgtgcacacactatatacaacacagaagactgcaagcatatattccaaaatcttaactctggctctccctgggtggtacactgagggtagcctctttcgtgtctgtcactcacatttattactattgccatcaaatgaagtgactaattaatgtttcgagtttagcctgtcacgttcagagaagcctactgaatagtaattgaacaagtgacatatctga

SEQ ID NO: 58824 - DNA, 579 bp, Homo sapiens
ttgaattggagcaggatatgttcaaaatgagcctggaaaaacttacagtaacaaaaaataagacaatgttcctagaatgatgactttttttgaaagacacaggagccagcttgaactggatcccactggccaaatctagaaaattggatcatcaaaacgaatcttaatagtaatatgttataagacataggataaaataagaatccacgagtctatagtaacataaataaataaataaacacatgaatgaataaatgggaaagaatggaaaatgctttgttacagtaattaattagcatagaaaaaaatgaagagaaaaaccaccatatagaaaaaaatcataaattttttcagtcaagaaaactcagtggatgccaaacattaggaaaaaacgtatataagatatatttatatacagaaaattataaatacttttaaatgacaaaatcacactatccctaatcaaatgatctaagtaactactatcattaatggaacccctagacattatgtggctcctggtttgttgcayattgaaaacacaatatcacttcgatagtattattgtcaaaaatacat

SEQ ID NO: 58825 - DNA, 1467 bp, Homo sapiens
gctagatcacatatcttgtagacatataaaactcagtactacaattaaactttttatagttttggctctactctccctcaaaattccatttacatacataccatcctgttggttacacctttcctgtatcttcatctcctatatttatattgttctttatgaccactcacccagactactgctagttttgtaagagttttctatggctctaggtattaccattacacagcccaatcaattcaacacaatacttaccattatctcaaacactcctcaaagacctgtggcttcctaataataaaatataaaatttaacatatatttatatatttattatctaccgatagcctataaaatagtccagattatctgtggcttacagttctccacatatgtaaaacttcactcccactcagattttcttacaatgcccactaataaatacaccagatcttgtccaaacttttcacttttttcaaagcattgttaaattcccaacacctttaaagtattcacctaatatccctctcttctgaactcctgtgccagttaatatttaatcatgtaattcctttcgatcttttttattgagtttttttattccattttgatgtgtttgttttgggttttcaattactttataaactcaagaaggaacctatttcttgttcctttgagaattgaaacgatctataccaacacatcttactgtttacattaacacaatttgctattcaactgtctgcattgatatgactttaatatttcaggaaattctttccaggaagctgaagttgcaaataaccttcttttttttcaagaactttccaaaaacccatttacttgaaaaatagaccgcccatctaaggctcataaatatatctttctcagaacaacatacagcacaaacaaatgactgtttcctatttaagagcttctccaaagcactcacatccctcaattcacctatcctaaactcttaatcacaaagtatgcccaactctaatcaagaccacttattgaaatacctgtcaaactacatacccccaaaactttataagcaactcttctttgcttttctctttccatatgctgctcactttctgtgacaagagtgatcttttttaccaaactaagcaattaagtcagccatgctttatctttaataggttattttggtggaatttttggtgagccaccattcagtcattcacagcttttagagtatgtactacagccccatccagtagaatgatcacagcaaatatttttgtttcctctaagtttttgaccacatcgatcatatatatatatgtacttatttattkattgattgctgttgtgacgttatttagaaatgcatttagcactcctgatgaagatatctgccttgactaaaatttgttcaggctcctccatctacttcacaactagcccttgaccttggcctgcctttaacaagaatcc

SEQ ID NO: 58826 - DNA, 768 bp, Homo sapiens
cacaggcatcagtgaaagattaagggcaattagaaacgcagtggctgctattgtagagccacagaacaaatgaaattagctgcctacttaatagatataatttgaaattaataactagctttttttaaccaactgtgtttgagttttcttgtacttgtagctgaaaagatttctagttgttgtaggttgtaacttgagtgatttgtccttttttaaaaataaatgtaaatacatttcattaggaagtatgataaataaaatatatatacaaatagatacattggattcccatagtttgacagtatatgagcaaatgcttaaatgtcgattgtaccaaaatattggaaactgcccaagaggcagaagatcaaactggaatgtcatgttatctttcactgtccataaggaataaagagaaatgtaagaaaaatcaacatgagcrtcttgaaattcatcatggaatactagggagaggcatgaaaagtttgaaagtcaaaaattagcagcaaaatgatcaacagctttgagaatttgatggtcattggagagagaatccatagccacagctgtatccacagccatagcttgacccatggtcactgccacacccagagccttaactacagcccagtcttgggaagttcttgctacccatatcatagccatagccaagcccacaagagcaatttgttcttaattttaaaattatattgcacaatgtactccttatactattcattttggccaaatcttttgtttgagaggatc

SEQ ID NO: 58827 - DNA, 786 bp, Homo sapiens
actacaattctctgcatgtttttctgcatttggagtttggacctgacaacctcatgtaagtatggaaagaatttcatggcacacatcagtgttgtcatgatctttctatccccaggtgataaccatgttattttgagatatgaacagcatattatgttttcagaatgggtttgaaggctctggaggtttttaagatttgagttatttggaaatattttttcctaaaagtcatgtctcccatatactacgttgaccacgtatttcaatttatgcctgtcatcctggggtaactatgggtactgctttcttcgctctcaaaaagttatctaacttcaataataaattatatggtcattctgccttagtactatattcttcaaggaagttacctaaataactatgcagggatctgattagaataggcaaatgtccatgatcatagagaaagtacctggtaaaagamgatattactaatcttgtaccccatatggggaaatgaacatactaaaaagtcatgcttttaagttaatggacagaagagtgtgactctctagacagtccaaagcatcaacacaaccagaactgttagtagagatttgtaagaattatagtttctccataaaatatgacaaattttccattgatggtgctttgcaggcttgatttctagccataacatttgacctttgttttgccctgttctcccagatgaccatgtaagattttctaatctgaaaagaatgatgaactaatgttataccaatcttactccacacttgcagtgag

SEQ ID NO: 58828 - DNA, 783 bp, Homo sapiens
ctgcttggccagaccttctgagtttccagttcaggaggtctagggtgaagcctgtgaattttcgtctcttaaaatgtcccctatgctgttttcactggctgrggacctaatgcagtgctttaagagcactgctttagaataacctaaagaattttcaaaaatcacaaagctgaagcagaacgccacaccaatttcatcagaatctcttaaaagggagaaaagacatcagtatttttaaaatgttctatatgattccagtgttcagataaggttaagaacaactggtctacatttaaaacaaaaataattatttgtgttttctaaacatgtagatagatctaaaaaatataagcacaaatctatccttccattttggttttaaaattgtactttaataatttgtcataaaacacctgatatttatgtgtgagcatgtgtatccatattcatgtgtgcttgtgtatgtggtgtgtttgtgtgtgtggatgcacataaatgtatttcaatcaagagagtatgtcaattagcataaagaatatgagaaatataactctcattggttaaatgaatgacattgtggatatgtggatttgctataaatattatgcaaacaactctatacaagtttctagcaagcccagctgtccacagagtctagaacagtgctttacacctcctattcattcaattctgtgtccccacttaggaaggcttctatcacctgatccaattagaggtctggctaatactgctgttagaacacacattgtcacatctgagcca

SEQ ID NO: 58829 - DNA, 783 bp, Homo sapiens
ctgcttggccagaccttctgagtttccagttcaggaggtctagggtgaagcctgtgaattttcgtctcttaaaatgtcccctatgctgttttcactggctgaggacctaatgcagtgctttaagagcactgctttagaataacctaaagaattttcaaaaatcacaaagctgaagcagaacgccacaccaatttcatcagaatctcttaaaagggagaaaagacatcagtatttttaaaatgttctatatgattccagtgttcagataaggttaagaacaactggtctacatttaaaacaaaaataattatttgtgttttctaaacatgtagatagatctaaaaaatataagcacaaatctatccttccattttggttttaaaattgtactttaataatttgtcataaaacacctgatatttatgtgtgagcatgtgtatccatattcatgtgtgcttgtgtatgtggtgtgtttgtgtgtgtggatgcacataaatgtatttcaatcaagagagtatgtcaattagcataaagaatatgagaaatataactctcattggttaaatgaatgacattgtggatatgtggatttgctataaatattatgcaaacaactctatacaagtttctagcaakcccagctgtccacagagtctagaacagtgctttacacctcctattcattcaattctgtgtccccacttaggaaggcttctatcacctgatccaattagaggtctggctaatactgctgttagaacacacattgtcacatctgagcca

SEQ ID NO: 58830 - DNA, 599 bp, Homo sapiens
ctgcacagcgggcttcaaagcagtaacacatccaaaccctcacccactcaagatctgccatttaatcaccattcactgcctgtctagaatttgctcagcactacaaagaccaaaatgatcacaccacagttcttattctcaaggagtttataatctgaggaacaagacaataaaaatgtaggagaggactgttagaaaggctacagctgtagtaaaaccaaaatcaatcctccayctccctcataattttagaaaattgcaattcaaaaactttgaacatcttaaagtcatgatacagtcggccacggggtattggttccaggaccctccacagatgccagaatctgtggatgctcaagcctcttacataaaacgacatagtacagtgagccctctgtatctgtggacttcgatccacagtgggttgaatctgcagatacggaaacccgtggacagggagggccaactgtatccagttcacatagctaaggtggcagctacctggagcatctgggcattgaagagaatgaaatagtaagagatcaaaagtcctctgccaccaggagaacaggacaggacagctactctactggtgggat

SEQ ID NO: 58831 - DNA, 844 bp, Homo sapiens
aggccgaggcgggcagatcatgaggtcaggagatcgagaccatcctggctaacatggtgaaaccctgtctctactaaaaatacaaaacaattagctgggcatggtggcgggcacctgtagtcccagctactcaggaggctgaggcagcagaatggcgtgaacctgggaggcagaggttgcagtgagccgagatcgcgccactgtactccagcctgggcgacaragcaagactccatctcaaaaaaaaaaaaaaaaaaatcaatgtagtgctcggagacaagacccctagaggcctcccttctgcacatccatgctcctcggacctcacacacatggaccacctgcaggcttgtaaagagcaggtgtggagaagggtctgagagattctgcatttccagcaagctccctggccatgttggtgctgctggcgtggaagccatcctttgagtagcaaggctatatagtgccatactgccgaagactgagcaggcagagattaagtcaagagtcggtggtcagttccctgcgaagggaggtcaggaggcatgcttgtaagctgcctgcttgggagcaaggccatctcctagggatattctgaggggaactggggcctgctctcaggagtgtggctggccgctgtcaggaggactgagcatctccaacactaagaaacgctgagtgcagtgcctcgtccagccttccctctgcactccacctggaagtggaactctaggatcagcacaaagagcagaagcatctgttaatgcctccttggcccaaatgcacaatgtctgtagatctgatgcagagaaccacccccgccttcagtctgagcagccgcact

SEQ ID NO: 58832 - DNA, 681 bp, Homo sapiens
gacttaaaatgagagaaaacacagtgggcaaatcagagcaacacctgagtgaactgtttatgttcacaagtgtgaaagctaccaaagccatccatgaattgaagaagaactcttggtttgccaattaacagagaacaagagtatgcttccagaaaccttcctggggggcgctgcattttaaaattgaccattgagaacagcaatgatgagctcaacaagagatataatcttaccctcctgacaatttgtgttcagaagggacagtgttctagcagaaaagtcagtgactttcaagttagaatacttgtgtttcaattctcttaagagcatgtggccttcaggaagatatttaacttcgcttagcttgactctcctcatctgtaatacagaattatctgtaactcacaccatacttgtgagaattaaataaataaggtcatatgtgagaaagtgcctagtctaggctcttgcytgattaaggtttgaataactcttcactcaaagcaagaagtgttttcaccaaatgcattttccttatgttgtaaaacccaagcacagcaaatcagaagaaattgattcttatggattaatatcatcattcaaactcaccggcatgagtttaagatatgttgattttgaatttctcatgtcaatcttctatataatcagaaaatcacttta

SEQ ID NO: 58833 - DNA, 1329 bp, Homo sapiens
  misc_feature (1)...(1329): n = A,T,C or G
tgaacccttgtcagaatgatattttcaattgcataaagtaatgtacaagattagaaaggaaacaattacactgaaatatggtagtcaaatcatttctaaactattacagaataatgcattttttatttattaacatattaataagaaaattcagcaaagaaccagaccatcataactttaaagtatgattaacaggaaagatatttcgagatgctgcaagaaatgtaatatgtcatgtaaatgtctatgatttctgttgatgttaaaagcactggtactaataatacttccacggtgtattgtctacattcacaaccaaaggaaatgmtggatatcaattagaataagtggaattcttccacttaaagctgctggacccctgtttctaatccatgaacactcaagggattcatggacgaggttaagaactcctagttagaggaatttaacagcttaaagaaagggggctgtgtgtggtgctttgggaagccacagtcaggaagannttgcctgaccccaggagtttgaggctgcagtgagttatgatcatatcactgcacggcagcctgggcaacagagcaagaccctgtacctaaaaatagaaaaataaaaagagcttaaagaaaaaaatgcaatattagctcatcattagggtacatttcctagtacttaaataactgtagtgactttggtgctgatatgtataattgctgcttttaatacaagtatagaattatcccttacattcaagcctctgaattctccatatgttcattactttagtgatttgtagattctgttataatgaaactataaagtaaattctattctttttttcacccaggctggagtgcagtggtgcaatcttggatcactgcagcctccacctcctgggctcaagtgatcctcccacctcagcctcccaaagtgctgggattacaggtgtgagccaccgcacctagcccgaagagaattctatatgtagcatgttcatcttgaattagttccaaggattcttccaaggatattccaaggtagatctagaacatgatactgatgaaaatatgacaaggaggcttccatgttgctgctccactaagccaaatcttctaattgcataatgtgtaatgcttagactttcccagattagtggttgatttcctggaaaaactttgtaaacaccaaatagtcaataaattgccatctacagagcaggaaatttcaaatccacaccaaatacaatttcattctcataaacaccagagttttttctgaaaggagctcagttttcaaatataacatgtagttcacaatagtttatgcacataa

SEQ ID NO: 58834 - DNA, 1329 bp, Homo sapiens
  misc_feature (1)...(1329): n = A,T,C or G
tgaacccttgtcagaatgatattttcaattgcataaagtaatgtacaagattagaaaggaaacaattacactgaaatatggtagtcaaatcatttctaaactattacagaataatgcattttttatttattaacatattaataagaaaattcagcaaagaaccagaccatcataactttaaagtatgattaacaggaaagatatttcgagatgctgcaagaaatgtaatatgtcatgtaaatgtctatgatttctgttgatgttaaaagcactggtactaataatacttccacggtgtattgtctacattcacaaccaaaggaaatgatggatatcaattagaataagtggaaytcttccacttaaagctgctggacccctgtttctaatccatgaacactcaagggattcatggacgaggttaagaactcctagttagaggaatttaacagcttaaagaaagggggctgtgtgtggtgctttgggaagccacagtcaggaagannttgcctgaccccaggagtttgaggctgcagtgagttatgatcatatcactgcacggcagcctgggcaacagagcaagaccctgtacctaaaaatagaaaaataaaaagagcttaaagaaaaaaatgcaatattagctcatcattagggtacatttcctagtacttaaataactgtagtgactttggtgctgatatgtataattgctgcttttaatacaagtatagaattatcccttacattcaagcctctgaattctccatatgttcattactttagtgatttgtagattctgttataatgaaactataaagtaaattctattctttttttcacccaggctggagtgcagtggtgcaatcttggatcactgcagcctccacctcctgggctcaagtgatcctcccacctcagcctcccaaagtgctgggattacaggtgtgagccaccgcacctagcccgaagagaattctatatgtagcatgttcatcttgaattagttccaaggattcttccaaggatattccaaggtagatctagaacatgatactgatgaaaatatgacaaggaggcttccatgttgctgctccactaagccaaatcttctaattgcataatgtgtaatgcttagactttcccagattagtggttgatttcctggaaaaactttgtaaacaccaaatagtcaataaattgccatctacagagcaggaaatttcaaatccacaccaaatacaatttcattctcataaacaccagagttttttctgaaaggagctcagttttcaaatataacatgtagttcacaatagtttatgcacataa

SEQ ID NO: 58835 - DNA, 736 bp, Homo sapiens
cattcttttcattggaacagctgtattataaaaacaaaataaaactcaattattattatattttgaatttcattaattaattatttaaaaactttaaaacttgtggaaattcgattttctcctttgttatataggtgcctacataatatcctacattttgcttcttggcttgcaatacctcaaatatttaccatctggtcctttgtagaaaaggtgggctactcctgatctactccagtagggtttacagcaaaactgtaaaagtaatttatgatggaattggggtgaagatgaaagtgaaggtgcagtgttgggaaaggaggatgcagcggtgagcagaggccagctgccccttgccctgacatccttccagggactcagagccctgggaagcccagaagcactgtccacctargtcaatcctgccctctttggagtgtggctggggtaggaagaagggaagggcgctctggatgttggggatcgagtgtctcctcgatacctggccctgcactaagctctgaggtctgttacctggcttcatcctcttgcagtcctatgagattataggtatttttccctttttacagatgaggaagctgaatcttagagattgaactaacttaccttggtaagtgtctgagctgggatttaaacctatgacttctgaatcctggtccagtgctctctttgaagtaccaagttgcctagaattttctttctgtctgtgaccctg

SEQ ID NO: 58836 - DNA, 1102 bp, Homo sapiens
cccgcctcggcttcccaaagtgctgggattacragagtgagccaccgtgctcggcccaaggcaggagaatctcttgaagccaggaggcggaagttgtggtgagccgagatcgcgccactgcactccagcctgggcaacaagagtgaaactccgtctcaaaataaataaataataaaggaagaagtcagctgggtgcagagctcatgcctgtaatcccaatactttaggaggccaaggcaggaggatgcttgggtctggaagtttgagaccagccagcgcaacatagtgagacctgtctctaccaaaaaaaaaaaaaaaaaaaaaaaatcaatttagaggtaggctatgaaaaagtacagatacatcccttaacatagactggagggtggtggcaaggggagcaaatgtggaggcccagtagctggcaaagtttagaagcagggggcaaaagctcctgcctgacttttcctgggtagctcctgggtcaaaatttcaggcaggatcccagggaaggggcaggcacccattgccacaggagagttgcaggcatgttgggatgtaggcctaggggaggtgctgcaggctcaagaaccaggcccacacattatatattaaaaaaaaaaaaacccacatttttttttattggtcagtgttggtaggagtttgttacaaaagtgagtccatgggcctgtggaatgtgaggggagtgggtccgctccaccagatgccagcaccggggccagtgcagctcagagccctgtggcggactacagggcctgcacagacggtcactcaaagaaagatgtccctgtgccctactccttggcgatggcaaagggcttctccacctcgatcttgccgcagtctgcgatgatcacatccttcaggggtttatcccggctgtctgtcttggtgctctccaccttccgcaccacctcctggaaaagaaaggtggaagcaggagggcatggtggatcaggaggtccaccgctcaggagaaaggccccagcgtatggctcaggagggctaagacccacaagtgatcaacagcacacaaaactggaggcaccaaaattctaacagactcctggccagagcaggg

SEQ ID NO: 58837 - DNA, 1102 bp, Homo sapiens
cccgcctcggcttcccaaagtgctgggattacargagtgagccaccgtgctcggcccaaggcaggagaatctcttgaagccaggaggcggaagttgtggtgagccgagatcgcgccactgcactccagcctgggcaacaagagtgaaactccgtctcaaaataaataaataataaaggaagaagtcagctgggtgcagagctcatgcctgtaatcccaatactttaggaggccaaggcaggaggatgcttgggtctggaagtttgagaccagccagcgcaacatagtgagacctgtctctaccaaaaaaaaaaaaaaaaaaaaaaaatcaatttagaggtaggctatgaaaaagtacagatacatcccttaacatagactggagggtggtggcaaggggagcaaatgtggaggcccagtagctggcaaagtttagaagcagggggcaaaagctcctgcctgacttttcctgggtagctcctgggtcaaaatttcaggcaggatcccagggaaggggcaggcacccattgccacaggagagttgcaggcatgttgggatgtaggcctaggggaggtgctgcaggctcaagaaccaggcccacacattatatattaaaaaaaaaaaaacccacatttttttttattggtcagtgttggtaggagtttgttacaaaagtgagtccatgggcctgtggaatgtgaggggagtgggtccgctccaccagatgccagcaccggggccagtgcagctcagagccctgtggcggactacagggcctgcacagacggtcactcaaagaaagatgtccctgtgccctactccttggcgatggcaaagggcttctccacctcgatcttgccgcagtctgcgatgatcacatccttcaggggtttatcccggctgtctgtcttggtgctctccaccttccgcaccacctcctggaaaagaaaggtggaagcaggagggcatggtggatcaggaggtccaccgctcaggagaaaggccccagcgtatggctcaggagggctaagacccacaagtgatcaacagcacacaaaactggaggcaccaaaattctaacagactcctggccagagcaggg

SEQ ID NO: 58838 - DNA, 1102 bp, Homo sapiens
cccgcctcggcttcccaaagtgctgggattacaagmgtgagccaccgtgctcggcccaaggcaggagaatctcttgaagccaggaggcggaagttgtggtgagccgagatcgcgccactgcactccagcctgggcaacaagagtgaaactccgtctcaaaataaataaataataaaggaagaagtcagctgggtgcagagctcatgcctgtaatcccaatactttaggaggccaaggcaggaggatgcttgggtctggaagtttgagaccagccagcgcaacatagtgagacctgtctctaccaaaaaaaaaaaaaaaaaaaaaaaatcaatttagaggtaggctatgaaaaagtacagatacatcccttaacatagactggagggtggtggcaaggggagcaaatgtggaggcccagtagctggcaaagtttagaagcagggggcaaaagctcctgcctgacttttcctgggtagctcctgggtcaaaatttcaggcaggatcccagggaaggggcaggcacccattgccacaggagagttgcaggcatgttgggatgtaggcctaggggaggtgctgcaggctcaagaaccaggcccacacattatatattaaaaaaaaaaaaacccacatttttttttattggtcagtgttggtaggagtttgttacaaaagtgagtccatgggcctgtggaatgtgaggggagtgggtccgctccaccagatgccagcaccggggccagtgcagctcagagccctgtggcggactacagggcctgcacagacggtcactcaaagaaagatgtccctgtgccctactccttggcgatggcaaagggcttctccacctcgatcttgccgcagtctgcgatgatcacatccttcaggggtttatcccggctgtctgtcttggtgctctccaccttccgcaccacctcctggaaaagaaaggtggaagcaggagggcatggtggatcaggaggtccaccgctcaggagaaaggccccagcgtatggctcaggagggctaagacccacaagtgatcaacagcacacaaaactggaggcaccaaaattctaacagactcctggccagagcaggg

SEQ ID NO: 58839 - DNA, 1102 bp, Homo sapiens
cccgcctcggcttcccaaagtgctgggattacaagagtgagccaccgtgctcggcccaaggcaggagaatctcttgaagccaggaggcggaagttgtggtgagccgagatcgcgccactgcactccagcctgggcaacaagagtgaaactccgtctcaaaataaataaataataaaggaagaagtcagctgggtgcagagctcatgcctgtaatcccaatactttaggaggccaaggcaggaggatgcttgggtctggaagtttgagaccagccagcgcaacatagtgagacctgtctctaccaaaaaaaaaaaaaaaaaaaaaaaatcaatttagaggtaggctatgaaaaagtacagatacatcccttaacatagactggagggtggtggcaaggggagcaaatgtggaggcccagtagctggcaaagtttagaagcagggggcaaaagctcctgcctgacttttcctgggtagctcctgggtcaaaatttcaggcaggatcccagggaaggggcaggcacccattgccacaggagagttgcaggcatgttgggatgtaggcctaggggaggtgctgcaggctcaagaaccaggcccacacattatatattaaaaaaaaaaaaacccacatttttttttattggtcagtgttggtaggagtttgttacaaaagtgagtccatgggcctgtggaatgtgaggggagtgggtccgctccaccagatgccagcaccggggccagtgcagctcagagccctgtggcggactacagggcctgcacagacggtcactcaaagaaagatgtccctgtgccctactccttggcgatggcaaagggcttctccacctcgatcttgccgcagtctgcgatgatcacatccttcaggggtttatcccggctgtctgtcttggtgctctccaccttccgcaccacctcctggaaaagaaaggtggaagyaggagggcatggtggatcaggaggtccaccgctcaggagaaaggccccagcgtatggctcaggagggctaagacccacaagtgatcaacagcacacaaaactggaggcaccaaaattctaacagactcctggccagagcaggg

SEQ ID NO: 58840 - DNA, 872 bp, Homo sapiens
atccttgcaagtcggcctgccccacctgtcgggccagatgactaacgcctcggcccccacaactctgtactaaaatggctcatctgtctttctcccttgacgtgtgtatttgttagggcaaggatataacttgttgaccattggccccaaacacacggcaccatcctggaaacactgtaggttctcaaacacttaagraagtaaagagcagacattctccaaaccctaattcctcactgctcttctgcctattcctctagggcctggctaagctcacagcctctctgcctctccctgccttccccatcctgacttgtctgaaggcgtgagcttgcatcattgctggtgtccaccagccttagccctggctgaatggggtgagcagaggtgctcaaataggcctgtccagggtccgggggcaaagaaggtagcctggttctacttcccctggtggactgcagcaggggaggtaacaggcgagggaattatgctacagggtgagagcccagcctcctgaggctttttgtgccacgttggcgggccaaccactgaaaccttcatgccgctaagctagagccagtgccttgctgcattctctctggtcctttctctgaaagtccccagggatggaagaacaaacgatagcacagagagccacaagaaaacagagccacacactgggccttgtccataattattactataatgatttacaaaagtttttttcaggcaaccgtgttaaattattgtacatatctgagagagggaggtggggccctggccacagcaaaagtgacgacctctttcttgggtgaggtaagaaaatgtcccccacccccttttaggtctgactccttattaagtggcttccc

SEQ ID NO: 58841 - DNA, 880 bp, Homo sapiens
cacatcctcaatggtgaataaagctgatctccaactgggaagaacttctgtctcctggtgtggtgaaggctgttggagcatctgcaggagcatccaaaccctgtgctattggggtagtccatgcccttcaagccagtcatggctttcctgtttcctctgtcaaatactggctaaggataggtctgtgatgcaattctggccagtgagacatgatggaagagctgctgggtgaaattctgggaaaagttcccttactctttaaaagatggatccaggagaagagagtctcttttgctgrgtgttgtcatatctggaggtgatgcctggaactgtggcagctgtcttgtgattatgagggaagctggcctgaaaacagactggcccactgaagaggagggcagcatggaatgtggaataaacctgggtccctgttggcttcctgcggccctgatctaaccagccctgagctgtcctacctctgcactgcttggcacaggagacacatcttgattgtttaagcccctttgagttgggttttctgttccttgcagctgacagcactctaaccaatccacacatttccctctgctcgatttcctgctccagagagacaggcacagaccagtaccgggcagccccactctggggaaaaacaacagtgcttattgtttgccggcacagtgggagctctgcctcctggcacagtgggagctctgcctcctgtggcaggctggccattccaaaaccacactgcctgccactgccataaagaggccaggactgtgttcaaaaccccaggcagcaggaggagtggtttgtgggaggtgttgtggtagtgcataaaggaaggtcatttcctgaccctcagaacccacactgc

SEQ ID NO: 58842 - DNA, 880 bp, Homo sapiens
cacatcctcaatggtgaataaagctgatctccaactgggaagaacttctgtctcctggtgtggtgaaggctgttggagcatctgcaggagcatccaaaccctgtgctattggggtagtccatgcccttcaagccagtcatggctttcctgtttcctctgtcaaatactggctaaggataggtctgtgatgcaattctggccagtgagacatgatggaagagctgctgggtgaaattctgggaaaagttcccttactctttaaaagatggatccaggagaagagagtctcttttgctgggtgttgtcatatctggaggtgatgcctggaactgtggcagctgwcttgtgattatgagggaagctggcctgaaaacagactggcccactgaagaggagggcagcatggaatgtggaataaacctgggtccctgttggcttcctgcggccctgatctaaccagccctgagctgtcctacctctgcactgcttggcacaggagacacatcttgattgtttaagcccctttgagttgggttttctgttccttgcagctgacagcactctaaccaatccacacatttccctctgctcgatttcctgctccagagagacaggcacagaccagtaccgggcagccccactctggggaaaaacaacagtgcttattgtttgccggcacagtgggagctctgcctcctggcacagtgggagctctgcctcctgtggcaggctggccattccaaaaccacactgcctgccactgccataaagaggccaggactgtgttcaaaaccccaggcagcaggaggagtggtttgtgggaggtgttgtggtagtgcataaaggaaggtcatttcctgaccctcagaacccacactgc

SEQ ID NO: 58843 - DNA, 611 bp, Homo sapiens
tgcctcygaagagtcctttccttcctgtggaatctggagcctggtcctccttctccaaggcagcacctgccaggttcctcactggcagcaagcagccttgctaacagccttgctaatccattaattacctgcttctagcagaagagctgttaattgaaaactccaccccctcctttaattgcctgcctgcctctggctgtctaggcttccctgggttccctccaggcccgcagcccttggttctctgcctttgggctcctgacttcttcctggtcaataagggtgtctgtggctgtctctgcagtgctcattactggggttgccaggtgagaatccggggctacactccctagcctgcagctaacagcctctctcctgcctggcccactgtgggaggaaggaaagcatttaatgcaatttgccccagaaattaagggggagataacaggccagtgggaggattccacagggtagcagattttactgaaaccaaaggctgaactcctccaggtcagagctagccagaggggccagccacccagaggggctgcaccacttcctggaagggtccaccctgactctaagtctcagccctgcccggaggattttct

SEQ ID NO: 58844 - DNA, 611 bp, Homo sapiens
tgcctctgaagagtcctttccttcctgtggaatctggagcctggtcctccttctccaaggcagcacctgccaggttcctcactggcagcaagcagccttgctaacagccttgctaatccattaattacctgcttctagcagaagagctgttaattgaaaactccaccccctcctttaattgcctgcctgcctctggctgtctaggcttccctgggttccctccaggcccgcagcccttggttctctgcctttgggctcctgacttcttcctggtcaataagggtgtctgtggctgtctctgcagtgctcattactggggttgccaggtgagaatccggggctacactccctagcctgcagctaacagcctctctcctgcctggcccactgtgggaggaaggaaagcatttaatgcaatttgccccagaaattaagggggagataacaggccagtgggaggattccacagggtagcagattttactgaaaccaaaggctgaactcctccaggtcagagctagccagaggggccrgccacccagaggggctgcaccacttcctggaagggtccaccctgactctaagtctcagccctgcccggaggattttct

SEQ ID NO: 58845 - DNA, 2413 bp, Homo sapiens
ttccttgacacttgtagcctgaatggaatttgaaatgaaataataaataaataaagtatgtttcatagaccatacattaactagttcacaatataaatgagagtttcattaccttcaaggctggtggtttctgagaagacactgaaaagcaaaagggattcataatcactcatatgtaaatatgacaaagatatccacacattcatgcagtgttagcatcaaactctgtcctcctgcctgtattagcgtaggctttgatggcttctactttgtgtctgcggactagaacgtgacagaaatgcactgagaaaagggaatacaggctccatgaaatatacccttacaatttcaaacatggtatgatttctcatatgtcaaaaactaaactaaaaccgtgtcaatatcaatgtgcataggccaagtgatgagaacaaatgtgatctaaaatcagaggagcaactcacactcctgagaatcaatgtcaaagcaggtgctacatgatcccacatgtctttcatgcaacaaatcaaaaggatttacaccattatactacaaacattcatcatgctctttaaattgcccaataactgagaaggcacacaattgcaatgatacttcagttaaacttacacttcacatctcttcagtggaagagtcctgaattgatcaccttggacacctgtttgctgataccaagtagataatattcattatctctcacacccatatggtgtaataatctgcctaagtttcttgtatccactagtttagccttccaaatgtttcttcatccagtcgtggcaccaaaggataatatattagcctcaataaaaatatcatcaattatcaattttgacatatttctacaaagtaaaactgctacaagcattagataataatgttttacattcagaaatcattccaatattctttgacaatgatcactctaggacttaattagaatgcaacataatttatgcctctaaaatagctttgttgggagtatcatgttattttctaaagaagtttcattaaacagctattttatacaagaggtagctccttgaacaaggaagccaatgtgttcatattcaagtttatctcatttctataactaaaatcaacaaaacatgtatctctgatgcctaatagtaacaaagaggagtaatgagtcattgtgtttttatgccaattcaagcactgtttcctgcttccagcacttgctggagttgccaaaatcaaatattgtttatgaaaatgttccaaatgcatctgaagtgagttcactcaggtttcctcagcagtaaccccaaaattatataaatgacttcctcttttcccacattcctgcctcacaatccgtcttcattcagaaaataattgctacatcaggggtctcctcagttctccttctacagtgtctatgggttattatgaacagttttctgtctgtttttagcactacgatgtgacgtctgtaaaatctgtacttcctctctttctccttacacccttaatgaaaagatgctacagaattaaagcaaaattatgctgtgccccagagccccttatgtcttcaactgctctctatatttcttcctcccagttgcaatgtggggatgtgtataatcttacagccaagatcatattccagaccagcagtatcagcataacccaagaacttattagaaatgaagaatctcaggcctgctgagtcagaatgtgcagcttcgaccagccccccactgatttattcggggaagagaacttcttatctggactgaacatgacattaaatgtgtttcgcaaaattacctgtcctagatatttctccatcctttttttctctggttatattcgaaaaagaatctttctcatcacttgtggcctgaatggaatttgaaacaaaataataaataaggtatgtttcataggctatacgtttactagctcacaatataaatgagagtttcattaccttcaaggctggttttttctgagaagacactgaaaagcaaaagggatacataatcactcatatgtaactatgacaaagttatccatacattcatgcagtgtttgtatcaacctctgtcctcctgcctgtattagcgtaggytttgatggcttctactttgtgtctggggattagaacatgacagaaatacactgagaaaaggaaacacaggctccgtgaaatatacccctgcaatttcaaacatggtatgatttctcatacgtcgaaaactaaaatcaaaggttgtcaacatcaatgtccatatgccgagtgatgaggacaaatgtgatctaaaatcagaggagaaactcatacacctgagaatgaatgtcaaagcaggtgctacatgatcccacatgtctttcatgcaacaaatcaaaaggatttacaccatta

SEQ ID NO: 58846 - DNA, 583 bp, Homo sapiens
atggggggcatcacggctctttgtccaggtgacaygtgggaaatatgagggcttatctttgtgctgctgtggccttcttgggattctccctgaggactggccctgccctgccttgctcttgcccctgggaacggcccaccctgtctcctgcctccccacccagacgggaagcagtcactctgccagctctcaaggactcatctctgaggttttagacagaataatttcctctccctctcacgcctgcctgtccgggaaaatcacacaacccacgcaggaccccccctacgtgcacccacatgccccacagccattgtctcctgcaccagccagcagaaaagcagagtggggcatgggaggaggatgcggaggctgcaggaagggggggtgacacccccaaccctgagggtctcctggtgtcaggccaagagctgacatggacatggggagacaggagccaggctccttccagatcctcccacaacctgggtttcagccaccctcagccaccctgccaaggccgcaggtgctgcacaaggccacaggcaaatgtccggctgaggactgaggtaggggctggatc

SEQ ID NO: 58847 - DNA, 1723 bp, Homo sapiens
gattctgcttcagcatgtctgcagagaactcagaaataagcagtttacaaatgctgccactcaagcatttaaggagacaggctgaatgagggcagagggccccatggctgaaccaccccatggcatctggctctgggcaggccacctgaacactgcccagcctcggtcctcttacctgctcaatgaggatgaccagggaatcctgtgggttttggcaggtcctgtgggagatggtgtggtaacagcacttggccataccttacaggactccaaagggtaaggggctcaggtctattgggatccatttcggctgtgagtaacagcagctgaataccatggaagttgatttctctctcctatctgtctgtgggaagctcagagcacttgctggcaagggaaggggtctcagaggtggagggagccccaccrcacagccccagcctcccaggcagcatagggtggggacaggcgcatcagaagtcctgctttcttccctctgcttgcacttttcagccatgtgtggagcctcacggggcctcagctgcctcgtcggtgaagtgggtgtagtgatagtgtccactctaggaggtggtcactttgaggattcgatgaggtcatctgtgcagcacacctgctcagggcctgcgcgtggcactccacagagcacaaggccagctctactcctccaggctgctgcaaagtgctgccagtgcagggcctctccctggggactcaggaaaggccagaatctatgaggctgttgctctggccctgctgcctgcatcgctgatccatcctcagcctgaacctcaagggctgcagctcagacacagctctgctgctgcttcctaggaacagagtgaggactcaaagggaggtgctgggagcaaccaaggacatcagtgccttcttctcaaccagacaccctgggctctgagccctaatggttctccctcccactgtggcctaagtgtcttcacattcaaggctctggcagtcaagaggattacatctcaacatgagatttggagggaccatccaaactatatcacacggtaagacatgatgtatgtttatacactttattggacaattcgtttactgacagccaaaagcaccctcacaaatacaaaggctcaaccctatctggggagtcttttcagcctcattttccaccactgctctttgatgcctctctgggtgaaccatgtgttgctttctctttgctttggctgctaactgcaaggcccctctagtctcctcaaattggtgaactcctagtcatccttcaaagcccaactcaaattcccctacctctacaaaggcttctgagctcccctaggcagaactcaaagccctgtcttgctgccttcaaatgtcttcactgtggaatttcccacatcattctccagccacttgtctgctggccactctgctgcactgtgagctcttgtgtgctgcagccctttctctgtgatctgttatcccctagcattgcacctggtatgctgcaggtgctggtcaatgctgcatattgcattactgaaaacactgcttcctccaggcctcctgtaacccttggctctcctgatgttcttgcccagctgggcaggaaggtggtgcatctctcatgtcccaggggaaacaagctctcagcgagtgcacagtatgggaataggctcctgctgcaccacactgtccctgctctcttcaacccaggtgg

SEQ ID NO: 58848 - DNA, 1723 bp, Homo sapiens
gattctgcttcagcatgtctgcagagaactcagaaataagcagtttacaaatgctgccactcaagcatttaaggagacaggctgaatgagggcagagggccccatggctgaaccaccccatggcatctggctctgggcaggccacctgaacactgcccagcctcggtcctcttacctgctcaatgaggatgaccagggaatcctgtgggttttggcaggtcctgtgggagatggtgtggtaacagcacttggccataccttacaggactccaaagggtaaggggctcaggtctattgggatccatttcggctgtgagtaacagcagctgaataccatggaagttgatttctctctcctatctgtctgtgggaagctcagagcacttgctggcaagggaaggggtctcagaggtggagggagccccaccgcacagccccagcctcccaggcagcatagggtggggrcaggcgcatcagaagtcctgctttcttccctctgcttgcacttttcagccatgtgtggagcctcacggggcctcagctgcctcgtcggtgaagtgggtgtagtgatagtgtccactctaggaggtggtcactttgaggattcgatgaggtcatctgtgcagcacacctgctcagggcctgcgcgtggcactccacagagcacaaggccagctctactcctccaggctgctgcaaagtgctgccagtgcagggcctctccctggggactcaggaaaggccagaatctatgaggctgttgctctggccctgctgcctgcatcgctgatccatcctcagcctgaacctcaagggctgcagctcagacacagctctgctgctgcttcctaggaacagagtgaggactcaaagggaggtgctgggagcaaccaaggacatcagtgccttcttctcaaccagacaccctgggctctgagccctaatggttctccctcccactgtggcctaagtgtcttcacattcaaggctctggcagtcaagaggattacatctcaacatgagatttggagggaccatccaaactatatcacacggtaagacatgatgtatgtttatacactttattggacaattcgtttactgacagccaaaagcaccctcacaaatacaaaggctcaaccctatctggggagtcttttcagcctcattttccaccactgctctttgatgcctctctgggtgaaccatgtgttgctttctctttgctttggctgctaactgcaaggcccctctagtctcctcaaattggtgaactcctagtcatccttcaaagcccaactcaaattcccctacctctacaaaggcttctgagctcccctaggcagaactcaaagccctgtcttgctgccttcaaatgtcttcactgtggaatttcccacatcattctccagccacttgtctgctggccactctgctgcactgtgagctcttgtgtgctgcagccctttctctgtgatctgttatcccctagcattgcacctggtatgctgcaggtgctggtcaatgctgcatattgcattactgaaaacactgcttcctccaggcctcctgtaacccttggctctcctgatgttcttgcccagctgggcaggaaggtggtgcatctctcatgtcccaggggaaacaagctctcagcgagtgcacagtatgggaataggctcctgctgcaccacactgtccctgctctcttcaacccaggtgg

SEQ ID NO: 58849 - DNA, 1723 bp, Homo sapiens
gattctgcttcagcatgtctgcagagaactcagaaataagcagtttacaaatgctgccactcaagcatttaaggagacaggctgaatgagggcagagggccccatggctgaaccaccccatggcatctggctctgggcaggccacctgaacactgcccagcctcggtcctcttacctgctcaatgaggatgaccagggaatcctgtgggttttggcaggtcctgtgggagatggtgtggtaacagcacttggccataccttacaggactccaaagggtaaggggctcaggtctattgggatccatttcggctgtgagtaacagcagctgaataccatggaagttgatttctctctcctatctgtctgtgggaagctcagagcacttgctggcaagggaaggggtctcagaggtggagggagccccaccgcacagccccagcctcccaggcagcatagggtggggacaggcgcatcagaagtcctgctttcttccctctgcttgcacttttcagccatgtgtggagcctcacggggcctcagctgcctcgtcggtgaagtgggtgtagtgatagtgtccactctaggaggtggtcactttgaggattcgatgaggtcatctgtgcagcacacctgctcagggcctgcgcgtggcactccacagagcacaaggccagctctactcctccaggctgctgcaaagtgctgccagtgcagggcctctccctggggactcaggaaaggccagaatcyatgaggctgttgctctggccctgctgcctgcatcgctgatccatcctcagcctgaacctcaagggctgcagctcagacacagctctgctgctgcttcctaggaacagagtgaggactcaaagggaggtgctgggagcaaccaaggacatcagtgccttcttctcaaccagacaccctgggctctgagccctaatggttctccctcccactgtggcctaagtgtcttcacattcaaggctctggcagtcaagaggattacatctcaacatgagatttggagggaccatccaaactatatcacacggtaagacatgatgtatgtttatacactttattggacaattcgtttactgacagccaaaagcaccctcacaaatacaaaggctcaaccctatctggggagtcttttcagcctcattttccaccactgctctttgatgcctctctgggtgaaccatgtgttgctttctctttgctttggctgctaactgcaaggcccctctagtctcctcaaattggtgaactcctagtcatccttcaaagcccaactcaaattcccctacctctacaaaggcttctgagctcccctaggcagaactcaaagccctgtcttgctgccttcaaatgtcttcactgtggaatttcccacatcattctccagccacttgtctgctggccactctgctgcactgtgagctcttgtgtgctgcagccctttctctgtgatctgttatcccctagcattgcacctggtatgctgcaggtgctggtcaatgctgcatattgcattactgaaaacactgcttcctccaggcctcctgtaacccttggctctcctgatgttcttgcccagctgggcaggaaggtggtgcatctctcatgtcccaggggaaacaagctctcagcgagtgcacagtatgggaataggctcctgctgcaccacactgtccctgctctcttcaacccaggtgg

SEQ ID NO: 58850 - DNA, 1158 bp, Homo sapiens
atggggcttaaaacctagatgacgggttgataggtacagcaaaccaccatggcacatgaatacctatgtatacctgcatgttctacacatgtatcccagaacttaaagtaaaatcttttaaaaagtcattttctgaacatgattctattttgatgatatgtgttactatcctagaacctagtacaaaaacagggcaataaataattattggatcagtggattaacatagtcttaacctcttacataattttacatatatatatatatatatatatatatatatatatatatatatatatatatatattgctctgggttttgtgtaatggaatacaagttagttcaccttaactcatccagagcatattatcaaaagagccatcttcataggcgaatgactcacaaaagcaaaagataaaatatatagatgaaagatagtatactatgaaagtacccttttatcatatcaagaatcttatacctgtagccaacagaagcaattcaagaaatgtaattatgatacagagtatagtttttaatgaagaatatttctagaccattttctattcatttattatcatatttaatgtcataaggctcataagattttctcagtctgttcttttaatgactaaatcattctggggggaaaatagtttctaagctttaatgggttaatawtgaattaagatataggattcaggtaaatttgataaaggatttcagtatttctgtgtctgaaatgtttctgtgtctgaaacaggaattctggactagcaacgtcctctcttaagctaaaatccacaagtttatggtcacaggaatgatttaagttactgtaaaaaataagaagtttaggtatatcagagctattcaaaagagagaaagaaactgaccttttcagtcagcaaagtattaataataccaatttgccatgaccaataaggaacaactagaaatggaagcacctggcaacattaagcaaattattaacataattcaacatattaggtcaaagaaaaaaatacagtatcttttcttttttagaataattgtataatattctaaatatctattatcctattatttgttaatgaacattgcttttcaatttgagtcaacaataaattgaactaccgtaaacatatgcacatgtgc

SEQ ID NO: 58851 - DNA, 1386 bp, Homo sapiens
gatccactcttgaccttagagccagcatttaaactcaggaggctggcttacagagttcacaattgttctactctcctaagctcccttctgctttctctgcaaaccstagtgctttcccgctgctttccttgaactctctcctagacacacagacaaggtctgatgactccaattattggacttccccgcatactccagttcactcccctctcctggatcagatccatgagctgttagctcctgaaactgttccacctcagaaacctctatctcaagccccagggtatggctctattcccatcacctcttctcttccactttctagtgatttctagaaaacctttcctccctgcttacagatgccccctaacttgcagacaccctctaagtggtcctgagatagcaacctgattccttcacagccttggcatgaaatttaggaagccaggagtgtcccagagggcaacatggagatgcagagagaacaggtggctcaggggaggcctagggtcaggaattgagtccagagagggtggccccctcatcaatagaggcaaaacatcaggggccttgaaattcagcagcaagtctcagcatattggtccaaaggacaagtgcaattagacacatctcaagaaagaatggtgcggaacattcggggacagcctctctattccacagcagagaccagcatgctgggagaggcccatcccaccaggagtatgggtaggtctctccctgcacccagaggcattttaggaaaacaggagggagatgcaagacagcttaagttaacccagaaatgactactttaaaccataagaaacagaatattcttgctttggcaagtttaaatagtatcccaccccagcctccagcattggtagaaatggggctctaaacagcagttacagaagacaaatgaaggccaaatctatgcagatttgaataacagcatgtatctatcagcatgtattcaagaaagtagagtcactgtggatatcatggaagaagagacaggatagggattagacctgacacaattgtgggagaagctgggaaggcagagatctggaaggggaagtgagagtatcagagaaaactcactgtccagtcctcctgaagccctggccaagtgtattgatcagagcttgctagagatcagggaaggaaggccaagtgctgttgggctgctgaaacaggatgacagtaggggagctgggatgtgtgggtagggagtgttggccactgcaggtctacggccaagtggctggtggtgggccaacaatcagaaagaagacctggacatggagaggaacagagcaaagacgggctggggcccacagggcattgcccatctgatagtcacgatatcagcctgcaaag

SEQ ID NO: 58852 - DNA, 1386 bp, Homo sapiens
gatccactcttgaccttagagccagcatttaaactcaggaggctggcttacagagttcacaattgttctactctcctaagctcccttctgctttctctgcaaaccgtagtgcttycccgctgctttccttgaactctctcctagacacacagacaaggtctgatgactccaattattggacttccccgcatactccagttcactcccctctcctggatcagatccatgagctgttagctcctgaaactgttccacctcagaaacctctatctcaagccccagggtatggctctattcccatcacctcttctcttccactttctagtgatttctagaaaacctttcctccctgcttacagatgccccctaacttgcagacaccctctaagtggtcctgagatagcaacctgattccttcacagccttggcatgaaatttaggaagccaggagtgtcccagagggcaacatggagatgcagagagaacaggtggctcaggggaggcctagggtcaggaattgagtccagagagggtggccccctcatcaatagaggcaaaacatcaggggccttgaaattcagcagcaagtctcagcatattggtccaaaggacaagtgcaattagacacatctcaagaaagaatggtgcggaacattcggggacagcctctctattccacagcagagaccagcatgctgggagaggcccatcccaccaggagtatgggtaggtctctccctgcacccagaggcattttaggaaaacaggagggagatgcaagacagcttaagttaacccagaaatgactactttaaaccataagaaacagaatattcttgctttggcaagtttaaatagtatcccaccccagcctccagcattggtagaaatggggctctaaacagcagttacagaagacaaatgaaggccaaatctatgcagatttgaataacagcatgtatctatcagcatgtattcaagaaagtagagtcactgtggatatcatggaagaagagacaggatagggattagacctgacacaattgtgggagaagctgggaaggcagagatctggaaggggaagtgagagtatcagagaaaactcactgtccagtcctcctgaagccctggccaagtgtattgatcagagcttgctagagatcagggaaggaaggccaagtgctgttgggctgctgaaacaggatgacagtaggggagctgggatgtgtgggtagggagtgttggccactgcaggtctacggccaagtggctggtggtgggccaacaatcagaaagaagacctggacatggagaggaacagagcaaagacgggctggggcccacagggcattgcccatctgatagtcacgatatcagcctgcaaag

SEQ ID NO: 58853 - DNA, 1386 bp, Homo sapiens
gatccactcttgaccttagagccagcatttaaactcaggaggctggcttacagagttcacaattgttctactctcctaagctcccttctgctttctctgcaaaccgtagtgctttcccgctgctttccttgaactctctcctagacacacagacaaggtctgatgactccaattattggacttccccgcatactccagttcactcccctctcctggatcagatccatgagctgttagctcctgaaactgttccacctcagaaacctctatctcaagccccagggtatggctctattcccatcacctcttctcttccactttctagtgatttctagaaaacctttcctccctgcttacagatgccccctaacttgcagacaccctctaagtggtcctgagatagcaacctgattccttcacagccttggcatgaaatttaggaagccaggagtgtcccagagggcaacatggagatgcagagagaacaggtggctcaggggaggcctagggtcaggaattgagtccagagagggtggccccctcatcaatagaggcaaaacatcaggggccttgaaattcagcagcaagtctcagcatattggtccaaaggacaagtgcaattagacacatctcaagaaagaatggtgcggaacattcggggacagcctctctattccacagcagagaccagcatgctgggagaggcccatcccaccaggagtatgggtaggtctctccctgcacccagaggcattttaggaaaacaggagggagatgcaagacagcttaagttaacccagaaatgactactttaaaccataagaaacagaatattcttgctttggcaagtttaaatagtatcccaccccagcctccagcattggtagaaatggggctctaaacagcagttacagaagacaaatgaaggccaaatctatgcagatttgaataacagcatgtatctatcagcatgtattcaagaaagtagagtcactgtggatatcrtggaagaagagacaggatagggattagacctgacacaattgtgggagaagctgggaaggcagagatctggaaggggaagtgagagtatcagagaaaactcactgtccagtcctcctgaagccctggccaagtgtattgatcagagcttgctagagatcagggaaggaaggccaagtgctgttgggctgctgaaacaggatgacagtaggggagctgggatgtgtgggtagggagtgttggccactgcaggtctacggccaagtggctggtggtgggccaacaatcagaaagaagacctggacatggagaggaacagagcaaagacgggctggggcccacagggcattgcccatctgatagtcacgatatcagcctgcaaag

SEQ ID NO: 58854 - DNA, 1386 bp, Homo sapiens
gatccactcttgaccttagagccagcatttaaactcaggaggctggcttacagagttcacaattgttctactctcctaagctcccttctgctttctctgcaaaccgtagtgctttcccgctgctttccttgaactctctcctagacacacagacaaggtctgatgactccaattattggacttccccgcatactccagttcactcccctctcctggatcagatccatgagctgttagctcctgaaactgttccacctcagaaacctctatctcaagccccagggtatggctctattcccatcacctcttctcttccactttctagtgatttctagaaaacctttcctccctgcttacagatgccccctaacttgcagacaccctctaagtggtcctgagatagcaacctgattccttcacagccttggcatgaaatttaggaagccaggagtgtcccagagggcaacatggagatgcagagagaacaggtggctcaggggaggcctagggtcaggaattgagtccagagagggtggccccctcatcaatagaggcaaaacatcaggggccttgaaattcagcagcaagtctcagcatattggtccaaaggacaagtgcaattagacacatctcaagaaagaatggtgcggaacattcggggacagcctctctattccacagcagagaccagcatgctgggagaggcccatcccaccaggagtatgggtaggtctctccctgcacccagaggcattttaggaaaacaggagggagatgcaagacagcttaagttaacccagaaatgactactttaaaccataagaaacagaatattcttgctttggcaagtttaaatagtatcccaccccagcctccagcattggtagaaatggggctctaaacagcagttacagaagacaaatgaaggccaaatctatgcagatttgaataacagcatgtatctatcagcatgtattcaagaaagtagagtcactgtggatatcatggaagaagagacaggatagggattagacctgacacaattgtgggagaagctgggaaggcagagatctggaaggggaagtgagagtatcagagaaaactcactgtccagtcctcctgaagccctggccaagtgtattgatcagagcttgctagagatcagggaaggaaggccaagtgctgttgggctgctgaaacaggatgacagtaggggagctgggatgtgtgggtagggagtgttggccactgcaggtctacggccaagtggctggtggtgggccaacaatcagaaagaagacctggacatggagaggaacagagcaaagacgggctgggrcccacagggcattgcccatctgatagtcacgatatcagcctgcaaag

SEQ ID NO: 58855 - DNA, 717 bp, Homo sapiens
ggatccatcaagtgcaaacattttctaatgcactatatttaagcctgtgcagctagatgtcattcaacatgaaatacattattacaacttgcatctgtctaaaatcttgcatctaaaatgagagacaaaaaatctataaaaatggaaaacatgcatagaaatatgtgagggaggaaaaaattacccccaagaatgttagtgcacgcagtcacacagggagaagactatttttgttttgttttgattgttttgttttgttttggttgttttgttttggtgacctaactggtcaaatgacctattaagaatatttcatagaacgaatgttccgatgctctaatctctctasacaaggttcatatttgtatgggttacttattctctctttgttgactaagtcaataatcagaatcagcaggtttgcagtcagattggcagggataagcagcctagctcaggagaagtgagtataaaagccccaggctgggagcagccatcacagaagtccactcattcttggcaggatggcttctcatcgtctgctcctcctctgccttgctggactggtatttgtgtctgaggctggccctacggtgagtgtttctgtgacatcccattcctacatttaagattcacgctaaatgaagtagaagtgactccttccagctttgccaaccagcttttattactagggcaagggtacccagcatctatttt

SEQ ID NO: 58856 - DNA, 649 bp, Homo sapiens
aatcaactgtctgcatgtaagctcacaggctcttctccctctgaagctcacctcatggatgcctaggaatgatggaacccacaaggccctcagattcctcagtcctttacacaagacccttctagccagcttcatttcccatacacgccacttaacacaccctctctgggcagagccgaccactctccrgtccgggaatacacagagcctcccttgtggtgatgctgttctctctcagctatcttgtaagacccagttctgatgacacctctctctgacatcgtcctttcccttccaaaataaactgctgtctcccttttgtcacattcataaccttttttctttttttttttttttttttttttttgagacaaagtctcgctctgttgcctgggctggagtgcagtggtgcgatctcggctcactgcaacctccgcctccaaggttcaagcgatactccacctcagcctcccaagtagctgggactacaggcacgcaccactgcacttggctaatttttgtgtgtgtgtttttggtagagacaggtttcaccatgttggccaggctggtcttgaactcctgacctcaagtaacccacctgcctcagcctcccaaactgctaggaaacaggcatgagccaccacgcccg

SEQ ID NO: 58857 - DNA, 715 bp, Homo sapiens
tttttttttttttttttttttttgagatggagtttcgctcttgttgcccaagctggagtgcaatagcacgatctcagctcactgcaacctccacctcctggattcaagcaattctcctgccttatcctcctgagtagctgggattacaggcatgtgacaccacacctggctaattttttttttttagtagaaaacagtttcaccatgttagccaggctggtcttgaactcctgacctcaggtggtctgcccacctcagcctcccaaagtgctgggattacaggtgtgagctgctatgcccggccaggaactgtcttttttaatgraatcacagtttcctgtagtggaacatcaagctactcatgactattaccttcattatgtcatctgatcatctcaacaacctggtagagtaaaacaggcaaaaagtatccttaccttgtcaatgagaaaactgaggcttagatacttaaaattttcaggtaaaactctaataaatggcatacctaggacccaaactcaggtcttctgggttcccatttcaatatttattgaactattcagtgctgtgagtgaaaggggatggcaatgatgagggagagaaaaagagaagagaattttttgttaaaagtatggctacctcaccaattacaacccttttgattcacacctttccagcccaccaatcaattctaaagcagaaggagaagactagg

SEQ ID NO: 58858 - DNA, 1265 bp, Homo sapiens
agttggatttyttttcttctgagttttgactaaattactagtatggagatggttacatgaattaattctattctttggttataagagagtccttaaaaaacttttttattctgtctagttgttctaactatttcagtttagactatctttattattaagaaaatttctaaacagttactttaatgaagtactctctatacagaataaatcttgttcacatgtctaaaatatcaaggataaatatatggaagaaacttcaaggacaacctaacaatatggctgacctgaaatgcagtagtaaaggacatttattaagaagaatgaaaactaaggctagatgatcatttgatagggatgtaataaatatgtgttgtctactataactttcttcaatgatgaaaatgttcgatatttatattgtctgaacacttgcattacccatatgtggctcttgagctcttgaaatgtgactagtatgatggaaaaattaaatttcaacttaaaaatatttttcattgtcacatgtatctaatggcttccaaattggacagcatagttatagatggtattgataccgaggttaaagaatcagatttgatagattctaaagtctcttccaactttgtattgccatagctgcaaaaataaatggtgaaactttttctccgttactgctccactctgaaccaaatttttctgtttttaatattaggaattcatttattcattaatttaatcatcatagaattagtgtgccaagtgcagtggaaaaaaaaagaagctgctctggcatcaacatttttgaccttgcttttctctttcactgccttcaatatctcttctcctctgggacacatgtctcattgtcaaatgtgatagcaaggtagcaggctatggacacaaaaccctaaatgcaggggcttccagattgagcagatatttctctgcttggaaggagcaaacccacagaaatgtatggggtcatgcaggaataataaggatactgagtcagatcaaattgattttagtgtaaataatgtgatgttacttgcacatctgagattgcgtgtgggctgtacataattcccactattgccaggattcttgccagtgttccaagaattctcaaaggggcttaagccaaaattaagttcccaatctcactggcacctcaccttctgcatccggtttatttactcaaccttgcacatacttcatccaaactgaaaaaatggaatatggccccttttacatttattccacaa

SEQ ID NO: 58859 - DNA, 1265 bp, Homo sapiens
agttggatttcttttcttctgagttttgactaaattactagtatggagatggttacatgaattaattctattctttggttataagagagtccttaaaaaacttttttattctgtctagttgttctaactatttcagtttagactatctttattattaagaaaatttctaaacagttactttaatgaagtactctctatacagaataaatcttgttcacrtgtctaaaatatcaaggataaatatatggaagaaacttcaaggacaacctaacaatatggctgacctgaaatgcagtagtaaaggacatttattaagaagaatgaaaactaaggctagatgatcatttgatagggatgtaataaatatgtgttgtctactataactttcttcaatgatgaaaatgttcgatatttatattgtctgaacacttgcattacccatatgtggctcttgagctcttgaaatgtgactagtatgatggaaaaattaaatttcaacttaaaaatatttttcattgtcacatgtatctaatggcttccaaattggacagcatagttatagatggtattgataccgaggttaaagaatcagatttgatagattctaaagtctcttccaactttgtattgccatagctgcaaaaataaatggtgaaactttttctccgttactgctccactctgaaccaaatttttctgtttttaatattaggaattcatttattcattaatttaatcatcatagaattagtgtgccaagtgcagtggaaaaaaaaagaagctgctctggcatcaacatttttgaccttgcttttctctttcactgccttcaatatctcttctcctctgggacacatgtctcattgtcaaatgtgatagcaaggtagcaggctatggacacaaaaccctaaatgcaggggcttccagattgagcagatatttctctgcttggaaggagcaaacccacagaaatgtatggggtcatgcaggaataataaggatactgagtcagatcaaattgattttagtgtaaataatgtgatgttacttgcacatctgagattgcgtgtgggctgtacataattcccactattgccaggattcttgccagtgttccaagaattctcaaaggggcttaagccaaaattaagttcccaatctcactggcacctcaccttctgcatccggtttatttactcaaccttgcacatacttcatccaaactgaaaaaatggaatatggccccttttacatttattccacaa

SEQ ID NO: 58860 - DNA, 932 bp, Homo sapiens
ttaatgccgaaaagaaacagtgtgatcaatcttttcttagaatgtatacaggcttgtcagttgaacatctaaaatgaacaacataatggacaaaaacttagtaaataaactctgtgtcatacctagaacagaaaatcatcaaaagcctgagatttggggcaggtcccaaactatgctcaaagctaccaaaggtgatataacaaactcacaggggtgccagaagacattttaaattttccatgcaagcacaataatactaacatctgttagacatcataaactccagggagtttacaatttcagcattagatcatactatgttcaattaaatgacattgttctttgtaaagctgtgttttcagtaactgctctgatagaaagtaaatacttcatgaaaataaatttgagcagaaaatgaaggtggaaatgttcaatcttattccaacgttggcaaagttgtgcacacataccccattaagcaattagcaaatatgktttttttttttttcaaatgactactaagttagacatcaagttgtcttgttaccaaaatactactgagacactgaggggactgtgaaccaagaaagttttagagcctttgttttgtgcagtcttaatgctacatactttattaagcacctactatatgcaagatctgtactaggcactgagagagacacaaataaattagtagcctttaatatgtttacaagtcagaaggagagagtgatagtaccaagaaaattacaggtaaagtgagagtttagagaattgtataattaaattattctggctaacaatgttaagcaagaaatcagtcatttatgaactcttagtgtatatctaaaaggtgcttgttcactttattgtcttagtaagaacattctagaaaacgtgttttctttgaaaaaaacatttagtattctaaa

SEQ ID NO: 58861 - DNA, 1107 bp, Homo sapiens
aatgggtgaatggcaaattgagcaaataaatccagatgtcttgttttgtataatgtcacggtcatctggaatatggtgtgatacgttgagaacaccactaaaatttcaggttacattctggaaataaagtgattgtagccaaaaagtgcgtttacrttatgtattggggtcttgagtttggtaaatcagacatatggacactgtgtttaaaaagtatgataaaaactgaacacagccatcttaaagaattgagataaattacagatgcctctcaattcctatgcaattagacatatccaattcatcattagcagtgtatagatatctgtttcttattagctttctctctaactttttaatagctgtgtgctccaagtttctctccagagataagtattcaaattttcaaaaatgttttagttctgatgtggtgttaataaacctaacattatgatatcaaaatttaaaacttcatggaaagttttaaagagcaaaactgactccaaaaaacctaaaaccactatatatcgatatataccactataatctgaccatgaggaaactgcctagaatgcaggtaaaagtaacttaaaatgataggtatgaatggcattaagaaaatgtatttccaggatagcatttatatatgcacaaaagtgagaaattagaacatatggcatagaagtaataatcaaacatgtggctaagggtaatttataaaaagtaacagacaagctaatttacagacttcattgtaatttcagactatcacagtgaaaagagacactcaactataacccattttgaaaaacatatatgatttaacaagccaatgaaaaatctgcatgagaattcagatagataaaaattgtaataatgtatataaggtagccaggctgattatagtcttgtatctgcagtagtggataacagaagaacataggaaaggtctatggtgtttaaatggggaaaatgacccttgttgttgtaaaaacatacccattgttatatacctttttgaatgaaaagattcaacagaaaaatctcatggaaacccaaggaagctgcacattaccaaactggatatatgtccagaactaagaaaat

SEQ ID NO: 58862 - DNA, 1107 bp, Homo sapiens
aatgggtgaatggcaaattgagcaaataaatccagatgtcttgttttgtataatgtcacggtcatctggaatatggtgtgatacgttgagaacaccactaaaatttcaggttacattctggaaataaagtgattgtagccaaaaagtgcgtttacgttatgtattggggtcttgagtttggtaaatcagacatatggacactgtgttyaaaaagtatgataaaaactgaacacagccatcttaaagaattgagataaattacagatgcctctcaattcctatgcaattagacatatccaattcatcattagcagtgtatagatatctgtttcttattagctttctctctaactttttaatagctgtgtgctccaagtttctctccagagataagtattcaaattttcaaaaatgttttagttctgatgtggtgttaataaacctaacattatgatatcaaaatttaaaacttcatggaaagttttaaagagcaaaactgactccaaaaaacctaaaaccactatatatcgatatataccactataatctgaccatgaggaaactgcctagaatgcaggtaaaagtaacttaaaatgataggtatgaatggcattaagaaaatgtatttccaggatagcatttatatatgcacaaaagtgagaaattagaacatatggcatagaagtaataatcaaacatgtggctaagggtaatttataaaaagtaacagacaagctaatttacagacttcattgtaatttcagactatcacagtgaaaagagacactcaactataacccattttgaaaaacatatatgatttaacaagccaatgaaaaatctgcatgagaattcagatagataaaaattgtaataatgtatataaggtagccaggctgattatagtcttgtatctgcagtagtggataacagaagaacataggaaaggtctatggtgtttaaatggggaaaatgacccttgttgttgtaaaaacatacccattgttatatacctttttgaatgaaaagattcaacagaaaaatctcatggaaacccaaggaagctgcacattaccaaactggatatatgtccagaactaagaaaat

SEQ ID NO: 58863 - DNA, 1107 bp, Homo sapiens
aatgggtgaatggcaaattgagcaaataaatccagatgtcttgttttgtataatgtcacggtcatctggaatatggtgtgatacgttgagaacaccactaaaatttcaggttacattctggaaataaagtgattgtagccaaaaagtgcgtttacgttatgtattggggtcttgagtttggtaaatcagacatatggacactgtgtttaaaaagtatgataaaaactgaacacagccatcttaaagaattgagataaattacagatgcctctcaattcctatgcaattagacatatccaattcatcattagcagtgtatagatatctgtttcttattagctttctctctaactttttaatagctgtgtgctccaagtttctctccagagataagtattcaaattttcaaaaatgttttagttctgatgtggtgttaataaacctaacattatgatatcaaaatttaaaacttcatggaaagttttaaagagcaaaactgactccaaaaaacctaaaaccactatatatcgatatataccactataatctgaccatgaggaaactgcctagaatgcaggtaaaagtaacttaaaatgataggtatgaatggcattaagaaaatgtatttccaggatagcatttatatatgcacaaaagtgagaaattagaacatatggcatagaagtaataatcaaacatgtggctaagggtaatttataaaaagtaacagacaagctaatttacagacttcattgtaatttcagactatcacagtgaaaagagacactcaactataacccattttgaaraacatatatgatttaacaagccaatgaaaaatctgcatgagaattcagatagataaaaattgtaataatgtatataaggtagccaggctgattatagtcttgtatctgcagtagtggataacagaagaacataggaaaggtctatggtgtttaaatggggaaaatgacccttgttgttgtaaaaacatacccattgttatatacctttttgaatgaaaagattcaacagaaaaatctcatggaaacccaaggaagctgcacattaccaaactggatatatgtccagaactaagaaaat

SEQ ID NO: 58864 - DNA, 848 bp, Homo sapiens
aaatgctaaagctaaatataaaagctatataagcaaaataataaaatgtgatcataagatctacaaatatcgagctctactttctactgccatgacaatgttttctcatttctatttacataatctccaaaaacacagcctttagattttgaactgtttgctttagtattttatttgtaatgaaacttctaatgaaataaaatgataaataatagataattaaaagaaacagattctggggaagtgatgtcttagaagtaaagcatatggttctttgcaagacagtaaagaacttctctrtgaaataagagcattggactagatgatttctgggttttcttccagctctggggacttatgatgttcgttatgtatattgcccttctttttttttttttttttttttttcattggggggctagcagcaccattctttagtgcggtgtgctctattttcaccactcaactaacacatttataaaggataccctgtctgcattaccacaacttaatgagtttctgtgaaaatatagcatgcagaagcacactgtggactacaaacactgcaaatgcaagatggtggttctactgtccaagacacaaactgcctcaaggaagtgtaacttaggggttgaaatgtgtggcctcaagtgcctaactcagtttaaatctttattttctcaaaaccactgagtctcagtatgtaacttggaaaagaaggatgcaggtaccaaccttatgagatcactgggagaacggaatgaaacaatgtatgcacagctcacattacacggccttgagtgtgataagtgtttaataaatgctggtgactattctgtgtacactcc

SEQ ID NO: 58865 - DNA, 848 bp, Homo sapiens
aaatgctaaagctaaatataaaagctatataagcaaaataataaaatgtgatcataagatctacaaatatcgagctctactttctactgccatgacaatgttttctcatttctatttacataatctccaaaaacacagcctttagattttgaactgtttgctttagtattttatttgtaatgaaacttctaatgaaataaaatgataaataatagataattaaaagaaacagattctggggaagtgatgtcttagaagtaaagcatatggttctttgcaagacagtaaagaacttctctatgaaataagagcattggactagatgatttctgggttttcttccagctctggggacttatgatgttcgttatgtatattgcccttctttttttttttttttttttttttcattggggggctagcagcaccattctttagtgcggtgtgctctattttcaccactcaactaacacatttataaaggataccctgtctgcattaccacaacttaatgagtttctgtgaaaatatagcatgcagaagcacactgtggactacaaacactgcaaatgcaagatggtggttctactgtccaagacacaaactgcctcaaggaagtgtaacttaggggttgaaatgtgtggcctcaagtgcctaactcagtttaaatctttattttctcaaaaccactgagtctcagtatstaacttggaaaagaaggatgcaggtaccaaccttatgagatcactgggagaacggaatgaaacaatgtatgcacagctcacattacacggccttgagtgtgataagtgtttaataaatgctggtgactattctgtgtacactcc

SEQ ID NO: 58866 - DNA, 1109 bp, Homo sapiens
tatatatgatacatatatgtcatatatgtatcatatatatatgatttcttacaattaaattgcttttacttttcaagaccttctgcaaggctgttctattaaaagctaaagcagatgggttttattaaactacccagactctactttctctaatcatctgcctcacccaatctgaggggaaaagggccgacatatgaggaatctattcctctctaaccctctctgcaaggcatctgctaagacctcattcatcactgtgaaagctgtgaatggatagctatgcaataccccaaggtctcattgggagtggtgctgtaaygcctaacctctcctctggtaaagcaaaagcaacatgtccttttgtcaaactgtcagcaaacacttctctcttgatacagtttgctcaacccaaccttctgcaatgtcaactggctgcaaatgtttcattttcaagaaaacccccaatggttgccttgatgtagttctcacaaatgagtacttttgcctctgtggtagctacgaatgtgtaggatttgcttgcctccagagaggtccacactattcaggaaacaaaatgactttcaaatttggttgtcaaattatactattaggccatgtagtgtacatggctgcttaataaaatcagccccaaacatctcctttatgaatctttctaagaatgatagatgattattcaatcattcacagtatcctagaactgctactctcctggcagtcttgaggaataacagatgattgtaatataagcagccagacactagtccctccctcccacttcactcctcaagtgggacaaaatgctaatctagtgttaactatatggcccacacttactttcaatcatgagcaccataactgttcaatcaaatgaaattaaggctggaatcatcatccacttgttaattacagtgtgaaatatctcaatcactttgtttttagaggtggcatgagaattgtgaaaaacagacaagggcgtttgttatgcagtgtgtgaagtagtccattaagccatggaaacgtcttccaagcaactgtattcaccctgactcccctcataattccatctcctagttgttcaaagaagaaga

SEQ ID NO: 58867 - DNA, 681 bp, Homo sapiens
tcattcattatacatattcatagccatcatgcactagatactgttcctgcccatggtaataaaaggatgtaaaagaaaatctgatcctgtcaccatggtgcttatagtctaatcagggagacagagtattgatgaaacaactgcactcagccactagttcaatgtggacactgaccacagtaaatttgaaaataaacctagaaaccattatgttttgataggtgatatgttcccaaaacaaaaattcctagtttcttatctccttgccttgtaacacacgctagaatgatatctcctgggcctctgctacctaatagagatcttatcaaaaagtcttgtgttgcttttccrtaatgaagcctgtgcttccttgattggaaccttgtctatgcaaattacaaagggacagacaatagtggacccagctctatcctgtattttatggccctgtcctgcagaaatccattttctagcttgcaacctattcctctctctcctcttggactagttaaagaaagtattcctagttccatagtgatgcctttgaaactctggcccccaatttaggccctaagaactccactggacttcatagaacacattgatcccaagtttaatagcattttatcagatttcacacatcccttctatacatttctgctagctttcttggggtcagga

SEQ ID NO: 58868 - DNA, 692 bp, Homo sapiens
gaggcagcgccggaagtatgacgctcatttctttaagccactagaagctcaccgtgagtccattcacagggccagagttccaagtgtgcggcgtgggcggggcctgcagaaagggacggggcctgcagaaagggacggggctggcaaaggcctggtctacctcaccgatccgggtcgcgggggctcctagggggttccttccacagctggtgcgcgtgcgcaagagtgcgwcgaggttgttccgcggcaatttatgaaactcggagccggcagtgagttgagggttcggcgaggtcagggattcctagttgcagcgtgattaccaacgccagctcccttcactgtccaagacagcgattccgcggctcctctgagaactggcgcttgtgagtgactgaacgggccactggagaggagcggtgctcacgggtatcgttctcgtcagcgggcggtggggacgcggggtcttggaattgggaatcacgcttgagggcgtccatgcggaacgtgcagcttacctcagcttgcttgcagttacccagtttccacgctgccctccaaggtctgtgccggaaaacctggaggagggcgcgagctgacgggagggatggaaacgtgggctgcggaagtaagacaagcgttgagagcagcgacagagggcgagggggtgggcggcgggacggctggggtca

SEQ ID NO: 58869 - DNA, 692 bp, Homo sapiens
gaggcagcgccggaagtatgacgctcatttctttaagccactagaagctcaccgtgagtccattcacagggccagagttccaagtgtgcggcgtgggcggggcctgcagaaagggacggggcctgcagaaagggacggggctggcaaaggcctggtctacctcaccgatccgggtcgcgggggctcctagggggttccttccacagctggtgcgcgtgcgcaagagtgcgtcgaggttgttccgcggcaatttatgaaactcggagccggcagtgagttgagggttcggcgaggtcagggattcctagttgcagcgtgattaccaacgccagctcccttcactgtccaagacagcgattccgcggctcctctgagaactggcgcttgtgagtgactgaacgggccactggagaggagcggtgctcacgggtatcgttctcgtcagcgggcggtggggacgcggggtcttggaattgggaatcacgcttgagggcgtccatgcggaacgtgcagctyacctcagcttgcttgcagttacccagtttccacgctgccctccaaggtctgtgccggaaaacctggaggagggcgcgagctgacgggagggatggaaacgtgggctgcggaagtaagacaagcgttgagagcagcgacagagggcgagggggtgggcggcgggacggctggggtca

SEQ ID NO: 58870 - DNA, 2934 bp, Homo sapiens
tgcatgggtgtctgtggatgctaagatcaatagtgcaggggcctcacaaaagaaatgagcaatgctgttactgcctcggtagggtagcctcagtatgaaggtggtgtctaccacagacaccagaatgccactggtccatgatcctgttgccagctggacacacactttccaggtcatgatgttagggtaacgcagaggattgcagattgcaacatagcgatcataggacatcactgcaagaagggcgcactgggtacacccaaaaatgaggaaaaagagaagtcgagctgcgcaaagtgtgaatgcaatgaccttctttctggaaagcaggtggactagtgcctgaggaactatgttggtagagaaacagaggtcagccagagacaagttgcagagaaaaaaatacatgggtgtgtgaagttgggagtcaacatgaacaagggagattagaagcagatttccaagcacagtgaccaggtagacacccaataatacgataaatagcagctgctcggtgtgtggcccatcagagagtcccagaaggaggaattctgtcacttgtgtctgatttatctgtctcatagtttgttgtccttttcagtaagaagtcactatgtgctaaccatagacaggcatacctataaaattatataattcagaagtgcaggcttaggaactgccccaatttctactgaaaatttcaagaacccccttcataagatgatcatgtttctttcattggaacattttcagtgttgtaaaacaaactttaaaagatgttgcattcattgttgatgtcatctggcaagaatagatttttaaaattatttttctcactctgaataccacacttttaataatacaatattaaatacagactgagttcatctataaagtcctgccatttaatttctgtttgttcttaactaaaacccctgagtcgtaagtgctcttgtcacatctcctcttccccgcttatgataatatagttttctgttgtattttccgtgaaaggacagacacgaaggtataagaaatcagaaagagccaaagtactggtatgttttatttaagaaactaacctgtcttacaggagctgggaaaccaaagattaactcaggatacccttgggaatcctatctgaagcctcagcttgagttctgttcagtctcaactgtgaatgaacttccaacataacagacacaccatcaaaacagaattttcattttaagccaccagcgtgactagtttcatactcagcccaaacagcactactccccagctctctctgctaaaaattatatgcattatctgtccactccccccgcaaaagtaaaagttcctttgaaaatagtttccatgtctttttcacctctgtgtcctttacragtcatagcagagaacttcatttcataaatgaccataattcattaaacaaataataatttgatcacatagttaagcagagtcatttagaagttttgccaatatccctagagagatttgaaataataatccaattttgtggagctgttccaaaaagaagggaaataaatttactttaaagtgtaaagtttaagatcctatacacgggttgggctatcaatcctttaactgtctggtgaaagtatctcagaataacgttttaaatacatcaaataaaatgtataggattactaaggaaaccagttatatcaaaatacagttatcgaaataattttagaaaacagatttgtaaacagcaatatatgtgcttctttattaatacactaaaattttgaaatgtagtggtgggtctaataaccatcttcatttcaaaataatgatgagtttaaatatttggagatctctccaacaactgcaatacaatataaaaattcttataattactactgctgacaaagtcataaatacttctaatattggtgtgggttggttacttgcattcaaattggaaggaaacatcaactttcagttaggggaaaataaaaataaagaagtaacattttactccaagttgcagaactcacttgggttacaggaatccccaggagatttcttaaaaaaaaaaaaaagacataattacaccctacataatctagtaacagagtctcagcatctggattggtctgtgagtcaaagaaatgaaagatttcaattcctaattggtcttcagactaaagttggaatttggcattgggaggaaggtccctttgcacttctacttaactgtttggtgctttagatttttagcattgctccctgctcactttgcaggcagaaggccttaagcaaacagctcagtccaacatgcatcacctgtatgacaaaatccaatttataacccttccacctttgcccactactggtaagccatggactctacactcctttcctcacttcctgggatttctcctgcaacatcttttctccagacaggaatgtagctgtcctgggccaaagttaccactaacaaccaatctgggaaaagtttgacctaatttcttttctcttctccacttttattttaaccaccagaggaagaagcctgaaaacaatttcaccttactgttttactttacaatgtacagattaattacttaaaaggttcttttttaactcaaaatacagattattctttatgttattctcctcttttacacatctaggaaaatctgtcaaaacaaaaacagtctcatatcaaatcatataaatgtaatggttacacaatattaccattatatcaggtaaatggaggtgtggatgttgattcaatggtaaaataaaaaccagtgcccacaaactctaaaatctttgaaaggataaaagcctcttaccctatccttaaaaggaactctatattcctcctcaggttttgaagataagttacttaattttaacattttgtttgcttaattgtattttaaatataca

SEQ ID NO: 58871 - DNA, 754 bp, Homo sapiens
cgaggcagcaggagtcctggcacccaggaccacagtttgagaggcctggcgcaaaatgmaaatgcagggctcctgctcagcagtaactcagacgtcaagatggcgacagcagagcttccacccaagcccggagccccgccaggtgcaggccgcacacccgcgaacccgccctgctgcatctgcgagtggggcgcccagggaggcgaggggctctgggggctgcctggagaggcctgaccccttcctttcccggaggccgctcccgagctatgccaaacccgggctgccgcggcgctgccacctgctggccacctcgggcccctgccgcgtccctcggagagaaggaccttgtgtggagtgggcaagcggcttggtggcccggacctcaccttcacagaagagaagctagccggggagggagttcacatcggctacagcaccccagtgacggtggcagcacgttactgtcgctcttgaactgtcctgtgccttacatcagtaaggtagagatgatgaccccccactacaggtaaggaattaagaattggagttttctggccgggtgcggtggctcacgccagtaatcccagcactctgggaggctgaggagggtggatcacctgaggtcaggagttcgagaccagcctggctaacatggtgaaagcccgactctactaaaaacaaaacaaaaattagccaggcgtgatggcgggcacctgtaatcccagctactcaggaggctgaggcaggagaa

SEQ ID NO: 58872 - DNA, 1281 bp, Homo sapiens
catatggaactccaagacataaagataaaatttatataaggaactccaataataaaatgccagcagtaggagtccctacgtaaataaatctgctcccatttttctaattatatgagagtgaaatcatatttaaaaattaacactttttaaaggtgaaatccagaaatatagtctgaaatcaaattatcttgcacttgttcatctaaaagtctaaagaagtagtatttccttctttttttatttcttcatctctctctccctcctgccctccccagtscttgccaacttcttattcttccctctggtcacaatcagggttctttcagcagttcagtgtgggttttctctttctctctcacctgcgaccccccatcatagttcttttaaggtctcatatgttatattagtttgattccaagtctttcatgaaccatactttaaaatgctcaaagggttcattggatgtacacaattatcaaaagcactggccccacaaaataaaagttcaaaggtgaaccaatttgattccaggacctagtagttgtggtttttcaaagaccatcctttatttttattctatttctttgttggctagatttcattgtcaattccattattttttaaagaagcattcaagatatctgtagtctgtgttttcttggttccttgagagtttctgtttgttttctctgtaattggataatttggcaatttttaaatgtcaaatataaaatgtaatatattttctccttcagaatgtatagacctacccactgaatatgttttcattgatatataatacttgtacatattttcagggtacatgtgatattttgatacattcatgtgatatataatgatcaaggcaggtaattgggatatctatcatctcaaacatttatcttttctttatgctaggaatattgcatttatagctattttgaaatatacagtagattaatattgatttaatcctttcaacatagctttttctttcatcttctgggttggtaaattttggtcttttttatattccttgagaacatgaggtttgaaactatcttgtctcttgtatttatacttgaacggcagcttggctaagttgacattcttggatcaaaaagagacagtcatctgagggaaggttggcttaacttgcagtggtttgagaatgtaccattgagccagatcacttgatgcttaaaaagagtgacagatgttatagctgaaacaccttcacattttggctactgagcaggttgctgaagtacctgagataat

SEQ ID NO: 58873 - DNA, 979 bp, Homo sapiens
ataaaaagtgaggtcatagtgaaaagtttagaaaggagatgatggaataaagtagaattcccttcatcagtaaccaataaaatcacaaacagcataaatacttactagcggaaaccaaaaaaactaagaaggcataattcactgtgttgagtttgaaatactatcagctaagggaaaaaaaarggggggttttatcttgacttggtacagaccctaaaactggccttaagcctcacactggtaccagtgaaataacaaaagccctcgcattttcacaaagaataccaaagatggacagtgtatagggcagactgcagggttgacaatggtgaaagaagaacggtgaacagggactgaattattgaggcagaagtgtggggtcacactggacagtaggaataatacaacacagaaagacatttcccacaagcctatgataaaccctgaatgtggtggtggaatgaactggaacacatgtacttattctacaataagtacaaagagtagaaattccttgattgtcctccacccctattcctgcccccaaggtccccaggccttcaagctataggactgtgtctggaatgaaataagctcaccttcgtgctgggccttgcctaggaggatcatcaatcttagacatgagagaaacacgttaagaaaagttaccacacttttcaggtccagtggaagttcttaagcagagctttttaaattaaacatagcaagatgaaaagaattggcaaggtgactctataaacactattgtgatatggtgtgcggaaggggagaaaagaaagaaaggaatacatagtgcaaaatgcagatgaagagctgtttggaagagaagaaaaatttccctgagcgttttgtgctacaaaaatacataagatatacacttattaaaagggaataaaatagaagaggaattgaagagctaaagaaaaaaactgagttccagaatagtactactgacaaa

SEQ ID NO: 58874 - DNA, 762 bp, Homo sapiens
ggatccactaaattctctgttttcataaagaaaaaaagtgaatgttgaagtctttctgggatttggcaacagaatgagagctgtaaaatatcaattttcaaaatctcttggcagatttaaatgaccattatatttatgatgtagactttcattgttttcaaattttatgtaacttatttttataaaatatctctgcatccccatgacagtgagagcaaatggttagaaagcctattctacaagaatttcaaatattaaaccctctctttcatgtcacgtattctggatgattaaatcagtcaggaaggtattatattttaaaatgcaayccccttactccattaagaatgctagaactctagcacagaaaggaatatcataatgcttgtatacctttattaaaccaaggataatgtccccatgtgcattcatgctaagcacactcccttcatggttgaaccaaacttggtattctcaagttgtggaggatattccaaagatgggctttagagattttcagatgttttcactaacgcaaaaataatataatgtaatctcccaatttgtatcattttctgtaatttccgtagatttgcttatgacaagaataatcctttttttatgacttgctttatgacacttttctgtttcaactgctagtgactgcctattacctttaggtaaaaccccactcattagcatggtgttgaagacccttaggcattctcaaacctctttacctgcatctctttccctttctgt

SEQ ID NO: 58875 - DNA, 822 bp, Homo sapiens
gtgcacacatatatgtgttctagcagatatagtgagcagcacagctcagttgaggtggtctatacactttgttggaaacgtagttagaatacctggaccatggtctttctcctgatattttggtgactatctaactccatacatcacgccaattacttggaagtgtggcaacatacgattggcattgagtaatgacctcctgaattgatattttccttcaaattattgtccatctctagtactttatttccttcgcaaagaaaatcaagctcaatgcttatttgatctatgtcttctttgaaattayatgatcataacaaaaaataaggataggaagttgttttcatttttgcaaatattgtaagggattaatgagaatttttgaaattccatcctactatatcagtcaagtgcttgcaagaagaaactatctgtactacctctatggtgtgcttcaggattttgtgtctttcttgttcttgatgcaaatgtcttccttttttgggggtggggcacagggatggggtgaatggtgcaattattaaggtcaaaacaattatttggagaagttttatttactatcttaacttagcagtatgcttttaaacttgttcaggcttttagtttgagagggctctttcacaaagagtaattaatctgacagtccattatgacatgtgacaacgagaactacaagtagtcttagagggggattttcttttgtccaacgcctcattcttttctttttttatgtaagctgagagtcagggtttattagaatttctatttagtctagctcccaattatacttgtgactgtccc

SEQ ID NO: 58876 - DNA, 822 bp, Homo sapiens
gtgcacacatatatgtgttctagcagatatagtgagcagcacagctcagttgaggtggtctatacactttgttggaaacgtagttagaatacctggaccatggtctttctcctgatattttggtgactatctaactccatacatcacgccaattacttggaagtgtggcaacatacgattggcattgagtaatgacctcctgaattgatattttccttcaaattattgtccatctctagtactttatttccttcgcaaagaaaatcaagctcaatgcttatttgatctatgtcttctttgaaattatatgatcrtaacaaaaaataaggataggaagttgttttcatttttgcaaatattgtaagggattaatgagaatttttgaaattccatcctactatatcagtcaagtgcttgcaagaagaaactatctgtactacctctatggtgtgcttcaggattttgtgtctttcttgttcttgatgcaaatgtcttccttttttgggggtggggcacagggatggggtgaatggtgcaattattaaggtcaaaacaattatttggagaagttttatttactatcttaacttagcagtatgcttttaaacttgttcaggcttttagtttgagagggctctttcacaaagagtaattaatctgacagtccattatgacatgtgacaacgagaactacaagtagtcttagagggggattttcttttgtccaacgcctcattcttttctttttttatgtaagctgagagtcagggtttattagaatttctatttagtctagctcccaattatacttgtgactgtccc

SEQ ID NO: 58877 - DNA, 822 bp, Homo sapiens
gtgcacacatatatgtgttctagcagatatagtgagcagcacagctcagttgaggtggtctatacactttgttggaaacgtagttagaatacctggaccatggtctttctcctgatattttggtgactatctaactccatacatcacgccaattacttggaagtgtggcaacatacgattggcattgagtaatgacctcctgaattgatattttccttcaaattattgtccatctctagtactttatttccttcgcaaagaaaatcaagctcaatgcttatttgatctatgtcttctttgaaattatatgatcataacaaaaaataaggataggaarttgttttcatttttgcaaatattgtaagggattaatgagaatttttgaaattccatcctactatatcagtcaagtgcttgcaagaagaaactatctgtactacctctatggtgtgcttcaggattttgtgtctttcttgttcttgatgcaaatgtcttccttttttgggggtggggcacagggatggggtgaatggtgcaattattaaggtcaaaacaattatttggagaagttttatttactatcttaacttagcagtatgcttttaaacttgttcaggcttttagtttgagagggctctttcacaaagagtaattaatctgacagtccattatgacatgtgacaacgagaactacaagtagtcttagagggggattttcttttgtccaacgcctcattcttttctttttttatgtaagctgagagtcagggtttattagaatttctatttagtctagctcccaattatacttgtgactgtccc

SEQ ID NO: 58878 - DNA, 1162 bp, Homo sapiens
tattataagataggaataaactacttgagagagtccaggctttgttattctcttctggaagcagaaggtccttcgaagcttttcacaatctgtcacatggctcctgaggactataaaccagagtggactccctatcagggtctctsaatggttgtgctagtggggcacatgcagctgagtctccctctgacccaggaaactttcttaagctgtgagggactagctgacaatgggtcctaggcttctgtttgcccttgttacctacatggaagcaataaatccacttcctgttacttgctgtgtatgagtgtgttcgcctcacaagacagagagacaagttgaagaccagtgcacagtgaacttgcttcacaaagaaacttgttactagcctcaaatataaaaacaaataattcaaggtgattattcttatccatatagactagctttggtcagatttcaaaattaactttaaaaaaacacaaccagaggcaaaactttgctgcagaacacgactacacatagatatagatatagctgtagatttatagatatgtcaatataaatataattttcagactctctgaatctctaaaacagggaactttactgcatcacatgaattttctaaacacatgatagtgcttataaaaacatctaaggcattatattatttatacaacctggaaaatttctaagcttaagccttatttccttatagtctataaacactgtattgctctcattgctctctttcctctcactctctttaattttcaagtgagaattcatgaacacttggtatatcctaaagcatgtgtgtgccttttccctaaagctctcatttatggtactattacagaatgcagtttactattcctcttcctgcaagcaactaacaaaaacatgtgctcacatttttcaatcaaactggttataactactgtgtcacagtttgctcttatattagatttcaaccaaattcaattacacagtgtgctccttgctgccataggatgaatggcaggacaaagatgaatgaacacaactggcacgagtgattgatcccaacatgccagcaggttgattaaagtgtctagaaacaaaatgaaaaatagtattcatctgtaactactggtcaatttttaaattaactgcaaatttc

SEQ ID NO: 58879 - DNA, 1162 bp, Homo sapiens
tattataagataggaataaactacttgagagagtccaggctttgttattctcttctggaagcagaaggtccttcgaagcttttcacaatctgtcacatggctcctgaggactataaaccagagtggactccctatcagggtctctgaatggttgtgctagtggggcacatgcagctgagtctccmtctgacccaggaaactttcttaagctgtgagggactagctgacaatgggtcctaggcttctgtttgcccttgttacctacatggaagcaataaatccacttcctgttacttgctgtgtatgagtgtgttcgcctcacaagacagagagacaagttgaagaccagtgcacagtgaacttgcttcacaaagaaacttgttactagcctcaaatataaaaacaaataattcaaggtgattattcttatccatatagactagctttggtcagatttcaaaattaactttaaaaaaacacaaccagaggcaaaactttgctgcagaacacgactacacatagatatagatatagctgtagatttatagatatgtcaatataaatataattttcagactctctgaatctctaaaacagggaactttactgcatcacatgaattttctaaacacatgatagtgcttataaaaacatctaaggcattatattatttatacaacctggaaaatttctaagcttaagccttatttccttatagtctataaacactgtattgctctcattgctctctttcctctcactctctttaattttcaagtgagaattcatgaacacttggtatatcctaaagcatgtgtgtgccttttccctaaagctctcatttatggtactattacagaatgcagtttactattcctcttcctgcaagcaactaacaaaaacatgtgctcacatttttcaatcaaactggttataactactgtgtcacagtttgctcttatattagatttcaaccaaattcaattacacagtgtgctccttgctgccataggatgaatggcaggacaaagatgaatgaacacaactggcacgagtgattgatcccaacatgccagcaggttgattaaagtgtctagaaacaaaatgaaaaatagtattcatctgtaactactggtcaatttttaaattaactgcaaatttc

SEQ ID NO: 58880 - DNA, 1112 bp, Homo sapiens
cagtgtcccttctaacatctatgccccttactcggtgagatctcttctaagtgctcaccacacttgacactattctgttagccacctcacctcttatgagrtactcctgctttctgcccccagcatcacttcaaagcactgtaacaccgttaacactgctacccttctcccccttccaggtaaacaacaaaaggaagagaaacgtgattacaatttacctactaatatcttactctcccctaaagaagatttacaggaaactcccattgagaatgctgaattaatttggttcatggttggttcttatttaagggacaaccaggggcattaccaggcaggatatatcatcatttttataacagaaataatcaaaagtgcccaactccaaggagtcaaatcagcccagaaggctcgcaaatttgctaaaggaaaagtggcaaatatatataccaatagttgatatactttcggagtagcccatgattttggcatggaaataaatattttcttacctcatctggacagcccatacaaaatgggcaacaagtctcagagttactagaagcaattcagatgccaaggcaacttgcaatcataaaaattcctgggcactcaaaggataacactaaagaagcaaaaagaaataatctagctgatgctgcagcaaaaaatgctgctccaggaaatatagcctattctgtacaggaatgtatctttcatcctccaaataccctaacattctttttcaatatcaacaagcatctagccctcaagagaaacacacctgtcagcagaagggaggcatgtttgaaccatttaaggaattatggctagagcctaataaaaaactgacagttccaataggtacacaattgcctttccttaagtttattcacgacatgacccatggggcccctgaaaaaaaaatggtatcatgaggaagacaatacttttgaaaaccatcccccatggtagcccaaaatgtatactctcaatgtactattatgctcaaaacataacctgacaagctcttacgtggctcccaaagtcattttcctttgccaataggacctcctgaagtatggccgttggattttatccagatgccacca

SEQ ID NO: 58881 - DNA, 1112 bp, Homo sapiens
cagtgtcccttctaacatctatgccccttactcggtgagatctcttctaagtgctcaccacacttgacactattctgttagccacctcacctcttatgagatactcctgctttctgcccccagcatcacttcaaagcactgtaacaccgttaacactgctacccttctcccccttccaggtaaacaacaaaaggaagagaaacgtgattacaatttacctactaatatcttactctcccctaaagaagatttacaggaaactcccattgagaatgctgaattaatttggttcatggttggttcttatttaagggacaaccaggggcattaccaggcaggatatatcatcatttttataacagaaataatcaaaagtgcccaactccaaggagtcaaatcagcccagaaggctcgcaaatttgctaaaggaaaagtggcaaatatatataccaatagttgatatactttcggagtagcccatgattttggcatggaaataaatattttcttacctcatctggacagcccatacaaaatgggcaacaagtctcagagttactagaagcaattcagatgccaaggcaacttgcaatcataaaaattcctgggcactcaaaggataacactaaagaagcaaaaagaaataatctagctgatgctgcagcaaaaaatgctgctccaggaaatatagcctattctgtacaggaatgtatctttcatcctccaaataccctaacattctttttcaatatcaacaagcatctagccctcaagagaaacacacctgtcagcagaagggaggcatgtttgaaccatttaaggaattatggctagagcctaayaaaaaactgacagttccaataggtacacaattgcctttccttaagtttattcacgacatgacccatggggcccctgaaaaaaaaatggtatcatgaggaagacaatacttttgaaaaccatcccccatggtagcccaaaatgtatactctcaatgtactattatgctcaaaacataacctgacaagctcttacgtggctcccaaagtcattttcctttgccaataggacctcctgaagtatggccgttggattttatccagatgccacca

SEQ ID NO: 58882 - DNA, 1233 bp, Homo sapiens
attgtcgtccttgccggttatatgtgctgtgcatgctttcttactttaacctttaaatgatggtagatattctcaattttaatgccttcaaatttaatgctgttttctttaatttatttacatcttgtgtatgaaatctctcctctcctaagagtaaagatattatccctattttctataaatgatattattttgcctttaatgtttaagtcttcaattcacttggaattaattgtagggtgtggtatttccatttggataatatctgaaacatcatttattgaaaaggccattgtaaaggattaggcaaactgcaaggtctgaggkaacagtccctacaagatgccgtcactcagacaccagctacaacttaagaggttcccatgaccactctcactttagaccagctagctacaaattcaggtatttccaccaccaccacccttaggtataataattcagtagaaagcctcacagaactcaatgaaagctgttatattcacagtcatatttataacagggaaaggatacattgggttgtattaccctcccagtattgatgtttggcagtacacccagagtattgtcaaccagagaagctcactcaagcttcagtgcccagtttttactgaagcttcattacataggcatcattgattgaatcattttccatgtgcacgaactcagtttccagcatctgtcctccctccttgcctgaaagtcaagctgataccacacggctcaaagtcccaagaccgattacatggtagaagtaggtgtggccagccccaagccctagtcatctcatgagcataaactaacagacgtggtcttaggggctcaccataaataacaaagacattcctatcactcaggaaattcaaaatgtttagaggttgcttcccaagagctgggacaaaggccagacctctttttggaggccacattccttactacacagtcctcctttctatgtacttcagtggcagttctgtcataaattaagtttccctatgtatatgtttgtctattctgggctctcctttctaatctgtccgtccgtttgtctatttaaaccatactgcctaaagactgctttctagtaatgtctgatatttggtaagtcacatgcctctaccatggtcctgttctctagaaaggtcttagctgttcctaggttttggcttcatacacattttagaattggcttatcaatttctgtagaaatccagt

SEQ ID NO: 58883 - DNA, 748 bp, Homo sapiens
tccccatcactcaggatccgcactcgccatgtggccctggtctggcctgggttgaactgcacttgtttctgtgctttgcccttgaagtctttgtctttttctgcagttctgtctcttgtgccaataccttcacaaaaacataatatcattttcttagtttcattttcgcttggattattaagattttccttgttaactttttgcatgtcattttatcctgaaaagcaaagttgatcctgctttgacctcatgaaatggaaaattgggaatgggtctgatgatgaaagtgtttcactgtaggtgttgggtagtttgtgattctgttctgcttttgcctcaattatggttttgctatatatgctttmagctacatttggattagaacttcttgtcaaacaagaccaagtaaatgtatattcacattgttcaatatccttactcctacaagttatacaatcttaaaactcttcacatttacttttgcatgtgttcctggatattataaaaaaaataagaaacattctctaactataaaatataagccaataagaaactcctccatgaaagaattctctgactcacaatctaagtcataaatggccaagtggaataataaaaagtgatagtattctctaagcacttaatggaactaagatcctttaaaaaatgtaattcagtgtttttcaacatggtcactgcaaaatttttctttctggaacaccccagaattccatgaaattaaataaac

SEQ ID NO: 58884 - DNA, 1104 bp, Homo sapiens
ttaggaatcagttctcgcatggaggttgagaaggaatagatatagaaagaactcaataaacattagcaattattggagttcttttatggagacaatgaagagacaattatgtcatgcaccccccacagcaaggatcctaaaaatcttttccacacatgtctcaaccagaaggtcttttttcccatccagccccagtttaaaagcccagttgctagcttagctaacaaaggaaactttctgcatataagcaggggcaagggaaagtgtacaaatactcttaattttgtatttttaaaaattaatctgatcatatttaacaaaatgaaaaattgatgtacatactaacatgtttaagatgaataaacaaattgacatagacacattcccacggacatctccagctgttttwttttattttttattttttatttttatttttttaagatggcgcatgctctgttgcccaggctggagtgcagtggcccaatctcggctcactgcaacctccacctcccaggttcaagtgattctccagcctcagcctcccaagcagctgggattacaggtgggcaccaccacatgcagctaatttttgtatttgtttttagtagagatggggtttcaccatgttgaccaggctggcctcgaactcctgacttcaagtgatcctcccgcctcagccatccaaagtgctgggattataggcaggagccactgcacctggctgccagctgggttttgcatacctcgaagtttaaatattcaacactttgacctacaatttttctgcaaaactcttcaacaggttatcagacatgagtaactttaagataaagtacttgaaatcttatgtttgatattaactctgggccatagattgaatctctgaggtcacgtggacaggcagtaggatgaaaaaaaaaaaaaaacgttaccagctacaccctctgcttgattatttttatccttacaccatcttgttagaacagtggttctcaaaatatgcctccaacgtaaatagcattgtcattgcctgaatcccatccagacctactgaattagacactctggggtggggcccctcaatctgtgttagaagacacc

SEQ ID NO: 58885 - DNA, 704 bp, Homo sapiens
taggatgcaccgagcagctccgggggcgcctgacagcacctgggaaagatggcttctccactggcttgttggcgtcaccctccagaggggcatcaggaaatgtcctgggaaccaggcaaaccagtgagcattaacccttagaagtgcttggcatgggtgacacccaccatctgtaaacacgacttctcccaaggagtgacgcagaacaggatgtctgagggaggcactccgactccagccttcagagatcgccagggtggcacctggtgacgacaggctgatgcttgggtgccccagaaaargtcatgtgtgtgaatgggggccccaaagccaacgcttcatccctgacagcctggtgcatttagaggggaactttttgtcccttggcaaggtgggtggaatttcaggttcatagggcaagggtattttagctttaatagatattgtcaaacagttttccaaagtcattgtacacactctgtgattctacttatgtaaagtttaaaaacaggcaaatcaaatctatggtgttcgaagtcaagacagtagttacccttgtgggggctgcaactggtacagagtgtaaggggggactgtaggatggtctatttcttgatctgggtgtgttcgcttttggaaaagtccttgagttgcatttataatgtgtgaacttttctgtatgttacactttaattgaatgtaca

SEQ ID NO: 58886 - DNA, 1190 bp, Homo sapiens
tttataactaagcattaaaaagttactaaaaggattaacaccaaatgttcccaaagctttcaatctactcttaaagaggagaatatgacttttcaagctgaacatattttccctaatatttgaaacaaaaataagatcatcacacacatatgagttaagataggaaactaaaaataagtatgaattggatagacctgtatcttagtttgggtttccccagaagcaaaccttgacatgataatttgagtgcaagtagtttatttgggaggtgaaagaaaacaccagtgcaggtgggtatggggggaataagacatgaaagtgaagacagcaaatatcactttatcaaaccagtcaacaccgcagggactgctgcttgatatcactgggaaaactctgggagtccatggaagagttaatccactgggcaagtgagagagctggggtatttatgcaccagcttctgtcagtcattggttaagggctgctcccaggaattgttaatccccctgcatttctggtctgtgcaggtggtcaagcaggctccagaagcaagagaaaaccttcaggcaaaaaagagcaggtgctggcatttggaagttgggttgctgcacctcagggtgttaggggcaaggagatatagcagggcactggcagcatttagcatgtcatgataaaactactgtcaacgaattcccacccaatagctatttatttaactaggctgtgtgacatgaggctttatatgtcctcttctcaccttcaaggaatgggcagaatccacagggcatccagatgacaggcaggatgctcctgccccttagaagtgctccactgcagcctccacacatgaatgagaaccagcccttcaccccaactcatctgggtatgtctggttattacctgaactgcctccaacctcctaaagacagtaatctttatttttccaaatggtcctcactccacagttggcattgctcactctgagagcggggcgtgagacagcagaggagacagaaaagctactctcatgattcatctaacatcctagtgaggcgarggaagagttctgacctcccccgctttctgttattattcccctagaggcaaattttagatccaaggtgaaattcaatgaatttccttttaccttacttggaatataaaagtaagtttctccctctttactgaaa

SEQ ID NO: 58887 - DNA, 624 bp, Homo sapiens
taacttgtttttaatcaagatgctagaataaaatataatgtaaactgataccatacttcactatgtcaagatacatgactcatttatttgacaaaagagtaacctgcagcaagtagtctacaggcctaagtacaatttttatctttttttcctttactactgacttcagggaaaaagacaatactgaaaaattcttgcctgttggaatagacaggttacctgacatttaggaagattttattaaagacaggcaaactcactgaggttaagggaagaacagcagaaaaacttaaattggaagattgaaccagtaattagcatgtcttagtttataaagcatataattcattctcccaaaactttatgctgtcagtgagscaaatattcgtactatttccattttaaaaatggacaatttcatcacactagctctttcgggaattaacagcatggtggcagatgttgctccttgctcattgtctagccaacagtgatttcccttcttagctgccaacagagccctagattattcaggtgacaggcagcattcccttaatatttcagaagacagacctctaggttcaactccagagaatgtatcacaataacaaaataattgattca

SEQ ID NO: 58888 - DNA, 624 bp, Homo sapiens
taacttgtttttaatcaagatgctagaataaaatataatgtaaactgataccatacttcactatgtcaagatacatgactcatttatttgacaaaagagtaacctgcagcaagtagtctacaggcctaagtacaatttttatctttttttcctttactactgacttcagggaaaaagacaatactgaaaaattcttgcctgttggaatagacaggttacctgacatttaggaagattttattaaagacaggcaaactcactgaggttaagggaagaacagcagaaaaacttaaattggaagattgaaccagtaattagcatgtcttagtttataaagcatataattcattctcccaaaactttatgctgtcagtgagccaaatattcgtactatttccattttaaaaatggacaatttcatcacactagctctttcgggaattaacagcatggtggcaratgttgctccttgctcattgtctagccaacagtgatttcccttcttagctgccaacagagccctagattattcaggtgacaggcagcattcccttaatatttcagaagacagacctctaggttcaactccagagaatgtatcacaataacaaaataattgattca

SEQ ID NO: 58889 - DNA, 638 bp, Homo sapiens
attattctacataaaaagtcagttattgaatacatgcttccagtgaaccttcttaaacgtaaaatagtgtaacttgttatacaagtattactgttctggattttttgtttactattttaaaactgaaagaaaaaaataggtgtatatacttttggttattacgattacacataatttttttaaaaaacatgtatgaatgggagcctctctgtaccccacccatcactagcttccccctacttcccttaccctcccaggaccccaggttgggcattggctcattttcataaataacctcatcccagacaggggtragggaaggtgttgtggctgttttgtttaaattggagctgtaagagggatcatgtcatattttatgcccttcctagaaaggggacgggacacctggtttgcattcctgtattgaccactgctgccgtcactcgtcacattgagttcacatctcctgagagtttgtataaattcaggtcagcgctgctcctatgcagccatccagtgtcatagaaaagcaattcactgataactgatctctccattcagaagtgtgcagttttaatgtatagcaataagaaattgttatttatctattacaagcctggtttgattaaaaacaaaaa

SEQ ID NO: 58890 - DNA, 790 bp, Homo sapiens
ctgcatcaaaatatccactgatatttgagaggagaagaagggtgctacattgggataacaaaagaagcaatgagatttcctgtttgtctgcatttccaacaaagctagaaatactggcttagttgctgaacaaagaatgcctgtccccagagatattctgagagccagtgaattcagtggccttcgcatgttttattaaaatcatgacatcaatctacctgggtagattagttaattcttttctttgatttctcaaatttctgaattttagatttmtgaaatgtgggtttattttgttatgtaaatctttaggtgacttctaaaactcatcttttttccatagtagtttcaggaaaacgtgtatttgattagtaaatacatttttttgtaattttttatttcatttgcttatattgttgagcaatacatgcacatagtttaatgaaatgtcatttactccaaagaagaaattttttaacaatagcacactatggactgattcatatatgcagacatttctgtggaaaatctaagtgtgagcaaactatatcactgtactaatattatggtattctaaaagtgaattgattattataacatgtgaattcttcattagattgcaagatctttgaggcaggatattatcttttgcatatttatattcttagagctagcacaatccattacataaggcagaaacaataaatatttaacaaatttatggatgctatgttcttggtgctatttaaaaaattctataagaaaaatctgagaatgttctattggtata

SEQ ID NO: 58891 - DNA, 790 bp, Homo sapiens
ctgcatcaaaatatccactgatatttgagaggagaagaagggtgctacattgggataacaaaagaagcaatgagatttcctgtttgtctgcatttccaacaaagctagaaatactggcttagttgctgaacaaagaatgcctgtccccagagatattctgagagccagtgaattcagtggccttcgcatgttttattaaaatcatgacatcaatctacctgggtagattagttaattcttttctttgatttctcaaatttctgaattttagatttatgaaatgtgggtttattttgttatgtaaatctttaggtgacttctaaaactcatcttttttccatagtagtttcaggaaaacgtgtatttgattagtaaatacatttttttgtaattttttatttcatttgcttatattrttgagcaatacatgcacatagtttaatgaaatgtcatttactccaaagaagaaattttttaacaatagcacactatggactgattcatatatgcagacatttctgtggaaaatctaagtgtgagcaaactatatcactgtactaatattatggtattctaaaagtgaattgattattataacatgtgaattcttcattagattgcaagatctttgaggcaggatattatcttttgcatatttatattcttagagctagcacaatccattacataaggcagaaacaataaatatttaacaaatttatggatgctatgttcttggtgctatttaaaaaattctataagaaaaatctgagaatgttctattggtata

SEQ ID NO: 58892 - DNA, 2320 bp, Homo sapiens
tcccttgagcccaggagttcaagaccagcctgggcaacacggccaaaccccgtccttacaaaaaaatacaaaaaaaggggcgcgcgccgggtggctcatgcctgtaatcccagcactttgggaggccgaggcaggcggatcacatgaggtcaggagttcgagaccagcctggccaacatggtgataccctgtctctactaaaaatacaaaaattagctgggcgtggtggcgcacayctataatcccagctactcgggaggctgaggcagcagacaggaagctgaggcaggagaatcacttgaacctgggagacggaggttgcagtgagccgagatcgagacactgcactccagcctgagcgacagagtgaggctccgtctcaaaaaaaaaaagaaaaagaaaattagccgggagtagtggtgtgggcctgtggacctgtagtcccagccacttgacaagaggcaagtgaggcaagaggatcacttgagcctctggaggtcgagactgcgtcagtgagccatgattgggccactgcattccagcctagacaacagaacaagaccctgtctcaaaaaaaaaaaaaaaaaaaaatcgcaggtgacaggggcgattgcattttggtggtggcacaggtatcaccggcaacatccactccctaaggacagcaagggcagtgaacttagctccagctcccagctgctaatgctggcggtggtgctggtggcagccgtgggcacccacaatgacgtcctcgacagaatcaccatgtggtgtgctcgtctaggttttaaatgttctgtttcccttccttccttcctgcctgtcccctgaacctgcctccccatctttcccagagattctatgaactgtgcagtgtcttactgatcaattttgtttctttgaaaatcaaaatcggtttccctggtttgccctagccctaactgatatacactgcactaaggttccagctccatgagagtttggttgaagcctttcttacagcaaggggagaaatgtcaacatatcagggatagtggggggcccagggctttgtatgggatggtccttgcgcttgtgcacaatacctgtaagctcaggtagagaaaagacaaactggccagctgtcaacactgcagtgtgtgtgtgtgtgtgtgtgtgtgtgtgtgtgtgtgttctgagtcaggtagagaaaagacaaactggccagctgtcaacactgcagtgtgtgtgtgtgtctgtgtgtgtttgtgtgtgttctgagacagggtctcactgttgcccaggctggagtgcaggggtgcaatcacggctcactgaagcctccacctcttgggctcaagcaatcctcccacctctgcctccctagtagctgggattaacaggtgtgcaccaccatgcccggctaattttttaatttttgtgtaaagacagggcctcactctgttgcccaggctggtctcaaactcttgggctagagggatcctcccacctcagcctcccaaagtgctcgggttacaggtgtgagccacctcacctagtccagagtgtggtttgaaatcagggtgttccctgcctttcctctgtatttccctggccaagttcatctgactggcctgaagatgccactgttgttcctctgcctgcagaactgagcactgacagaagctgtcacctgactgcctggtcactggaaaagctcctggccctggaggaaatgtgtctttaactctttcctctccatggctcctttccttgtcctctgcctcccaggacagcaccacccccttcctctgccttctgcatatcagctgggaccatcaaaaccacggatcaggggcaaagacctcagctgccacagccgggccaggcactgtgccggggacagcaagacagagatgagaacctggagcctttttttctcaaggtattaggaggtacctgagtgaaagaggcaccttttcgccttattgccatagtttagttctggtatagggatgagttcatgtgtgttgtgtgataacctttagcatcaagcaacctgcgtgagttcacacaggtgcctgtcttcagatcccctggctctagaagtccttgatctttctacattgtcacattattagcttcaaagaaaatttcagaatatcaagaaacagatggctcaaacaattctgagcaccattcggatggtacccacactgcttcctgatctctgcctaagggtgggtctctacagtcagtttgggcacccaagttggagtggctatccagtgatttgggggcagatgacacatggggtggccatgcctggtagccaagcatc

SEQ ID NO: 58893 - DNA, 2320 bp, Homo sapiens
tcccttgagcccaggagttcaagaccagcctgggcaacacggccaaaccccgtccttacaaaaaaatacaaaaaaaggggcgcgcgccgggtggctcatgcctgtaatcccagcactttgggaggccgaggcaggcggatcacatgaggtcaggagttcgagaccagcctggccaacatggtgataccctgtctctactaaaaatacaaaaattagctgggcgtggtggcgcacatctataatcccagctactcgggaggctgaggcagcagacaggargctgaggcaggagaatcacttgaacctgggagacggaggttgcagtgagccgagatcgagacactgcactccagcctgagcgacagagtgaggctccgtctcaaaaaaaaaaagaaaaagaaaattagccgggagtagtggtgtgggcctgtggacctgtagtcccagccacttgacaagaggcaagtgaggcaagaggatcacttgagcctctggaggtcgagactgcgtcagtgagccatgattgggccactgcattccagcctagacaacagaacaagaccctgtctcaaaaaaaaaaaaaaaaaaaaatcgcaggtgacaggggcgattgcattttggtggtggcacaggtatcaccggcaacatccactccctaaggacagcaagggcagtgaacttagctccagctcccagctgctaatgctggcggtggtgctggtggcagccgtgggcacccacaatgacgtcctcgacagaatcaccatgtggtgtgctcgtctaggttttaaatgttctgtttcccttccttccttcctgcctgtcccctgaacctgcctccccatctttcccagagattctatgaactgtgcagtgtcttactgatcaattttgtttctttgaaaatcaaaatcggtttccctggtttgccctagccctaactgatatacactgcactaaggttccagctccatgagagtttggttgaagcctttcttacagcaaggggagaaatgtcaacatatcagggatagtggggggcccagggctttgtatgggatggtccttgcgcttgtgcacaatacctgtaagctcaggtagagaaaagacaaactggccagctgtcaacactgcagtgtgtgtgtgtgtgtgtgtgtgtgtgtgtgtgtgtgttctgagtcaggtagagaaaagacaaactggccagctgtcaacactgcagtgtgtgtgtgtgtctgtgtgtgtttgtgtgtgttctgagacagggtctcactgttgcccaggctggagtgcaggggtgcaatcacggctcactgaagcctccacctcttgggctcaagcaatcctcccacctctgcctccctagtagctgggattaacaggtgtgcaccaccatgcccggctaattttttaatttttgtgtaaagacagggcctcactctgttgcccaggctggtctcaaactcttgggctagagggatcctcccacctcagcctcccaaagtgctcgggttacaggtgtgagccacctcacctagtccagagtgtggtttgaaatcagggtgttccctgcctttcctctgtatttccctggccaagttcatctgactggcctgaagatgccactgttgttcctctgcctgcagaactgagcactgacagaagctgtcacctgactgcctggtcactggaaaagctcctggccctggaggaaatgtgtctttaactctttcctctccatggctcctttccttgtcctctgcctcccaggacagcaccacccccttcctctgccttctgcatatcagctgggaccatcaaaaccacggatcaggggcaaagacctcagctgccacagccgggccaggcactgtgccggggacagcaagacagagatgagaacctggagcctttttttctcaaggtattaggaggtacctgagtgaaagaggcaccttttcgccttattgccatagtttagttctggtatagggatgagttcatgtgtgttgtgtgataacctttagcatcaagcaacctgcgtgagttcacacaggtgcctgtcttcagatcccctggctctagaagtccttgatctttctacattgtcacattattagcttcaaagaaaatttcagaatatcaagaaacagatggctcaaacaattctgagcaccattcggatggtacccacactgcttcctgatctctgcctaagggtgggtctctacagtcagtttgggcacccaagttggagtggctatccagtgatttgggggcagatgacacatggggtggccatgcctggtagccaagcatc

SEQ ID NO: 58894 - DNA, 2320 bp, Homo sapiens
tcccttgagcccaggagttcaagaccagcctgggcaacacggccaaaccccgtccttacaaaaaaatacaaaaaaaggggcgcgcgccgggtggctcatgcctgtaatcccagcactttgggaggccgaggcaggcggatcacatgaggtcaggagttcgagaccagcctggccaacatggtgataccctgtctctactaaaaatacaaaaattagctgggcgtggtggcgcacatctataatcccagctactcgggaggctgaggcagcagacaggaagctgaggcaggagaatcacttgaacctgggagacggaggttgcagtgagccgagatcgagacactgcactccagcctgagcgacagagtgaggctccgtctcaaaaaaaaaaagaaaaagaaaattagccgggagtagtggtgtgggcctgtggacctgtagtcccagccacttgacaagaggcaagtgaggcaagaggatcacttgagcctctggaggtcgagactgcgtcagtgagccatgattgggccactgcattccagcctagacaacagaacaagaccctgtctcaaaaaaaaaaaaaaaaaaaaatcgcaggtgacaggggcgattgcattttggtggtggcacaggtatcaccggcaacatccactccctaaggacagcaagggcagtgaacttagctccagctcccagctgctaatgctggcggtggtgctggtggcagccgtgggcacccacaatgacgtcctcgacagaatcaccatgtggtgtgctcgtctaggttttaaatgttctgtttcccttccttccttcctgcctgtcccctgaacctgcctccccatctttcccagagattctatgaactgtgcagtgtcttactgatcaattttgtttctttgaaaatcaaaatcggtttccctggtttgccctagccctaactgatatacactgcactaaggttccagctccatgagagtttggttgaagcctttcttacagcaaggggagaaatgtcaacatatcagggatagtggggggcccagggctttgtatgggatggtccttgcgcttgtgcacaatacctgtaagctcaggtagagaaaagacaaactggccagctgtcaacactgcagtgtgtgtgtgtgtgtgtgtgtgtgtgtktgtgtgtgttctgagtcaggtagagaaaagacaaactggccagctgtcaacactgcagtgtgtgtgtgtgtctgtgtgtgtttgtgtgtgttctgagacagggtctcactgttgcccaggctggagtgcaggggtgcaatcacggctcactgaagcctccacctcttgggctcaagcaatcctcccacctctgcctccctagtagctgggattaacaggtgtgcaccaccatgcccggctaattttttaatttttgtgtaaagacagggcctcactctgttgcccaggctggtctcaaactcttgggctagagggatcctcccacctcagcctcccaaagtgctcgggttacaggtgtgagccacctcacctagtccagagtgtggtttgaaatcagggtgttccctgcctttcctctgtatttccctggccaagttcatctgactggcctgaagatgccactgttgttcctctgcctgcagaactgagcactgacagaagctgtcacctgactgcctggtcactggaaaagctcctggccctggaggaaatgtgtctttaactctttcctctccatggctcctttccttgtcctctgcctcccaggacagcaccacccccttcctctgccttctgcatatcagctgggaccatcaaaaccacggatcaggggcaaagacctcagctgccacagccgggccaggcactgtgccggggacagcaagacagagatgagaacctggagcctttttttctcaaggtattaggaggtacctgagtgaaagaggcaccttttcgccttattgccatagtttagttctggtatagggatgagttcatgtgtgttgtgtgataacctttagcatcaagcaacctgcgtgagttcacacaggtgcctgtcttcagatcccctggctctagaagtccttgatctttctacattgtcacattattagcttcaaagaaaatttcagaatatcaagaaacagatggctcaaacaattctgagcaccattcggatggtacccacactgcttcctgatctctgcctaagggtgggtctctacagtcagtttgggcacccaagttggagtggctatccagtgatttgggggcagatgacacatggggtggccatgcctggtagccaagcatc

SEQ ID NO: 58895 - DNA, 2320 bp, Homo sapiens
tcccttgagcccaggagttcaagaccagcctgggcaacacggccaaaccccgtccttacaaaaaaatacaaaaaaaggggcgcgcgccgggtggctcatgcctgtaatcccagcactttgggaggccgaggcaggcggatcacatgaggtcaggagttcgagaccagcctggccaacatggtgataccctgtctctactaaaaatacaaaaattagctgggcgtggtggcgcacatctataatcccagctactcgggaggctgaggcagcagacaggaagctgaggcaggagaatcacttgaacctgggagacggaggttgcagtgagccgagatcgagacactgcactccagcctgagcgacagagtgaggctccgtctcaaaaaaaaaaagaaaaagaaaattagccgggagtagtggtgtgggcctgtggacctgtagtcccagccacttgacaagaggcaagtgaggcaagaggatcacttgagcctctggaggtcgagactgcgtcagtgagccatgattgggccactgcattccagcctagacaacagaacaagaccctgtctcaaaaaaaaaaaaaaaaaaaaatcgcaggtgacaggggcgattgcattttggtggtggcacaggtatcaccggcaacatccactccctaaggacagcaagggcagtgaacttagctccagctcccagctgctaatgctggcggtggtgctggtggcagccgtgggcacccacaatgacgtcctcgacagaatcaccatgtggtgtgctcgtctaggttttaaatgttctgtttcccttccttccttcctgcctgtcccctgaacctgcctccccatctttcccagagattctatgaactgtgcagtgtcttactgatcaattttgtttctttgaaaatcaaaatcggtttccctggtttgccctagccctaactgatatacactgcactaaggttccagctccatgagagtttggttgaagcctttcttacagcaaggggagaaatgtcaacatatcagggatagtggggggcccagggctttgtatgggatggtccttgcgcttgtgcacaatacctgtaagctcaggtagagaaaagacaaactggccagctgtcaacactgcagtgtgtgtgtgtgtgtgtgtgtgtgtgtgtgtgtgtgttctgagtcaggtagagaaaagacaaactggccagctgtcaacactgcagtgtgtgtgtgtgtctgtgtgtgtttgtgtgtgttctgagacagggtctcactgttgcccaggctggagtgcaggggtgcaatcacggctcactgaagcctccacctcttgggctcaagcaatcctcccacctctgcctccctagtagctgggattaacaggtgtgcaccaccatgcccggctaattttttaatttttgtgtaaagacagggcctcactctgttgcccaggctggtctcraactcttgggctagagggatcctcccacctcagcctcccaaagtgctcgggttacaggtgtgagccacctcacctagtccagagtgtggtttgaaatcagggtgttccctgcctttcctctgtatttccctggccaagttcatctgactggcctgaagatgccactgttgttcctctgcctgcagaactgagcactgacagaagctgtcacctgactgcctggtcactggaaaagctcctggccctggaggaaatgtgtctttaactctttcctctccatggctcctttccttgtcctctgcctcccaggacagcaccacccccttcctctgccttctgcatatcagctgggaccatcaaaaccacggatcaggggcaaagacctcagctgccacagccgggccaggcactgtgccggggacagcaagacagagatgagaacctggagcctttttttctcaaggtattaggaggtacctgagtgaaagaggcaccttttcgccttattgccatagtttagttctggtatagggatgagttcatgtgtgttgtgtgataacctttagcatcaagcaacctgcgtgagttcacacaggtgcctgtcttcagatcccctggctctagaagtccttgatctttctacattgtcacattattagcttcaaagaaaatttcagaatatcaagaaacagatggctcaaacaattctgagcaccattcggatggtacccacactgcttcctgatctctgcctaagggtgggtctctacagtcagtttgggcacccaagttggagtggctatccagtgatttgggggcagatgacacatggggtggccatgcctggtagccaagcatc

SEQ ID NO: 58896 - DNA, 2500 bp, Homo sapiens
ttctttctactcttttgatccccgtttttgtttcctcccgatctttgccattcttctcaaccaacagaatgaccagagttgtggggcggctgccacactccctgatgggacctcacacgtgtcccgtactttctctttccttgtatttcagaagtccagtttgaccttccaaaggaaaacttgataagttttggaaatttcttctaagtccatcttttatttatttatttttttggagacagggtctcaccttgttgcccaggcttgagtgtagtggcatgatcatgggtcactgcagcctcgacctcctgggctcaaatgatcctcctacctcagtctcccaagtagctgcaactacaggtgtgcaccatgacgcctggcaaattgtttcttttttgtagaggtgaggtttcactgtgttgcccaagctggcctggcctaactccctgtttcaatatgcacttcaaagggtggcctagatggcttctcacttggccttctctttaggaaagggcactggtgtcctgcaggaagagatgaaactctgcagctggtttaaacacctgccagcatccatcgtcgagttccagccaacactccgaacccttgcacatcccatcagtcaggaatacctgaaagacacgctgcagaaatggatccacatgtaagtaaccagaaagagcttccctgcagctggcaggagccacccatgcagccttgtacggggcattacaagggtcagcgaggcatgtgcagaaagcctgtcctggatggcgtgctgcccatcagccagcctctcactctgtgacccattgccacctttgaggtcattcagcacccgctgtgggagaaccaagaaggaatttgtctttcaaaaggttatgtgggagttttaaattctctttatgtgagagttctgcaactcctgtttttacttaatgcattgtttttttaagccattccgcagggtccagacttgcgtatatcctcggggaagcaagggtaggcctggtgtgggcaacagactgcatgccccaacccagccaaaacgctctgtgttgctacaggtctatcaacactgagacacatagatatttatctactggaactcagataagagattgtcaaatgggattctgatgtttttcttaataaagatgtgaacaccatgcctctgatggagcccaaagaacatgattctgttgcaggtgtaatgaagacattaaaaatgggatcaccaacctgctcatgtacgtgaagagcatgaagggtctcgcgggaatccgggacgccatgtgggagttacttaccaatgagtccaccaatcacagctgggatgtgctatgtcggcggcttctggagaagccgctcttgttctgggaagatatgatgcagcaactgttccttgaccgattacaggtgagctggacagtcacatggtctacctgttttatggccaatcctagtggtattttgactgtcttgggagatttctgtcgcttcccaagtatattcttttcctgcttagtaacagatccagagtctagagctgaaaatacaccaggcctctgtcacttgatcgggaatgggcccatgttcatcaataatggctttattctctgccaacaccatgccatctttctgaagatggtgaaccttctgaatgctaggataaattaccatttggtacttttgttttgaaatgtccttaaaggaactgtgattagaactcttctctcattctcttttagactctgacaaaagaaggctttgactccatctccagtagctccaaggagctcttggtttcagctttgcaggaacttgaaagcagcaccagcaactccccttcaaataagcacatccactttgagtacaacatgtcgctcttcctctggtctgagagtcctaatgacctgccttccgatgcggcctgggtcagygtggcaaaccggggtcagtttgccagtagcggcctctccatgaaagcacaagccatcagcccttgtgtacagaacttctgttctgccctggattctaagctgaaggttaaactagatgacctcctggcttacctcccctctgatgactcatcactgcccaaggacgtttctcccacacaggccaagagttctgcctttgacagatacgcagatgcggggaccgtgcaggagatgctgcggactcagtccgtggcatgcatcaagcacatcgtggactgcatccgggcagagctacagagcattgaagagggtgtgcaagggcaacaggatgccctcaacagtgccaagctgcactcagttcttttcatggccagactctgccagtccctgggagagctgtgcccccatctgaagcagtgcatcctgggaaaatcagagagctcagagaaaccagcaagggagtttagggctctgagaaaacagggaaaggtgaaaactcaggaaatcattcctacacaggccaagtggcaagaggttaaagaagtactcctccagca

SEQ ID NO: 58897 - DNA, 2016 bp, Homo sapiens
ccttgagcccaggagttcaagaccagcctgggcaatatagtgaaaccccacctctaccaaaaatacacagattagctgggtgtggtagctcacacctgtgctccagctactcaggaggctgaygtgggaggatcacctgagcctgggaggttgaggctgcagtgaggcatgatggggccactgcactccagcctggtcgacagagtgagactctgtcaatcaatcagtcaatcaatcaaccaatcaatcaatcaataagcagggactccctcactacacactcacctctctgcggctatccaatctactgtgggagagcctgaaaacccttttttttttttagatggaagtttcgctcttgttgctcaggcttgagtgcagtgatctccgctcactgcaacctccgccttccaggttcaagcgattctcctgccttagcctcccaagtagctgggatgaaggtgcccaccaccaggcccaactaatttttttgtatttttagtagagacagagtttcaccatgttggccagagtgatctccaactcctgacctcaggtgatccgcccgccttgacttcccaaagtgctgggattacaggcgtgagccaccgcacccagccgaaaaaccaccgtcttagaccatcctagagctggcagagctggcccatcatactccattaaacactggcaggaaaagcctgtccaaatcaaataacttctttaaaacatgttgagattatttgtgtacaagataaaaggaatctactgccagtataaatgcattcagattagttatgtacagtagaatttttatttgtaggaaatatttagattttttttcagatatgtgagacaccccaagagaatatcgtaagtataaactgggtttgggaaagaataatatggcagtcgggtcagattcactgtatctaaagatcttgctcctaattccgatggcatgtctgtaattgggcccccaatttcaaatttagtccactcttcttttctatacaaggagaggctttatgctccacctgctacatgacccaaatcaataatccaatgcagcagcttggggaaccctaggttttcactatgggaccaaataaactcagaatacttttgagaacttcaatcacatgaaataattatttcagagaaggatccttgtggaaagaccgtaacaggaagagcattctgaggtaacctttcccaactttctcctccacacattcttgcagaggaaattaagagagagaaaaaaattaagaaatcccaacttagtccggactctagtagtacatgtcaagcacagaacccctaatttaagacccgcgtcccgaggccaggctccctcgggaaggtagcgagtgcatcgcgataaaatctttcctcccgccttcggagtcaaacggccccgcaatccaaacagtttagaatccagcttgttcttaatgccacagtcaagagaagatccataacccgccttggtcatctgcccttctgtgttcacaaccgttcagggcacaagttcttcggtctaaccgaatctttccctgctgcggggttaagcccaacctttctttctgaccttggggagccggcagctccccgcccggtgccctcacaaaagcctttgggggctccctctccaagatgagacgtttatcccatccccccaccctcctaaatttaggacaggaaagctttagggccaccgtctctcttccgggaccgatcacacttcgttccaaataggaaaagacaggggggaaaaaagatggaggggcgggagacctggaccccggagagtcaccttccagctacccacaggaaccaagcatccgatcactcgcgcatccctctcccctcctcccccggcccgcagtgcaccccacagggagccccgccgggtccactcttgctccgacccccatttcgcgcgccccctcggctctatctcccagatcctcaggcgacgaatggaaagggggtcccttccctctcacctgggac

SEQ ID NO: 58898 - DNA, 539 bp, Homo sapiens
tccggtgtttgatgttccccttcctgtgtccaagtacattttcaaatgtgctatttcaaaaacaatgaatatatttccatattatccttaaatttcaggagtcaaattcagattaatttcctaaagagaaatatttcattgagagtggcagagaaaacattagtagaataggtgaactaaaattcacataatcgtcttgttcttaggtaattcctaaatacctttaagataaaatccaaattctttgattagaaaataagaatttttccccttcatcatatctttattagtatccttccatccctgaatagtttacactctgtcacttccttttttttttttttcttttttcttttttgagacagagwcttgctctgtctcccaggctggagtgcagtggcttgatcttggatctcagctcacttcagcctgcgcctcctgggttcaagtgattctcctgcctcatcctcctgagtatctgggactataggcacacgccgccacacttagctaatttcactctcgtcacttctaagggc

SEQ ID NO: 58899 - DNA, 1067 bp, Homo sapiens
ctactatgagaatttgatttgattgaggtcaggatgtctacagccataccaccctgaacgcgcccgatctcgtctgattgaggtcaggagctgggccctattcaccattgcctagtgtctacctcactggtcctgcagagtggctgagggtaatacacatgtcaatatcctgtgatcaaattattaaataaatgtagacagacaaaataacttcttaatattacttctataatgaaawgtagttggagagcaggggcacaacctttttttttttttttttaacaaaaaaagcatagagtccccacatttccacaagtaaatataattagccaacctacttgaaaaagaaaaaaaagtaataccaagaaagaattccaagtcataatcccaggtgtaactctgatttcaagtgaaactcatgttaaccaccctaggaaaaaacaaatcggggccccgtgggggtgggggtgggggtagatagggaggaatcttttaatgtaaaacatcaggatcctttctagtagagcattcacttaggattctccaacaaggaagcaaatacatacgcacccttagactgaactccaactcaggtcaagaaaacacatctcaatttccttcatgctgttcctaagcatatatttcctgtgctagaggctgaaagaattcccaggatgcagtgaactcagttagtagaaataaatacaattctggtttcaaagtgaaagctctatgttacaatgcaggtatgagttaacaaggctggaggcatcagctagaatgaaaaccttgctttcagtaggtaaaagatttacaggtgtaatgacctgagatggtattttttctaattcaagagtcaaggtactgaaattgtgacaatttgaagagtgctgtcatgtaagttgaatcacatactaatcaatacaatataaatttaatccaggtcctagaaactgagtttttcaaggagatgttaaagaccatttgtgctgtaaacatctatggataaatcaatctaagcaatcataaaaataaataaataacttggcaacgacgtcgcctatgaa

SEQ ID NO: 58900 - DNA, 927 bp, Homo sapiens
aatgtcagtgttggctgtagccatggcatgccagccctcaggcccctgtgtggcacgtatgggtgttggaggtggtcgtagcaagctggatgggcctttccccaagccaaagggagatttttaagaacaagaatcatttgtactcatccattcaatatttatgtcatctttaccaaaattttttgattgtgcattatttttcttaatcaaagttcaagctattctcttaattttttatctcacgacaaaataattattaaacaattttttgagctgagcaaatctagccccttttttctttatagtgttttggcaagatctaaaattaaaaattctttcggtagtctttccaatattttaaaaatatttttgttgatttttaaatatttaaacaactaaattgagtttaagtaagcagatcattactgggtatagccgctatactatatattccttaggatgtaccacaaaaaggcatttatctcaatgacaccatccscacaagggaaatgaaataaaatgcttgctgccaatatgaacatgtaaaggtcaggtttcctttactatgataaaggtcaaacaagtgggcccaattgagttaggcattaaagagtatatgtgggtcaaatttgaactccctcaaagtttgtgcttaattgaattcagatacctgaaactgcttttgaaaaaaaaacacaattgttgtctttcaagaaagacacctttaagataggacatgagacttcttgaatatgtcagtgctctttcaaaagagccctaaaattctaagtaaaatttgttgagttaagcaaggttggaccaactctactggtatcctctattgggaggaaatttatttttttagtgttgacagtgcaagccaacttcagacctcatgtatatgtttgtggctctccttgtaataaa

SEQ ID NO: 58901 - DNA, 679 bp, Homo sapiens
tctcctctccttcaagatgtctcacaaggcaacagtgaaggtactggccagaggtgaggtctgatctgaaggtttgcatgaagaaggatttacttccaagctcacatggttgttagcagaattcaattccttgaggatcattggtcaaagggcctcattttctcactggctattggcctgaggttgctgcaggtctctgcctcataggcctttctattatggccacttgcttcatcaaaatgtacaagcccaggagagtctgctggtaagatggaggtcacaaccttatgtagctgaatcacagaagtgacaacccatcacttctgccatattctactggttagaagcaactcacaggtttaccatacaagttgattgtatacctcagattatgtaagagtctatccaccacaaagagctcaatggctggtagcaagtgatatagtgaaactatgaatatgggaaatctaactccagataatatactggtttaagcattaaaactccgtcaacttcctaaagaattaagcattttgtggcagatgccaacattggcaaactgctaatttgtctccctcagtgcttgaggttaattataagaaatctctgagaattgagataaatatcttaagagtaccaagtaaatattcagcacccamtatggaccttgttttctgta

SEQ ID NO: 58902 - DNA, 586 bp, Homo sapiens
tcccaaatatgcttgaccacagaacctttcattccatggggtattttaagggattgatatgcaaagctgactytgaagtagttttcagaggcccatgcaccaaaaagcagctgtattgttttgtgtagtttgtgatgaggggcaaggtttattaacacagtctacatggttttgtatcctggtgccttcacttaccatgtgtctctctctaaccataagctaatgttatttttcttttgttatattatgtctatcttgttacattatatagtatatatgttatattgaaagatgtaaaatttttcaaatagcacgttgtataaaatgcatagtacaggttagcaattatttttaacccatttgaaaataaaaccctgggtaaagtattgtgttgcttctttttactcatgtatagttttatgtaaatgccaagaatactttttgtcatgagaatcatttgtccagtgatattaaaacatatgttttacttttattttaaaagcgcgtgttgagctccctcaattgaagaaatgtctattcaaggcctctgcctagtttttaaattgggctcttacattgcaattga

SEQ ID NO: 58903 - DNA, 2687 bp, Homo sapiens
ccaccaacatatattcagcacttcctatacaccaggcactgtactaaacacataagtaatttatctctttcagtcctaaacaccttttttcttttttggggtaggtattattaccacccttattttacaaatttggaaactaatgctcagagaaggtaagtaaatgacttgccaaccgtcaccaacaaggatgtggtgaagcagagattctactcacccatttcattcactctattagattcctagcatttgtacaatactttccaagataaatagctgacaactctatttttagtactttctgttgtctaattatgtctgccaagagttcaaatgttatgcccagttcccaatgtgatggtatttggacatggggcctttgggagttaattctgtgtagctgagattatgaagatggggtcctcatgatgggattagtgccctcatgagaaaagaaaccacagagtttgctctctctccatcttccatgtaagaacactgccagaaggcagttgtttataagccaggaagagagccctcaacaaaacttgagaatatctgttgttgaaggcatcaacatttatttagttatggcagcctgcgctaactaagacagtactcatatactacttctgcaataaaccatctctaaaaatctcgtttaacaagcagatcaatgaatcagttatcatctgctagaacaatttttggattccattgattgattcacctaattatgctttctggcttattgttacttttcatgcttccttatattttattgggatttattttctctcaaaattttagagtgactctattattagaacttcaaattaagggccaggcgtggtggctcaggacagtaatcccagcattttgggargctgaggcaggcggatcatgagatcaagagatcgagaccatcctggccaacatggtgaaaccccatctctactaaaaatacaaaaattagctggacttggtggcgcgtgcctgtagtaccagctattgggtgactgaggcaggagaattgcttgaactcaggaggtggaggttgcagtgagcagagttcacaccactgcactccaccctggtgatagagcaagacttcattaaaaaacaaaacaaaacaaaacaaaacaaaacaaaaaacacttcaaataaaatagcatggtttaaaattcatcataaccacattatatatttaaaaccttcagttcaccttttttttttttgaagtataaatactcgaagctcactaagaacttaagatgtctgataatgtctttatttggcttcacttttgtccagatattgcccatgtaattaccacactgctggaaggcaaagaaatgatagcccagttttccatgtatgagcaagtttattcagcttcagggattattgggcaagctctcaagtgttacagggttcaatttaaatgccctcttaaattaaaggtagtttaacaaaaacttgcttgtaattgtgctgcaaatacagaaaagaaaaaaatatacttttaaaatgactcgatagcttgaagcatgatttcttcctcatagatcattttattctcttgcttcatatgttctttttcaccctcaaagtcctttttttttttttcttgaaacaaccttgactttttcaggaagaattttttctaattcttacgtgtttctgtttaacatatataacaagagagaatgactgtttttattcccgtaggtctcaatgtctagacattagcttcttcctcaaaatagatatcataaatatttatgcatagacctagtgtagtatataatatttctgttgtttgttgattggcttaatgaatgaaagagcacattgaaaagttttaaaagaacattcaaatgtggacaaatgtacgtgcaatgtaaattcaagtgattaaagtcattttaaaaattaggcatgtttctaaacatagtgtgcagagtaatcattaaaaataatctatgggaacatttcatgtaatgataatttatgctcaatagtctcaacaagtaaaaacaaaaaaccaaacgtcatactagacttcaaatatacttctccattttaaatgtgtgtatatagaaatcaagatctttgtgtactggaatgaatctacatataatagtaaaaataacagctaacatattctaagcatttagcatttaacaaattctgttctaaactgttttacatgtattaacttaattatcacaagtgaaatatacaaatgaaagattattataatataaaatttgacagtattttgcaaggtttttgtaataggattcattctgcattgtagttttaacaaaattatgaatttgttaatgaaataatatcaggaaattcacttgacaaattcccatttatcagaagacttttatttgataccaggaaagatagaaaaaataggtcattatttaggtcaattataccaggaccctccctggaataaatcatatctatatttgaaaaaggaaatttgattagtaatttatgcaatgctaattagtttttggccacaagccacctttaccacccgcatcaccctttcattccaataccgttgggttagttctaatcttattctgaaagttgtttaacctaaaatgtctttaggggataattttctaaccaccttttaaactaccacccacagtttctca

SEQ ID NO: 58904 - DNA, 2687 bp, Homo sapiens
ccaccaacatatattcagcacttcctatacaccaggcactgtactaaacacataagtaatttatctctttcagtcctaaacaccttttttcttttttggggtaggtattattaccacccttattttacaaatttggaaactaatgctcagagaaggtaagtaaatgacttgccaaccgtcaccaacaaggatgtggtgaagcagagattctactcacccatttcattcactctattagattcctagcatttgtacaatactttccaagataaatagctgacaactctatttttagtactttctgttgtctaattatgtctgccaagagttcaaatgttatgcccagttcccaatgtgatggtatttggacatggggcctttgggagttaattctgtgtagctgagattatgaagatggggtcctcatgatgggattagtgccctcatgagaaaagaaaccacagagtttgctctctctccatcttccatgtaagaacactgccagaaggcagttgtttataagccaggaagagagccctcaacaaaacttgagaatatctgttgttgaaggcatcaacatttatttagttatggcagcctgcgctaactaagacagtactcatatactacttctgcaataaaccatctctaaaaatctcgtttaacaagcagatcaatgaatcagttatcatctgctagaacaatttttggattccattgattgattcacctaattatgctttctggcttattgttacttttcatgcttccttatattttattgggatttattttctctcaaaattttagagtgactctattattagaacttcaaattaagggccaggcgtggtggctcaggacagtaatcccagcattttgggaggctgaggcaggcrgatcatgagatcaagagatcgagaccatcctggccaacatggtgaaaccccatctctactaaaaatacaaaaattagctggacttggtggcgcgtgcctgtagtaccagctattgggtgactgaggcaggagaattgcttgaactcaggaggtggaggttgcagtgagcagagttcacaccactgcactccaccctggtgatagagcaagacttcattaaaaaacaaaacaaaacaaaacaaaacaaaacaaaaaacacttcaaataaaatagcatggtttaaaattcatcataaccacattatatatttaaaaccttcagttcaccttttttttttttgaagtataaatactcgaagctcactaagaacttaagatgtctgataatgtctttatttggcttcacttttgtccagatattgcccatgtaattaccacactgctggaaggcaaagaaatgatagcccagttttccatgtatgagcaagtttattcagcttcagggattattgggcaagctctcaagtgttacagggttcaatttaaatgccctcttaaattaaaggtagtttaacaaaaacttgcttgtaattgtgctgcaaatacagaaaagaaaaaaatatacttttaaaatgactcgatagcttgaagcatgatttcttcctcatagatcattttattctcttgcttcatatgttctttttcaccctcaaagtcctttttttttttttcttgaaacaaccttgactttttcaggaagaattttttctaattcttacgtgtttctgtttaacatatataacaagagagaatgactgtttttattcccgtaggtctcaatgtctagacattagcttcttcctcaaaatagatatcataaatatttatgcatagacctagtgtagtatataatatttctgttgtttgttgattggcttaatgaatgaaagagcacattgaaaagttttaaaagaacattcaaatgtggacaaatgtacgtgcaatgtaaattcaagtgattaaagtcattttaaaaattaggcatgtttctaaacatagtgtgcagagtaatcattaaaaataatctatgggaacatttcatgtaatgataatttatgctcaatagtctcaacaagtaaaaacaaaaaaccaaacgtcatactagacttcaaatatacttctccattttaaatgtgtgtatatagaaatcaagatctttgtgtactggaatgaatctacatataatagtaaaaataacagctaacatattctaagcatttagcatttaacaaattctgttctaaactgttttacatgtattaacttaattatcacaagtgaaatatacaaatgaaagattattataatataaaatttgacagtattttgcaaggtttttgtaataggattcattctgcattgtagttttaacaaaattatgaatttgttaatgaaataatatcaggaaattcacttgacaaattcccatttatcagaagacttttatttgataccaggaaagatagaaaaaataggtcattatttaggtcaattataccaggaccctccctggaataaatcatatctatatttgaaaaaggaaatttgattagtaatttatgcaatgctaattagtttttggccacaagccacctttaccacccgcatcaccctttcattccaataccgttgggttagttctaatcttattctgaaagttgtttaacctaaaatgtctttaggggataattttctaaccaccttttaaactaccacccacagtttctca

SEQ ID NO: 58905 - DNA, 2687 bp, Homo sapiens
ccaccaacatatattcagcacttcctatacaccaggcactgtactaaacacataagtaatttatctctttcagtcctaaacaccttttttcttttttggggtaggtattattaccacccttattttacaaatttggaaactaatgctcagagaaggtaagtaaatgacttgccaaccgtcaccaacaaggatgtggtgaagcagagattctactcacccatttcattcactctattagattcctagcatttgtacaatactttccaagataaatagctgacaactctatttttagtactttctgttgtctaattatgtctgccaagagttcaaatgttatgcccagttcccaatgtgatggtatttggacatggggcctttgggagttaattctgtgtagctgagattatgaagatggggtcctcatgatgggattagtgccctcatgagaaaagaaaccacagagtttgctctctctccatcttccatgtaagaacactgccagaaggcagttgtttataagccaggaagagagccctcaacaaaacttgagaatatctgttgttgaaggcatcaacatttatttagttatggcagcctgcgctaactaagacagtactcatatactacttctgcaataaaccatctctaaaaatctcgtttaacaagcagatcaatgaatcagttatcatctgctagaacaatttttggattccattgattgattcacctaattatgctttctggcttattgttacttttcatgcttccttatattttattgggatttattttctctcaaaattttagagtgactctattattagaacttcaaattaagggccaggcgtggtggctcaggacagtaatcccagcattttgggaggctgaggcaggcggatcatgagatcaagagatcgagaccatcctggccaacatggtgaaaccccatctctactaaaaatacaaaaattagctggacttggtggcgcgtgcctgtagtaccagctattgggtgactgaggcaggagaattgcttgaactcaggaggtggaggttgcagtgagcagagwtcacaccactgcactccaccctggtgatagagcaagacttcattaaaaaacaaaacaaaacaaaacaaaacaaaacaaaaaacacttcaaataaaatagcatggtttaaaattcatcataaccacattatatatttaaaaccttcagttcaccttttttttttttgaagtataaatactcgaagctcactaagaacttaagatgtctgataatgtctttatttggcttcacttttgtccagatattgcccatgtaattaccacactgctggaaggcaaagaaatgatagcccagttttccatgtatgagcaagtttattcagcttcagggattattgggcaagctctcaagtgttacagggttcaatttaaatgccctcttaaattaaaggtagtttaacaaaaacttgcttgtaattgtgctgcaaatacagaaaagaaaaaaatatacttttaaaatgactcgatagcttgaagcatgatttcttcctcatagatcattttattctcttgcttcatatgttctttttcaccctcaaagtcctttttttttttttcttgaaacaaccttgactttttcaggaagaattttttctaattcttacgtgtttctgtttaacatatataacaagagagaatgactgtttttattcccgtaggtctcaatgtctagacattagcttcttcctcaaaatagatatcataaatatttatgcatagacctagtgtagtatataatatttctgttgtttgttgattggcttaatgaatgaaagagcacattgaaaagttttaaaagaacattcaaatgtggacaaatgtacgtgcaatgtaaattcaagtgattaaagtcattttaaaaattaggcatgtttctaaacatagtgtgcagagtaatcattaaaaataatctatgggaacatttcatgtaatgataatttatgctcaatagtctcaacaagtaaaaacaaaaaaccaaacgtcatactagacttcaaatatacttctccattttaaatgtgtgtatatagaaatcaagatctttgtgtactggaatgaatctacatataatagtaaaaataacagctaacatattctaagcatttagcatttaacaaattctgttctaaactgttttacatgtattaacttaattatcacaagtgaaatatacaaatgaaagattattataatataaaatttgacagtattttgcaaggtttttgtaataggattcattctgcattgtagttttaacaaaattatgaatttgttaatgaaataatatcaggaaattcacttgacaaattcccatttatcagaagacttttatttgataccaggaaagatagaaaaaataggtcattatttaggtcaattataccaggaccctccctggaataaatcatatctatatttgaaaaaggaaatttgattagtaatttatgcaatgctaattagtttttggccacaagccacctttaccacccgcatcaccctttcattccaataccgttgggttagttctaatcttattctgaaagttgtttaacctaaaatgtctttaggggataattttctaaccaccttttaaactaccacccacagtttctca

SEQ ID NO: 58906 - DNA, 2687 bp, Homo sapiens
ccaccaacatatattcagcacttcctatacaccaggcactgtactaaacacataagtaatttatctctttcagtcctaaacaccttttttcttttttggggtaggtattattaccacccttattttacaaatttggaaactaatgctcagagaaggtaagtaaatgacttgccaaccgtcaccaacaaggatgtggtgaagcagagattctactcacccatttcattcactctattagattcctagcatttgtacaatactttccaagataaatagctgacaactctatttttagtactttctgttgtctaattatgtctgccaagagttcaaatgttatgcccagttcccaatgtgatggtatttggacatggggcctttgggagttaattctgtgtagctgagattatgaagatggggtcctcatgatgggattagtgccctcatgagaaaagaaaccacagagtttgctctctctccatcttccatgtaagaacactgccagaaggcagttgtttataagccaggaagagagccctcaacaaaacttgagaatatctgttgttgaaggcatcaacatttatttagttatggcagcctgcgctaactaagacagtactcatatactacttctgcaataaaccatctctaaaaatctcgtttaacaagcagatcaatgaatcagttatcatctgctagaacaatttttggattccattgattgattcacctaattatgctttctggcttattgttacttttcatgcttccttatattttattgggatttattttctctcaaaattttagagtgactctattattagaacttcaaattaagggccaggcgtggtggctcaggacagtaatcccagcattttgggaggctgaggcaggcggatcatgagatcaagagatcgagaccatcctggccaacatggtgaaaccccatctctactaaaaatacaaaaattagctggacttggtggcgcgtgcctgtagtaccagctattgggtgactgaggcaggagaattgcttgaactcaggaggtggaggttgcagtgagcagagttcacaccactgcactccaccctggtgatagagcaagacttcattaaaaaacaaaacaaaacaaaacaaaacaaaacaaaaaacacttcaaataaaatagcatggtttaaaattcatcataaccacattatatatttaaaaccttcagttcaccttttttttttttgaagtataaatactcgaagctcactaagaacttaagatgtctgataatgtctttatttggcttcacttttgtccagatattgcccatgtaattaccacactgctggaaggcaaagaaatgatagcccagttttccatgtatgagcaagtttattcagcttcagggattattgggcaagctctcaagtgttacagggttcaatttaaatgccctcttaaattaaaggtagtttaacaaaaacttgcttgtaattgtgctgcaaatacagaaaagaaaaaaatatacttttaaaatgactcgatagcttgaagcatgatttcttcctcatagatcattttattctcttgcttcatatgttctttttcaccctcaaagtcctttttttttttttcttgaaacaaccttgactttttcaggaagaatttkttctaattcttacgtgtttctgtttaacatatataacaagagagaatgactgtttttattcccgtaggtctcaatgtctagacattagcttcttcctcaaaatagatatcataaatatttatgcatagacctagtgtagtatataatatttctgttgtttgttgattggcttaatgaatgaaagagcacattgaaaagttttaaaagaacattcaaatgtggacaaatgtacgtgcaatgtaaattcaagtgattaaagtcattttaaaaattaggcatgtttctaaacatagtgtgcagagtaatcattaaaaataatctatgggaacatttcatgtaatgataatttatgctcaatagtctcaacaagtaaaaacaaaaaaccaaacgtcatactagacttcaaatatacttctccattttaaatgtgtgtatatagaaatcaagatctttgtgtactggaatgaatctacatataatagtaaaaataacagctaacatattctaagcatttagcatttaacaaattctgttctaaactgttttacatgtattaacttaattatcacaagtgaaatatacaaatgaaagattattataatataaaatttgacagtattttgcaaggtttttgtaataggattcattctgcattgtagttttaacaaaattatgaatttgttaatgaaataatatcaggaaattcacttgacaaattcccatttatcagaagacttttatttgataccaggaaagatagaaaaaataggtcattatttaggtcaattataccaggaccctccctggaataaatcatatctatatttgaaaaaggaaatttgattagtaatttatgcaatgctaattagtttttggccacaagccacctttaccacccgcatcaccctttcattccaataccgttgggttagttctaatcttattctgaaagttgtttaacctaaaatgtctttaggggataattttctaaccaccttttaaactaccacccacagtttctca

SEQ ID NO: 58907 - DNA, 851 bp, Homo sapiens
gtctatgctgatgtcacaatgcggatgaaaacaccaatcaaccagaggatgaatggggcgaaagaaaacgttagacatgatttatgttatttaaagtattatatttttgattttgctataatgtgtgtcaattaccagtcgatagtgcattttttctaacacctctgtgttcatgtgtatgtaattttatttttggggktagaatatagtggcacatttcgcaatcaggtaaatctgcaggtgacagtcaagtgaatttaaacactatagtttttaattataattccaacaaatagcctgcaagtagttaaagagaaatggatgatggctgtggtaaagcagacaataacaagttcatcagagtgacgactaatgttaattttcttctcttccatgaataactttattcactctgtgattgatgatctgcatttttgtaagaaatcataggggcagatggtttaaaataacagatgaacccctaaatcatttatacgtaaccttagaaagacttctaaaacttggacagggagtggattcacatcgttatttcttcctttagctaaaactgcaatgtgaggtgacccaaagaaattccgggtaaaggaggaaagccctaaaattatcaattttgattacacattgtgacttgcccttaggttgttctgcttatttctctaactaaaagtctagtccctgtttgttctttattattttgctgatttatcctaaccaaagaccaaatacatgattataggccaagaatggttctggttctgcaggttgtacgagaagcttggagctggcatccggtcctgctgaggctgcaggaggcttacagtcaatcaagc

SEQ ID NO: 58908 - DNA, 851 bp, Homo sapiens
gtctatgctgatgtcacaatgcggatgaaaacaccaatcaaccagaggatgaatggggcgaaagaaaacgttagacatgatttatgttatttaaagtattatatttttgattttgctataatgtgtgtcaattaccagtcgatagtgcattttttctaacacctctgtgttcatgtgtatgtaattttatttttgggggtagaatatagtggcacatttcgcaatcaggtaaatctgcaggtgacagtcaagtgaatttaaacactatagtytttaattataattccaacaaatagcctgcaagtagttaaagagaaatggatgatggctgtggtaaagcagacaataacaagttcatcagagtgacgactaatgttaattttcttctcttccatgaataactttattcactctgtgattgatgatctgcatttttgtaagaaatcataggggcagatggtttaaaataacagatgaacccctaaatcatttatacgtaaccttagaaagacttctaaaacttggacagggagtggattcacatcgttatttcttcctttagctaaaactgcaatgtgaggtgacccaaagaaattccgggtaaaggaggaaagccctaaaattatcaattttgattacacattgtgacttgcccttaggttgttctgcttatttctctaactaaaagtctagtccctgtttgttctttattattttgctgatttatcctaaccaaagaccaaatacatgattataggccaagaatggttctggttctgcaggttgtacgagaagcttggagctggcatccggtcctgctgaggctgcaggaggcttacagtcaatcaagc

SEQ ID NO: 58909 - DNA, 3760 bp, Homo sapiens
atatggaccgaatagggctgggtggamccctgctgcactctgaaacatagaccaaagttgtggtttaggagcagtatcataaaatctggcactttccaaggcatattttttcccattcaccttctagggaaaaaagtaaacctgaaatttaattttttatgtcaggttggatgaagaagaaccagaacttctgctttatatgatctcagtttaccagagatctaaattttggtatgagagcatatagattaaaatgcctactaatttccatcaaatgaatttctttcccatccagtttcccagtgcaagaacatatgggaaagccacaattttagaggaagtattttattaattaaatagcacattctatacctaaaatatacctgaccatggcagctcctcatacagtaatacctcttatgaatgtcctaaattttacttctttattacctttatgctcaagtccctgaatatagatttttaccttcctaagaaggtgatctgataagaatgtgcttcaaaattctagcaccatgctgggcaaatcttggatagtcctgttgtttgtcaatcttgagacctctttcattttttaaggcaattaatcacctgcggtgatactaaggtttgcttggaatttttacattttgagttgcttctttgatagcatcatccagattttattaaatgggaatcaaataaacaattaaaacagctaatcgtgccatctccctctctttccccttgctgaaagacacaggaggcttttcagccttctttttcaactccccctctcttgttcttttgttttcaaagctgatcagaaataagataccctaaatatatatataatattgctaacattagaatgggctccaagaaattaaaataacactactaatattaaattatatatgataaaattaattggataaaagataataaaaggatggaagtggtagtaaattgagttgcagatatcagctgcagctgactcacagacatcagaatactaagatgaggactgcattgataaggtgatttccctgctaatatctgttttctttattggtaaagaaaagattacagagtcaaatgtaaaaaagtgagtcaaataaggccaaagaaggtaaatagcatagtaaataattcaagaagtagtcggcaggcaaaaaaatattttgagacatctaagccaagactatgcatatatagcagagaaaaatctgtcaaacaccatctttttcaatcacagtgttttatatttgaagttgtctacagaaagtatttgtttttattttgtaagctttttatggttaaaatgaaagaaaagaaatttatttttcttatttttttaatgtctggaagtagggattcaagctgataaacaaaatatattatgttgaatttatactattttgatgaatatatatatatacatcaaaattattgaaataatgaaaattaaatatttgttgtattgatgcaaaatttcatttgaaaactgcattttttcaggctggtgatagcagatctgtaatataatatctaacaaatggatagttctttgcaaatatttgttcagtgctaagcacttggaaatttgggcatggcgatttcataaaattcaagctgctatttatgattgtttgaattatacagtgcgatggatggcagcaattaaccaagaaaatatgaagtgaattatccaaataattaaatcagaggctaagctgtaattacatattgaaaatccacttgcaacatttaattattctgcaagacttgcattattttttgtcatagagagctgtttgatatggtgggaaaaaaagctgacctggcagtcagaaaccctagcttctgctgtcaactacaaaactaccccactccgtgtcttattctgtcacagattctctagctttaatataggaaaggaatttgtgattgcttaggccctttccacctcagaaaatgttaggagtcactgtaacacatgtagaaacaaccaaccctatgtaaaaacaaccaaccatgaagttgaatctccactttagtcaacatgtgatgcattatttagacttaggaaagggatcgctggtgctcattatcatgaagacaatcagcttttggaggaaaatttaaaactccagcaaaaatcttagcatggagagcacaagtcatctacacagtcgcagagatggcttctagaacatgttggccactgtaggtgagctaaccactaccccatgccattcagtgttagaacccaggactgctgaaccttaggtggataactgctacacaatatggaagttaacatataatttacttttatgtttaacctgatttcagtgatcagtcctcagttgtaaactagcctccgtcacttactagctgtgttaactagagccagttatttaacttttcaacgttactttctctatttatgaaatgggaaaatagttcccacttcacagcgtgccaggatgactaaagaaataatgtcctttatggtggatttatcataatgctcaccagacaataaatgctcctatttatttggagtttgcttggaactcctatttaatcctcacatttatccgaaagctcaacttatttcacgttctttcattgggcttgagctctgtcatgttatgacctcagagataacatgccatagtctaagatgtttagctaatatgaaactgttttagcctgtggctttgcctaaggataaatgtgtgccaccctggccaacatgaaggagaaatttgcagtagtaagagctcgacagtctaattaattatttagaggtttcaaggggaaaaagaagcctagagtcccagagttcccatttgcaatgtattaaataatcagaataataagaaacagcagagagagactgtcctggctgtctggaatgtgtaggatgtaatttgaaggcccaaattagaagtaacctaggatcttaaagacagttttaaggctgaaggtttcaggaaggcaagtccttctagaattgcaatagtattttttcctccttttgtctttatttttgtatcttgaaatgtctgtagagctttacttccttgcttctaaattgccttcatgtattagaagtctttggctgagcatataattagagtccaaatgtgaacacgaaggagaaaggtgtctaataaagtaagtggcaaatgtgaatttattaaaagtaggtcatgtcatacattgtaatagccttctgtggcatatctcctaagttaggaaataaaagtagtgaaagatactgaatgcttaagtttgcaaaatgtgtttgttatagtgctacataatagacgcctatacattaattggataaatacctgaaagaaaacctggtcctatgaagccaagtaagcataatcaataaatgtacagcctctaagtggaaagctgcaggaggagtctcaaggggtcagtattagcacatattaagtattttgttaataatatgctcacatctgtggaatatattttctgatacgaaaatcaaattagccaggaaacacacagaagggcagagcaacctgcagagttaacagtagtgggatgaaagtcataatgaatataaactaatattaagataaagaataaacaacaggcaaatgcaacaggagaatccagtctggaaaaaaacaaattgagacacatgtctgatacacacaggtgtttgcggttaattttgaaccggtctcatatataagaacaattgcatgca

SEQ ID NO: 58910 - DNA, 3760 bp, Homo sapiens
atatggaccgaatagggctgggtggaaccctgctgcactctgaaacatagaccaaagttgtggtttaggagcagtatcataaaatctggcactttccaaggcatattttttcccattcaccttctagggaaaaaagtaaacctgaaatttaattttttatgtcaggttggatgaagaagaaccagaacttctgctttatatgatctcagtttaccagagatctaaattttggtatgagagcatatagattaaaatgcctactaatttccatcaaatgaatttctttcccatccagtttcccagtgcaagaacatatgggaaagccacaattttagaggaagtattttattaattaaatagcacattctatacctaaaatatacctgaccatggcagctcctcatacagtaatacctcttatgaatgtcctaaattttacttctttattacctttatgctcaagtccctgaatatagatttttaccttcctaagaaggtgatctgataagaatgtgcttcaaaattctagcaccatgctgggcaaatcttggatagtcctgttgtttgtcaatcttgasacctctttcattttttaaggcaattaatcacctgcggtgatactaaggtttgcttggaatttttacattttgagttgcttctttgatagcatcatccagattttattaaatgggaatcaaataaacaattaaaacagctaatcgtgccatctccctctctttccccttgctgaaagacacaggaggcttttcagccttctttttcaactccccctctcttgttcttttgttttcaaagctgatcagaaataagataccctaaatatatatataatattgctaacattagaatgggctccaagaaattaaaataacactactaatattaaattatatatgataaaattaattggataaaagataataaaaggatggaagtggtagtaaattgagttgcagatatcagctgcagctgactcacagacatcagaatactaagatgaggactgcattgataaggtgatttccctgctaatatctgttttctttattggtaaagaaaagattacagagtcaaatgtaaaaaagtgagtcaaataaggccaaagaaggtaaatagcatagtaaataattcaagaagtagtcggcaggcaaaaaaatattttgagacatctaagccaagactatgcatatatagcagagaaaaatctgtcaaacaccatctttttcaatcacagtgttttatatttgaagttgtctacagaaagtatttgtttttattttgtaagctttttatggttaaaatgaaagaaaagaaatttatttttcttatttttttaatgtctggaagtagggattcaagctgataaacaaaatatattatgttgaatttatactattttgatgaatatatatatatacatcaaaattattgaaataatgaaaattaaatatttgttgtattgatgcaaaatttcatttgaaaactgcattttttcaggctggtgatagcagatctgtaatataatatctaacaaatggatagttctttgcaaatatttgttcagtgctaagcacttggaaatttgggcatggcgatttcataaaattcaagctgctatttatgattgtttgaattatacagtgcgatggatggcagcaattaaccaagaaaatatgaagtgaattatccaaataattaaatcagaggctaagctgtaattacatattgaaaatccacttgcaacatttaattattctgcaagacttgcattattttttgtcatagagagctgtttgatatggtgggaaaaaaagctgacctggcagtcagaaaccctagcttctgctgtcaactacaaaactaccccactccgtgtcttattctgtcacagattctctagctttaatataggaaaggaatttgtgattgcttaggccctttccacctcagaaaatgttaggagtcactgtaacacatgtagaaacaaccaaccctatgtaaaaacaaccaaccatgaagttgaatctccactttagtcaacatgtgatgcattatttagacttaggaaagggatcgctggtgctcattatcatgaagacaatcagcttttggaggaaaatttaaaactccagcaaaaatcttagcatggagagcacaagtcatctacacagtcgcagagatggcttctagaacatgttggccactgtaggtgagctaaccactaccccatgccattcagtgttagaacccaggactgctgaaccttaggtggataactgctacacaatatggaagttaacatataatttacttttatgtttaacctgatttcagtgatcagtcctcagttgtaaactagcctccgtcacttactagctgtgttaactagagccagttatttaacttttcaacgttactttctctatttatgaaatgggaaaatagttcccacttcacagcgtgccaggatgactaaagaaataatgtcctttatggtggatttatcataatgctcaccagacaataaatgctcctatttatttggagtttgcttggaactcctatttaatcctcacatttatccgaaagctcaacttatttcacgttctttcattgggcttgagctctgtcatgttatgacctcagagataacatgccatagtctaagatgtttagctaatatgaaactgttttagcctgtggctttgcctaaggataaatgtgtgccaccctggccaacatgaaggagaaatttgcagtagtaagagctcgacagtctaattaattatttagaggtttcaaggggaaaaagaagcctagagtcccagagttcccatttgcaatgtattaaataatcagaataataagaaacagcagagagagactgtcctggctgtctggaatgtgtaggatgtaatttgaaggcccaaattagaagtaacctaggatcttaaagacagttttaaggctgaaggtttcaggaaggcaagtccttctagaattgcaatagtattttttcctccttttgtctttatttttgtatcttgaaatgtctgtagagctttacttccttgcttctaaattgccttcatgtattagaagtctttggctgagcatataattagagtccaaatgtgaacacgaaggagaaaggtgtctaataaagtaagtggcaaatgtgaatttattaaaagtaggtcatgtcatacattgtaatagccttctgtggcatatctcctaagttaggaaataaaagtagtgaaagatactgaatgcttaagtttgcaaaatgtgtttgttatagtgctacataatagacgcctatacattaattggataaatacctgaaagaaaacctggtcctatgaagccaagtaagcataatcaataaatgtacagcctctaagtggaaagctgcaggaggagtctcaaggggtcagtattagcacatattaagtattttgttaataatatgctcacatctgtggaatatattttctgatacgaaaatcaaattagccaggaaacacacagaagggcagagcaacctgcagagttaacagtagtgggatgaaagtcataatgaatataaactaatattaagataaagaataaacaacaggcaaatgcaacaggagaatccagtctggaaaaaaacaaattgagacacatgtctgatacacacaggtgtttgcggttaattttgaaccggtctcatatataagaacaattgcatgca

SEQ ID NO: 58911 - DNA, 3760 bp, Homo sapiens
atatggaccgaatagggctgggtggaaccctgctgcactctgaaacatagaccaaagttgtggtttaggagcagtatcataaaatctggcactttccaaggcatattttttcccattcaccttctagggaaaaaagtaaacctgaaatttaattttttatgtcaggttggatgaagaagaaccagaacttctgctttatatgatctcagtttaccagagatctaaattttggtatgagagcatatagattaaaatgcctactaatttccatcaaatgaatttctttcccatccagtttcccagtgcaagaacatatgggaaagccacaattttagaggaagtattttattaattaaatagcacattctatacctaaaatatacctgaccatggcagctcctcatacagtaatacctcttatgaatgtcctaaattttacttctttattacctttatgctcaagtccctgaatatagatttttaccttcctaagaaggtgatctgataagaatgtgcttcaaaattctagcaccatgctgggcaaatcttggatagtcctgttgtttgtcaatcttgagacctctttcattttttaaggcaattaatcacctgcggtgatactaaggtttgcttggaatttttacattttgagttgcttctttgatagcatcatccagattttattaaatgggaatcaaataaacaattaaaacagctaatcgtgccatctccctctctttccccttgctgaaagacacaggaggcttttcagccttctttttcaactccccctctcttgttcttttgttttcaaagctgatcagaaataagataccctaaatatatatataatattgctaacattagaatgggctccaagaaattaaaataacactactaatattaaattatatatgataaaattaattggataaaagataataaaaggatggaagtggtagtaaattgagttgcagatatcagctgcagctgactcacagacatcagaatactaagatgaggactgcattgataagktgatttccctgctaatatctgttttctttattggtaaagaaaagattacagagtcaaatgtaaaaaagtgagtcaaataaggccaaagaaggtaaatagcatagtaaataattcaagaagtagtcggcaggcaaaaaaatattttgagacatctaagccaagactatgcatatatagcagagaaaaatctgtcaaacaccatctttttcaatcacagtgttttatatttgaagttgtctacagaaagtatttgtttttattttgtaagctttttatggttaaaatgaaagaaaagaaatttatttttcttatttttttaatgtctggaagtagggattcaagctgataaacaaaatatattatgttgaatttatactattttgatgaatatatatatatacatcaaaattattgaaataatgaaaattaaatatttgttgtattgatgcaaaatttcatttgaaaactgcattttttcaggctggtgatagcagatctgtaatataatatctaacaaatggatagttctttgcaaatatttgttcagtgctaagcacttggaaatttgggcatggcgatttcataaaattcaagctgctatttatgattgtttgaattatacagtgcgatggatggcagcaattaaccaagaaaatatgaagtgaattatccaaataattaaatcagaggctaagctgtaattacatattgaaaatccacttgcaacatttaattattctgcaagacttgcattattttttgtcatagagagctgtttgatatggtgggaaaaaaagctgacctggcagtcagaaaccctagcttctgctgtcaactacaaaactaccccactccgtgtcttattctgtcacagattctctagctttaatataggaaaggaatttgtgattgcttaggccctttccacctcagaaaatgttaggagtcactgtaacacatgtagaaacaaccaaccctatgtaaaaacaaccaaccatgaagttgaatctccactttagtcaacatgtgatgcattatttagacttaggaaagggatcgctggtgctcattatcatgaagacaatcagcttttggaggaaaatttaaaactccagcaaaaatcttagcatggagagcacaagtcatctacacagtcgcagagatggcttctagaacatgttggccactgtaggtgagctaaccactaccccatgccattcagtgttagaacccaggactgctgaaccttaggtggataactgctacacaatatggaagttaacatataatttacttttatgtttaacctgatttcagtgatcagtcctcagttgtaaactagcctccgtcacttactagctgtgttaactagagccagttatttaacttttcaacgttactttctctatttatgaaatgggaaaatagttcccacttcacagcgtgccaggatgactaaagaaataatgtcctttatggtggatttatcataatgctcaccagacaataaatgctcctatttatttggagtttgcttggaactcctatttaatcctcacatttatccgaaagctcaacttatttcacgttctttcattgggcttgagctctgtcatgttatgacctcagagataacatgccatagtctaagatgtttagctaatatgaaactgttttagcctgtggctttgcctaaggataaatgtgtgccaccctggccaacatgaaggagaaatttgcagtagtaagagctcgacagtctaattaattatttagaggtttcaaggggaaaaagaagcctagagtcccagagttcccatttgcaatgtattaaataatcagaataataagaaacagcagagagagactgtcctggctgtctggaatgtgtaggatgtaatttgaaggcccaaattagaagtaacctaggatcttaaagacagttttaaggctgaaggtttcaggaaggcaagtccttctagaattgcaatagtattttttcctccttttgtctttatttttgtatcttgaaatgtctgtagagctttacttccttgcttctaaattgccttcatgtattagaagtctttggctgagcatataattagagtccaaatgtgaacacgaaggagaaaggtgtctaataaagtaagtggcaaatgtgaatttattaaaagtaggtcatgtcatacattgtaatagccttctgtggcatatctcctaagttaggaaataaaagtagtgaaagatactgaatgcttaagtttgcaaaatgtgtttgttatagtgctacataatagacgcctatacattaattggataaatacctgaaagaaaacctggtcctatgaagccaagtaagcataatcaataaatgtacagcctctaagtggaaagctgcaggaggagtctcaaggggtcagtattagcacatattaagtattttgttaataatatgctcacatctgtggaatatattttctgatacgaaaatcaaattagccaggaaacacacagaagggcagagcaacctgcagagttaacagtagtgggatgaaagtcataatgaatataaactaatattaagataaagaataaacaacaggcaaatgcaacaggagaatccagtctggaaaaaaacaaattgagacacatgtctgatacacacaggtgtttgcggttaattttgaaccggtctcatatataagaacaattgcatgca

SEQ ID NO: 58912 - DNA, 3760 bp, Homo sapiens
atatggaccgaatagggctgggtggaaccctgctgcactctgaaacatagaccaaagttgtggtttaggagcagtatcataaaatctggcactttccaaggcatattttttcccattcaccttctagggaaaaaagtaaacctgaaatttaattttttatgtcaggttggatgaagaagaaccagaacttctgctttatatgatctcagtttaccagagatctaaattttggtatgagagcatatagattaaaatgcctactaatttccatcaaatgaatttctttcccatccagtttcccagtgcaagaacatatgggaaagccacaattttagaggaagtattttattaattaaatagcacattctatacctaaaatatacctgaccatggcagctcctcatacagtaatacctcttatgaatgtcctaaattttacttctttattacctttatgctcaagtccctgaatatagatttttaccttcctaagaaggtgatctgataagaatgtgcttcaaaattctagcaccatgctgggcaaatcttggatagtcctgttgtttgtcaatcttgagacctctttcattttttaaggcaattaatcacctgcggtgatactaaggtttgcttggaatttttacattttgagttgcttctttgatagcatcatccagattttattaaatgggaatcaaataaacaattaaaacagctaatcgtgccatctccctctctttccccttgctgaaagacacaggaggcttttcagccttctttttcaactccccctctcttgttcttttgttttcaaagctgatcagaaataagataccctaaatatatatataatattgctaacattagaatgggctccaagaaattaaaataacactactaatattaaattatatatgataaaattaattggataaaagataataaaaggatggaagtggtagtaaattgagttgcagatatcagctgcagctgactcacagacatcagaatactaagatgaggactgcattgataaggtgatttccctgctaatatctgttttctttattggtaaagaaaagattacagagtcaaatgtaaaaaagtgagtcaaataaggccaaakaaggtaaatagcatagtaaataattcaagaagtagtcggcaggcaaaaaaatattttgagacatctaagccaagactatgcatatatagcagagaaaaatctgtcaaacaccatctttttcaatcacagtgttttatatttgaagttgtctacagaaagtatttgtttttattttgtaagctttttatggttaaaatgaaagaaaagaaatttatttttcttatttttttaatgtctggaagtagggattcaagctgataaacaaaatatattatgttgaatttatactattttgatgaatatatatatatacatcaaaattattgaaataatgaaaattaaatatttgttgtattgatgcaaaatttcatttgaaaactgcattttttcaggctggtgatagcagatctgtaatataatatctaacaaatggatagttctttgcaaatatttgttcagtgctaagcacttggaaatttgggcatggcgatttcataaaattcaagctgctatttatgattgtttgaattatacagtgcgatggatggcagcaattaaccaagaaaatatgaagtgaattatccaaataattaaatcagaggctaagctgtaattacatattgaaaatccacttgcaacatttaattattctgcaagacttgcattattttttgtcatagagagctgtttgatatggtgggaaaaaaagctgacctggcagtcagaaaccctagcttctgctgtcaactacaaaactaccccactccgtgtcttattctgtcacagattctctagctttaatataggaaaggaatttgtgattgcttaggccctttccacctcagaaaatgttaggagtcactgtaacacatgtagaaacaaccaaccctatgtaaaaacaaccaaccatgaagttgaatctccactttagtcaacatgtgatgcattatttagacttaggaaagggatcgctggtgctcattatcatgaagacaatcagcttttggaggaaaatttaaaactccagcaaaaatcttagcatggagagcacaagtcatctacacagtcgcagagatggcttctagaacatgttggccactgtaggtgagctaaccactaccccatgccattcagtgttagaacccaggactgctgaaccttaggtggataactgctacacaatatggaagttaacatataatttacttttatgtttaacctgatttcagtgatcagtcctcagttgtaaactagcctccgtcacttactagctgtgttaactagagccagttatttaacttttcaacgttactttctctatttatgaaatgggaaaatagttcccacttcacagcgtgccaggatgactaaagaaataatgtcctttatggtggatttatcataatgctcaccagacaataaatgctcctatttatttggagtttgcttggaactcctatttaatcctcacatttatccgaaagctcaacttatttcacgttctttcattgggcttgagctctgtcatgttatgacctcagagataacatgccatagtctaagatgtttagctaatatgaaactgttttagcctgtggctttgcctaaggataaatgtgtgccaccctggccaacatgaaggagaaatttgcagtagtaagagctcgacagtctaattaattatttagaggtttcaaggggaaaaagaagcctagagtcccagagttcccatttgcaatgtattaaataatcagaataataagaaacagcagagagagactgtcctggctgtctggaatgtgtaggatgtaatttgaaggcccaaattagaagtaacctaggatcttaaagacagttttaaggctgaaggtttcaggaaggcaagtccttctagaattgcaatagtattttttcctccttttgtctttatttttgtatcttgaaatgtctgtagagctttacttccttgcttctaaattgccttcatgtattagaagtctttggctgagcatataattagagtccaaatgtgaacacgaaggagaaaggtgtctaataaagtaagtggcaaatgtgaatttattaaaagtaggtcatgtcatacattgtaatagccttctgtggcatatctcctaagttaggaaataaaagtagtgaaagatactgaatgcttaagtttgcaaaatgtgtttgttatagtgctacataatagacgcctatacattaattggataaatacctgaaagaaaacctggtcctatgaagccaagtaagcataatcaataaatgtacagcctctaagtggaaagctgcaggaggagtctcaaggggtcagtattagcacatattaagtattttgttaataatatgctcacatctgtggaatatattttctgatacgaaaatcaaattagccaggaaacacacagaagggcagagcaacctgcagagttaacagtagtgggatgaaagtcataatgaatataaactaatattaagataaagaataaacaacaggcaaatgcaacaggagaatccagtctggaaaaaaacaaattgagacacatgtctgatacacacaggtgtttgcggttaattttgaaccggtctcatatataagaacaattgcatgca

SEQ ID NO: 58913 - DNA, 1302 bp, Homo sapiens
ataaacaaaaaattacatcttgtagcaagtattaaaaaagaaataaacatttatggaaactctgctggcaacacatgagtatatccctagcaaacatctgtaaatagctctacatacccattgaactttcttaaaatttgtttaaaaaaatcgagttaatgtatagaaaactgacacctattcaactaaattttatttcagcattaaaagagttaaaaattacagataaagacatctacatctgtttcatagatgtttaggctctactttatttgaaagaaaaataaagttttcttatacgaaatttgtgatgcagaaagtcttccttagagatgggcagacaatgaaatcttgcaagatccttttggaaaatactcctgctatggtatgggttgtatgtatttgtaccccaaaattcatatgttggaacctaagacccaatgtgacagtattacgagaaggggactttaataggtgattaagtcatgagggcactgccctcacacatgggatcagaacccttataaatgatctctagggaaatagctgggcccctttttgcccttccactttccaccagtgaggatacagtattcacccttctgccatgcaaggatgcagcaacaaggcaccatcttggaagcagagagtaaccctcaccagacaccaaatcttctcatgccttgatgttaaatttcccagcctccagaactgcgagcaataagtttatttttatgaaccacctactctcagatattttgtaaagcagaacaaatggactaagacaatcccaatgaggtaggtctgaaaaccgaagttaytgccaaataatcaatggcctctaatagtgaactaaatgtacactcaagtaaacatttaggttgatgaacttaaacatcatagccaattctttctcaataatctatttcttaactattttctaattctaacataactcatttcaatgccatattttgttttacctattttgaatgaaagtgatacactgaaagaaaatcctgttttctcttcatgctaaaatttaattacattcaagcaccacttaaactctcatagaaataaagcattatatttccagcttcttcttttttcctgtttttcatttgaaaacctaccttgactcattttgttactccttctctgtgtttgtatttaagtggggaggcagcaagcagtggggatagagatttagactgtcaatcattctgttcactcagagtttaagtgttctgtttgttgtctcctgggagagtaacatccatagtaacaaatgcaaatgca

SEQ ID NO: 58914 - DNA, 680 bp, Homo sapiens
actttagcagttgataatatgaactttttttttttttgagacggagtctctctctcgcccaggctggagtgcagtggcgctacctaggctcactgcaagctccgcctcccgggttcacgccattctcctgcctcagcctcctgagtagctggaactacaggcacccgccaccacacccagctaattttttgtattttagtagagacagggtttcactgtgttagccaggatggtcttgatctcctgacctcgtgatccacccgcctcggcctcccaaagtgctgggattacaggcgtgagccaccacgcccggctgataatatgaacttaaaactcttaatgatttaaaattctcctaactgcttagaccaagagcctaatgaccacccccatccttctccatctcccaggagaratgccatattttaagtaggaaggaaatatgtccaaaggcagaccaacctagtagtctcctggcttaaccctttatcaagggatgctcaggaatgaagaagaactttctgtggtaaccaacagaggtcccaaagggagccccaaggtgattatggtgagaattcacacccccatgggttctagagcttgagtgacccacagtacccacaagggttcctggtggcaaataagactgactctggctggttcaagcagaaaaggaattc

SEQ ID NO: 58915 - DNA, 1523 bp, Homo sapiens
tccatttaaactcccaccatgccacacactctctctaccaaatgagctggggaagggcaatttttcagattccagatgagacagatgaacacctcaagcagccagagtttcagaaggaagaacaccaatctttgcttgattcactggactgaacaaaggccaattcatgcaggcagttagcatccctcctcattgctcctcaagaaaccaactcacccctacctgccctacccaccagtgatctggaaaaatgcctccagttgaggtgacagagaacataaaatggtcaagaccagcatcttcatagggaaaagcagacagaatggcaaccacagcaattcttttcctggaaggaacttcagagtgtacttagtatgatttcctcatttcccagatgaagagacagataccctgagaggtgaagttatttgcccaaagttgcattcctagttggaggctgatatgggactaaaactccagatctccagactagcaggtcagtacattttctacaacatcacatgaggcaggagaaagccaggagttgactgctactagaataatattctgctggctagggaagtgtagctcccctaaaaaggaatctggttccatgtcaccatttatgggagcatatggcaactgctaatggccatggcaatgagatgtcagctggaagcagagtgcctagggacctagaaccagaaaaagaaagatccaacctcgatgactcaaggtcaagcagggagtgagccaaacagaggtgatgcctagaaagctcactaaggcactgcctttgtgggaacggagaaacaccaaatgtaaacgagattataatcaagtccagtgaagaagcatttaaagaactgacttggaaacctatacctcaaagatccagaacccagggaaatggggttgccaggcatgccccagaggagcacattccagaggagtataatggttggatgggaggacactggcttcagagacacaaatgtcataattttatagcccaaaratgcatctataaacttcctgagcacttccaggaattctctccactatgtgaagaaatgcagacgtaaataaaaggaggggccaggagtacagctcacaccccctgcagtaagcctcattgggccctctaaacaaaacttaccattcttcatctaagatacggggtggggggtggctgtggatgaagcataaagactagagaagtacaaagaaacaccaccagaaatggacacaggcccccttccctctctaagaagcaaagcatggggcagagaaaggcaggattctggatgaattgaggagaaagggatatttaagaagccaggacccctccaccacaccaaacacactgatacgtaccaatagatgctataaaattttcttcctttaaacttctggtgtccagttccttaggaccctttcctgtggcacttggtgcccgaggtcccagttgtggaactctcagttgtgccatagcctttgggtccccccgcccagctaggcca

SEQ ID NO: 58916 - DNA, 370 bp, Homo sapiens
tcttgttggaacaagctgctaaaatattgtggccattttaagagaatctaccacattatctatgtatttttcatttgtaaacatctatacagaaatgccaagtgtttttatctttgatttcagatattttaattgtttcacagttgaatttcataaactttcctcatggaaatctgtttttctcctcagcaacttctcggtttttccaggcaagcctttctgttcttaattactgtaattttcagaatgagctwctttctacatgtgcacatgtcttttaaattaatataatacaaaactaaatctggaaaattttagttttacatttttttgttcatctcctaacctatttccctgaagcaaagtgaca

SEQ ID NO: 58917 - DNA, 648 bp, Homo sapiens
tccaacccttcgtagaatggccaggaaccaaagctaatcccaggaagaagtgccatactcggcttgactctgtcctttagctggtgatcaaagcactgaggacatgtccccagatcttaccatggccaactatcagacctcaaaatctagaggttcaaaactaaaaatataagcttacagtcaaattaagtatcaaaaatattaaagaagtagtagtttcatgactttaaaacatgtatcagaggtagtataaaattgtctgaccagtatatgcagacaaaatgtctgaattatatttaactgacaattttgaagtcatttgtatttcgtcataataacaatttaaaactagctttatttatcaagttttatgtatacataatacatagagacatagacaaaaatagattttatagtttttataaagaatttttattaattggcttttaaatatatattttttctktttagatgattaatcttttatttatctgttttattgccctaagtaattgataggcaataatttgtttttaaagcaatgactcttacatgaaacaagataaaaaatctgtaccttgaaagcacagagctgagacttcaggcctaaatattgtgctattatttgctcaaatcaaagaaaaagtt

SEQ ID NO: 58918 - DNA, 1020 bp, Homo sapiens
ctcagcctccagagtagttggaattacaggtatgcacgaccatgcccagtgatttttttttttccatggagacagtgtctcaccgtgttacccaggtkggtcttaaactcctgggctcaagagatcctcccacctcagcttcccaaagtgctttgatcacaagtgtgagccaccatgcctggcaaaattttctctataaatgtaaatttttttacaaaagggttttcatatagccagctaaatgttagaagggtgtactttgaacactgatttagtttaataggtggtctttttaacttagtttttgccttttagttaaaattactgagttcagtttggaacccatcagggaatagggtaaagaaacgattctctatgtctggactcagcatagatagctttgaaaaagaagaaagcctactttttataaatactttatacagaatagctttttttttttgtcattgggtagtaacagccaaatgtttagtggatgtagtttttcttattaattaatcacttgagatttttatttgtctttcataaagtcttttaaaaaaataaagaataaaaatattaaaatctttttagaagcttttctacatcaataggcattccttcatgggcctaattcaggagccctcatttaaaaatgtacttttacaagtacagtgttcatttggaatgttctactgtaattttaaattactttagtaagctttttcaatttctataagcatttgctgcttttgaggcctaatatgcatgtaaacataggtgtagctggtaggtagagtgggtagagttctttagaaataaggttatttgctttggttctcagatctccttgatctacttagtcaatgattttttccccacctaaacatgcaaggaaaagaaacaaaggggatagaacacgaaaaacatgaatttctgaaagccagagttggcacattctgcagcatttctatttactctcagtttctgcctgacctagtcagacatttgaggcctctaact

SEQ ID NO: 58919 - DNA, 2814 bp, Homo sapiens
ataggttttgttttgtttttaagttttcagaatgttttcatgatagtttaagcccatacaaatatcattctttagaccacagattggcaaagtatgacctgtgggccacatctggccagcggcctgtttttgtaaataaagctttattggaacacagccacactcgcttgtgtacatactgtctgtagctgcttttgtgccacaaggcagagttgagtagttgcaacagagaacatatgtggtccacaaagcctaaaatatctgccatccggcyttttacaaaaaaatttgccaactccctttttagaccaacattgacacaatctcattttcctcactaatttaacaggaggaagtttatatattaatgcaaaaatagaacacatggcccttcctcaaaatgtaccccctctcatatcttataagcatgtcactgcttttctatacaagaagcattttttagagtagctgtaaagaacagagaatttgagtcctgactccatgctctccagctgtgtgactttgggccagtccttcagtctctcatgcctcagtttttctcatctgtatagggggattgtgatcatacctagttcatcaggttgtaatgaagattaaatgaatcgatacacgtaaagagtcgagaacagtcccttcgcatagtgtggcctcaatgagcattggcttctaattatttgcttcgtgtggtgtagccattcctctacacttgacgtccagtgaaacacacatgtatcagaaaaggggcaagaaggagaacatggaaaaagagaatagaaatccattttgcaatttagcaagatctaagatctacctagcccagtcagcctttgcttccttctcagagctgtttccccagcttactacactgatttttatttatttttcctaaaaaccataaaatttctgaactggatgcattagaacacggcctgcagaatgcctcctggaacgtctgaactaacagctggagagaatgacaattcttagttgcgctggaatctgttgaattcacgattcccccagatccagttatttctattcactctcaggcttcagtgagctcattgttccttggatggaatcaccagcttgggctcagcacccagcccttttcaaagtgcttaataaattagtggctctccacatgtacttacccatgtggcacgaagtgagacacacaaggttaaaaaaaaaggctgatctggatttgaaaacaggaagactaatcaggcctttgctcaaaggaggtcagaataatttgccccaagcacccagcactgcgttgtcccttgacagggctgttgaatcaattagcctaattaaatgaggtggaaaattactccggcaaataagttgccatgaaaggtaagtcttaatttggcctaagggaaagcaaacagctctccggtgtcttgccaaagtctatgaatggggaataattggcaatttatgtgtatgtgtttttaaggccgtgggacaaatatatttttgttgacaagcagctgaagctttccctggtataaagacagggttactaattaagggatagtataattatgtgtgttggcagaaatgtcacatatgtaccatggctgcaaacatcgggggcctgcgacccagctcatctcagggggttcaggccaagacggacctctggggcagcacctcacatcaggccagtcagtcattgcttcctcctcggtgatgtttccccagctcgctacactgatgaggactccatcacaagccactgggaaagacaggctatgaagtttgaacatatgtgaaaatgtaccttcatctcatagaatccactgcaagcctcaagaatgatgttggagaaatctacgttttttagtgcaggaaggtgattgaaattatgtgatatgaaaaaataaatatatataaaacggtctatgtcagcatggagagtggaaagtacgcatcttcctcctctgcaacccaggatccaatctctggggccaacctgctccagctccatcctgcagggggaaatgtgagatccttcattactgaggttctaggttcctgggatatctcagaaaggcacatctccaaacacagaaaagttccctgccagtcacgttgaccacctcatgcagggtaactttgataagttttttcacacacacacacacaagtctgctttgtatgcatttctcagaaatctctttctcaaaagggatgcaggctcaaaagaaagtaggctgtggggagaaagaaaatccctgccgttctgggtaactgaaaaattaaattattaaaacaatcacagcatgtgaacttctcccaaaaccctattccaagcttcccagtcagacctagagcagtattgttcagagaccaaggggcagtgcagacaagcaaggccaacgtggccttctcagccaacttggcttcctcagagttttcctggcccctcctgtacagtgcagcccttaagcccctactgtttgctcacttgtctgtgagcccagttcagccccgtgcagggcttctggaatgctggcctgtgtcttgcactgtccttcaacctagctggggaagtgaatgattagttaatgacctagtatgaggcagaacccagagttctaaaagatccttgagaagagtgtccttgaggtgatgcgggggaggcgcaacaagaaccatcttttaaatgattgaggaccatggttgtgtgccctgaaggcaccagaaaaattagtgccagcccctctgtatcatgacagggctctgtgtttgagatggcaagtttacaaggcagcatag

SEQ ID NO: 58920 - DNA, 626 bp, Homo sapiens
aatactttataggccataatctctgatgaagaaatgcagcatttaaaattyttttgccttttttttttttttgaaatggagtcttactctgtgccccgcaggctagaaggcagtggtgtgatcagaacttactacagcctcaaatccctggctgggctcaagcaatcttcctactttgcctcagcctcctcagcctcccaagtagctggacttaaaaggcatgagccactgcatctgctaaacttagtctttatgtttctcctgatgtctcaaaacataatcgagttggttctacataaatacaatcatttcagtgtgtatcttacttatttcagatttaaacatggccagtcattcaagaactttccccaactcctcattctcccaaaatagtagctggtgttggagggaatgtcttaggtgagattctctagaagccaagcctaaggcagagattcttatgcaagtgactgattgagggagtgctctcagaacaaagctgtaaacaaatggaggcagtgggattcctcaggggaagaagttaagcacatgaaatttcaaccgaaatctagcctcagcttgcaaaggaaccctggaatgtgaatggaatcacaaagttgagccca

SEQ ID NO: 58921 - DNA, 1773 bp, Homo sapiens
ttatcgttactgaacggcaaggttcatttgtggaagtgtggttctgatgatgctgtttagttgctcagagcctgcattgtgtcctcagggccactagattcactctggtgtctctgaagcccttagcaggatccagggcgacctccacaatcaccccaaaagtttgctcayctcctgcctttgtttgcacgtgggagtgacatcttcaacaccgccctgcctgaggtcctgagcacagtggaatacacagttggtgctcagcagatgctgggaagtgcgtgaattcatgctctcaatcgggtcctcaagcccccctttaatgccataatgaaaaaacaaaggtttgcaatgggaaatagaaaataatgcttttgcagtgcttgaaactaaacatgactgaattttaaaaatagataattttttaaaatatacatcttcaattttttaagaaaaaatagaaattaaatgagggagaatagttgtgaactccagaaggatatgtctggattcttggaagctagttttacctcgcattttgcagtttctaagtttagttcagaggttgataatgatagcaacaacattgatgacactgattctctgacctcttggctgagaaagggccttgtctgggctcatcacatgcattttctcatcagttcttgcagccctctgtaagggatccccaccctctaagtagagcactgttacaagaagtgctgcacaacttttcttcttatgcattagggtgggagagaaggaaagaaatccatgtgcctaacaagcactgggttaggtgaggagtcaggggataacaggcaataaagttgagaattggagaattgatgaaattacacacagtgaaagacagaaagtactagaacacaccaggtttgcaatcccccttggtaggtggagggaagtgagggtggcggagtttgagaaaacactgagatttgcagttacccaatctgctcactaggtggtaccatcttcctaggacagcttggttgccaactgccaggttggagttgggtggggtggggtgggggtgggggaacaacctcctggggaggggcaagggtgggtttaggtgtctggcagctggtggtgggatatttaaagtgcggatgaccctaaactgtgtggcagtctgtaatttccctttggccttacttagataatatgtcataatgtgtgaagacacacatgtatgacacaggagaacatttgatttaatacagtgtctagcttgcagtctcaaatgtaaacacttaggtcttctcaatcagtaggagacctgatcagcatccaagtgaataaaaaataggccaaagacattttagacaccgtcttgttgacaatgaactcttaccactcaaggcttagtaaatatacttaagtgtttatgaaaatgaatacactaaacttatgaaaatggtttattacagaaactagaagaaaaagttagaaaatagatgcatacttttagtaacatccaagaagacacaatctctataaagacaggacagaaagtcagaaggaaaaaaaatgctgaaacgaaaagtaagaaaagataataaacacttacatggagattgctatacaccaaacactggagttcatgtatattaacgtattcagtctttgcaataatcatgtaaagtgaaaaccattattatccttatatctcagatgataaaattgagatagagttagagatagagatagagataggaatttaatgtggttcactaatttgacagtctgtaa

SEQ ID NO: 58922 - DNA, 1773 bp, Homo sapiens
ttatcgttactgaacggcaaggttcatttgtggaagtgtggttctgatgatgctgtttagttgctcagagcctgcattgtgtcctcagggccactagattcactctggtgtctctgaagcccttagcaggatccagggcgacctccacaatcaccccaaaagtttgctcacctcctgcctttgtttgcacgtgggagtgacatcttcaacaccgccctgcctgaggtcctgagcacagtggaatacacagttggtgctcagcagatgctgggwagtgcgtgaattcatgctctcaatcgggtcctcaagcccccctttaatgccataatgaaaaaacaaaggtttgcaatgggaaatagaaaataatgcttttgcagtgcttgaaactaaacatgactgaattttaaaaatagataattttttaaaatatacatcttcaattttttaagaaaaaatagaaattaaatgagggagaatagttgtgaactccagaaggatatgtctggattcttggaagctagttttacctcgcattttgcagtttctaagtttagttcagaggttgataatgatagcaacaacattgatgacactgattctctgacctcttggctgagaaagggccttgtctgggctcatcacatgcattttctcatcagttcttgcagccctctgtaagggatccccaccctctaagtagagcactgttacaagaagtgctgcacaacttttcttcttatgcattagggtgggagagaaggaaagaaatccatgtgcctaacaagcactgggttaggtgaggagtcaggggataacaggcaataaagttgagaattggagaattgatgaaattacacacagtgaaagacagaaagtactagaacacaccaggtttgcaatcccccttggtaggtggagggaagtgagggtggcggagtttgagaaaacactgagatttgcagttacccaatctgctcactaggtggtaccatcttcctaggacagcttggttgccaactgccaggttggagttgggtggggtggggtgggggtgggggaacaacctcctggggaggggcaagggtgggtttaggtgtctggcagctggtggtgggatatttaaagtgcggatgaccctaaactgtgtggcagtctgtaatttccctttggccttacttagataatatgtcataatgtgtgaagacacacatgtatgacacaggagaacatttgatttaatacagtgtctagcttgcagtctcaaatgtaaacacttaggtcttctcaatcagtaggagacctgatcagcatccaagtgaataaaaaataggccaaagacattttagacaccgtcttgttgacaatgaactcttaccactcaaggcttagtaaatatacttaagtgtttatgaaaatgaatacactaaacttatgaaaatggtttattacagaaactagaagaaaaagttagaaaatagatgcatacttttagtaacatccaagaagacacaatctctataaagacaggacagaaagtcagaaggaaaaaaaatgctgaaacgaaaagtaagaaaagataataaacacttacatggagattgctatacaccaaacactggagttcatgtatattaacgtattcagtctttgcaataatcatgtaaagtgaaaaccattattatccttatatctcagatgataaaattgagatagagttagagatagagatagagataggaatttaatgtggttcactaatttgacagtctgtaa

SEQ ID NO: 58923 - DNA, 1773 bp, Homo sapiens
ttatcgttactgaacggcaaggttcatttgtggaagtgtggttctgatgatgctgtttagttgctcagagcctgcattgtgtcctcagggccactagattcactctggtgtctctgaagcccttagcaggatccagggcgacctccacaatcaccccaaaagtttgctcacctcctgcctttgtttgcacgtgggagtgacatcttcaacaccgccctgcctgaggtcctgagcacagtggaatacacagttggtgctcagcagatgctgggaagtgcgtgaattcatgctctcaatcgggtcctcaagcccccctttaatgccataatgaaaaaacaaaggtttgcaatgggaaatagaaaataatgcttttgcagtgcttgaaactaaacatgactgaattttaaaaatagataattttttaaaatatrcatcttcaattttttaagaaaaaatagaaattaaatgagggagaatagttgtgaactccagaaggatatgtctggattcttggaagctagttttacctcgcattttgcagtttctaagtttagttcagaggttgataatgatagcaacaacattgatgacactgattctctgacctcttggctgagaaagggccttgtctgggctcatcacatgcattttctcatcagttcttgcagccctctgtaagggatccccaccctctaagtagagcactgttacaagaagtgctgcacaacttttcttcttatgcattagggtgggagagaaggaaagaaatccatgtgcctaacaagcactgggttaggtgaggagtcaggggataacaggcaataaagttgagaattggagaattgatgaaattacacacagtgaaagacagaaagtactagaacacaccaggtttgcaatcccccttggtaggtggagggaagtgagggtggcggagtttgagaaaacactgagatttgcagttacccaatctgctcactaggtggtaccatcttcctaggacagcttggttgccaactgccaggttggagttgggtggggtggggtgggggtgggggaacaacctcctggggaggggcaagggtgggtttaggtgtctggcagctggtggtgggatatttaaagtgcggatgaccctaaactgtgtggcagtctgtaatttccctttggccttacttagataatatgtcataatgtgtgaagacacacatgtatgacacaggagaacatttgatttaatacagtgtctagcttgcagtctcaaatgtaaacacttaggtcttctcaatcagtaggagacctgatcagcatccaagtgaataaaaaataggccaaagacattttagacaccgtcttgttgacaatgaactcttaccactcaaggcttagtaaatatacttaagtgtttatgaaaatgaatacactaaacttatgaaaatggtttattacagaaactagaagaaaaagttagaaaatagatgcatacttttagtaacatccaagaagacacaatctctataaagacaggacagaaagtcagaaggaaaaaaaatgctgaaacgaaaagtaagaaaagataataaacacttacatggagattgctatacaccaaacactggagttcatgtatattaacgtattcagtctttgcaataatcatgtaaagtgaaaaccattattatccttatatctcagatgataaaattgagatagagttagagatagagatagagataggaatttaatgtggttcactaatttgacagtctgtaa

SEQ ID NO: 58924 - DNA, 1773 bp, Homo sapiens
ttatcgttactgaacggcaaggttcatttgtggaagtgtggttctgatgatgctgtttagttgctcagagcctgcattgtgtcctcagggccactagattcactctggtgtctctgaagcccttagcaggatccagggcgacctccacaatcaccccaaaagtttgctcacctcctgcctttgtttgcacgtgggagtgacatcttcaacaccgccctgcctgaggtcctgagcacagtggaatacacagttggtgctcagcagatgctgggaagtgcgtgaattcatgctctcaatcgggtcctcaagcccccctttaatgccataatgaaaaaacaaaggtttgcaatgggaaatagaaaataatgcttttgcagtgcttgaaactaaacatgactgaattttaaaaatagataattttttaaaatatacatcttcaattttttaagaaaaaatagaaattaaatgagggagaatagttgtgaactccagaaggatatgtctggattcttggaagctagttttacctcgcattttgcagtttctaagtttagttcagaggttgataatgatagcaacaacattgatgacactgattctctgacctcttggctgagaaagggccttgtctgggctcatcacatgcattttctcatcagttcttgcagccctctstaagggatccccaccctctaagtagagcactgttacaagaagtgctgcacaacttttcttcttatgcattagggtgggagagaaggaaagaaatccatgtgcctaacaagcactgggttaggtgaggagtcaggggataacaggcaataaagttgagaattggagaattgatgaaattacacacagtgaaagacagaaagtactagaacacaccaggtttgcaatcccccttggtaggtggagggaagtgagggtggcggagtttgagaaaacactgagatttgcagttacccaatctgctcactaggtggtaccatcttcctaggacagcttggttgccaactgccaggttggagttgggtggggtggggtgggggtgggggaacaacctcctggggaggggcaagggtgggtttaggtgtctggcagctggtggtgggatatttaaagtgcggatgaccctaaactgtgtggcagtctgtaatttccctttggccttacttagataatatgtcataatgtgtgaagacacacatgtatgacacaggagaacatttgatttaatacagtgtctagcttgcagtctcaaatgtaaacacttaggtcttctcaatcagtaggagacctgatcagcatccaagtgaataaaaaataggccaaagacattttagacaccgtcttgttgacaatgaactcttaccactcaaggcttagtaaatatacttaagtgtttatgaaaatgaatacactaaacttatgaaaatggtttattacagaaactagaagaaaaagttagaaaatagatgcatacttttagtaacatccaagaagacacaatctctataaagacaggacagaaagtcagaaggaaaaaaaatgctgaaacgaaaagtaagaaaagataataaacacttacatggagattgctatacaccaaacactggagttcatgtatattaacgtattcagtctttgcaataatcatgtaaagtgaaaaccattattatccttatatctcagatgataaaattgagatagagttagagatagagatagagataggaatttaatgtggttcactaatttgacagtctgtaa

SEQ ID NO: 58925 - DNA, 992 bp, Homo sapiens
tttttattttacaaatgaccagggttttaacgtgctcaactttaattttttcaagcgtaggaaggccttaaaaaagctacattaagcgtagctaaaattatttattggactaaaaactaacagaacttcatttccagaatcttttttttttttttgtggcaaatgttcacattcaattaaggggaaaaagtagaaccagcacaaatgagtggcagttgctggagcataactgcttcaataaatcttcatcttggggtaattacaggcaagtcattttcacatcctcttgaggttcagagcatcagaatgaactctatgaatacatgtgtaagtgccagacagctgaatctttatcaggtattgtaaagatacacatatgatatgtttattaaaattgaaataatgtaaaacacatgaataaatttgcaaaaccaagatcacagtacaccatatgcactctggtaccttaatttttttttataaataataaaagtgaatattgaagcttcttaaagttggtcttaatttttcataaataaaatttggggttataacagaaataatacattaaatacatagacaaaaaaagttaaacataagataatctattttacagtgtttcttataggcttacaattatttgaatgtatttccagttcttgtatgattaacttttgtgcatatctaactttttattatttttatctttggctactgcacgtgcatctctcgtcattcctccaccaaataaacagacaaaagtagtattgaaaagtttacagtcccttatctaatggcaaattgtgtgtatgtatgatttttttatcttgttctcttaagatttactgctgcttaaaattactaccagtaatccttagtcactcccaactgtttctgctgtatctcatgaagtgttagagcatttatgagaaacataaatacatgtataagcatattggtcacaccttctgggccagctagrgtccaaagtc

SEQ ID NO: 58926 - DNA, 436 bp, Homo sapiens
gcctgtgacaaaaaggtgtactgttatctgttctaaatggacacttggaagtactattcctgatstgcatttttactagggatggaatagtatatattttcacaatcaatggctgcagatcacatatctgatgccgtattaatacgctttagtacagatttctcattccacacaacagctacaattaacattgctacaaggtgcagatggcaatattggatgctatcctccagtatccatctggctttttttatgagtcagaaacatgaactgaatggagatataatgaacatcagcaccccaaggatagccctagcctctaccattctttccaggacattttttttttttatgtttctattttggctggtggaaaggtgcttttggaagctgccagttgactttctcactatgatggttcttacgccacacaaca

SEQ ID NO: 58927 - DNA, 728 bp, Homo sapiens
ctatttccagcatgaatcaaagtaagtaagaagtaacttatgcattctcagaaataagcctacatctcattttgcttcaggcatttcaaaattttttttcttctctattctcatactttaagaagaactttaaatctgaagccctaggacttagtaaatattgcaatgagtggagaaggaagtttattttcattatttgatacatatgtcatctcagaatgctgagagaaattacattattgtgttttatatgtgtactgtgaatttttgtcagagttaaagatcaattcattatcaagaacagcaaattactaggccatatattttacgccttctcgctgcctaatggtttatttatttcactgacggctgttttctagacaactggaatatcaatatgagtttttaagatgcccttcttcacaatcatattttacttttttccattctcattaatttttttaatttgaaacattcaatagttgtttgmgttaataattttctagtcttgttttcaataacatagttactttaaaaaatgttttgttgagacttctacttttgcttagaatgtaaaaagttgccaaaaatgttgctcccacaacagcaatgagaataatatggataatccacacacaaaaatcaactttttaaagcccatcagagaggtgaagttgtaaggaaatgaaagaacaaaaaaaggctccaaggaaagatggggacacaaa

SEQ ID NO: 58928 - DNA, 822 bp, Homo sapiens
cccagggcagctgaagcccaacctcaaggcacaggttgacctgtagccacagggctgcagtgaacagcttgagaatgccaagtggagggctgtggctgtcactggagtaaggaaggagcccccactctcagagcactgagaagggtgaaacacacagatttgtgaaccagcatggaagtggggcattcctccaacccctagaaatacctaagaatacagctaaccaagaaggtaaacaatctccacaagcataactacaaaacactgctgaacaaaatcagagacaacacaagtaatggaaaaacattcaatgytcatggattagaagaatcaatatcatttaaatggccatacttcccaaagcaatttacagaggcaatgctattccttgcaaactaccaatgttattcttcacagaattacaaaaaactattgtaaaacttatatagaaccataaaagaggctgaatacctaaggcaatggtaagcaaaaagaacaaagccagaggcaacacactaccctacttcaaactgtattgtaagtctacctaaccaaaacagcatggtactggtacagaaacagacacacagaccaaaggaagagaataaacaaccaagataataaagctgcaaacctacaatcatctgtcttccacaaagctggcaaaaacaagtaatgggaaaaggggtccctgttcaataaatggtgctgggataagtggctattgatatgtagaagaatgaaactgggcccccacctttcaccatatacaaaagttaactcaaggtggattaaagatttaaatccaccttacaagaccca

SEQ ID NO: 58929 - DNA, 822 bp, Homo sapiens
cccagggcagctgaagcccaacctcaaggcacaggttgacctgtagccacagggctgcagtgaacagcttgagaatgccaagtggagggctgtggctgtcactggagtaaggaaggagcccccactctcagagcactgagaagggtgaaacacacagatttgtgaaccagcatggaagtggggcattcctccaacccctagaaatacctaagaatacagctaaccaagaaggtaaacaatctccacaagcataactacaaaacactgctgaacaaaatcagagacaacacaagtaatggaaaaacattcaatgttcatggattagaagaatcaatatcatttaaatggccatacttcccaaagcaatttacagaggcaatgctattccttgcaaactaccaatgtyattcttcacagaattacaaaaaactattgtaaaacttatatagaaccataaaagaggctgaatacctaaggcaatggtaagcaaaaagaacaaagccagaggcaacacactaccctacttcaaactgtattgtaagtctacctaaccaaaacagcatggtactggtacagaaacagacacacagaccaaaggaagagaataaacaaccaagataataaagctgcaaacctacaatcatctgtcttccacaaagctggcaaaaacaagtaatgggaaaaggggtccctgttcaataaatggtgctgggataagtggctattgatatgtagaagaatgaaactgggcccccacctttcaccatatacaaaagttaactcaaggtggattaaagatttaaatccaccttacaagaccca

SEQ ID NO: 58930 - DNA, 2391 bp, Homo sapiens
ttgtcagcagaatctactaaagccttgagtgtatatgatgtgtgttgtgggctgaattttgtccctccaaaatttctatgttgaagccctaatttctggaacctccgaatatgactgtatttagagataagacctttaaagaggcaattcaattaaaaataagaccattaggttgaaccctaatctattctgactggtgtccttatattaagagggaatttggatgtacaaacagaaccaaggatgtgcagaaccagaagaaagatcatgtgagaacaccgccctaagtatctgcaagccatggagagagacctcaaaagaaactgaactctgacaacacctctatctcgctcttctagcctttagaactatgagaacataaatctcggttttttaagccatccagtttgtaatactttgttatggctgacacagaaaactaataaaagatacaaaaatacagtaaataatgcacgttacttgataaaaatcaagtaagaaacttttagtacataaattaggtaaataaaatgtaaaatgtttatcttcagcttctatacaaacatgaaatttactttgaacttctctgaattctcatatttcttctttaatttattccaggttcagataatgagtgtattataaacagagtctcaaacttaatttgataactgaaagtgactatgttggtaatttaatttcaaagttatatcttcagcatttatgtaccacagaaacatttcacaataacattctaaaattaatgaattttcccagaaaagtgattccaatcatttgaaactttttacttatgtacacgataaatttaatgcaaacataagccattccacaaatacatctaaatattatatcacaggatatagcatgtaatatatttctatagatcagtaggaaattcatgaaaattcaaaccaagtataagttttgtaaatcacactgtacttttccattgcttgtgttagtatttaacttttcaagtattttaatgctgttttccccagccagtctataaattcttcaagaattacttattgtaccacctacagcaaaatcagaaacatgaacaatataagtaatctatagtctgtatggatagaatgaatcaataattctaacagcctatgaaagtgagttcctagaaatatttacatatgtatatatttaattatatatatatttaattatagatatatatatttttttaataaagataggttctcactctgttgtcccagctagtctcaaactcctggatccaggcaatcctcctgcttcagccaaagtgctaagattacaggtgtgagtcaccatgcatgcctggccactatgaattatttttttttaaatcacattccgacctctgtttctacctcagtttggctttttatcccagtatgtcggaygatttccacaaaaatctttcaaaaagatgattgatgttgatgtctttaatgcaacaacattgagacatcaagtggagttacagctaacttgtgaagtagcttgaaatttctataaccaatggtggtgagtagacattattttggatttttaacaagtttcaacaaaattcaatgtgtacttaagtattataaaagaacgtagtgtagtggttaagaggtaagatcctggaatcaaattgcctgtgtcaccatttattatccttggaatttgggcaagttatttatcattttgtggctttgctttcttgtctatgaagtgggactgaacatatctaccatatagtgacattaggagtattacgtgcattatctttgtcaggacatactgaaatatgtttgcttctaaatataatctatggaagtgcttgttaaataagtgaataaataaataaatattatattgtttgcaaagattctaccattcaaaaagtattctttttctctttcattaagttttaccctatgcaaacaattccctgccagatttgttgatggaagctatcactatgaaaacataaagtcaacttttacatttttaaaaaatcgctgaaaagttgttgaaaaacttgttgcaaagaaatgattgcaagtaatggaaatatggagaagccacaaacagacataatttctccagttcttaagttttattccctgttgactagaccagtatcactgtcttttatctcacttagattcaccaaaaatatctaatcatttcaaatctttcatttttctatccctacctatttcaacacataaaaatgaataacttgatcagggcaaagtatccacaacagtgtgagaattctgctgtttcagtcagaatttttcctctcgaggcaagtctgtctatacttaatctttcctatttctttggtcttctgatcaaagttttttctgactcttt

SEQ ID NO: 58931 - DNA, 777 bp, Homo sapiens
  misc_feature (1)...(777): n = A,T,C or G
ggtgtgtttcatagttaataaatactaaaaattttcttttataccaccttgacatttaagaaagattagccgctagaagaaaatcagggtgggacacaaagttgggggacagaaaaccatggacangaagagtgagatgggggcgggtgcggtcgctcatgyctgtaatcccagcactttgggaggccgaggtggacagatcacctgaggtcaggagttcgagaccagcctggccaacgtggtaaaactccgtctctactaaaaatacaaaaattagccaggcatggtggtgcgtgcctgtactcctagctacccaggaggctgagggaggagaattactggaacccgggaggcggaggctgcagtgagccgaggtcgcgccactgtactccagcctgggagacagagtaagactctgtctcaagaaaaaaaaaaaatgaaagaaagaatgagatgggaggggtcccagtgcttggttgtcctgttgtcctgggctgatttttgcctatgctaatgcgcaatacagtggagttcagaggagtaaattgattcagtgtaaaaatcttaccagctgttcttagccttatgtctggacaatgtaaataaaacaatactgtatggatctttgctcttttttaaataacatgaatcttcagtttttctcttaaactaatattttatcttgtactttatatgacatcttgtctgggagttggggtcaggtgagatatttgtgatctcaatattcttgatttcatttgaacatttgacacttaa

SEQ ID NO: 58932 - DNA, 777 bp, Homo sapiens
  misc_feature (1)...(777): n = A,T,C or G
ggtgtgtttcatagttaataaatactaaaaattttcttttataccaccttgacatttaagaaagattagccgctagaagaaaatcagggtgggacacaaagttgggggacagaaaaccatggacangaagagtgagatgggggcgggtgcggtcgctcatgcctgtaatcccagcactttsggaggccgaggtggacagatcacctgaggtcaggagttcgagaccagcctggccaacgtggtaaaactccgtctctactaaaaatacaaaaattagccaggcatggtggtgcgtgcctgtactcctagctacccaggaggctgagggaggagaattactggaacccgggaggcggaggctgcagtgagccgaggtcgcgccactgtactccagcctgggagacagagtaagactctgtctcaagaaaaaaaaaaaatgaaagaaagaatgagatgggaggggtcccagtgcttggttgtcctgttgtcctgggctgatttttgcctatgctaatgcgcaatacagtggagttcagaggagtaaattgattcagtgtaaaaatcttaccagctgttcttagccttatgtctggacaatgtaaataaaacaatactgtatggatctttgctcttttttaaataacatgaatcttcagtttttctcttaaactaatattttatcttgtactttatatgacatcttgtctgggagttggggtcaggtgagatatttgtgatctcaatattcttgatttcatttgaacatttgacacttaa

SEQ ID NO: 58933 - DNA, 964 bp, Homo sapiens
tgcataaatctgctgaataagcatcagcatgtattttaaaaaccagtaaccgatttaagaagactgtacttaaaaattatgattcattctgcagaaggtatcttggacatattttgtgaagcatgacttttcatttagatcaaaggactgctcttccaaatgaatttcatttattcattttttttggtaagagttttttatgatataatttacatatattaaatcactccttttaagtgtagagttcattgaattttgcaaaatatatgcaatcatgtaaccaccaccacagtcaagatttagaacaacatcctcagccccaaaggtcagtaccctcctcccacttccagtacatagcagctactaatctatttttatgcctaaaatttcctttgtttaatatgtaattttaatgaaattatatacagtacccggccccttaacaagcagctttgctttccatgatttcaattatgttctgtgagctgaatcccaaaaatattaaatggaaaatcccataaataaacaatccataagatttcaattgcacacccttctgagtagtgtgatgatatctcacgctatcccactccatcccacccaggatgtgaactatctctttattcagagtatccatgctgtacatgctacctctcctttagtcacatagtaggcatcttggttatctcatcaactgttgcggtttcacagtgcttgtattcaagtaaaccttattttacttaataatggccctaaagcgcaagagtggtgatgctagtgattcggcaycaccaaaaagaagtcagaaagtgcttcctttaagtaaaaaagtgaaagtgcttcctttaagtaaaagagtgagaagaggaaaaaatatgctgaggttgctaagatccacagtatgaataaacctatctgtgaaattgtgatgggaaaaaaattgtgctagttttgctgtcacact

SEQ ID NO: 58934 - DNA, 626 bp, Homo sapiens
ccacctgacacatttttatatttgttttctgtttatcccactagaaatgtaagccccatgagaacagagactttacctctttatytatgtccctagtgcccagaacagtatttggcatatggcaagtactcagtagttgaatgaatgaatgaatcaaggctgaagtttaagtatgttgtttaatgaatgccaggagagaacataaagaaataaacagaataagcctggcacggtggctcacgcctgtgattccaacactttagaaggccaaggtgggggtggatcacctgaggtcaggagttcaagaccagcctggccaacattgtgaaaccccgtctctactaaaaaaaaaaaaaaaaaaaaaaaatagccaggcatggtggcacgtgcctgtaatcccagctgctcaggaggctgaggcagaagaatcgcttgaacccgggaggtggagattgcagtgagccaagattgcgccactgcactccagcctgggcaacaagagcaaaactccatctcaaaaaaaaaaaaaagacataaacagaataacatgaaccttgctcattgaataaacattcatctacaacctatatggcttcagctttgtactaggtgctaaatacatggga

SEQ ID NO: 58935 - DNA, 1284 bp, Homo sapiens
tgcatgcaactctctgtctgcaagagcttccctaaccctgttgatccttgtgactgtttccatctccatgagtcacccacatatcaatatttttctctggtggcacccaatttgcagagggaaattaactctcggctacrcaaattggattgagaggacatccctgatccattttaagtgaattgggacttaaaattttaaaaacacagtgtgattgagcatagacaatatgaaggaatgcagttagaattttgtggatataatatagaaactacaagagagaatcacactggacatctgactgattaggttgagagtatagaaaatgtactttttaaactaatgtgcataaggttattgaaaataggtgtaaacagcaatgtaataataatgataataataataaatcgcagttatctcaagggcttactatattacctatttttatttttataaccactctaggtataattataccccagaggaggaagatgagactttatgtaatttaaagcttaggtaacttacaagcaattatagcttgtaagtgtcagagctggggaactttttttgttttttaatgaacacatttagtgacctctagaatataagctccatgagggtaaagatggtttttctgttttgttttctgctgtgtcctagaggcaaatgcctgtcatggatttacagttaagaagctttcagagaccaggcatggtggctcatgcctataattccagcacttttggggaagccaaggtgggcggatcacttggggccaggagtttgagaccagtctgggcaacacagtgaaaccccatctctgtaagaaatgaaaaaacattagccaggcatggtgacatgtgcctgtagttctaggtacttcagaggctgaggtgggagtattgcttaaacctgggaggcggaggctgcagtgagccatcatcacgccactgcactccagcctgggtgacagacagagcagaaacctcatctcaaagaaaaaaaagaagaagaagaaaaagaaaagaaacattcacagtcagatttctgtcattcaatagactggccaatccctgttatttttgtttgctcttcagagtcaaggatgatgttgttgccatgtttttgagccaaaattttcagctattctcactggtagcagtaactcgagggcagagataaaactctacaataaattgtatggacaggtccaaacaactagagaggctgtaagcacctgaaggatgtcagtatgagcagagttcagctgccgtcacaaaa

SEQ ID NO: 58936 - DNA, 710 bp, Homo sapiens
gatcctgttctcaaggagatggccaagaagtaggacatacacatataattttcacagaaagggaagagattcagaagttagagagatgcaatgatggaagtttcacattaagaagcaaacattcctgactctgaataaggtgagttcaaaaagtttttggaggcagtgatattcagtatatttggaaatgtttaaaatgatgactaatgctttatttttttttcaaagttttttctaggtaattggtgttgcagaaatataacttcaatctgccgccagattggttcagacacagaaatcattgcttttatctcaatgtggagtgctattagtaggagtacttcatgctctgtattttagagagagcaatgggatgaacttggtattcaagccatatggcaacattataaatatggtcttgccttggacatgatgtttccaacaacaaaacgtggtcaacactgtttgcactacagccctactgacaactttctgctcctctaaggagcaggcagcactctgagtgccagatgagagttttatgacagttactggcagggcctgtgcttgctacctgggtcagcgacagtatcgaaagaaaatgcartctcattttagtcaccagggattgcttcttcgtcatatacatttagagtgtgtcttggatgaaatcagaaaatggcataatagagcaattaattatagcagaa

SEQ ID NO: 58937 - DNA, 1329 bp, Homo sapiens
acttcatcctaaactaaaacctggttcctaacaaagacaagagatagttagatatggacaattaacaaaatcatatctgcaaactgaagtaaccaaagttttttggaagatgtgttggtagcttctctcctctacattcacaaacacttttagaaactagaagcacagtagttttaaagaaataaagtcagagggacttggtacaaagcaaatgtaatgaggaggcaggagtcacataattgaataatgaaattttctacttgtcaaatgtaagtcatgccctattagagcagccactattaccaggatgattccaactatggaaaacaacataggggatgaggaagctttaaaatttatgaggaaaccagtagaattgcaacaatttacattttctccatatttcacaaggtctacatttaatttcaagcagtaatttaggcttaaatatggctattcaatctaatttaccaatataggtggtttttcctgcaacaaagcttctttaaaaagctttgtatagcatttgttaacttggtctttcaaaagataaataaggccaggcgcggtggtttactcctgtaatcccagcactttgggaggccaaggccggcggatcacttgaggtcaggagttcgagaccagcctggccaacatggtgaaagctcttttctattaaaaacataaaaaatgagccgggtgtggtggcaggtgcctgtaattccagctactcaggaggttaaggcaggagaatcgcttgaacccaggaggctatttcccaggcgacagagcccagatcgcaccactgcactccagcctgggcaacagagcgagactctgtctcaaacaaaacaaacaaaagataaataagagagcagtactagatgagaaactatttctgatagtataatcccagaaactactgtctttatcataaaatagaacaaacacatttgctactgaaaaactatcctgatctaaataccagttccagcagttgtgtttttttctggggactggaatgtacatagtttctaaaatgttcataggactttagaattatacaaaatgggccacatttttaaaaatctttacacacacaaccaccctgggtttattcatccccctaaagagctattttagaaccacctgagaattctaaagtgagcaacccactgatgagtaaatcacttttcaaaaccgatggactgtctccactgcacctgtatagaacctggataccccgcacagagggaatcttacrtgcatacctatatttcatgccagtctgctttgcggtggactctttgagagaaatgtgatgctgag

SEQ ID NO: 58938 - DNA, 558 bp, Homo sapiens
gcctgtaagtcccagctacttgggaggctgaggcaggagaatcgcttgaacctgggagacagaggttgcagtgagccgagatcatgccactgcactccagcctgggcaacagagcaagactccgtctcaaaaataaaaagaatgtggaatccgggggcactggcatggctattacctgccattgtgaatagaaatgtcctgagatgactcttaactcgggcatggtactcggcacttctcaaggaaacattctacatcacatatgtgttcttttcagctggtcggtttgaatgtaatacttgcaggtaagtttatctgtaatccttttattacctaaatcagccagtgcttactctgctrtccaccagttggactagaactcactctattctggcagaagggatatctgttttatgatgattgtgagatcttatttttattctccaaaatagagtttctaataagactattgttctatataaagcttttcctttaaattgaccactgattctagaagattggtgtaatctaaagatcttaagaatacttgggtgcttc

SEQ ID NO: 58939 - DNA, 652 bp, Homo sapiens
cttgaggtgaggagtttgagaccagtctggccaacatggtgaaaccctgtctctactaaaaatacaaaaaaaaaaaaatgagctgggcgtggtggtgtgtgcctgtaatcccagctactagggaggctgaggtatgagaatcacttgaacccaggaggtggaggttgctgtgagccaagatcaygccactgcactccagcctgggtgacagagtgagaccttgtcaaaaaaaaaagaaagaaagaagaaaggaaggaaggaaggaaggaaggaaggaaggaaggaaggaaggaaggaaggaaggaaggaaggaaggaaaagaaagaaacgttctagatagggaataactgcctccactttacagatgaaaaaatgagggtcagggaggttaagaaacaacacaccaagctagtaaagggtgcaaataggactcaacccaacagccccacatcccaacccaccacaatagatacttcactatattcttggtcacaaagtataagctcctgagggcatgcctgggcctctcaattctgtatgcttccctccctagagtggagcacacagtcatgtaaatttgcagcaagcagctcttatgggccttggaatctcactacctgggcttcggcttcctcatctgtcaaatggggat

SEQ ID NO: 58940 - DNA, 677 bp, Homo sapiens
atgttcttatccatctgggttattggcagaattcaattccttgtgttgacaggaccgagatcctggttttcttgctgtcaggtgaaggtcatggccaggttctacaggccacccacattccccggcttgcagccccctccccatcttgaaagcctgtgatagcaggtggagtctctctcatgctttgaacccttcctcctccttttgccatttcatttctaaccaagtccgtaaaaggttctctgcttttaaggattaatgtgattagatcaatcatgcccactcagataatccaggataaactccccatctctaggtckgtacccctagtcacttctgcagagttctttttgctacaacaggtatagtatgtttacaggttatgggaattagagcacagatggctggggcgctgctgttgttgtgcttactacagagcctgtgttttttcttcctcagtactttctccaaaaagcttttccactggtttgtagttccattggtacttgtttaattttaaatagtattcctttggttttgctagataaaactattgtaagctactagtacttgacaatgtatttgtgtaaaattgaatgagtgaatgaatatgtattatggctctcaaatctgataaattgcaaaatacaatagtaaaacaaactccagaaagacaa

SEQ ID NO: 58941 - DNA, 1426 bp, Homo sapiens
ttttttgagatttgagagatttctgaaccatgacttgggactattagagacatactaatgatactgcaaagactaagattataaatttctacagtagagctttcattttcaataaaccacataatcaaatatttgttatatgtaatttcaaatataaagctgagatattttaaactcagtaaaagcatttggataagtaaatattatgtaattgggaagggctaggcatgactcattttttttttccaaaaagtaaccttggttaatatttcaagatttgcctataaactgagcttccttgtctgtgactgactttgaaccttttaaaaccaaaacattaagttagatatcttgaagttyactgcatgtatataaggaattttatattattaagatgtgaatttagggatcccattattatggttccctctggcccccacccccatccactgggtatttgggtgtccattttcccacatggtgatggatttgcactttgcttcatcaggtctcccttgggccaagaacacattttagccataattattggagcagtctgtggcagtggaaaaccaaagttaactgaaccacatggaaataaaacccatgtcattggtgtcattaccagtacaccctaaccaacagagttaacctcaatgtaaacagcaggcaaaaatagcaaaacactccatcttttggagaaatcagtccgtttggaaagaatgcaataagaaggaaacacctgaactcattttttttggactaaaatgagatacaagtactgatttctttttttttaaaattatatatgtatgtgagtcaaaaaaaaatcacacagttggaaaaaaaaatgttcacagtgaaaaacattcttcactctccagtactcaacactgactgcccatctctcaggtaccctcaagagtcaacttctattaccactgtctaaattttatttccatctcagtgtacttgtttatgattatgctatgtgtgtgtgcatgcatacagtcatctccctttaataaatggtagcacgttatatacccatttttaaaaataatatataaaactttcatctgaaatttattctgctgaaagcagcgcagtatgaatcatactttatctctttttttccaaataaatgtctattggtcaaaaccatttatagaattatcaatctttcccccacttatttgaaataaaatcttactgggaactaagctctgtatatgtttgagtatatatctaggaatgctactgtttttatcatctgtctgattatttactactatcactaatttaacattgttttatgttttgataacttagaagaggtataaacagtaacatatcatgtagtaagagacatagattgctaagtgtggtactgttttataaatactaaaaactataattcatggga

SEQ ID NO: 58942 - DNA, 1426 bp, Homo sapiens
ttttttgagatttgagagatttctgaaccatgacttgggactattagagacatactaatgatactgcaaagactaagattataaatttctacagtagagctttcattttcaataaaccacataatcaaatatttgttatatgtaatttcaaatataaagctgagatattttaaactcagtaaaagcatttggataagtaaatattatgtaattgggaagggctaggcatgactcattttttttttccaaaaagtaaccttggttaatatttcaagatttgcctataaactgagcttccttgtctgtgactgactttgaaccttttaaaaccaaaacattaagttagatatcttgaagttcactgcatgtatataaggaattttatattattaagatgtgaatttagggatcccattattatggttccctctggcccccacccccatccactgggtatttgggtgtccattttcccacatggtgatggatttgcactttgcttcatcaggtctcccttgggccaagaacacattttagccataattattggagcagtctgtggcagtggaaaaccaaagttaactgaaccacatggaaataaaacccatgtcattggtgtcattaccagtacaccctaaccaacagagttaacctcaatgtaaacagcaggcaaaaatagcaaaacactccatcttttggagaaatcagtccgtttggaaagaatgcaataagaaggaaacacctgaactcattttttttggactaaaatgagatacaagtactgatttctttttttttwaaattatatatgtatgtgagtcaaaaaaaaatcacacagttggaaaaaaaaatgttcacagtgaaaaacattcttcactctccagtactcaacactgactgcccatctctcaggtaccctcaagagtcaacttctattaccactgtctaaattttatttccatctcagtgtacttgtttatgattatgctatgtgtgtgtgcatgcatacagtcatctccctttaataaatggtagcacgttatatacccatttttaaaaataatatataaaactttcatctgaaatttattctgctgaaagcagcgcagtatgaatcatactttatctctttttttccaaataaatgtctattggtcaaaaccatttatagaattatcaatctttcccccacttatttgaaataaaatcttactgggaactaagctctgtatatgtttgagtatatatctaggaatgctactgtttttatcatctgtctgattatttactactatcactaatttaacattgttttatgttttgataacttagaagaggtataaacagtaacatatcatgtagtaagagacatagattgctaagtgtggtactgttttataaatactaaaaactataattcatggga

SEQ ID NO: 58943 - DNA, 1193 bp, Homo sapiens
tgcatggcaaatatcaaagtggtgatgatttaccttggtcagacctcaccaagacctacttgggttatcaatgttaccacatgggtcctcacacaaattataggtaacttgggaattagctcccatgatgctatcaaccgacagtaattattctgttggtaaaaggcagtattgcttttgttaaattgatcaaacatttaggtaaagtcatggtattgagatcagtatcagaatgaacagggatctcactctggtgattgccactttgataggcatcagttatcaccttaggaaagcaggtaatttcatacacatttgaaaggacaaaagaagataccactcacatccatgctttcaacactagggttacagaccacagggagattttaacttattctcctttagattccttctttttttccagttcacttgtaatgactctccaagaagagaaatagacactggaaaggtattgaacatttagcctgaacatctactggcatgaatattgcacgggaaaatttttctatatctgttctgtggtaccagtgtctacaactgcacattcctctaagaaatacagtcccaaaagggaaagggtagagaaatctgacctcaattgtgggcaytggtgtgagaaataacacattgtctacagctcaaaagcagtggaatcaaggtagcatcagacagaagacggcagccattgtggacagctgtctctcagtggctccagaactgcattgttctcacatgagatttgtctatgagaagttcagcccatatccagtaatggttctgagaatctgaatatcatcttcatttaatacccaacaaatgatacattttcacatacatacacacaagatccttgcttctggaaagtaaaggttgcccaaaaacaaaacaagaagaatcattttgcggttgtatggcttcacctttagtatttatctcaaaaggggtcaaggaaaatgggagggtcttggctctcttatttgatattatctcaatatatacaacttttagatcctcttcctttccaaaagtccaatttcattcctttttctgagaagagcaataaacagtgaaatatgaatgagtaatgaaagtttagcatggtcaagtctagtcataccaacctcaaattgtgtataactattatcattgctaattaggaattatgaagtata

SEQ ID NO: 58944 - DNA, 741 bp, Homo sapiens
ggatcccaatagtttarataaatgtggacttaacaaaaacaacttatatgtatattaattgaatattagttgagtatttactatttgccaactactatatagagtgccaaggaaacagtggtgaacaaaacaggcactcctcctatcctcaagatataaagaaaaattgtagcacactgtgggtgctcataacagagactacacttcaaactgtgaagcttctttaaggaaattacatataagctgaaacttgaagaccacatataggaaggaagggagacggcagggatagatcgtggcagatggcattttgggccaatggactcatacattgttgatattgatgatgacatttatcaagattcacagagtgaaatctagcagtaatagtattcttactctttgtacaagattacatatttctcaacatttatatgcaaagaacttcaattttttgataatttgaactttattataaaataactttctttactcattcatccatagttactggcaatctccaaacgaaaaatttgcctaattaagattttcaccttgggtggttatttaagttattctgagaagcgtaaagtctaaaaaggagggattctacatatttttagtaaactgtgtactattatgaatatccttgaacattttttgtatgattcatgaggattttctcagacttatgaatattactatcatatactggccttaaactaattttcccatgtgttg

SEQ ID NO: 58945 - DNA, 741 bp, Homo sapiens
ggatcccaatagtttagataaatgtggacttaacaaaaacaacttatatgtatattaattgaatattagttgagtatttactatttgccaactactatatagagtgccaaggaaacagtggtgaacaaaacaggcactcctcctatcctcaagatataaagaaaaattgtagcacactgtgggtgctcataacagagactacacttcaaactgtgaagcttctttaaggaaattacatataagctgaaacttgaagaccacatataggaaggaagggagacggcagggatagatcgtggcagatggcattttgggccaatggactcatacattgttgatattgatgatgacatttatcaagattcacagagtgaaatctagcagtaatagtattcttactctttgtacaagattacatatttctcaacatttatatgcaaagaacttcaattttttgataatttgaactttattataaaataactttctttactcattcatccatagttactggcaatctccaaacgaaaaatttgcctaattaagattttcaccttgggtggttatttaagttattctgagaagcgtaaagtctaaaaaggagggattctacatatttttagtaaactgkgtactattatgaatatccttgaacattttttgtatgattcatgaggattttctcagacttatgaatattactatcatatactggccttaaactaattttcccatgtgttg

SEQ ID NO: 58946 - DNA, 782 bp, Homo sapiens
aaggatcagggagggcagtcagggaatgatgttccagactcaagtaagtgtggaggtgagaaagagtttggtgtgtctgaagaactggaggaagaccccacagcttaggtacactgagcctgggggaagcgattacagtgaggtccagggccatgctcaggatttgaaactctttttttttttttttttaagtacaatcagaaggcaatcaggagtttaaaggagaaggatgacaagctttgatttatttttttttttttcaaagatcacttgggcctctgtttggagaatgaattgaagcagcacaggattgaaggatgaatatcagttaagaccataactgaggataacagcagggttctagggagatgaaagaatcaagaaatgttggcaaaaattccatatctgtgggttaggtggcccagaaagatttctcaaaatatggtcccaacatggagtaaggcctcgtgtaacatgaccatctgatgaattagccatccttctctttaccaagtaccgactttatattttatttctgtgtcacatacaatgtacgtaagtgcaaaagaaagggcaaacattttaaaaatattttcaacaggtccatatattttgagccaaaggcacgaacataatcctcaggtggttcaagatcattagctttcatgttccaaagggagatgatatagttagggtattttcccatgccccaatctcatgttgaagtgtactccccagtgttgsagatggggcctgctgggaggtggttgggtcatggaggt

SEQ ID NO: 58947 - DNA, 782 bp, Homo sapiens
aaggatcagggagggcagtcagggaatgatgttccagactcaagtaagtgtggaggtgagaaagagtttggtgtgtctgaagaactggaggaagaccccacagcttaggtacactgagcctgggggaagcgattacagtgaggtccagggccatgctcaggatttgaaactctttttttttttttttttaagtacaatcagaaggcaatcaggagtttaaaggagaaggatgacaagctttgatttatttttttttttttcaaagatcacttgggcctctgtttggagaatgaattgaagcagcacaggattgaaggatgaatatcagttaagaccataactgaggataacagcagggttctagggagatgaaagaatcaagaaatgttggcaaaaattccatatctgtgggttaggtggcccagaaagatttctcaaaatatggtcccaacatggagtaaggcctcgtgtaacatgaccatctgatgaattagccatccttctctttaccaagtaccgactttatattttatttctgtgtcacatacaatgtacgtaagtgcaaaagaaagggcaaacattttaaaaatattttcaacaggtccatatattttgagccaaaggcacgaacataatcctcaggtggttcaagatcattagctttcatgttccaaagggagatgatatagttagggtattttcccatgccccaatctcatgttgaagtgtactccccagtgttggagatggsgcctgctgggaggtggttgggtcatggaggt

SEQ ID NO: 58948 - DNA, 782 bp, Homo sapiens
aaggatcagggagggcagtcagggaatgatgttccagactcaagtaagtgtggaggtgagaaagagtttggtgtgtctgaagaactggaggaagaccccacagcttaggtacactgagcctgggggaagcgattacagtgaggtccagggccatgctcaggatttgaaactctttttttttttttttttaagtacaatcagaaggcaatcaggagtttaaaggagaaggatgacaagctttgatttatttttttttttttcaaagatcacttgggcctctgtttggagaatgaattgaagcagcacaggattgaaggatgaatatcagttaagaccataactgaggataacagcagggttctagggagatgaaagaatcaagaaatgttggcaaaaattccatatctgtgggttaggtggcccagaaagatttctcaaaatatggtcccaacatggagtaaggcctcgtgtaacatgaccatctgatgaattagccatccttctctttaccaagtaccgactttatattttatttctgtgtcacatacaatgtacgtaagtgcaaaagaaagggcaaacattttaaaaatattttcaacaggtccatatattttgagccaaaggcacgaacataatcctcaggtggttcaagatcattagctttcatgttccaaagggagatgatatagttagggtattttcccatgccccaatctcatgttgaagtgtactccccagtgttggagatgggscctgctgggaggtggttgggtcatggaggt

SEQ ID NO: 58949 - DNA, 650 bp, Homo sapiens
ccacgtgtaattctaagtcctattttcacatcccgtgtgtataagagagaaaagacttttcacccattgcaaggttcatggctgaggcacttataacaaaaatcagattagcaagaaaaaatcagacagatctgtttaatgtaagttttacatgacatgggaaccttcagaaacaaagccccaaagaaacaggaaaaactgtccattttaatgcttaggtttggtaagcagcaacagttgtatagaagtataattggacaaaggcggtgggatctaataggagtaaaccaggaggaaatgtaggaaagcctgtttgttgacattcatcttgtcctccctgtgtcttcagacaggacatttctttactctgggtatagggaggacccctttggaatgagtcatgacctcttttcagaggaaggtcaactaggttttatggcccacttcaggcaacttttgaggaggggtgggtgaagttttttctagtatctatggccggcttctgctgttttcccaagtgccaagtttccatatttgggggaagtgtgtcctgaaccctgtctcattataaaataaaattagcatggatggtgagggcattctgctgcctgggaacttgggtrgggggtacatacgtttcagcttcagtg

SEQ ID NO: 58950 - DNA, 1215 bp, Homo sapiens
ggaaaagcatgtactctatccaccaaactgagacattctggggagcaaaaggaaacactcttgataattccattgggagggcaacgtatacatcaagactttcctaggcaaaccaggacatgcgttcaccttatctataaggatagaacttggaaaccgatagtatgatgatgactgcatccaggttgggggactctaagtcctaactcctctctccattctagtcttgtgtttatcttcgtatctcaaaggtgatatattagtccattttcatgttgctgataaagacatacccgagagtgggtaatttgtaacaaaaaaaaaaaagaggtttaatggactcacagttccacatggctggggaagcctcataatcatggtggaaggtgagtaaaaggcacatattccatggcagcagacaagagagaacttgtgcaggggatctcccctttataaaaccatcagatctcatgagacttcactatcatgagaacagcatggccaaggcccgcccccatgactcaattacctcccaccaggtccctcccatgacatgtgagaattatgggagctacaattcaagaagagatttgggtggggatacagccaaaccatatcaggtgatgctatgaatccttcagaatgggtgaaaccctcctgcctcagtcaagctagaccaatacttgatcattttagtcttttcctgattggtcatatcatatgtactctgtcttaatgatcattgtaatatactctatctctaagtaacaactgtaataaaggatctgaatctattattttcttatttagagactgggtctcactctgtcacccaggctggagtgcagtagtagtgtgatcatagctccctgcagtcctgaccttctgggcttgagcagtcctcttgcctcaacmccccaagtagctgggactacaggcgcgcaccaccatggttggctaattaaaaaaatttttttagagatatggtctcactgtgttgcccaggctggtcttgatctcctggcctcaagcgatccttttgcctcagacttccaaagtgctgggattacaggcatgagccatagtgcccagcctgaatcaatttttaatggctgaccactgatagttttcaaattctatgccttatccttttgtttttgtcccacagctggacaagccaatgagaaagcctgggagctacccgcttggaaagca

SEQ ID NO: 58951 - DNA, 1026 bp, Homo sapiens
ttcagtagttagactaagctcagacactgtcaagtcatggctaatgatacatgccggtatattaccttactcatggaatgtattcaataaatgatgccttaatcagtgaaactatgtaattgcagataactagactttttttaaaagggctaaacaagcaaacatttgtaagaggctgaataaatagctctccttcacaacatgagttttgcatcagttgaggtagacagaggactcaggacgaagtgagttcaaaatgttggtattatcactggtgaattgaatactggaggccatgattaggtacgtagcagccctggggttccctggatagagatccagaagtgggcaggcttaccctcagaactgcaagaagcacagaaccacccactgccctatcttgcatggctaatagcagatctgaagtggggtgtgggagaagccaggctgagctgccaaaggcagggaacccaggtgagaggccaggggtagggaccagggaaatatcttccaacagaaacccaaggcatgtcagagaagggctcccacgaaactagatcatgttcttgattctatctaatatctattaatcaccaaaataaaagaaaggcttagaggttcttccaaaatgataaatacatacttgtgagcctaaaygaatatgttagctaaaaaaaaaaaaaaggtctccaattcgcttacatagctgtcttccccatttttgagaagatgctgattatttcagtgggaagcattatatgtaagctggtggaatggctctgggctgaacttacccagaatggtaaatcatcatcttacttgtgaagataatgtgtcagcagaattcatatctgtgctgattatttactttaatgctgataaaaagtgaaatgaactgcttgaagaaaaaatattcatggtagacagcagcgtgcagaggctggtactgacagctacaacgaatggcttggtggaccctgatagtaaatgcaattactatccaactctgtaattagacactctgaa

SEQ ID NO: 58952 - DNA, 1026 bp, Homo sapiens
ttcagtagttagactaagctcagacactgtcaagtcatggctaatgatacatgccggtatattaccttactcatggaatgtattcaataaatgatgccttaatcagtgaaactatgtaattgcagataactagactttttttaaaagggctaaacaagcaaacatttgtaagaggctgaataaatagctctccttcacaacatgagttttgcatcagttgaggtagacagaggactcaggacgaagtgagttcaaaatgttggtattatcactggtgaattgaatactggaggccatgattaggtacgtagcagccctggggttccctggatagagatccagaagtgggcaggcttaccctcagaactgcaagaagcacagaaccacccactgccctatcttgcatggctaatagcagatctgaagtggggtgtgggagaagccaggctgagctgccaaaggcagggaacccaggtgagaggccaggggtagggaccagggaaatatcttccaacagaaacccaaggcatgtcagagaagggctcccacgaaactagatcatgttcttgattctatctaatatctattaatcaccaaaataaaagaaaggcttagaggttcttccaaaatgataaatacatacttgtgagcctaaatgaatatgttagctaaaaaaaaaaaaaaggtctccaattcgcttacatagctgtcttccccatttttgagaagatgctgattatttcagtgggaagcattatatgtaagctggtggaatggctctgggctgaacttacccagaatggtaaatcatcatcttacttgtgaagataatgtgtcagcagaattcatatctgtgctgattatttactttaatgctgataaaaagtgawatgaactgcttgaagaaaaaatattcatggtagacagcagcgtgcagaggctggtactgacagctacaacgaatggcttggtggaccctgatagtaaatgcaattactatccaactctgtaattagacactctgaa

SEQ ID NO: 58953 - DNA, 607 bp, Homo sapiens
aacgctgatatagcagtaaaggtattttgtagatgcggttaacatctaacaatcaaatactgatataggagtaaaggtattttgtagatgcggttaacatctacaatcagtttactgtaagtaaaggagatcaccctccataacatgtgtggccctcatccatttagtcacagcccttaagagcaaaaactaaggtatcctggagaagctattctgcctcaagaccacagcatcacctttctgcctgaggttccagcctgaggacctgccctataaatttcagacttgctaccaccacaataacataataccttaaaataaacaaatatatatactatctccttggttctatttctctgaagacccttactgatacatgcaagagagactctctatgtgtggaaaactccagttttccaaccttttctgattgyataatctctacctcctacatgtatctcagctcttacccttctcatagaaactatcaaatagtcttgggtcacaatgcaatgtttcagtcaacagtgactatacatacaatggtggtctcctatgattataatactatatttttattgtactttttctgtatttagatcttttt

SEQ ID NO: 58954 - DNA, 766 bp, Homo sapiens
caatgctctaggattccaaaacctgttggtgaagtcgtaatggaatctacagtcaaatgagaggatatggggatgcagtgtttgatgggattaaggtgaagattggattaaaatggaaatgtttgaatggatattatgtaaagtggttacatttcttgtccccggacatcccttccagaggaggaaagtttgagtaagaataaaccacaaatggagagaacaagaactagcagttggggataaaggaatgaataaatgggttattgcaacgaggaaaatccaattttacattggtgccttaagagaggctcagaggaagagaataatattatctcttagcasaattatactagatacccacacgggtgaagctatgtatttgtcacattcatcttgcttctggaacctgacaagatggaatagaagccggcaaacctgagtagcgctgccctgggagacatgctggtcatacaatatgatgaactggaggaatggttaatgagtgagtagagctctagtaataagtcaatacctctgacccttatttttcaggttttatctactacaaaggatatcacttgggaaggaatttcttgaaactgctcccaagagagccattggaccatgtggtaaacaactcctagctgatggattattgggtaaagataaacctggatgatcccatgctcagaaagtttcctgattataatgaataagatgtagcagtggcatgcccaatattccatagtatgctatgcacaaatat

SEQ ID NO: 58955 - DNA, 848 bp, Homo sapiens
gaaattcctctgagggcagaggaggtgggaggccagagtcttctagatgcctgtctccttctgtttatccaggcctatcacagcctctgccgccccctccaagagaggctcaagtatttaatgactggcccctctgccccccacttcccagccacccccaccccctcgcagggacactgcctccccaggtgccctctcccaggtgtgtgatggggtgttaatcctcagcggaggaggatcccaggtgtccccactgggccccaccttgctcttttctgagtccttctgtctgtgccctgtggctatttccagggagggcaggaggaggccacagaggcaagcttctctccagtcctgggccttcttcrgtggactggcctccatcacaggccccgttgcctgaggaatgaggccaaaataatggcagatacagggcctctcagaggctgagccaggcctggcccacttccatttttagagattcttgatctattaaaaaatgaagaaatgccgtaacagggttagggaaattgtggtgtattcagtcttatgatgactgtcttctttccgtcctgtcgctgtgcctctggctgtgtgtcctcaagtggagacaatgtcagatgtccatattgagaccccttgtaacactgagaccctacagagcctctgcccagtcctgtccctaggctccccgggtgtgtgccagagaacccggggttcaggtgtcctgtcttgtgtcttttgaaagtatggagcttcagttcacaaagtccccttgcagacatgattgcctgggttcttctgcagctcagaggggaaggcaagggggtcatccttattttacagcc

SEQ ID NO: 58956 - DNA, 712 bp, Homo sapiens
ccatgctggaaccttgcaggaaggacctggagctggggtagccagggagagatcaagagaagatggaatttcttctgtaggtgactgggaacccgtgaaaggctttcaaaatataatacttattatattttttattatttttaaaatttattttatttttattatttatttctttatttttttgagatggagtctcactctgtcgcccaggctggagtgcagtggcgtgatcttggctcactacaagctctgcctaccgggttcacgccattctcctgtctcagcctcccgagtagctgggactacaggcgcccgccatcacacacggctatttttgtatttttagtagagatggggttttaccgtgttatccagggtgctcgatctcctgacctcgtgatccgcccgccttggcctcccaaagtgctgggattacaggtgtgagccaccgcgccyggcctattatttatatttattatgattatgattatgttttttctctttattacaaagtaatatatgttcattgcagaaattttggggaaagttggagaaaagcagaaagatgtcagaattctctgtattcctacccagcagtggaaatgactgttaccattttggtataaatccttttcacctactcactttctttttccccaaaatgagatcaaactgtatattcagtttcaaagagagagagaccgggtcagaa

SEQ ID NO: 58957 - DNA, 553 bp, Homo sapiens
gaggtcatcttccaatggttaaaatcataaataattatatctgcatattatctattgtgctatatggacttcaaattatctttcctgggttactgagtttgttgcacaagtatttgtgagacatctctttataatttgcaataatattgataagtgagggtcattatgaaagcagccgagaattttttttttaagttcacaatgtaactaaagtatacagtcaataactccagatctgagccttaaatcctaaaaccctgatatggccctatggcttaacccaaattccagagaccatgtagccagttccctaatatagacaacattctagcaactgaggtgaaacgggtgtgaacaggagctgcagctatttagaaacaaaatctaagtgaggctctagtacataatataggtgaaatatatactgtggctcagagtgggattgcagcagatattctgacaaatagatatgttaccagcttaacattcctaaattggaagaagctccrttcttaccaccaccaactccaagaacaatttttaaggcaatttc

SEQ ID NO: 58958 - DNA, 553 bp, Homo sapiens
gaggtcatcttccaatggttaaaatcataaataattatatctgcatattatctattgtgctatatggacttcaaattatctttcctgggttactgagtttgttgcacaagtatttgtgagacatctctttataatttgcaataatattgataagtgagggtcattatgaaagcagccgagaattttttttttaagttcacaatgtaactaaagtatacagtcaataactccagatctgagccttaaatcctaaaaccctgatatggccctatggcttaacccaaattccagagaccatgtagccagttccctaatatagacaacattctagcaactgaggtgaaacgggtgtgaacaggagctgcagctatttagaaacaaaatctaagtgaggctctagtacataatataggtgaaatatatactgtggctcagagtgggattgcagcagatattctgacaaatagatatgttaccagcttaacattcctaaattggaagaagctccgttcttaccaccaccaactccargaacaatttttaaggcaatttc

SEQ ID NO: 58959 - DNA, 516 bp, Homo sapiens
gcaagaagtctgtgctggtcagagtgtgtacagttaaggtgttcgaccctgggaaccaatacaaacactgaccatctaggactcacagttgagggaaacagacccattgaaatgctgcctgacaagcctcaggaggagcagatggagggccctagcaccagttagcacagagacaggagcagtaagaaaggaggtagcagtggccatcatctatgtaagggatgtcatctggaagaaggctgggtgagttctatgtctctacaaacagggaagtgggagaaagtcacagggaagcaaaatctaaygtgcaaaattaaggcgaaattttcctagcatgtagaggtaatcagaaatacaacaggttgttctgcaaatgaacaatcttgctttattacatgtgactcttgttgcctgaaagctcaatggacatgggcagagacacactgctataaacaaggagctcactggatctcaaccacatgaagacaaggcctctccctgcaaccaaaaacagac

SEQ ID NO: 58960 - DNA, 710 bp, Homo sapiens
gttcattttgtgtcatttgtcaaactttttgtctagagtttagtattcccatattaacctttcaatatctgcagggtctgtaatgaaatctcctgtttatctcttaatattgatatcttttctcttttttcttcgttagttcattaattttattgaactgttcaaagaaccagcttgtggttcattgatttttttcaatttttttaaattgtattgatttctgctctttattaattccttacttctacttgatttgtgtttattttgcccttccttttctttgctcttgaggtgggagcttattgatttgggacttatcttcttttctaatatatgcatttagtgctataaatttctctctcaagtattgctttacctgtttttttggcaatttttgatatttaattttaattttaatttattttatgtatttttaaaaatttccctgagccttcctctttgacctgtggattatttagaaatatatttagyttgaaaacatttggagattgtctggttattgattttcagtgtgattctgttgtggttggaaagcatactctaagtgatttaaattttttaaaatgttgttttgttgaggtttattttatggctcaagatatggtctgccttggtatatatcccttgggaacttgaagggaatgtgtattctgttgttgttgagtggtatgttctataagtgttgagtg

SEQ ID NO: 58961 - DNA, 1025 bp, Homo sapiens
ttcatttatttccagaccatccaggataatcatctgtatttgtttcctgttgctgtataacaaactgccacacactggtggcttaaaacagcacacatttattccctttagttctgcagataagaaacctaaaatcaagacgtcagcagagcactgttccttctggaggcttcagagagattttgtttccttgcattatcagtgtctgaggctatctgcattctcagttcccggctccttccttgaagaactccagtcactcactctgtcatcatgtctgctactaccaactctgatcctcccatcttcctctttataaggacttgtgtagttacattgcgcccacctggataatccaagataacctccccacttcaagaacttaatcacattggcaaaatctcttttactatataaaatagcctattcacagcctctggggattaggacatggacatctgtgggggtcattattcagcctaaagctaatcttaatttctggcattaattgagtgaatgctatacaatgggcactacacaaaacactttatatactttccttggttcacttcacttcgctgccactcctaaaggttgttttattattgtcatctctgttttacagatgaggaaactgaggcaaagaattgttaagcacattcattcgctcacataggtatatcaaaatcgagactgaggttcaggttgatctcaatcttaaaattattgtaccatttactccccagactggatattgtcattgataatttgtttcttataatttgtatatttttacaaaaagacttttacagaaagtcacaagatgtccaatctactccctcctctctcttcctggacarcctgttctcttaagctgccccgggctttccagaccagaaaaatatttaacagattcattcacactaaggcactagaagtttaatctgccaccggtctcaggagtttttgcattttaaagaaggttgggaagaaggaaggaagagagaaagctggaaggaagaaac

SEQ ID NO: 58962 - DNA, 713 bp, Homo sapiens
ggatccactgggatgaaaagcacaggaggcaattttccatgtgcacatgcagtccaaattcttcttgttaggtctgacatggagcactatttccataatgcacattaataaggcaattttcttagaaaaataaacggagctgcttgcatggcttattcaactcaatttccatgggaattcagtgctttggttcactatgaagaaggatggaacccttccacagcagggctcttaactcggaggttcactgctgacctttaacatatattttcataacttcccttaaatctacagtgtggagaaaacaaccttcctgctcttcattctccagggcttatgtgctcatgttgcgctagtcatgttgcattatatgttgtaactaagaggaactgaggtgatgcatcataatgagatatcctaggaggagaattcgaaagcagagaatgacaggtggatggcaaagaatcggcgccttgaaattacagacaaatgattctcatggagataccttccccttacctcacgatgctgaggccacaccggtttgatttcgttctaagcataattcatgggtctcaggaacatactttattagtcacagagtgcatataaagatgaactcaacatgatcctcrtcctctcagggctaacaatcaagtggaagagaaagacgtgcgcaaaaaggggcatagtaattatcacagtgcatcaga

SEQ ID NO: 58963 - DNA, 578 bp, Homo sapiens
ccttacatgctgtaaccctttagaagaaataaattctcctctgtaagctcacaaattgtatggtttttcagttaacagccctctgctgaaagtttgcaaaatgggatactcactacctgccattcttccatatgtccgcctgcttttgttcagtcttccagcaccttcaaattatataatatatatatgaaataaatttttctagtttatagtcrttatctgtgggagagttactctgaaagcagcaagaagccattaccagatgcagatctcattctgtcagtaatggcaacccagcaaataggacaggagccccacccaggttggatcaatgcatggctgtataaccttgagcaagctgcttagtcgacctctgaagtcagtactgctgtatgagaaatggagatatgaaaagaacaggagtgctagggtgcccaagggagaaaagagtaggtaacaagattttcggtcaggagcatgagaaacagggagagggtcaccattaactccccttcttcaccagagttttctggcacccaagactacagaaactctcctgcagtgggctttggggcaca

SEQ ID NO: 58964 - DNA, 578 bp, Homo sapiens
ccttacatgctgtaaccctttagaagaaataaattctcctctgtaagctcacaaattgtatggtttttcagttaacagccctctgctgaaagtttgcaaaatgggatactcactacctgccattcttccatatgtccgcctgcttttgttcagtcttccagcaccttcaaattatataatatatatatgaaataaatttttctagtttatagtcattatctgtgggagagttactctgaaagcagcaagaagccattaccagatgcagatctcattctgtcagtaatggcaacccagcaaataggrcaggagccccacccaggttggatcaatgcatggctgtataaccttgagcaagctgcttagtcgacctctgaagtcagtactgctgtatgagaaatggagatatgaaaagaacaggagtgctagggtgcccaagggagaaaagagtaggtaacaagattttcggtcaggagcatgagaaacagggagagggtcaccattaactccccttcttcaccagagttttctggcacccaagactacagaaactctcctgcagtgggctttggggcaca

SEQ ID NO: 58965 - DNA, 578 bp, Homo sapiens
ccttacatgctgtaaccctttagaagaaataaattctcctctgtaagctcacaaattgtatggtttttcagttaacagccctctgctgaaagtttgcaaaatgggatactcactacctgccattcttccatatgtccgcctgcttttgttcagtcttccagcaccttcaaattatataatatatatatgaaataaatttttctagtttatagtcattatctgtgggagagttactctgaaagcagcaagaagccattaccagatgcagatctcattctgtcagtaatggcaacccagcaaataggacaggagccccacccaggttggatcaatgcatggctgtataaccttgarcaagctgcttagtcgacctctgaagtcagtactgctgtatgagaaatggagatatgaaaagaacaggagtgctagggtgcccaagggagaaaagagtaggtaacaagattttcggtcaggagcatgagaaacagggagagggtcaccattaactccccttcttcaccagagttttctggcacccaagactacagaaactctcctgcagtgggctttggggcaca

SEQ ID NO: 58966 - DNA, 578 bp, Homo sapiens
ccttacatgctgtaaccctttagaagaaataaattctcctctgtaagctcacaaattgtatggtttttcagttaacagccctctgctgaaagtttgcaaaatgggatactcactacctgccattcttccatatgtccgcctgcttttgttcagtcttccagcaccttcaaattatataatatatatatgaaataaatttttctagtttatagtcattatctgtgggagagttactctgaaagcagcaagaagccattaccagatgcagatctcattctgtcagtaatggcaacccagcaaataggacaggagccccacccaggttggatcaatgcatggctgtataaccttgagcaagctgcttagtcgacctctgaagtcagtactgctgtatgagaaatggagatatgaaaagaacaggagtgctagggtgcccaagggagaaaagagtaggtaacaagattttcggtcaggagcatgagaaacagggagagggtcrccattaactccccttcttcaccagagttttctggcacccaagactacagaaactctcctgcagtgggctttggggcaca

SEQ ID NO: 58967 - DNA, 779 bp, Homo sapiens
agacactgcctttctctgaaaactgcccttacctctttgttacaattcacttcaagatctgttgagtaggaacatcaaaaatgcaaataaaaagtttcaagtattatgaaagaatgcaataaaactgcctttaaaaaaaatctcaagatggaggtggagatcctgtgatcatgaaatctgaataggctgctcctgtgtccttcagtggtgatggctctgaaacccttgtgttttatgaacttcatgccctggtcttcaaacgaattcagtgcaggccaagaagcacagtttggcctgggttggatgctctatattttcaaacagtgaaatgccttgagacacagcctttgctatagtacctgctaaaacttcaacgtgtggataaatatagcttacattgaatcgaatagactcagcgagagtggcagtgaaggatgccctctggaagattcgaggtgctgaggccaaagggctagcaaggaaagagcgtgcaggtcaggcccttcagcctggtggaagagcaggcagggagggtcctatggttcctgggaggacccgaagcatgatcrcctgtcaagagccaagagccctaatggccagcgccggggaaagggcccccgaggggcagtcagcagccctgcaggggcggcgttcacactcctgtgtggcacgggacactcatggctccaccagctcctgaagcttctgggagccagagagtcagcagggagaatcccacacacgggcactcagttcctggaaaccctgcatgagatgcg

SEQ ID NO: 58968 - DNA, 660 bp, Homo sapiens
ggatccaacctgatcaaattcttggaccttggacaggcctgattgtttaggtcatggtagacaatctttggcacatgattctagcaagagcctttaatacccattcagacttaygcaagtattacaagaaaaatgcaagtatatactaccaatggcctcttctcttttttttgttttcttcagaaatcaaggtaggaaaatttgatttacctggaatttgtagaagatttcctctttcagttacgatggagttttgtggcaaaccagcactcccttcgaaaagaagtagataaaatctggtttaaaggaattctgtttgaagtctttgaaaagctaggacccacagggccagctacagaaagcgggtggagagagagagagagagaaagaagatcattggaatgaaacaatttttccccctcagggtatttgctagttcttggcaagggacaagaggctgagaagctggggagagggcagtggttaaaaaccagagaaaacagcagcactttaagtaacctcatgggggtggggagtgggtagacgtgtggagctgtccaggtattttgacttgaaaagccaagattctagaatgaattgagatgtgaactgaacacttggtaaaggttttcccctcaaggcatttgtgaattcagctct

SEQ ID NO: 58969 - DNA, 740 bp, Homo sapiens
cctgctttttcttctaaacacctgtgggacctccccttccttctcataacagcacccaccctgaccccaccccagcacttgctgcatctttcttttacccagtggattgttgggtcctcatggctgaggaagttgtaggcttcactctacttcctggtaggctctgctcttgagattctatcgtcctacaggatctccactaataatctaacctctgtaagccataattttgtttcaattgctttaggtagttttggagaaaagcctggccattgtgaagacatagacatctttcttctctgtccttcctttcaaagacggctgtaagagagctcttcatgagaaaatgtcccagcagaaggctgggatgcatcagccctcagagaagaagggacctgctgagaagggagtgaatgagcagaagcctcgggttgaggaagaattctctgtatcctgcagtgggcaagagacttcccactatcagcattaagtcattgctcrtcagagcagctttcagggcctgcagccagcctccataccttaattgtagggctttctcttaacaccttcctggaaatttcttcagagaaaaatctataaaagttttattagtaatgactttatattattcagagaaatttggttttattctaactaacattgcctgtattcaccaaatatatggcctttgtggttacctgagctggaaatcttccagtcatgtgagtggtctctcttct

SEQ ID NO: 58970 - DNA, 740 bp, Homo sapiens
cctgctttttcttctaaacacctgtgggacctccccttccttctcataacagcacccaccctgaccccaccccagcacttgctgcatctttcttttacccagtggattgttgggtcctcatggctgaggaagttgtaggcttcactctacttcctggtaggctctgctcttgagattctatcgtcctacaggatctccactaataatctaacctctgtaagccataattttgtttcaattgctttaggtagttttggagaaaagcctggccattgtgaagacatagacatctttcttctctgtccttcctttcaaagacggctgtaagagagctcttcatgagaaaatgtcccagcagaaggctgggatgcatcagccctcagagaagaagggacctgctgagaagggagtgaatgagcagaagcctcgggttgaggaagaattctctgtatcctgcagtgggcaagagacttcccactatcagcattaagtcattgctcatcagagyagctttcagggcctgcagccagcctccataccttaattgtagggctttctcttaacaccttcctggaaatttcttcagagaaaaatctataaaagttttattagtaatgactttatattattcagagaaatttggttttattctaactaacattgcctgtattcaccaaatatatggcctttgtggttacctgagctggaaatcttccagtcatgtgagtggtctctcttct

SEQ ID NO: 58971 - DNA, 673 bp, Homo sapiens
aactgacagatgatccctttttttcatggactctgcacccagtcaatgtcactgcctcctcctctgtgaggaagactcttggcagagctgccccatactatccttttgaaagaagactctgttaattaaaaacccctgtgcttccaggagacattttttaggcaaattattgattccaattcaactcgaaggaaatgttccctgcaatcttgggaggactccctgagatggtaaccttttcccaaaattttttttttttttttttttttttactatttgttaagcttccttgtacatttggaaattatataatcctctaataaaaccaaaatgaatataattgggttcttcagtggattcaagtatttgttcatttccaaaagtggagagattttatcattttggtcgcttttatcccctctgtaaatttagcttggatacctattggctgttattttctccacttccccaaccactaaacagttagaaatacaggggatgcagctcaggggactttcaygtggctcttttctctggaaaaccacgggcttggcatcccttggcttagtatgttggtctaatattctgtctgcaaaggtaacattgtggtttagcaaaggaaaggaaaaaaaaatacaggggaagtggagtgccaaactatggtgtaaaagac

SEQ ID NO: 58972 - DNA, 539 bp, Homo sapiens
tgcaacctctgcctctcaggttcaagcaattctcctgcctcagcctcccaagtagctgggactacaggcgtgcgccaccacacccagctaatttttgtatttatagtagagacagggtttcaccttgttggccagaatggtctcgatctcttaacctcatgatccacccacctcagcctgccaaagtgctgggattacaggcctgagccaccacgcctagtcgaatttattccttttacctaactacaggtttatacccattaagcaatctctcttcattgacccctcctcctccccagcttctgataattatcattctattctatctccatgagatcaatttttttaaccctcacatatgagaacatgcaatatttgactttctgtgactgtaaatsttaatagttttaacaaatcacctgatgcttcctcgtcttcattgttagctgtgttttcaatatatacagtaacactttttaatgcagtgaatcacgtcccatccctgtattactgaatcacaatctatttgagggaactgc

SEQ ID NO: 58973 - DNA, 555 bp, Homo sapiens
ttggccatagcacctgtggaaaacagggcatgatgcaaggattgcttattcttttccattatttctccctggtcctcactgcatgtttttctctgatttagaagcttttctcctgttattattttgctttttgggccaagtcaagatgagatcattaaaggaagcctctgcacagcacattgattttcaggtgttagctgtagtgagtgttggtcagtatttctccatggggacrttgctggaatgtggggcaggacaattctttgttgtgagggactgctcgagacactaggggaatgctagcatccctgagccccacttaccaagtgccagtattcctcttgtcaatgtgacaaccaaaaatcccccaagtacttcccaaaactccaggattggagtgtgacttccccagttgagaagcttgggagaggatagtgaatgggctgctgctgtcctctgtgcttcaggctctgacctgcctgctctggaagtctgaaacattgtggtttctttagtatgttttatgtcccttagaaaactctcttgtcctaatgg

SEQ ID NO: 58974 - DNA, 1832 bp, Homo sapiens
tgaaagatgtcaatgaccctcgctgctgctcggagaccttggggatgacctgcacccactagcatgcctggatggttcaaaaaggcgtggtatgggctggcgtctttactcagcttctcctccttcatcctgatcatcgttgccctggtagtgccccactggctgagtgggaaaatcctttgtcagactggagtggatctggtcaacgccacagacagagagctggtcaagttcattggggacatttactacgggctcttccgagggtgtaargtgcggcagtgtgggcttgggggccgccaatcccaattcacgagtgagtatattgggagcatgaaagctgattctaggcactcatttttgttaatgtgtaagagtgcttatgtctcattgtggaatttggctgctgcctcaacgtcaggcataatgtcaaagtccacagtgagccaagggttctggatccacatcaaaaagatctttccttccttccttgcttccttttctttttctgtagagatgtatagaaacattagaaataaggatttgtgcatttttgcagtttacctctattaattatgactattaaaatattgagagtttacacgtgtcagacattgtaagcacctcacgccacttgtctccttaaagccttacaacaaagttatacagaaggaattgttaatgttcccattttccagaggagtacactgaggcttggagaggttacataacttacctgaggtcacccagccaggaaacagtagagccggactccagacccatgccacatgaccacaacaagtgggtggaggctgcctgcagaactgaacctttgggaagcatgatgaccctttccacatctacttttgtaaaagcttcatagtctgagaaaatgcaaaggggcactgtgcttgggttctggaatcagactaccctggctgaaacccctactggaaagtttactggtggggagacctcaagcaaggcacttgcctgttctctgtgaacgtgagcgggcaccgactttggctggcattcagtgtagcatcagagctgcccaggatgtaagcagagcagtctgcacaaacaggaatccaagctggacttaggaacgggcttctggaaaggaaaaaacaaaacaggcaatattctgcaagccttttgaatcgatgagatcactggtgaaaagtgtctgcacaaaaccgtaattaatcaataccatgccaatgtagggtgatacagaattgtattcattccttgatttctatatttcagtattgtagtagtttatagaaatctggccaaggtaaatgtcgtattaaatttataaggacaaaaagctggaaccgttgacaaatataatacaaattgtcatcatttaaacacacaaaaatttacatttgttatgtatattcaagatcaatatgtctgggcatatttatatttacctagcaattagattagaccctggatattgaacaaatagctccatcaaaattataacataaaacttgaaaacacacacacataaacaaataaaaaaaagaaatgctaaaagctaaccatgacaactacatggactactcgattctgaactagatgctttgctataaaggatgtcttcgggactttaggggtcaagaaaacttcccctttgcactctgaaggttctctaaacaatctactgacaaaaggcagattaatagggaaaatggcttacacatttattagcatgcataggggaaaaatcacagagtgattgtccgctatctcaatggggtacaggtggttgtatcctcttcatcttaggggaaagagagatggggaagtgt

SEQ ID NO: 58975 - DNA, 1832 bp, Homo sapiens
tgaaagatgtcaatgaccctcgctgctgctcggagaccttggggatgacctgcacccactagcatgcctggatggttcaaaaaggcgtggtatgggctggcgtctttactcagcttctcctccttcatcctgatcatcgttgccctggtagtgccccactggctgagtgggaaaatcctttgtcagactggagtggatctggtcaacgccacagacagagagctggtcaagttcattggggacatttactacgggctcttccgagggtgtaaagtgcggcagtgtgggcttgggggccgccaatcccaattcacgagtgagtatattgggagcatgaaagctgattctaggcactcatttttgttaatgtgtaagagtgcttatgtctcattgtggaatttggctgctgcctcaacgtcaggcataatgtcaaagtccacagtgagccaagggttctggatccacatcaaaaagatctttccttccttccttgcttccttttctttttctgtagagatgtatagaaacattagaaataaggatttgtgcatttttgcagtttacctctattaattatgactattaaaatattgagagtttacacgtgtcagacattgtaagcacctcacgccacttgtctccttaaagccttacaacaaagttatacagaaggaattgttaatgttcccattttccagaggagtacactgaggcttggagaggttacataacttacctgaggtcacccagccaggaaacagtagagccggactccagacccatgccacatgaccacaacaagtgggtggaggctgcctgcagaactgaacctttgggaagcatgatgaccctttccacatctacttttgtaaaagcttcatagtctgagaaaatgcaaaggggcactgtgcttgggttctggaatcagactaccctggctgaaacccctactggaaagtttactggtggggagacctcaagcaaggcacttgcctgttctctgtgaacgtgagcgggcaccgactttggctggcrttcagtgtagcatcagagctgcccaggatgtaagcagagcagtctgcacaaacaggaatccaagctggacttaggaacgggcttctggaaaggaaaaaacaaaacaggcaatattctgcaagccttttgaatcgatgagatcactggtgaaaagtgtctgcacaaaaccgtaattaatcaataccatgccaatgtagggtgatacagaattgtattcattccttgatttctatatttcagtattgtagtagtttatagaaatctggccaaggtaaatgtcgtattaaatttataaggacaaaaagctggaaccgttgacaaatataatacaaattgtcatcatttaaacacacaaaaatttacatttgttatgtatattcaagatcaatatgtctgggcatatttatatttacctagcaattagattagaccctggatattgaacaaatagctccatcaaaattataacataaaacttgaaaacacacacacataaacaaataaaaaaaagaaatgctaaaagctaaccatgacaactacatggactactcgattctgaactagatgctttgctataaaggatgtcttcgggactttaggggtcaagaaaacttcccctttgcactctgaaggttctctaaacaatctactgacaaaaggcagattaatagggaaaatggcttacacatttattagcatgcataggggaaaaatcacagagtgattgtccgctatctcaatggggtacaggtggttgtatcctcttcatcttaggggaaagagagatggggaagtgt

SEQ ID NO: 58976 - DNA, 1590 bp, Homo sapiens
caggattgcttgagctcaggagttcaagaccagcctgggcaacatagtgagacctcatctccacaaacaaacaaaccaacaaaaatcaaaaattagccaagcatggtggcatgcacccatgatcccagctactcaggaggctgaggcaagaggatcgcttgaacccaggaggtcgaggctgcagtgagccgtgatcatgccactgcactccagcctgggtgacagagcaagaccctgtctcaaaaacaaaaataaaaacagacaataaagtcattctgtaacagaatatgtaacaacacgtaaaaatgtccaagtgaggggaaaaaaatcaaatttaaaatcaaagtaagaacaccataatactaattttcttaaagagaaagaaacataaagaaaaacactaaaatgttcaaagggttcaagctggcttttaggataaaagtaaatttgcttatgattttctctggtgtccaaatttttcttcgatgaagatatactaatcttttaagaagcatcataaatgtgttattaaaaatattaattaaaattgaaaccagaggaagagagggggagagagagagagagacagattcctcccagaaagtcaaagtttcaagcaaaacatagggaagtagtttggaattcttccagttttcccctccctcctttcctttttctatgaatggtcatccttatccttaagcatggaaggaggataattaaacaggagagcaacagtttttcttacatcttgccacatagccttcacggtcttcatagaaatcctaggatattttagacaatgaacttctccaaacgtggatccttaggaagcatggtactgggtaaggggaaaaattggaagagtgggccgggtgcggtggctcacacctgtacttccagcactttgggaggccaaggtgaatggatcacttgaggtgaggagttcgagaccagcctgggcaacatgatgaaaccccatctctactaaaaatacaaaaattagccggctgtggtgacaggcacctgtagtcccagctactcaggaggctgaggcaggagaatggcttgaacccgrgaggcagaggttgcagtgagctgagatggtgccactgcactccagcctgggcaatagagcaagactccatctcaaaacaaacaaacaaaaataattggaggggtggaaattcaaagctgataaagcagatcctctctttccccgcacaatcctgcctttctccttcatactgtgtgggttatctcctacttttaaaagcaaattaaaacttatgtcttcctcataattttgttaacccaaagcaagtttgtcacacgtggcacagaaatgccacctcttacagagttgcaaaaaggagccgtgaatgagggtgacctttttgagtttcaggcggcgtcgtggcgttagccatcgccagcttcgtggctgcggtgaaatttcacgacctgacggaacgaatcgccaactttcaggagaagctcttccagtttgtggtggtggaagaacagtatgaagagtcgttttggatctgcgtggccagcgcttcggcccatgctgcaaacttggtcgtg

SEQ ID NO: 58977 - DNA, 789 bp, Homo sapiens
gcatcccctttaggagaaagcacctttgtggatgaggccaggacaagccaggggcgcatgggctagtccctcaccccctatacttgcacctcccttgggcggggtgcaacctgcacagccacttgcagaaatcctgagaagaagcctcaagagtgattcaaggcaataatcttggtgtattgcaaaagtggtggccttgacgtcatataaatgagggctgaagtctttctccattacttattagcaatggggctgagcaagttccttaaattctccaaacctaaaattacccatctgttaaaaaaagataatgttatttatcttgaataattgtcagaattaaggagaaagtgtacagtgcctggcccacacmagatggtgacctctgagaggaaagaactcagtgtttttctgagctctcaaactactctcaacaacaattaatacagaagacttctatgaccaaatgtggggaatttccctccatcaacaaataagcaatccgttttgcagcagacaccaggtgggtgtgctgtaagtcagttctgacactatccatgtggagatagcatcacgtcccacaggctgagggctcagtccccaaagctgtccctcctccctcagacactagtcgcaagtctgggtttctggaacttctgactgattggcctcaaattagccaaatccacaacttcgtctttgggtttggctaattcgctggggcagctcacagaactcagggaaacacttctatttactggtttattacaaaggatatcacaaaggata

SEQ ID NO: 58978 - DNA, 789 bp, Homo sapiens
gcatcccctttaggagaaagcacctttgtggatgaggccaggacaagccaggggcgcatgggctagtccctcaccccctatacttgcacctcccttgggcggggtgcaacctgcacagccacttgcagaaatcctgagaagaagcctcaagagtgattcaaggcaataatcttggtgtattgcaaaagtggtggccttgacgtcatataaatgagggctgaagtctttctccattacttattagcaatggggctgagcaagttccttaaattctccaaacctaaaattacccatctgttaaaaaaagataatgttatttatcttgaataattgtcagaattaaggagaaagtgtacagtgcctggcccacacaagatggtgacctctgagaggaaagaactcagtgtttttctgagctctcaaactactctcaacaacaattaatacagaagacttctatgaccaaatgtggggaatttccctccaycaacaaataagcaatccgttttgcagcagacaccaggtgggtgtgctgtaagtcagttctgacactatccatgtggagatagcatcacgtcccacaggctgagggctcagtccccaaagctgtccctcctccctcagacactagtcgcaagtctgggtttctggaacttctgactgattggcctcaaattagccaaatccacaacttcgtctttgggtttggctaattcgctggggcagctcacagaactcagggaaacacttctatttactggtttattacaaaggatatcacaaaggata

SEQ ID NO: 58979 - DNA, 789 bp, Homo sapiens
gcatcccctttaggagaaagcacctttgtggatgaggccaggacaagccaggggcgcatgggctagtccctcaccccctatacttgcacctcccttgggcggggtgcaacctgcacagccacttgcagaaatcctgagaagaagcctcaagagtgattcaaggcaataatcttggtgtattgcaaaagtggtggccttgacgtcatataaatgagggctgaagtctttctccattacttattagcaatggggctgagcaagttccttaaattctccaaacctaaaattacccatctgttaaaaaaagataatgttatttatcttgaataattgtcagaattaaggagaaagtgtacagtgcctggcccacacaagatggtgacctctgagaggaaagaactcagtgtttttctgagctctcaaactactctcaacaacaattaatacagaagacttctatgaccaaatgtggggaatttccctccatcaacaaataagcaatcsgttttgcagcagacaccaggtgggtgtgctgtaagtcagttctgacactatccatgtggagatagcatcacgtcccacaggctgagggctcagtccccaaagctgtccctcctccctcagacactagtcgcaagtctgggtttctggaacttctgactgattggcctcaaattagccaaatccacaacttcgtctttgggtttggctaattcgctggggcagctcacagaactcagggaaacacttctatttactggtttattacaaaggatatcacaaaggata

SEQ ID NO: 58980 - DNA, 789 bp, Homo sapiens
gcatcccctttaggagaaagcacctttgtggatgaggccaggacaagccaggggcgcatgggctagtccctcaccccctatacttgcacctcccttgggcggggtgcaacctgcacagccacttgcagaaatcctgagaagaagcctcaagagtgattcaaggcaataatcttggtgtattgcaaaagtggtggccttgacgtcatataaatgagggctgaagtctttctccattacttattagcaatggggctgagcaagttccttaaattctccaaacctaaaattacccatctgttaaaaaaagataatgttatttatcttgaataattgtcagaattaaggagaaagtgtacagtgcctggcccacacaagatggtgacctctgagaggaaagaactcagtgtttttctgagctctcaaactactctcaacaacaattaatacagaagacttctatgaccaaatgtggggaatttccctccatcaacaaataagcaatccgttttgcagcagacaccaggtgggtgtgctstaagtcagttctgacactatccatgtggagatagcatcacgtcccacaggctgagggctcagtccccaaagctgtccctcctccctcagacactagtcgcaagtctgggtttctggaacttctgactgattggcctcaaattagccaaatccacaacttcgtctttgggtttggctaattcgctggggcagctcacagaactcagggaaacacttctatttactggtttattacaaaggatatcacaaaggata

SEQ ID NO: 58981 - DNA, 789 bp, Homo sapiens
gcatcccctttaggagaaagcacctttgtggatgaggccaggacaagccaggggcgcatgggctagtccctcaccccctatacttgcacctcccttgggcggggtgcaacctgcacagccacttgcagaaatcctgagaagaagcctcaagagtgattcaaggcaataatcttggtgtattgcaaaagtggtggccttgacgtcatataaatgagggctgaagtctttctccattacttattagcaatggggctgagcaagttccttaaattctccaaacctaaaattacccatctgttaaaaaaagataatgttatttatcttgaataattgtcagaattaaggagaaagtgtacagtgcctggcccacacaagatggtgacctctgagaggaaagaactcagtgtttttctgagctctcaaactactctcaacaacaattaatacagaagacttctatgaccaaatgtggggaatttccctccatcaacaaataagcaatccgttttgcagcagacaccaggtgggtgtgctgtaagtcagttctgacactatccatgtggagatagcatcasgtcccacaggctgagggctcagtccccaaagctgtccctcctccctcagacactagtcgcaagtctgggtttctggaacttctgactgattggcctcaaattagccaaatccacaacttcgtctttgggtttggctaattcgctggggcagctcacagaactcagggaaacacttctatttactggtttattacaaaggatatcacaaaggata

SEQ ID NO: 58982 - DNA, 1541 bp, Homo sapiens
tgtcagttattcttgaccctaaaatccctagatcttccaataaatatggaaatttgccttaataccaagatttctgcaatacttgttgaatgtcagaaaatttcttctggcaggaaattagatcaatctggggcgaggtcctgctgtgctgttagacttcagaagctttagtttaattgcactacagagtgaatgtgtgtgtggtggagggtggtggtcagtggtagacagctccaagctttatgcatttgatgtttctttctaactaatcctttaactaattcaatcatccattcattctacaaatatctattgagtaactagctgctggcaagatagccataaacatgagagaaaactccctgccttcacaagacttctattgtagtagtagagttcaacaataacaaacaaataagcaactacagtatttagaaaaaataaaactgcataaaataatgtcgtgtactaatataggttacaataaaaattaagcaaggtaaaggtgagtaggagaccacacaggtattttagatagggaggtctcaggggcctgtgtgaggacgtgacatttgggcacagactggcatgaagtgagggaacaagccattcagtgatatagagcaaaactatcacaggagaatccagagtgaaggcaaagtcacagaggctgaaacatgtttcctatatccaggagcaacctgagaggatcccatgccgggacaggtgtgactacaacagaatgagagcaagagagagtgacagcagatgaagtctgagaattagccaacagctaccaggtaagttcctgggaaacaaagttctatgtcggagcagaactcacagcaagagatgaattaggtgaagcatcccttttattgtgtcccaattaaagttgttctagtggctctagatcagtgcttttcaaaggttaatatgtatatgaattacctgaggatcttatgaaatgccacttctgattatctaagtctggggtgggttgtgatcacagaacaagcttctatactgttgttcctggtctactttgaggtgcaaggctccagagtatagatcatcatcagactgaagtccacactcctttggtttataaaagctttgtttctaattatgtcttcaacttcatttttgctggtcactctccccaccaccatctcccttccctactttatatgctccaggtgtatctctttctttctcgaacacaccaggagctctctcattctcaggccttcacaaagttagtgtctctcttcctagagcaaacatctytccctcttcaccagtcttagtcctctattagttcctagcttagtttttactcccctagtgtagggttttgctgccctctcacatgccactaaagctctctatccaccttcttaacactcacctgtcatttagcccagttcttagaggaagacccagattcctgtgctggttgttgcagtcctagagcatagcacagtgtttacaacaaaagtccccactaaatatttgatgtgtaaaagcatgattgaagg

SEQ ID NO: 58983 - DNA, 972 bp, Homo sapiens
gcgcttctattaccagtacttattattttctactttggctagtaatgacagtgtactagtgatagctggaatcttaatacataatataaagtctttaattccgaaaaaacaaaaggatataattatatagtctgtattccaagaaaactaggtatttttaaacataggaagcaaaattagcttaaataattatatggcaggatacgtaacttcttaaaaattttggtttttctatcacttcaaattttttgcttagaatgtgatataatttatctgaaacatgaaatacagtaattagagttgctctgatttttctctttagacatacctttagtcctatggtataaatttaaattatcacagaaaataaaataaaatttaatttaaaaaaacttacagagtcccacagtgttgcccagactggagtacaagggtgctatcatagctcactgtaaccttgaacttctgggttcaagaagtcctccagcctcaggctctgagtagccaggactacaggcgtacagcatgatggcataatgcttggctaattttttaattttttttttttttttttttttttttttttttttagagataggatttcattatattgcctaagctggtctcaaacagctagccttgagcaatcctcccatcttggcttctcaaagcaatgggataacaggcatgagccactatggactggtcaacatttaaattttttaactacaatttttctaggtcttttaaggatcaaatcattgatttagcaaacattgtgagtgcttatttgatggatcattgaatatttgttgatttgctatacacgtsagtattctaagaaaagttatgttttccggaaatctagagctcacaactgaagagagaaatgtacaatcgagtgttttaagtactctactgcaatagagctatatgcactgactgttgttgtaccaaaaaggaaggaatctc

SEQ ID NO: 58984 - DNA, 1010 bp, Homo sapiens
aaataccctattctttcagcatttaaataggagcagatatttccaaggttactaatgtagctataatttatttgactaaaaaaaatatcaaatgcagtcagctttattggcaaacactaccatatgtcctgagggtttcagtagattatttagatactaattatttaattttacaatgtttaactgaacaatggttttcttatttattcatgtttggattttaattgtactaccaaacatgtgatgttttgtttgtttcacttgaaaaaattaaaaaaaaaacaaagaaaacataagtagttattctaaatgaccaatatatgaaatgaaataaataaacatcactagtgctattctcttgcaaaatacctgatctgcatgtatgattttcatggtttattttctttcttgtattaataattagaatgaacagttcaagtataaactaacaaaataaagatttcccagaaatataacctcaagtttcttggatttcataaatagagaattttaaatctcttttttgtattggctttaattatttcagtgttcttacaatgtatcttttatagggtatagaaaggcactggtgattgtacatttttgacaattgtttacatccataaagatctccattagatgaaayactgagaactcttttagggcgtctgtggtcaatattatttatgcttagagaacattctagttctcctttccttgtgtcacttggagttatattttccttcaaccttggagacaggtatgaccacatggcttgccttagctagtgaaatgtgattaaaattatgctttgccacatccaggtggcaaaggattaacagccaatgtattaacttgcaagtcccgtttgctacagtggtacactgttacatctgcttttcagatgctagcatcctcagacagcagagctttgctagcctggatattggagtaacagcaatgagaccagtccccatggtcgtccacatcagacatgttgtgtgaatgca

SEQ ID NO: 58985 - DNA, 1010 bp, Homo sapiens
aaataccctattctttcagcatttaaataggagcagatatttccaaggttactaatgtagctataatttatttgactaaaaaaaatatcaaatgcagtcagctttattggcaaacactaccatatgtcctgagggtttcagtagattatttagatactaattatttaattttacaatgtttaactgaacaatggttttcttatttattcatgtttggattttaattgtactaccaaacatgtgatgttttgtttgtttcacttgaaaaaattaaaaaaaaaacaaagaaaacataagtagttattctaaatgaccaatatatgaaatgaaataaataaacatcactagtgctattctcttgcaaaatacctgatctgcatgtatgattttcatggtttattttctttcttgtattaataattagaatgaacagttcaagtataaactaacaaaataaagatttcccagaaatataacctcaagtttcttggatttcataaatagagaattttaaatctcttttttgtattggctttaattatttcagtgttcttacaatgtatcttttatagggtatagaaaggcactggtgattgtacatttttgacaattgtttacatccataaagatctccattagatgaaatactgagaactcttttagggcgtctgtggtcaatattatttatgcttagagaacattctagttctcctttccttgtgtcacttggagttatattttccttcaaccttggagacaggtatgaccacatggcttgccttagctagtgaaatgtgattaaaattatgctttgccacatccaggtggcaaaggattaacagccaatgtattaacttgcaagtcccgtttgctacagtggtacactgttacatctgcttttcaratgctagcatcctcagacagcagagctttgctagcctggatattggagtaacagcaatgagaccagtccccatggtcgtccacatcagacatgttgtgtgaatgca

SEQ ID NO: 58986 - DNA, 649 bp, Homo sapiens
aaggttcaactgtttattcccctccctagtagtaaacagcatgaaggaggtttctctttatacataacatatccaaagcccctgggagtatgtatgctttgatattttccccattctgacattttactagctggctaaaaacaaataggtttgctatgtgagtcatcaacctataagcaacaaattcttggattgtcacatttatggtcatccttttaatctctgttgtgttcagcatccagttttatggtaacctacagaaaaaaattattttctctgagtcatgtggtaaaactcttggttgaatttttttttcaacagttccccagccaaataatttaattatgtgatcatagtcttgttgaagcttgtgctattgattctaagaagcaagcatgcctttatttgttgtccttcaaaacaaaaacaggttttcctcttgcgttgcaaagtctcagctagggttttacagaacaaaataatgaatgcttctgctgcagcatgtcacaggggaggctgggacaatactgaactcatgcacacactgctgatccttgcttgctgggcaacatgtacacctggatttctgacagctatgtgggttcactagagacctctgtcattcttttcatcctcttrtaggcaatgg

SEQ ID NO: 58987 - DNA, 1200 bp, Homo sapiens
acccctgtgaatgtgacgttgatatagtctactgttgattttttttttttttttcaagacagggttttgctctgtcaccaggctggagtgcaatggcatcatctcagctcactactgcagcctcaacttcccaggctcaagtgatactcccacctcagcctcctaagtagctggaactacagacacacactacccactatgcctggctaattttttattttttttatggagatggagctcttgctatgttgcccaggcttgtctcgaactcctgggctcaagtgatcctcctgccttggcttcccagcatgctggaattgcaggcacgaagcaccacacctgacatactagtgaaatctttattggatcttaggcaaattataataggattaggtctgttagtgacagaaaatccaaaataacaatgacttattaaaaggataattttttttctctttcgaggaaaaaacaggtttccagagctggtacaaaagcagccatctttttatcatgctcttagttttgccttcatagagtctactttgtgatccacaatggctcctcttgcatattgtatcagccaacaggaaggatagaaaagggaaagagaatgagaccttcattcaataacacttcctggaagttgcacacaccagcattatttataatgytattggccaagacacacctagctgctagaaaaagttggaaaacatctttattctcagaagttaagtgtccagccaaaaacaggaggttctaacactgcagaagaaagggaaagtatattggtggacattatcagcctctcctacattggtttttgcatatctataagtttatatccataaacttagaaatgacatcaccattacccaatttctgagagtgaaggaaattaaagaagttttatagtatgaggagtgaatcagtctctctgtctgtctttcttctatcatacctttccaacaaagacccacattttgaaagacttaatccttggtgctctttactccttttttttcagttgaatctctcaataccagtatacaggaggtaataattgcaagaatcataagttgctctttttctcttcttacatgtgtttcctcatagcctactactgaaagcaatttgtaacagcccttaaagaaccagtgctgaaacacctgtttccaatttccaatatagacactatca

SEQ ID NO: 58988 - DNA, 1857 bp, Homo sapiens
tcctacagatgataaattcctaaatctccccaagtttatgaatccactgagctgtcacctacatggagtccttcccgatccttccagctagaaattgctggcatgtctatgtaatctgtattaacttgcttaccgtctccaaagtgggagcttcttgagaataagaactgtgtcttagtcttcgttgaatctgcagggccaagtaaagccataacacacagtaagagcttaataaatgttggataaataaagaaatgaatgcatgaacatagaatgaaaataatcctaaagttaatgaccctcaggggacattggaggtagggaaggagggagacacaaaattcgagtaatcaccctcagcaccgactaaactggagaccctaccggtcaaagcaatcaaatacaaaatgtattcaaatcccactctggggaggctcagactgcatccaatttctgcatgaaactacacctcagaagcctctccaaggcaagaaaaaactgacagcatcactatcaagattcagataggaggcagcatacacaggaatactcattaaatatttattttccaaatccccaatgacaagttctggccaataaagtgtgaatggatgtcatgtgtgtcacttccatgtggaggcagtgaaaagtccaagtaagatgctccagtctctctcttccgctgccctagcaactacatgttccagatggtgcatctacaagatggtggagcccaggtcaacctgggtccctgagttactatgtggagccaagtcctccaccaaccacagcaggtttgtaacatggtgataaataaatggtgtgtgtgtgagctgtggagatttgggggttaacttgttccagcagcataagctagcccattctgatgaatataatayagaaagaatacttgaaaagaagatggaatcttttgcattaaggtgcttctcagtagtttcctggatccaggcttccttcttcatattcattccaagcagctctcttagatctcgccttgcttcttctattggactttgttggcttccagtcacaatttatttctgatttactggcatctagatttaaaactctttttgaaagcagctggacctacgtgcattcatctcctttttctttttatgtctgtctctactgacagtcatcttcccatttcttcccctctgtccctgatccatgacccttaatcttaatcatctctcctttcctccaggtgaatcaatccatcatctttgattttatttttattcttccaccattcctatactaatgaaaaagcaatatatgcattttaaacctcttcagtttcttcttgatttttttggcaaatctgatccccagatttagtgctccatgcacaggctcctttaattgccttcttgggtaagaaataatttcactgggcctggcacagtggctcaagcctgtaatcccagcattctgagaggccgaggagggtggatcacctgaggtcaggagttcaagaccagcctagccaagatggcaaaccccatctctaccacaaatacaaaaactagccaggcatggtggcatgtgcctgtagtcccagctacttggggggctgaagcaggagaattgcttgagcctggcacggtggaggttgcagttgagtcgagatcgcgccactgcactccagcctgggtgagagtgagactctgtctcaaaaataataataataataatttcactgaattgcttcttttcttaaaaaagacaatacattcttttaataataaggactgttttatctcattttaatattaatacaatctaaatggcaacttgggggaaatcgtagtcatgatcagaaccagggat

SEQ ID NO: 58989 - DNA, 747 bp, Homo sapiens
ttatcttagtgagagtctatgttgtaatccttaccaccaccatcccaagttcaaggttatggcctgtggccttgctagtagcttacgtagagccctttgatggctcatgaagtcagttcatagaaagaagtgaggtaaactgggaacaaattgaacatatttaactgaagaggtgattttgcattaaaatatacctttattatctcttggaatcaaaaattattttataaatccttattgaatacgtactctgtgcccattctgatactatatagcctgcatatattatggggaacaaaatakacaaagtctcgtaaagtatccatcctagtgggaagggaaaacagtacacaaacaacaaaaaagatcattactaactgttgtaattagatgaaggcagtaagcagggtagtgtgataagagtaaatggcaggggagaagatacttgaggaagccttactgaggtgggggcacgtgaggtgaggatggatgggaaggagccagcagtgtgaagatgcacttgatgggcttgggcatggcagggaaggctagacattccagagagagggaacagggcaggcaaaggattcaaaggaggtacgaaaggaggccagggtgactggggagaatgatgtgagatggcgtttgtaaggtggactggggccagattatagaggaggccttgtttcaaaatttaggttttattagaaatgaaaattcttgaaacaggcctttttttttatgaac

SEQ ID NO: 58990 - DNA, 985 bp, Homo sapiens
gtttttttcccaggtgaaaaccaagccgatggctacagaacctagtgggagagactcttttgcccttctatttgactcaactggcaatgtcttaaccacaatatcgtgctgatgttaaaagacatactatgcttccatttttctttgcctttcctttgagcttagtttcagtgactactgattttatttctcactagaaggacaactcggttggcctcctttatgttctagccaggggtcaacaaacattctttaaagggagggcttcaggtgcagggcgaagtgagtgaggcacttgctttgggtgcaacctacaaggagggggtcaaaaactcagtaaacaagataaagaatatcttactgcaatattttaaataatcaaaattaacacaaaattccaagatgaagaaaatgtcargattttaaatatggaccagacacttgcagtgccctgcagagctatgcaggaatgtgaggcaaaaggagcaaccagggatactgccccctagctagagtgttggaatcctacttaggattttgtctttatttggcttcatcattctccaaagacctcaaaactgtcctcacgctcttccccagcagatctccctgggaaatctcttttcttatgcagaagcttgccttgctgcttctggctacttccaaatttggaaaaccaaacttttgatttccaaggagacttcagagtctagaaaatgtctctgaggatttcctacagcaagtggccgtttcgaagagctgggcagacaggaatatctgtggcttcctgggccttacacgcctgcttgctatctcattatacccctggctgtggcaaaagggagcaggtgtttggggatctctttctctatgaattattgtttgatcccagagccagaattaaaaaatatgcttcattctcagtactatgcttgatctattttggattaatgataaatatgtttggtttattgataacatcttt

SEQ ID NO: 58991 - DNA, 1756 bp, Homo sapiens
ctttccagccgtgccctctgtgtgccctggcactgggtccctgtgaacccactatgaaaggttaacagagccaagaacatggtctctttcatgtatctgttgcccctgaactaacctggatgcctcactttcaagatggaaatccattccagacagggcgaactcaaggggcaaggacagaccctgcagtcctttctgtctttggtctctggggctggccttctccagcacctcttggcagataaagagtgaccactttgttcataccgtgataatcttaacattttgcctacttgggcaacctatggtcttatagctgcttagagagcttcagctggcattccatatagagtgaccacattttctgaatccaattgtgtttgaaccatagttgatgagctataatcgtacattggaagagagtacattaaatcaggagtctctaggaaatttagtattaatctatgtatctttgataaatgtatggaattgaaaattattaatttttattactatattagtactatgtcagttttataaataacagtgatatatggttttctggaagaccaagaatggtaaggaaaaataggtgctgtatacacacgtatgcataatcatgttattacagaatttatgttgggggggaaaatgagagttgttctgtagggggaaaaatgagacttattatttggtcctggaatattatattcagtaacttcttgttactgaagttaactgtttttgagttatgttttcagagctaaatctgattgagtttacagaggggaccagcacataaatgtgcacttttaatacttccaggggactctttattctctaaaatgtaacagtgcagactgagctgagtgaataagatactccctaaggtcaagagggcttgaaagaccaatccagggaatgcccttgagttttagatgagagtcccccaaagactaacacacctgtgagagaaacagcgtcaccagcagagggaagggctcccttgcaggccctggccagctaaaaacaacagcacaatagctgctctcacaaattgaaaaaaagaacaagaagacaaaaggtatctattccctcaagctcacagtagcagtttcggccattctttgtcatactctgtgatttgaaaaataaaaccagtgctatcttgtgagaagccacgccattcctgtcccctggtttttctgtctgcccttttttctttctctatttgttagaataaaagtccctttcaagtttttctctgtatgtgtgtgcgaccttcttaaggatgactcccacaaactgcccacagattaaacaaaagatgactttttctttgagcctatttttgggcacagatatgtaagctgatttgtatcccatgcctgcctgattcgaaatgcacagcagtcaaggaaagagaagccaaacggcagatcctaaactcgagccagcagcccctcagccccagtgcactaacttcttacgactgagagttaggactggtgaggtgagctgccagaattgggcaaatcaaagctacgagcaaatctacacacaaggcatcgtcttctgtgcactagacaggagaggtgatttgttggaggtgacsatgtttgtttaacgttttgaaagctcatgggagggtgatgcaggaaccagtcaatatccttgagatggatttcaagttgggggaagcagcgctggttcctacgtttcctcccgcttagtggggtcagctcagaaaaagaca

SEQ ID NO: 58992 - DNA, 1756 bp, Homo sapiens
ctttccagccgtgccctctgtgtgccctggcactgggtccctgtgaacccactatgaaaggttaacagagccaagaacatggtctctttcatgtatctgttgcccctgaactaacctggatgcctcactttcaagatggaaatccattccagacagggcgaactcaaggggcaaggacagaccctgcagtcctttctgtctttggtctctggggctggccttctccagcacctcttggcagataaagagtgaccactttgttcataccgtgataatcttaacattttgcctacttgggcaacctatggtcttatagctgcttagagagcttcagctggcattccatatagagtgaccacattttctgaatccaattgtgtttgaaccatagttgatgagctataatcgtacattggaagagagtacattaaatcaggagtctctaggaaatttagtattaatctatgtatctttgataaatgtatggaattgaaaattattaatttttattactatattagtactatgtcagttttataaataacagtgatatatggttttctggaagaccaagaatggtaaggaaaaataggtgctgtatacacacgtatgcataatcatgttattacagaatttatgttgggggggaaaatgagagttgttctgtagggggaaaaatgagacttattatttggtcctggaatattatattcagtaacttcttgttactgaagttaactgtttttgagttatgttttcagagctaaatctgattgagtttacagaggggaccagcacataaatgtgcacttttaatacttccaggggactctttattctctaaaatgtaacagtgcagactgagctgagtgaataagatactccctaaggtcaagagggcttgaaagaccaatccagggaatgcccttgagttttagatgagagtcccccaaagactaacacacctgtgagagaaacagcgtcaccagcagagggaagggctcccttgcaggccctggccagctaaaaacaacagcacaatagctgctctcacaaattgaaaaaaagaacaagaagacaaaaggtatctattccctcaagctcacagtagcagtttcggccattctttgtcatactctgtgatttgaaaaataaaaccagtgctatcttgtgagaagccacgccattcctgtcccctggtttttctgtctgcccttttttctttctctatttgttagaataaaagtccctttcaagtttttctctgtatgtgtgtgcgaccttcttaaggatgactcccacaaactgcccacagattaaacaaaagatgactttttctttgagcctatttttgggcacagatatgtaagctgatttgtatcccatgcctgcctgattcgaaatgcacagcagtcaaggaaagagaagccaaacggcagatcctaaactcgagccagcagcccctcagccccagtgcactaacttcttacgactgagagttaggactggtgaggtgagctgccagaattgggcaaatcaaagctacgagcaaatctacacacaaggcatcgtcttctgtgcactagacaggagaggtgatttgttggaggtgaccwtgtttgtttaacgttttgaaagctcatgggagggtgatgcaggaaccagtcaatatccttgagatggatttcaagttgggggaagcagcgctggttcctacgtttcctcccgcttagtggggtcagctcagaaaaagaca

SEQ ID NO: 58993 - DNA, 1756 bp, Homo sapiens
ctttccagccgtgccctctgtgtgccctggcactgggtccctgtgaacccactatgaaaggttaacagagccaagaacatggtctctttcatgtatctgttgcccctgaactaacctggatgcctcactttcaagatggaaatccattccagacagggcgaactcaaggggcaaggacagaccctgcagtcctttctgtctttggtctctggggctggccttctccagcacctcttggcagataaagagtgaccactttgttcataccgtgataatcttaacattttgcctacttgggcaacctatggtcttatagctgcttagagagcttcagctggcattccatatagagtgaccacattttctgaatccaattgtgtttgaaccatagttgatgagctataatcgtacattggaagagagtacattaaatcaggagtctctaggaaatttagtattaatctatgtatctttgataaatgtatggaattgaaaattattaatttttattactatattagtactatgtcagttttataaataacagtgatatatggttttctggaagaccaagaatggtaaggaaaaataggtgctgtatacacacgtatgcataatcatgttattacagaatttatgttgggggggaaaatgagagttgttctgtagggggaaaaatgagacttattatttggtcctggaatattatattcagtaacttcttgttactgaagttaactgtttttgagttatgttttcagagctaaatctgattgagtttacagaggggaccagcacataaatgtgcacttttaatacttccaggggactctttattctctaaaatgtaacagtgcagactgagctgagtgaataagatactccctaaggtcaagagggcttgaaagaccaatccagggaatgcccttgagttttagatgagagtcccccaaagactaacacacctgtgagagaaacagcgtcaccagcagagggaagggctcccttgcaggccctggccagctaaaaacaacagcacaatagctgctctcacaaattgaaaaaaagaacaagaagacaaaaggtatctattccctcaagctcacagtagcagtttcggccattctttgtcatactctgtgatttgaaaaataaaaccagtgctatcttgtgagaagccacgccattcctgtcccctggtttttctgtctgcccttttttctttctctatttgttagaataaaagtccctttcaagtttttctctgtatgtgtgtgcgaccttcttaaggatgactcccacaaactgcccacagattaaacaaaagatgactttttctttgagcctatttttgggcacagatatgtaagctgatttgtatcccatgcctgcctgattcgaaatgcacagcagtcaaggaaagagaagccaaacggcagatcctaaactcgagccagcagcccctcagccccagtgcactaacttcttacgactgagagttaggactggtgaggtgagctgccagaattgggcaaatcaaagctacgagcaaatctacacacaaggcatcgtcttctgtgcactagacaggagaggtgatttgttggaggtgaccakgtttgtttaacgttttgaaagctcatgggagggtgatgcaggaaccagtcaatatccttgagatggatttcaagttgggggaagcagcgctggttcctacgtttcctcccgcttagtggggtcagctcagaaaaagaca

SEQ ID NO: 58994 - DNA, 1756 bp, Homo sapiens
ctttccagccgtgccctctgtgtgccctggcactgggtccctgtgaacccactatgaaaggttaacagagccaagaacatggtctctttcatgtatctgttgcccctgaactaacctggatgcctcactttcaagatggaaatccattccagacagggcgaactcaaggggcaaggacagaccctgcagtcctttctgtctttggtctctggggctggccttctccagcacctcttggcagataaagagtgaccactttgttcataccgtgataatcttaacattttgcctacttgggcaacctatggtcttatagctgcttagagagcttcagctggcattccatatagagtgaccacattttctgaatccaattgtgtttgaaccatagttgatgagctataatcgtacattggaagagagtacattaaatcaggagtctctaggaaatttagtattaatctatgtatctttgataaatgtatggaattgaaaattattaatttttattactatattagtactatgtcagttttataaataacagtgatatatggttttctggaagaccaagaatggtaaggaaaaataggtgctgtatacacacgtatgcataatcatgttattacagaatttatgttgggggggaaaatgagagttgttctgtagggggaaaaatgagacttattatttggtcctggaatattatattcagtaacttcttgttactgaagttaactgtttttgagttatgttttcagagctaaatctgattgagtttacagaggggaccagcacataaatgtgcacttttaatacttccaggggactctttattctctaaaatgtaacagtgcagactgagctgagtgaataagatactccctaaggtcaagagggcttgaaagaccaatccagggaatgcccttgagttttagatgagagtcccccaaagactaacacacctgtgagagaaacagcgtcaccagcagagggaagggctcccttgcaggccctggccagctaaaaacaacagcacaatagctgctctcacaaattgaaaaaaagaacaagaagacaaaaggtatctattccctcaagctcacagtagcagtttcggccattctttgtcatactctgtgatttgaaaaataaaaccagtgctatcttgtgagaagccacgccattcctgtcccctggtttttctgtctgcccttttttctttctctatttgttagaataaaagtccctttcaagtttttctctgtatgtgtgtgcgaccttcttaaggatgactcccacaaactgcccacagattaaacaaaagatgactttttctttgagcctatttttgggcacagatatgtaagctgatttgtatcccatgcctgcctgattcgaaatgcacagcagtcaaggaaagagaagccaaacggcagatcctaaactcgagccagcagcccctcagccccagtgcactaacttcttacgactgagagttaggactggtgaggtgagctgccagaattgggcaaatcaaagctacgagcaaatctacacacaaggcatcgtcttctgtgcactagacaggagaggtgatttgttggaggtgaccatrtttgtttaacgttttgaaagctcatgggagggtgatgcaggaaccagtcaatatccttgagatggatttcaagttgggggaagcagcgctggttcctacgtttcctcccgcttagtggggtcagctcagaaaaagaca

SEQ ID NO: 58995 - DNA, 725 bp, Homo sapiens
ccagtaaagctaaagtccactacaatgttgagttcacctttgacacagatgctcgggtagccatcaccatctattaccaggccacggaagagttccagaatggtattgccaggtaagatcaggagaccaggagagccacttccttcccagattattaccaggccacggaagagttccagaatggtattaccaggtaagatcaggagaccaggcgagccacttccttcccagatagggagagtccatgtcttatccactcagcaagggcggaaaacattctttttctgcagccagatgagatctggttcctgaatttagactttcttctacaaagccctaccctttaccttttcccttcaaattgtgccatcttggtatagtgacaaatggtggtatagtccttcaggtccttaacatgctgttaaaaatctagtaagctacctttctttggatgtgtgggttgaatagaaaagtttaaygttgccaagcaagagcaaaggaaatggattataaaggaccctttcttctcttcgctagaccctgttgataattgagaacaggcatgagcagaggaagttgtcagacccatctgtgccggatactgacttttgctttgcctcccacttgtatcaatagctacattcccaaagacaacagcctccagtcggagactgtgcagtacaagcgaggagtgtgtcagcagttctgcctgccctcccacaccg

SEQ ID NO: 58996 - DNA, 1047 bp, Homo sapiens
cctaggtgatgtgttgataggtgcggcaaaccaccatggcacacgtttacctgtgtaacaaaccggcacatcctgcacatgtatcacagcacttaaaattagaaaaaaaaaataaaaataaagcaatgtttccctccctttccagaagaaaggatcatccctatagcttacatgcttgtgatgatgwgtgtccctttaaaacacaatcccccattgatcccactcccttcgaaccatcgtgctgtcttctgctgcccttcttgaaagtgtttgtacgcttgtctctactgttcgcctttttctctctcaatgccaatccatcacccctttgtccatacctgccactgtgtttcctcttagccacagcaccatagcttcaagtcccacctgtccatcagcaaaatccatcttcatccctctcaggtgcacagtctcaacaagacgatgcagacctgctgccctggggtttagctttaatcttggttttaattatcatcttagattgcaaacttcttgagaacaagatttgagccttctgtttttctaagactcccaaagacttgcatttttatatccccatattgcctaccttcatagtgtgtttaaaataaaagcttcctatgtcttcattaaaataggtataaatatgaatgttcttttcaaaagataacctttccttaagcatgtgggattgtcttgaagatcatatagcagtgattcatgaaaaatgactttggatatgaaaagccatggacctttccccattgttcctaaattttgcaatgtctgccttgaacatgaagcgtttgggatgaccaaacagatcctgccttacttgcttactcagaatcccacgaggggtggttttatctgatcagcccctccagacagcaaatcttggttacaattgctcattggcttcctacctagatcatattcctctctttaaaaatatcagaagctgcttttgctgttaatttgtggtttcatgagattaacagaaaggatttgtttgaatttactaatctcaagttacgtgatggacca

SEQ ID NO: 58997 - DNA, 1120 bp, Homo sapiens
acaacatttcaacaatatcctcagagggagtaatttcagaaacaactgggaaatactcaccaaagatgaaagtctggcaggaaagtattccaactcaggaacttgcagctcataatttgaggcatgaaacatttttaggaattgtttaacactatagcatcaataagcctttaaaaaaggggaatgagtaatgccttcatcgtgacatttattgtttccaattaatatattattcttgtttaaatcatgttatttattttgaaatacatacatagaataagagaagaaaaaatgtaagtttttttttttttccgtaaaaatccaactcaagtcgtgaaacaagactgtaaagcatagtggtatggttacaaacaaaggacgatggaagtataaaggaaaaaatgaagtgaaaaagaatgctttttattaatctgaattattctgctgattttttaaactatcaatagatttgctcataaactcctgccccaaatgtctctgctccagaatttgcaacttaacatcaggaaaatcatcatcatgatcataaggtgaaaataatttcatttcacagtgtgcagtaatatatttcatagaagatgaaatacagggtcagctttatattttatcatgaagagaaagattcatagactcatagaattttagattgaaggtcaaagtcagcattaatgagtaagactggaggtgttaaaatgagctctgaagtgaccaagaatattatgcttgccaattttttcatctcagtttttaaaaacaatctgataataaagccaatctgtcaactaatatcccataaacgtcaaaagctcagtagataatactaattcacctgagcccatctatttaggccaagagcatgctcaactctcttgatgcttaataactcagacctcttagtcaataaccagtattctagataaggagatagaaaaattaaaaaaaagttattatctttccgtgtcatgttttgtgtgactggcttcctgaaatgttctatttgaaatggtatatttgtttttcatttkaaagttcatttacacaaaattgcatccactatttgtaattttcattttaatgataacctcttctatatttatgc

SEQ ID NO: 58998 - DNA, 1596 bp, Homo sapiens
ccctggcatactctctatcttgggtgctagcctggccccaggatggccccacgccacttcatgatgccttgaaaatcttgagggtactctcagcagggccacccaagcaggagccctggccccaactgggataaaccacctcccccaggttttaagatgaggctgcctgagcccaggtccttgggatgtccaatgcctaccagccctccctgaggcccgtctcctgctctcagctccctgcccctgcccctcacttcctggccatgcctccctggccctcagcctctgccccagccactgagcacccctccctcaccttcaaggcacaggtggccgagggcctgctgtcttctgcttggcatgggtctggcagggagtgggagaccctggcgtgcatctgcctcaggagcatcacggcagctctccagctgggtggcaagatcaggaacttatactctgactcagagctccaccttcctggccacagcttggcagtagctgggattgctctgggagtggtttgagtgggtagacagatagggtgcatgggcctagatctcttcatatcaaagaaatcacaggtcttcaggtcatagaaatacagggacccgcagggctctggtctttggggtcagcagtctgtagcccccagccactcagaatgaccaggccttcaagggcacagtgggtggcaagaagaggacactggacccacatgactgtaggactagcccgccataatttgggaaagctctatctcttcagcttatagaggtcatggctcatagatgcccctctaggaggatgcgaccgtcgctcccaactccacttcagtttcatggcttggtaccccaggagctgtggccagggaccttcatggggtccctggccacaactcccaaagagaccagggtcagtgctcccaaagctagagggttgagaaagaaaataattgcccaatacttcgtgagaaagggtctggggcaaccatcccctgtcctccctcctgggagccaggtggagagagagcgtgtccagcccctgcctggtctcaggacagcttggaggatgcacccgccccgcccagatgattcctatctctagcctggtggctcactgaggggcctgacaagggcagctttgcctgctctgctgcctgactctgtacactgggagtttcctgcctgagctattgcctggggccccacaaccggcttttctggcccatagatagaagtgcttttttgaaattgaggatgagatctgaacatgggacagactgggcctgaatgcagggatggaacctggttggaggtacctgtgggaactcttcacgtgcctggccttccagaaagtggaggggccttagcctgctgctctcctggcttccttccttgccctgccctcccctcctctgccaaggatggggactcagcaccacatccctcagtaaactccacaaattcaatttttytttttagttcatgtacctagtaagcatctgctgtatacatcctactgagagaggaatcctaagcttgaagttgctgacagtctggctggagagccagatgcatccaacccctcagaggctca

SEQ ID NO: 58999 - DNA, 1596 bp, Homo sapiens
ccctggcatactctctatcttgggtgctagcctggccccaggatggccccacgccacttcatgatgccttgaaaatcttgagggtactctcagcagggccacccaagcaggagccctggccccaactgggataaaccacctcccccaggttttaagatgaggctgcctgagcccaggtccttgggatgtccaatgcctaccagccctccctgaggcccgtctcctgctctcagctccctgcccctgcccctcacttcctggccatgcctccctggccctcagcctctgccccagccactgagcacccctccctcaccttcaaggcacaggtggccgagggcctgctgtcttctgcttggcatgggtctggcagggagtgggagaccctggcgtgcatctgcctcaggagcatcacggcagctctccagctgggtggcaagatcaggaacttatactctgactcagagctccaccttcctggccacagcttggcagtagctgggattgctctgggagtggtttgagtgggtagacagatagggtgcatgggcctagatctcttcatatcaaagaaatcacaggtcttcaggtcatagaaatacagggacccgcagggctctggtctttggggtcagcagtctgtagcccccagccactcagaatgaccaggccttcaagggcacagtgggtggcaagaagaggacactggacccacatgactgtaggactagcccgccataatttgggaaagctctatctcttcagcttatagaggtcatggctcatagatgcccctctaggaggatgcgaccgtcgctcccaactccacttcagtttcatggcttggtaccccaggagctgtggccagggaccttcatggggtccctggccacaactcccaaagagaccagggtcagtgctcccaaagctagagggttgagaaagaaaataattgcccaatacttcgtgagaaagggtctggggcaaccatcccctgtcctccctcctgggagccaggtggagagagagcgtgtccagcccctgcctggtctcaggacagcttggaggatgcacccgccccgcccagatgattcctatctctagcctggtggctcactgaggggcctgacaagggcagctttgcctgctctgctgcctgactctgtacactgggagtttcctgcctgagctattgcctggggccccacaaccggcttttctggcccatagatagaagtgcttttttgaaattgaggatgagatctgaacatgggacagactgggcctgaatgcagggatggaacctggttggaggtacctgtgggaactcttcacgtgcctggccttccagaaagtggaggggccttagcctgctgctctcctggcttccttccttgccctgccctcccctcctctgccaaggatggggactcagcaccacatccctcagtaaactccacaaattcaattttttwttttagttcatgtacctagtaagcatctgctgtatacatcctactgagagaggaatcctaagcttgaagttgctgacagtctggctggagagccagatgcatccaacccctcagaggctca

SEQ ID NO: 59000 - DNA, 1596 bp, Homo sapiens
ccctggcatactctctatcttgggtgctagcctggccccaggatggccccacgccacttcatgatgccttgaaaatcttgagggtactctcagcagggccacccaagcaggagccctggccccaactgggataaaccacctcccccaggttttaagatgaggctgcctgagcccaggtccttgggatgtccaatgcctaccagccctccctgaggcccgtctcctgctctcagctccctgcccctgcccctcacttcctggccatgcctccctggccctcagcctctgccccagccactgagcacccctccctcaccttcaaggcacaggtggccgagggcctgctgtcttctgcttggcatgggtctggcagggagtgggagaccctggcgtgcatctgcctcaggagcatcacggcagctctccagctgggtggcaagatcaggaacttatactctgactcagagctccaccttcctggccacagcttggcagtagctgggattgctctgggagtggtttgagtgggtagacagatagggtgcatgggcctagatctcttcatatcaaagaaatcacaggtcttcaggtcatagaaatacagggacccgcagggctctggtctttggggtcagcagtctgtagcccccagccactcagaatgaccaggccttcaagggcacagtgggtggcaagaagaggacactggacccacatgactgtaggactagcccgccataatttgggaaagctctatctcttcagcttatagaggtcatggctcatagatgcccctctaggaggatgcgaccgtcgctcccaactccacttcagtttcatggcttggtaccccaggagctgtggccagggaccttcatggggtccctggccacaactcccaaagagaccagggtcagtgctcccaaagctagagggttgagaaagaaaataattgcccaatacttcgtgagaaagggtctggggcaaccatcccctgtcctccctcctgggagccaggtggagagagagcgtgtccagcccctgcctggtctcaggacagcttggaggatgcacccgccccgcccagatgattcctatctctagcctggtggctcactgaggggcctgacaagggcagctttgcctgctctgctgcctgactctgtacactgggagtttcctgcctgagctattgcctggggccccacaaccggcttttctggcccatagatagaagtgcttttttgaaattgaggatgagatctgaacatgggacagactgggcctgaatgcagggatggaacctggttggaggtacctgtgggaactcttcacgtgcctggccttccagaaagtggaggggccttagcctgctgctctcctggcttccttccttgccctgccctcccctcctctgccaaggatggggactcagcaccacatccctcagtaaactccacaaattcaatttttttwtttagttcatgtacctagtaagcatctgctgtatacatcctactgagagaggaatcctaagcttgaagttgctgacagtctggctggagagccagatgcatccaacccctcagaggctca

SEQ ID NO: 59001 - DNA, 530 bp, Homo sapiens
tagaaaatctgagtataaatgctccacagtttccttttacagacagtgaaagaaataaatctttttttttttcttttgagacagagtctcaccctgtcgtccaggctggagtgcagtggtgcgatctagtctcactgcaacctccacttcccgggttcaagcgattctcctccctcagcctcccaagtagctgggattacaggcgcccgctaccacactcagctaatttttttttctttttttgtatttttagtagagacagggtttcaccatgttagccaagctggtcttgacctcctgacctcaggtgatmcacccgcctcagcctcccaaaatgctgggattatgggcatgagccactgtgcccggctgaaagaaatcttaaaataactttctaattatcatctgacttacctagctgataggaaatctatgaagagatgatttagggcattattatatttatcacatagtctagcttaaaagaattatagcgtttcagaaactgaaagaatctagctaaaagaatc

SEQ ID NO: 59002 - DNA, 821 bp, Homo sapiens
tgaaaaaaggacacatttgtttttaggcaaaaatattggttagttgtttttcataaaaaaatgtgtataaatctcagttccttctaattctccatttgtaacacttcaattatatggaggttgtatttctgataattactgacaaaaataatcattattaaatataaaaagataaaaaattactgacaagaaaaaaawtcaatggaaaacaaaatataagagagatttaaaacaaatttatttttaaaataaaaaaatctgctaaatgcataaagaaacacaaaataataaacagaaatgcctagaagttttatatttcaggtctgtcttagtccaggctgctataacagagtaccacacactgggtcaattataatgaacagaaacgtattggttcacagttctggaggctgggaagtgtaatatcaaggtgccagcatctagcaagtgccttcttaccatgttttaatatggtgggaagcatcacatggcaaagggcaaaaagagtgccacagagatagcaagaggaggtgaacctgcactcacaaaaaggaagccactctcttcatagtgctattagtccattcatgcaggcaaagttctcatacctaaacacattttgaaggtcctgtccctcaataccattaaaatggcaattaaacttcagcatgaattttggccagtacaagcagtcaaaccatagaaaggttctaaagcaaacagaggtagccaaatgctagattccttttttaaaatatgccctcacctaacagaagaaaatggactgcccatggcttactgatgtgcttattaatgtaaca

SEQ ID NO: 59003 - DNA, 1299 bp, Homo sapiens
actgtcccacataagaagaaaacattttatcaataaaaatatttctgtataccacaattttatttcatgaaattgattttatcaaatttgcataaatacsctgtttttattgctttgaaaaaatacatttagtctgattttattttgatggttatgaataactttatgagtaaaacattcttccaattgaaagcaaatttcaaaaggaatagaaattgtaaagaaaattctgttgtgtcattattagtagaattgtgctgtggaaaggattaactgaatgagtgcattttgtcaagaactatggataattagagattttatcaaactttctagctaataacttggcctgccacagtctcatggatctggcagaagacatgaaactcctgggtcagaagaaaaggattttatgactcgcagtacaacaggcagctcttacttcgtcttcacatcagttacctttctcatctaagtcccgcaagggtgatgctgaggtcatcccagatggatgctaaacacaaaacatgtgagtgtcatagctgaggaaccctaagcttaagaaaaccctaatttgataacaatgctactagcatacctgctagactcttgccctgaaaacacattttttttttttttttttttactatgtctatcaggaaacaaagctaccctctgccctggtagtgttttcttataggaaaacactattgctatctttcaggattgcttgctacacaaatgttctttgaaagatagccctggaacaaacacagaaacaaaacttgcagaaatgacacgatgaagtgtttcccagcgtatgtttgtacagtgttcttcctgctgagatgtgaccctaagttttaggaatattctctccttcttccactgtcccaggtacaatgactgcagctaagttcataaacattacctcgtatatcatccaaattgagctaataatggccctctgcccaaatttgctctatgctttggcaaacagggagaactgtacaccacaaaaactaatatgcaactgtacaccacaaaaactagtatgtatattaggaagttgcaagtaccatttttaagtcaaatatcaaaggttaacatacaggcataagaatgaaagagataggcagggtagagaataaataagagataaaaacaggaaactaggacttgagccttgagcagtggccccaaataggttctgagtcccaattgcttgcttgactttgagtataacttccccatgaggttctcctttttgcctaaattaactcgaatacattatttttattt

SEQ ID NO: 59004 - DNA, 1299 bp, Homo sapiens
actgtcccacataagaagaaaacattttatcaataaaaatatttctgtataccacaattttatttcatgaaattgattttatcaaatttgcataaataccctgtttttattgctttgaaaaaatacatttagtctgattttattttgatggttatgaataactttatgagtaaaacattcttccaattgaaagcaaatttcaaaaggaatagaaattgtaaagaaaattctgttgtgtcattattagtagaattgtgctgtggaaaggattaactgaatgagtgcattttgtcaagaactatggataattagagattttatcaaactttctagctaataacttggcctgccacagtctcatggatctggcagaagacatgaaactcctgggtcagaagaaaaggattttatgactcrcagtacaacaggcagctcttacttcgtcttcacatcagttacctttctcatctaagtcccgcaagggtgatgctgaggtcatcccagatggatgctaaacacaaaacatgtgagtgtcatagctgaggaaccctaagcttaagaaaaccctaatttgataacaatgctactagcatacctgctagactcttgccctgaaaacacattttttttttttttttttttactatgtctatcaggaaacaaagctaccctctgccctggtagtgttttcttataggaaaacactattgctatctttcaggattgcttgctacacaaatgttctttgaaagatagccctggaacaaacacagaaacaaaacttgcagaaatgacacgatgaagtgtttcccagcgtatgtttgtacagtgttcttcctgctgagatgtgaccctaagttttaggaatattctctccttcttccactgtcccaggtacaatgactgcagctaagttcataaacattacctcgtatatcatccaaattgagctaataatggccctctgcccaaatttgctctatgctttggcaaacagggagaactgtacaccacaaaaactaatatgcaactgtacaccacaaaaactagtatgtatattaggaagttgcaagtaccatttttaagtcaaatatcaaaggttaacatacaggcataagaatgaaagagataggcagggtagagaataaataagagataaaaacaggaaactaggacttgagccttgagcagtggccccaaataggttctgagtcccaattgcttgcttgactttgagtataacttccccatgaggttctcctttttgcctaaattaactcgaatacattatttttattt

SEQ ID NO: 59005 - DNA, 1299 bp, Homo sapiens
actgtcccacataagaagaaaacattttatcaataaaaatatttctgtataccacaattttatttcatgaaattgattttatcaaatttgcataaataccctgtttttattgctttgaaaaaatacatttagtctgattttattttgatggttatgaataactttatgagtaaaacattcttccaattgaaagcaaatttcaaaaggaatagaaattgtaaagaaaattctgttgtgtcattattagtagaattgtgctgtggaaaggattaactgaatgagtgcattttgtcaagaactatggataattagagattttatcaaactttctagctaataacttggcctgccacagtctcatggatctggcagaagacatgaaactcctgggtcagaagaaaaggattttatgactcgcagtacaacaggcagctcttacttcgtcttcacatcagttacctttctcatctaagtcccgcaagggtgatgytgaggtcatcccagatggatgctaaacacaaaacatgtgagtgtcatagctgaggaaccctaagcttaagaaaaccctaatttgataacaatgctactagcatacctgctagactcttgccctgaaaacacattttttttttttttttttttactatgtctatcaggaaacaaagctaccctctgccctggtagtgttttcttataggaaaacactattgctatctttcaggattgcttgctacacaaatgttctttgaaagatagccctggaacaaacacagaaacaaaacttgcagaaatgacacgatgaagtgtttcccagcgtatgtttgtacagtgttcttcctgctgagatgtgaccctaagttttaggaatattctctccttcttccactgtcccaggtacaatgactgcagctaagttcataaacattacctcgtatatcatccaaattgagctaataatggccctctgcccaaatttgctctatgctttggcaaacagggagaactgtacaccacaaaaactaatatgcaactgtacaccacaaaaactagtatgtatattaggaagttgcaagtaccatttttaagtcaaatatcaaaggttaacatacaggcataagaatgaaagagataggcagggtagagaataaataagagataaaaacaggaaactaggacttgagccttgagcagtggccccaaataggttctgagtcccaattgcttgcttgactttgagtataacttccccatgaggttctcctttttgcctaaattaactcgaatacattatttttattt

SEQ ID NO: 59006 - DNA, 548 bp, Homo sapiens
caatggtaaaattttcattcagttcattcttataatttatatgtttgtatttatattcttttttacataagatattgtcatcatatatttttacttatacatggtctattttagttttstgattatactaatatgtataaagctactttaaaaatcttcttctaccaagttcaacatctgggcctcatctaaagcaacttttattacctgcttttttctgtgtatgaatcacactttcctccttttcataattttttggttgttaaaaatctttacatttttatattttgtatcattactgttctggatacttctcctccctctccccatgaaggttaatgtttttgctgctatagtttttgtttgctttgccttttatttatttgcttaatggttttgcataactcagtatgcaaaatttgttcttccacaaatacgaagtccttgatacctctgtttaaattctgtttttgttttatgttttacctagcagtcactgtgggtcaatgtaagatacatattgatgaagggttgtatctaagaccctt

SEQ ID NO: 59007 - DNA, 744 bp, Homo sapiens
gagtctgaacagagactttgcccaatttcccccttcagtctataagcattagatcataccacttgcccaatcgtgtctctacacaactgtccattcttcattgaacctaggcataaaaatgaataatttcccctgtatctttgagtcttcaaaggttccatgttacctaaaactacaatcaaatatcaaatttcaaaaatcaaatttcttatgctcttctcttgttaacatgtctttgttattagagtgtctgccttgattcttatgatagggaggaaagagatcacccactttccagtcctacaatgaggaggaaatagcrggatatttactgtattgagcttgaaaaaaagtgattgaaaatgaaccttcaactggcaagagaaagagagattctatctggctttcttttacaatgttccaatatcattttgagattataacaagacatgtttgtcatcgtgactttattagccttccaaaagaagttcaagattaaccagaaaatacattacttaaaataagacattaataatatattctacaaagaaacagatgcaaaatatgctaataaatctggccaaaactaattatcaaaactgagtcacaagatgtgtaccacacatacatttgcatttgtgcctgagcactgcagcccgaaaggctcatcccatggctctactggcagatgtaactgaagaactggaaatgttgagtcttgtcatgacaatgcttctttctgtt

SEQ ID NO: 59008 - DNA, 954 bp, Homo sapiens
aggaaccaaggaaacgaccatgagatgggtctgtgcatgagtgaaacctgctgtgagatggcactaggtgagaactccatcgactatctaacctccccatttactactactccaatgggagggccatggtggtactttgagtagtccccttctcctaatatatgtttatctgagcaagtggccataggatgtcttgggaaagactgggagaatcaatacagtatattcttgccatggtggtacagagcccaacctcatggagaytcagtctgtccttttgtcagtgggttctggttagaaaactggttctggcctgggcactgagcaggaggagatcatgtttctctactgggctggctgactccaggcttctgctcctctattcttgatctctgtatctttttttttttttttttttgagatggagtccttctccttgctctgtcgctcaggctagagtgcagtggcatgaccttggctaactgcaacctctgcctcccgggttcaagtgattctcatgcctcagtttcccgagtagctgggactacaggcacgccaccatgcccggccaaattttttttttttttttttgtatttttggtagagatggggttttaccatgtttcccagggtggtctcaaactcctgggctcaagtgatcctcctgcctcggccttccatattcttgatctcttttaaatatgcctttgttagttgcccatctgtgttgccctaagaacaccatgttccttgagctaccttcatagatccctgtagatctatgctgccattgcatccttgctgcctgttattgaagtcacacccatcttatgtttgatggttagatattgccatttggcctttgctcctctgggataccattgcttccattgctttcagggagctgagatatgaattggcatcttctgttttccactctcatttacaaagaac

SEQ ID NO: 59009 - DNA, 954 bp, Homo sapiens
aggaaccaaggaaacgaccatgagatgggtctgtgcatgagtgaaacctgctgtgagatggcactaggtgagaactccatcgactatctaacctccccatttactactactccaatgggagggccatggtggtactttgagtagtccccttctcctaatatatgtttatctgagcaagtggccataggatgtcttgggaaagactgggagaatcaatacagtatattcttgccatggtggtacagagcccaacctcatggagactcagtctgtcctttwgtcagtgggttctggttagaaaactggttctggcctgggcactgagcaggaggagatcatgtttctctactgggctggctgactccaggcttctgctcctctattcttgatctctgtatctttttttttttttttttttgagatggagtccttctccttgctctgtcgctcaggctagagtgcagtggcatgaccttggctaactgcaacctctgcctcccgggttcaagtgattctcatgcctcagtttcccgagtagctgggactacaggcacgccaccatgcccggccaaattttttttttttttttttgtatttttggtagagatggggttttaccatgtttcccagggtggtctcaaactcctgggctcaagtgatcctcctgcctcggccttccatattcttgatctcttttaaatatgcctttgttagttgcccatctgtgttgccctaagaacaccatgttccttgagctaccttcatagatccctgtagatctatgctgccattgcatccttgctgcctgttattgaagtcacacccatcttatgtttgatggttagatattgccatttggcctttgctcctctgggataccattgcttccattgctttcagggagctgagatatgaattggcatcttctgttttccactctcatttacaaagaac

SEQ ID NO: 59010 - DNA, 954 bp, Homo sapiens
aggaaccaaggaaacgaccatgagatgggtctgtgcatgagtgaaacctgctgtgagatggcactaggtgagaactccatcgactatctaacctccccatttactactactccaatgggagggccatggtggtactttgagtagtccccttctcctaatatatgtttatctgagcaagtggccataggatgtcttgggaaagactgggagaatcaatacagtatattcttgccatggtggtacagagcccaacctcatggagactcagtctgtccttttgtcagtgggttctggttagaaaactggttctggcctgggcactgagcaggaggagatcatgtttctctactgggctggctgactccaggcttctgctcctctattcttgatctctgtatctttttttttttttttttttgagatggagtccttctccttgctctgtcgctcaggctagagtgcagtggcatgaccttggctaactgcaacctctgcctcccgggttcaagtgattctcatgcctcagtttcccgagtagctgggactacaggcacgccaccatgcccggccaaattttttttttttttttttgtatttttggtagagatggggttttaccatgtttcccaggstggtctcaaactcctgggctcaagtgatcctcctgcctcggccttccatattcttgatctcttttaaatatgcctttgttagttgcccatctgtgttgccctaagaacaccatgttccttgagctaccttcatagatccctgtagatctatgctgccattgcatccttgctgcctgttattgaagtcacacccatcttatgtttgatggttagatattgccatttggcctttgctcctctgggataccattgcttccattgctttcagggagctgagatatgaattggcatcttctgttttccactctcatttacaaagaac

SEQ ID NO: 59011 - DNA, 954 bp, Homo sapiens
aggaaccaaggaaacgaccatgagatgggtctgtgcatgagtgaaacctgctgtgagatggcactaggtgagaactccatcgactatctaacctccccatttactactactccaatgggagggccatggtggtactttgagtagtccccttctcctaatatatgtttatctgagcaagtggccataggatgtcttgggaaagactgggagaatcaatacagtatattcttgccatggtggtacagagcccaacctcatggagactcagtctgtccttttgtcagtgggttctggttagaaaactggttctggcctgggcactgagcaggaggagatcatgtttctctactgggctggctgactccaggcttctgctcctctattcttgatctctgtatctttttttttttttttttttgagatggagtccttctccttgctctgtcgctcaggctagagtgcagtggcatgaccttggctaactgcaacctctgcctcccgggttcaagtgattctcatgcctcagtttcccgagtagctgggactacaggcacgccaccatgcccggccaaattttttttttttttttttgtatttttggtagagatggggttttaccatgtttcccagggtggtctcaaactcctgggctcaagtgatcctcctgcctcggccttccatattcttgatctcttttaaatatgcctttgttagttgcccatctgtgttgccctaagaacaccatgttccttsagctaccttcatagatccctgtagatctatgctgccattgcatccttgctgcctgttattgaagtcacacccatcttatgtttgatggttagatattgccatttggcctttgctcctctgggataccattgcttccattgctttcagggagctgagatatgaattggcatcttctgttttccactctcatttacaaagaac

SEQ ID NO: 59012 - DNA, 565 bp, Homo sapiens
tgctcattcctgactctctgaaattccttacacttctcttcctaaggtagtcctattcattccttaataccaagcctcaatatcattgactttgagaagyttactttgactctgccagacagaaggaatcctctgctcttctgttcctcacagccctaaagataacattacattgtaagtaatttatacagatgtctttcacatagactgtttgtcgagttaaagaaccttgttttactcatctttgtgtttccaaagcctagcacagtgcctggcacatggtcagatggtaggtgttcaataggtgctagataaataaatgaataagtgaattgtaatagacacttgataaccattgtctgaatgggcacaagaagaatctgatacaatttgttttcataacagaataatatggcctaattcaggatctggggctcagatgccaaaaaagtctctctcctccaacctagccatgtgtttttgtggctttatgtaaccttgtccctccacaaatgtacatgggaatggaggggtacaaccctggtcccaaaaaggagaagtgaaa

SEQ ID NO: 59013 - DNA, 733 bp, Homo sapiens
caacctgtaataatagtatccacagccaggcacagtggctcacacttttaatcccaaggagggtggaccacttgagcccatgaattagagaccagcatgggcaacatagtgagatcttatctctacaaaaaaaaaaaaaaattaaaacttagctgggaatgatggtgtatgcctgtagtcccaactacctgggaggctgagatgggaagatcacttgcaccccagagatgaggctgcagtgagccatgatccagcctgggccacagagtgaggccctaatcaaaaataataacataaaaatagtacccacctcctgtggttaatgtagggttaaatgttaatatatataaacacttagcaccatgcctggcacagggtaacccttcaataaggtaataaggatgttaggtatcaycattacttccttttaatcattaggtgcctaaatgatctcaattgtacccttgctgctttaataaaattcaaacctttttcatggcttacacagccctatactgtctcattcctacctgtctctcagacctcatcccatatcactctttcttatttacactgcttgaaccaggctagatgtctttctgtccctgaaacatatcaagcttattctcattttaggacatttctatagattagaaacagacttgaaagccatattcatctgctcagccagggactttgtaataaatataatgaagtttgaattccaagtgca

SEQ ID NO: 59014 - DNA, 656 bp, Homo sapiens
  misc_feature (1)...(656): n = A,T,C or G
attcacatttcctatgaagaaaggnaagtgagcataaaaaaaaaatctcacattcactcaaagtcagataccacatactgaaattcaggaactcaagtaaatgccttaaagcaatgcacttcaataattagtgatgattcctccagtttcatgacataaaatggatatttatgtaataatgcctgatattggatacatagtgacaaaaacagagatatgaattcagagcaagcctgtgaagcttccagtgggatctagaaaaattcgtgaaaaagaaaagcactgtgttgagtgcttactccgtctcctaccctgtgccatccccctcatcatgtgctattggttaattgttacaacactgccagaaggtatttttattccctttttcagaagagaaaaagctgaggttcaaaaaaattaaataactcccaaggagttaattattagactgyggcaaagccaggattcaagctcaaatctgtctccaaaactcatattcattgtataattcccagaagaagaaaaaagcaaatctcacattgaataaacaagatgaatcaagtttggggacaaaaataatacagtaaacaaacactttattattaaatacattttaatttacttgaaacatctttttactaagtgctgcttcttcc

SEQ ID NO: 59015 - DNA, 1060 bp, Homo sapiens
taacacattgcatcaatgatttttatgctaatactcttttcaatatctgattagtcagtaacaatgacaacaacaaagcaaaggttttaaaaatgcttaaagggtaaaagggaaaggaagaaattagaagacaagcatgtgctgttcgcaacttcctggatcacaaggggcttcttcaccctccatttccttccctaagagttcccagagcccaggctcagtttcatgcccagaaacagcaacagagatgctagggcccaaccggtttcagaactcactgcctcccataaaactatgtctcttaattctgatgcagataataacaaaggcagatgaccaagccaacaaacattttccccatgccgccttccttatattagttgaataaatgtaagcatattaggttcgttgcctgatgcacacagcaagtcacaaagccgagacaccaggttgcagcagagaaaaatgtttaatcgtagggtcactgaaagaggagataagagaaaacctcaaatccatgtccctgaggagtttaggggtagggtttttaagggttttggagtggrctaaagtgtggagacccttgattggtcacagagcgcaaggtgaagtcactttcctgaagacaggaaaatgaagaagctgtattttcatgctgatcctgttcctctgtgagggtcttcaaactggttgttggaattcaggatctgaaaaacatctcatgcaactcttaaacaaactgtcacagatcctgtctataggaaccatgggaatgcaaatcaattcttaaacagccttaaaatcctaatgtcagaaatcctatcaatagaaataatggagatgcaaatggtcagtatctagtgctgcctgacttttagcaacaaggaagtgggccaaagtgcagcctaattaatctttaattataactatatttctgatcagtatctggcatgcaattcttgtcaaccctgtaaggatggtttcctaaaggtatggagtggtccatccatcatgtgaaccctccacagaccctgaaactaccgtggaagatcagatgaag

SEQ ID NO: 59016 - DNA, 1060 bp, Homo sapiens
taacacattgcatcaatgatttttatgctaatactcttttcaatatctgattagtcagtaacaatgacaacaacaaagcaaaggttttaaaaatgcttaaagggtaaaagggaaaggaagaaattagaagacaagcatgtgctgttcgcaacttcctggatcacaaggggcttcttcaccctccatttccttccctaagagttcccagagcccaggctcagtttcatgcccagaaacagcaacagagatgctagggcccaaccggtttcagaactcactgcctcccataaaactatgtctcttaattctgatgcagataataacaaaggcagatgaccaagccaacaaacattttccccatgccgccttccttatattagttgaataaatgtaagcatattaggttcgttgcctgatgcacacagcaagtcacaaagccgagacaccaggttgcagcagagaaaaatgtttaatcgtagggtcactgaaagaggagataagagaaaacctcaaatccatgtccctgaggagtttaggggtagggtttttaagggttttggagtggactaaagtgtggagacccttgattggtcacagagcgcaaggtgaagtcaytttcctgaagacaggaaaatgaagaagctgtattttcatgctgatcctgttcctctgtgagggtcttcaaactggttgttggaattcaggatctgaaaaacatctcatgcaactcttaaacaaactgtcacagatcctgtctataggaaccatgggaatgcaaatcaattcttaaacagccttaaaatcctaatgtcagaaatcctatcaatagaaataatggagatgcaaatggtcagtatctagtgctgcctgacttttagcaacaaggaagtgggccaaagtgcagcctaattaatctttaattataactatatttctgatcagtatctggcatgcaattcttgtcaaccctgtaaggatggtttcctaaaggtatggagtggtccatccatcatgtgaaccctccacagaccctgaaactaccgtggaagatcagatgaag

SEQ ID NO: 59017 - DNA, 615 bp, Homo sapiens
tttttttttttttttggaaatggggtcttgctatgtttcccaggctggtctcaaacttctggtctctagcaatcctctcactttggcctcacaaagtactgggattataggcatgagccactgtgcctggccaagagctcatattctaaacttgctataaagtatagcttttggaggaagttcaatcattaaacagcagttgattttatagatgaatttttattttatgttaaggaatagtgtactacatttttaagtaaatattgggccattaaaatacgtaaatatgaagatcttcattagttttgaaaaattggcacatcgcaatgaaaacatagactcaaatataagttccaacgatggattagtacaaaactcaacagtatattttcttattgactatgttttctgttcttagaaaaggatgatgtgtgtgtatttcaagaagtatcagtattgaatcctggacaatccatgataaagtatttggaagaagacttttgttatrctatagagtgtctggaagaaaaagataaccatacaggctttcacactctgaattttacactggtgaattgttcaaaaaaatgtgatgttgtaagtattccttgtaat

SEQ ID NO: 59018 - DNA, 959 bp, Homo sapiens
taacagttgctctcaaaactatcaaactcccctgaagaaaaacagggtctccaagtagttatgaagaaaagatttatgttagaaagtttcttaacttttgttttcaaagaaagattctagaagaaaaaaaggagtatggaaaataattcagtaaaaggtgatagtaataaagcaagtaagatggctcagaaaaaagagaaatgtcaccactgagtgtcctaaagattagcatatacagcatcagagtgttctagtctttcaaaaacgtctttttatggtatccacagagaaaaataactattgaccaaaaaaagtcatatttacgtgtctgggacctggatgtggggagcattagtcattcaaagtatgctggaatttggctggtgtggtggcttgtacctgtaatcctagcaatttggtaggccaaggtgggcaggttacctgagctcaagagtttgagaccagcctgggtaacatggtgaaactccgtctctactaaaatacaaaaaattagccagcatggtggggtggcacgcatctgtaatcccagctacccaggaggctgagacacaagaatcgcttgaacccaggaggcggaggttgcagtgagccaagattgcgccactgtactccagccttggtgacagtaagactctgtctccaaaaaaaaaaaaaaaaaggtatgctggaatttaataattcatgacctcaaactggccaaatttcaagcaatatttatcttaaatcatrcaactgtatctcctattgtcatgcctacctttttttcttacccttgtagataatcttctattcaatttttgttttctaaattcttctctttagaataatatgaaaaccagtaacattcactgagcactcaatacatgtaaaacattttgatacactctgggtggggggcataaaggtaagggtgactctttacatcttgtatttttgtg

SEQ ID NO: 59019 - DNA, 959 bp, Homo sapiens
taacagttgctctcaaaactatcaaactcccctgaagaaaaacagggtctccaagtagttatgaagaaaagatttatgttagaaagtttcttaacttttgttttcaaagaaagattctagaagaaaaaaaggagtatggaaaataattcagtaaaaggtgatagtaataaagcaagtaagatggctcagaaaaaagagaaatgtcaccactgagtgtcctaaagattagcatatacagcatcagagtgttctagtctttcaaaaacgtctttttatggtatccacagagaaaaataactattgaccaaaaaaagtcatatttacgtgtctgggacctggatgtggggagcattagtcattcaaagtatgctggaatttggctggtgtggtggcttgtacctgtaatcctagcaatttggtaggccaaggtgggcaggttacctgagctcaagagtttgagaccagcctgggtaacatggtgaaactccgtctctactaaaatacaaaaaattagccagcatggtggggtggcacgcatctgtaatcccagctacccaggaggctgagacacaagaatcgcttgaacccaggaggcggaggttgcagtgagccaagattgcgccactgtactccagccttggtgacagtaagactctgtctccaaaaaaaaaaaaaaaaaggtatgctggaatttaataattcatgacctcaaactggccaaatttcaagcaatatttatcttaaatcatgcaactgtatctcctattgtcatgcctacctttttttcttacccttgtagataatcttctattcaatttttgttttctaaattcttctctttagaataatatgaaaaccagtaacattcactgagcaytcaatacatgtaaaacattttgatacactctgggtggggggcataaaggtaagggtgactctttacatcttgtatttttgtg

SEQ ID NO: 59020 - DNA, 1010 bp, Homo sapiens
catggaatatgctctcmcttacagatcttgcaacagccttcattataaagcttcacaatcccttcattctagaaagagaaaaaagcaataaagtcaaagaatatggtgttcttccatgttctcttgtactagaaaaagaaaactaacttttctaaaacttttatcaaataccacaaagccttcatagaaaaatagttggaatttaactattactaaaaagaacttgtttttaaaatctggagtagatattttgtttaaaattacattatttatacattggtactatggaaaagagtgtaaaaggattattctacttaaaaggacactttaaatgccacaaaatattcttactaaaacaaaataataacagctattctaaataatgaccattatatattttcaactccttgaaataacctaaactacttccatttgacttgagtttctgaatataactgaatgttaaaattgtacatctttttctttgatagtttttatgaaaaaatatttccttccttggaaggactcttgtctaagactaaatttttacaagaattactaattgctttagcaacctactaactgcaattgaaataagagaatgatttacgctataaatattagtctgtgaaacaagatgatgcccaagttttttccagagctgaaattctgtgactttagtacgtgttatatctagctagccagccagccgtcatcattgaaaaggtacatcctgaaaaaaaatcaatgagactagactgtactatttctctatacaacggaacaaagcctagttttcattaggaattattattgtctaaataaataaagctacaaaaatcttgcaaaataaaaattatattatgttcacaaatctacttttccagtaaactcttctctgaaagaatagggaaattgatagagcaaaacataagaataggcaatcctgtgacttgtactaaatttttcagtgacctgtgaccagaaaagctagggcaaacatcatacag

SEQ ID NO: 59021 - DNA, 1010 bp, Homo sapiens
catggaatatgctctcacttacagatcttgcaacagccttcattataaagcttcacaatcccttcaytctagaaagagaaaaaagcaataaagtcaaagaatatggtgttcttccatgttctcttgtactagaaaaagaaaactaacttttctaaaacttttatcaaataccacaaagccttcatagaaaaatagttggaatttaactattactaaaaagaacttgtttttaaaatctggagtagatattttgtttaaaattacattatttatacattggtactatggaaaagagtgtaaaaggattattctacttaaaaggacactttaaatgccacaaaatattcttactaaaacaaaataataacagctattctaaataatgaccattatatattttcaactccttgaaataacctaaactacttccatttgacttgagtttctgaatataactgaatgttaaaattgtacatctttttctttgatagtttttatgaaaaaatatttccttccttggaaggactcttgtctaagactaaatttttacaagaattactaattgctttagcaacctactaactgcaattgaaataagagaatgatttacgctataaatattagtctgtgaaacaagatgatgcccaagttttttccagagctgaaattctgtgactttagtacgtgttatatctagctagccagccagccgtcatcattgaaaaggtacatcctgaaaaaaaatcaatgagactagactgtactatttctctatacaacggaacaaagcctagttttcattaggaattattattgtctaaataaataaagctacaaaaatcttgcaaaataaaaattatattatgttcacaaatctacttttccagtaaactcttctctgaaagaatagggaaattgatagagcaaaacataagaataggcaatcctgtgacttgtactaaatttttcagtgacctgtgaccagaaaagctagggcaaacatcatacag

SEQ ID NO: 59022 - DNA, 773 bp, Homo sapiens
gtgtaaraaatgtgttaaggaaaagaacagcattctatcagaaagaatagccgaagttatatttaaacaggggtctaagaagtctggatttaaatttcttaaatactgttatgactgctgaattaagagaactcctaagggggcaaggctgacagtgggaccaaccacaaaactaatttagaagtttaggcaagagaggagcatcatttgaatttgtgtggccacaggcaacgaaagtagagagaagtggatgaataagctgttaccaatattataccaatgaggccaaacaatgaatttaaccacaagggctgaatttttatcttacactttatacaatagtaagtaaatacaaaaagcctgtgtacctagagccacttaaagtcatgtgaatgttctatatcattacatagaataagctgtactctgtcttgactgcagtttgactaaggatcacttagaaaattttttttcagctttataaaaatataattgataaataaaattatatatcattagggtgtaaaacacaatgtcttgatatattcatgcactgtaaaattgagagacaggactagctgtatttcctaggccgactaagaatccctaagcctagctgggaaggtgaccccatccacctttaaacacggggcctgcaacttagctcacacccaaccaatcagagagctcactaaaatgctaattaggcaaaaacagtaggtaaagaaatagccaatcatctattgcctgagagcacagcaggagggacaagg

SEQ ID NO: 59023 - DNA, 665 bp, Homo sapiens
cgttaaatacttatcgttacatacatgtcgttacatatgataaatcaattccttatgagaccctagaaattgatagcccagatattccccctcttaatgagggtttatcattgaacacgaacaaagccttagtataagcaatgttgccctaatggtggaatcatgggctttacggaagcacgttggagaaaatattttgaatccaagaggccttttggagacagaggctcagtaagtaggtacccattcatccatcacatccatgtttaggatctaaatgtccttaatttcatagtaatttattcatgccaggaatgagcagagaatcaggatgggggaagtatcagaggggccaagaaatcatagacaagggtgtccgggtaaagaagactttgtyataggcagcagcacaacatagctcttctctgacatccccctcactctttcttcccatccctgttcctttgtcaccatggaaaccaatgatgctccctccttctcctcccctctctgctcactcgggtccccaggccccactgctctttgtctgactggcttcacaccgcggttgccagcctctttgcaaacactgagcctgggcatgcagcttcaccttcttttcaccctccaccccgccaccctctcccgcctcattttcctgctcc

SEQ ID NO: 59024 - DNA, 569 bp, Homo sapiens
ttgtcaaaccatcatctggcatttttagtggtcaggggagagcccccttctgcccttagcatgcctgtctaactacctgtaacaatctctctctccctcaaaataccgtattgtactgtactcacctttccttcttgtgatgatgtgagatgataaaatgtccacttgatgagataccatgacggttcatctgataaccgagacarctactaaatgactcagcaacaggtagcatagacagcatggatacacttgactaagggatgactgacatgctagtataaagtggtacagcacattttatcactttatgatacttagaacagcatgaaatttaaaacaattatttctagaattttccacttaatattttcagacctcagttgactgtgggtaactaaaaccatggaaagtaaaaccatgaatacaggaggactatggcacttttttgtgttgtggtcatgtacctaccttcctggcagtcatcaatcattggaactttaataacctaacctacaggttttgtaatttcaaaccagggcccactagcacagagtatattttttcaa

SEQ ID NO: 59025 - DNA, 892 bp, Homo sapiens
tataatgactcctctttgttgcaaagaaaactaaagaggcatatagcatattttaaaattggaggctattcacataaaataaatgaataattctgcagcatgataaacaaaagcaaatattgacatggaattttctgaacattaaaaaaatagatttggtagttatagccgttgatggggaatgcaaaaaattataatttgccaaattgactttctaatataacttgctttaagaactatgttacttaataattcaatggtattcatagcaaaagaattttctctacttgcctgaaatcctcatttcgacttgaaaatatgaatggctgttttaattttttttttttttttttgagacagaaccttgttctatcacccaggctggaatgcaatggtacaatgtcgcctcactacaacctccacctctcccagattctaaccattctgtaagctctcccaagtctctaagactacaggtgcctgccaccayacttgactaatgtttgtatctttagtagagacagagtttcaccattctggccagactggtctcaaactcctggcctcaagtgatctgcccaccccagcctcccaaagtgctgggattacaggcatcaaccactgcacagggcctatttgaatgttttattatgcgtaatatattctcatctagaccttcatgttctaaacatttggaagatttaccatgtctagtgataagagattttatttttatatcaacaagtgttaaaagctatgtgttttaaaaggtaaaatcatgacttatatattagtacaaaatataagtgagtcaaagattttattttactgagtaactgataagggaaccagcaagatgataaaactgattcaagagattccaaagaatgca

SEQ ID NO: 59026 - DNA, 892 bp, Homo sapiens
tataatgactcctctttgttgcaaagaaaactaaagaggcatatagcatattttaaaattggaggctattcacataaaataaatgaataattctgcagcatgataaacaaaagcaaatattgacatggaattttctgaacattaaaaaaatagatttggtagttatagccgttgatggggaatgcaaaaaattataatttgccaaattgactttctaatataacttgctttaagaactatgttacttaataattcaatggtattcatagcaaaagaattttctctacttgcctgaaatcctcatttcgacttgaaaatatgaatggctgttttaattttttttttttttttttgagacagaaccttgttctatcacccaggctggaatgcaatggtacaatgtcgcctcactacaacctccacctctcccagattctaaccattctgtaagctctcccaagtctctaagactacaggtgcctgccaccatacttgactaatgtttgtatctttagtagagacagagtttcaccattctggccagactggtctcaaactcctggcctcaagtgatctgcccaccccagcctcccaaagtgctgggattacaggcatcaaccactgcacagggcctatttgaatgttttattatgcgtaatatattctcatctagaccttcatgttctaaacatttggaagatttaccatgtctagtgataagagattttatttttatatcaacaagtgttaaaagctatgtgttttaaaaggtaaaatcatgacttatatattagtacaaaatatamgtgagtcaaagattttattttactgagtaactgataagggaaccagcaagatgataaaactgattcaagagattccaaagaatgca

SEQ ID NO: 59027 - DNA, 1308 bp, Homo sapiens
gtttggaatgtgtactaatgagagagcaggtgtactagtcagtgttttccagagaaacaaccattaggatgtgtatgtatgtacagatagatagatacgtaggtagatagatagatagatagatagatagatagatagatagacagatagatagatagatagatatttttaaaaataaattgaagttgacaattctaaaatctacagtgtgggctggcaggtcaaggaccaagaaaagcccatttttcagttctagttcaaagactggccggctggagactctggaaaactgatggcaagggtgatgtccaaagactgtcttctggacaattccctgttgctttgggagactgatatttttgcccttttcagaccttcacctgattagatgagccctagccacattatggaggacagtctgtttagtcaaagtttaccaatttaaatgctaatttcatccaaaatgccctccaasttgacacataaattaagcatcacaacagcatatggaaagagcttagttgtcagtagttactatggaacatgtactatcgttcttaattttaaagtaagcctgtgtgtgtgtgtgtgtgtgtgtgtgtgtgtgtgtgtgtgtaagacaatttttttagtcttttagacttataagaacaaaatgtgatattatctataaaagagtttagcaaactgcaaagttcagtataaacctaaggtggggtcattattattatatatctatatatttttagagatgggttcttattctgtcttccaggctagagttcagtggtgccatcatagcccactgcaatttcaaacccctggacccaagcaattctcacatctcaacctcctgagtagctgggcctacaagagttttagatattggctatctaaaaaaatatatatattttttgtagagacagggcttcattatgttatccaggctcaaactcctggcctcaggcaatcctcctgccttagcctcccaaataactggaatttcaggaatgagccagtaagcctggcatggaatcattattattataaaagcttttggagtcataattatgttgaatgtgccttttagatacctaaaacctgtgactctaagagcaatgctaaatgtgtcatcattttaaaatcattcttatcatctttgttggcattatcagaatttaagtatagatagatagatagatagatagatagatagatagatacatagattgttctgtttcagtcttttaaatttccaatgtgaaatttgctctttcttgaaaattgcatttaaacatttaaaccaca

SEQ ID NO: 59028 - DNA, 676 bp, Homo sapiens
gtctctatctggaaagcagacagaccaggccctaaggccctaacctgcctgtgccttaattttggacttcccagttcccagaattttgaaagaataaatttctgctctctataaattacccagtctatggtgttttgtcatagcagcataaaatgaactaagacacccccctctttagagatctttaatgggacaggtgtgaggctcaaatatgaaatgtactcaaacagaggaaatcatccatacattaaaagtaagagagaatatctacaagaatcagattaatcctgttattacatctcaggaattggcaccagctactgccatctccctgggtgattttcaaaggccaagagtttctgcccaatagccccatcgttagtcaaggaccttcatcgttcccatcccctatccatgtactgatcctkctttcccaacaagtccatcccccaaatcaaaatgtacttttccttttttacaaattaaccatacctagactgtttagataaattgtctgtgaattgtctgtaaaggtggaatgaagctcaatccttctggggttaagctactccagtcttctctattcaccatcttttgagaacatcagattgtgtgcatgccaatctgtcaacctaaccccactttatttatctgccctggaaattcctctttatcc

SEQ ID NO: 59029 - DNA, 1253 bp, Homo sapiens
gcattcaaaccatagcagctgctaaggcccgttgttttccagaagcttggctacggagctgggggaatacctggtgtgggagaaagatggagccaaaaatgtataccactaacagggtgtaaaaaagttttgcacatggacattaattaatgaaaagatatgccctcaatcctcaatttctcattatccaaaatgaataatttcctaaatatatctaatagttaccagtcatgggtatgaatattgcaaatagatgttccattgataaactacattttgtagtgattgataatttatttatatcatttttatgatacttagtctggaactaaaaataaattttagtattatatttatttttaagtaaacaccctgcaagcataaaaaatactttaaagacatgagtagcactatggttaaggaaatagaattctatatttacctcatcattatgaaacttctgagtcttactttctacattagtgaaattggacaatgactgtcctatcaggggatgttacggagatgaaaaaggttttaaatgcaaaaatatttgaaaacgtttcaaagtatacaaaataaaagtaatggtggtaatgatatgataaagagtcaatcatcttattttgggaatcaaattcaaagctaaatacttctgttaaattaaatttggcctaaatctgccttcccactttgagtcctcccatggcaaactacaacctaactcagtgtgtaaacaaacttcagcctaactgaagagttgattcctgtaacaaacaggtgagtcttggccaatcacagatcacagattgtcagctgatcagaccatgtcaatatagggtaaatgctttaccacaccatccctaagtaaggcaaattccaagctgtaaccaaccatgctgtttctgtagaacatttcttttctatwaatactgcccctgcccccatgttgctgggtggagctcccagtacctttcctagttctgattactgtccaattcatgaatcattctttgctcaaataaacacgctaaatttaatttataaaaaaattttcttttaacacttcatttttttaaattttgaggttcagggttatatgtccaagtttattatataggtaaactgtgtgtcacaggcatttggtgagcagataattttgtcacccaggtaataagtatagtacctgataggtatttttttctgatcctcttcttcctcccattcttcacactcaagtaggccccagtata

SEQ ID NO: 59030 - DNA, 1253 bp, Homo sapiens
gcattcaaaccatagcagctgctaaggcccgttgttttccagaagcttggctacggagctgggggaatacctggtgtgggagaaagatggagccaaaaatgtataccactaacagggtgtaaaaaagttttgcacatggacattaattaatgaaaagatatgccctcaatcctcaatttctcattatccaaaatgaataatttcctaaatatatctaatagttaccagtcatgggtatgaatattgcaaatagatgttccattgataaactacattttgtagtgattgataatttatttatatcatttttatgatacttagtctggaactaaaaataaattttagtattatatttatttttaagtaaacaccctgcaagcataaaaaatactttaaagacatgagtagcactatggttaaggaaatagaattctatatttacctcatcattatgaaacttctgagtcttactttctacattagtgaaattggacaatgactgtcctatcaggggatgttacggagatgaaaaaggttttaaatgcaaaaatatttgaaaacgtttcaaagtatacaaaataaaagtaatggtggtaatgatatgataaagagtcaatcatcttattttgggaatcaaattcaaagctaaatacttctgttaaattaaatttggcctaaatctgccttcccactttgagtcctcccatggcaaactacaacctaactcagtgtgtaaacaaacttcagcctaactgaagagttgattcctgtaacaaacaggtgagtcttggccaatcacagatcacagattgtcagctgatcagaccatgtcaatatagggtaaatgctttaccacaccatccctaagtaaggcaaattccaagctgtaaccaaccatgctgtttctgtagaacatttcttttctattaatactgcccctgcccccatgttgctggktggagctcccagtacctttcctagttctgattactgtccaattcatgaatcattctttgctcaaataaacacgctaaatttaatttataaaaaaattttcttttaacacttcatttttttaaattttgaggttcagggttatatgtccaagtttattatataggtaaactgtgtgtcacaggcatttggtgagcagataattttgtcacccaggtaataagtatagtacctgataggtatttttttctgatcctcttcttcctcccattcttcacactcaagtaggccccagtata

SEQ ID NO: 59031 - DNA, 850 bp, Homo sapiens
ttgctttttcagcacattgataacccttgactgaaagcactggttctccaacattctgttgaaattaatttggtgctccatgagtcgaagctagtgaaacctcatgacagtggatttccctgcaaaagtccttctttgctcataatgagccagtattaatgtttcacaacttcttgtgctcaaattagatcttcataatggcataacagaaaaaaatggctcattggcctaacacacaaaaataaaaccagagaggttaaataatgaaaactatacagaccgctatggtagagccacaaagtatctctcatatttttgacaaatgcagctattactgttggctaatcatgactgcttttctggttttttcttttcaaattactcatctaaactacattgaggtrtcattttgatgtggacagaggctttctgtcatgcttagcttggttcttaccatgaaccagtttgattagacccctgaccttcaaaaagcttctggagttgaatctggaaaatgggtatagacttagaatgcaggtacagagttagcactggagaaacggtgctggaaaactgtatcaatttttaaaggaaaattggcaaatctattgcaattttattttactcactgtattacctgtaggccattaataaaataaaatttatctggcaacttgtctttgataatcagtgatgtgactgaaaactgaagttggaaactgtgtttctaaagcatgttgttttgtggtgtcatatttttccatttctattgtcttccaatatagtcaattcttctttaaacagtcaataaaattcctcaccattctgtgactccgatgactaaattcat

SEQ ID NO: 59032 - DNA, 643 bp, Homo sapiens
catggtcatgccactgcagtccagcctgggcaacagagcaagaccctgtctcaaaaaataaaaataaaaaaagaaaaaagaaacacaaatttattacctcacagtttcagagatcataaatctgaaataagtctcattgctaaattgaagggattagtagaactacattccttctggagattctagggaggaatccattcttttgtcttttacaacttctagagactgttctcaggctttggcttaagttcccttacctcatcttcaaagccggcagcacaatcttgccaactctctctgatcctgattcttctgcctcactgttttacttacaaagaccyttgtgattatataaggcccaccagatcatctggggaattcccccatctcaaagttagccgatagcaaccttaatttctcctgaaaactgaattccttcttgccaagtaacataacatatttataaatttgggggactagaatgcagacatcttggggggccattattgtgcctacaatgtatatatgtgtttgtatatctgtatacatacagatatattagataatatatcaaaatattatcaatggctttctctagtagaatttagtttaaaattaagtatattcttttttaatctgaatt

SEQ ID NO: 59033 - DNA, 1667 bp, Homo sapiens
ctcctttcagcaggcatgagtccctcacagatgtaacaggacaatgtgtacatttgatgcattgagaagggggctcttatgtcacccagtttttatcggatcataattgatagatgactattttaagaaatggcacaataattaaacatacatgtaactaaacttacccaccagtacacaaagcactgaagaagcaaacagagtgggtgggggcctaaggggacaaccataaatgagtccccaaagttttcttgcagaaagcataaaaaggagaattcatatagccataaaaatctctgccraaatgtctgcagagacatttagatatacatgcctatatacattctcttttttacagtttctgcaagcaaaacttacattaataaaacatattcaacatatttgctctcctctaaattcatccaaagagtgaaactccaattacaaagaactattttatttttttttcttaaacattataaagggtagccagtatagaaatgggaggtgacaagatggcatttgatctatgagtccatcctctgaaaaggaaaatgtccagaaagaagtcattgaaggtgtgtgtgtgtcctttgttacttagagtatatttcactccaaatgaaatgaaatgctgaggctcataggctgctcgagtgtccctcatagacgccaattagcactggtgcccagtggcagcccggctgaagcgccgtctacaggtgctcacccattacacacagcgggaagttgcattgctctaaaaccacaagccactgctttgatggttcaggagaccttggccttttaaacgtataaacaacctttcttttctaatctgggccattagagggaaatgctgtgaaagcctgtattctgaaataaccaggtttgctcagagtcatgacagttttcaatcttgctgcctgtaatagaagaatagcattcaactaaaaataacatgggtgcgggatgtgccttgggcacctactgaggcctacagggtttcagattaatttgaaactgagcaaaggtggatttttttctctctgctttggcccttttgtgggtgttgtaatcatggggaaaatttgtccacctaatgagctctaggcacaggaagaagagaaactgtagtcaagatgaaaacactcatcagacaagcctatggcttttcttttctaaattatcattataattattaataagcagttattgatgctgtcccattccttagtaatagttatgttcatctacaaaatactcatgtgcaatcaagtactataattaaaataaatgaataaataattatggatagtgtttcaacactttgaaaggtgctaataaaattaaagacaggctaaaagcaccatgttttgcataccttaggacacagaaaagtttatcatagtcaatgtagttgtaagttttggattcattttattgcttttgggggcaattgattgaactgataagatgctaattcaaacattccagtaagtctttgaatgttctaaaaactcatgcaatttcggatgtcataaccatctttcaaaaatcagagctctatcttaattcgcatgtcactctcaggtgtttcactttataacatctgcacctaccagagccttggctctatgtatgctgataaatgagaacaaaaaaaa

SEQ ID NO: 59034 - DNA, 718 bp, Homo sapiens
cacagattcctcaaggtgctttgtcctcattgcattccagcacctaaaactggctgctgctgcctttctttcatttttatttatgtttatctccacccctttagcatgagtggtgtttgtgaggatttgctcatttgctttctcagtgctatgttttctggagaaatctgcgcttctgcacttacattctctgaagacataaaagctatgcttttttatgggagctatgaagatggagataaatatacgtgtgagatgtattcttgtctccatgtgccaggggcagtacatgcactgtttttggttcctgaaacaacgggagataggcatgcatcatctactgagatgatttgggggaacagtaagttactcccagggggtcatgggaggagcagggagagtggagaggggtgcacctgcggacctcggtgacttatttcccagggagaaagctgaggctgcagaggtcatgcaggtgatcgggggcggcttcccagcgtggggtctccaagmgcttttctgaaaggtctggaccgcctccatctcctcctcggccccttgcttcatctgtgtgagctttctgccatgacccctggcttcggcaagggaaaggtaatttttccctgaagcacacagaacgtagtttatggttgctgcagcgtgcgcttcgagaaactctaaattactgtgcttgccgagacctgcgtgcatgaataat

SEQ ID NO: 59035 - DNA, 1190 bp, Homo sapiens
  misc_feature (1)...(1190): n = A,T,C or G
agaggccggatctagagacaaggagagataggcatggctgggaacccttgaggaacttgagctatgggttctaatgaggcccctaagggtaactccgtggtgagctgtgtctgcatctgcactggcggcgtgacgtggcgagtgccatggatgggcagtgacactgctggaataaggttttcctgggagtgagaactgaaggaccacagcgtagcctgggaacatcactacacgtggggcaggaggatgcagggactgcaaaggagatgccgggaggtggctgcagaggcaggaagctcaggaaagaggctgcctggaaaccaaatgaggctagtggggaggagcagagtcccacgtcccaccaccgaggaagcaggcagcccgagtgcaggtccgcatcgtcggagtctgrgcgtctggacagagaggtctttcagcagctctgccaacctcagcagcccacgggggctggatcccggccgcagaagtgagggaggggaatgctgcctgtccagagacggggctgcagaaggacggggagaagcacagcctgcagcaggagagggatgtgttgtcggaggaggtcctggctttgtgttctgccattaacgaagtggnggtctgggtgtaaggcactgaacactctccagccttaaggaaaaggaaggatgcggaggctgaaggtgaagcagccgagggaacacgggacgcagacgaccagagggccgggtacattccccattccctttcgacaggagcaggagacaggaaggggaaggcgtgggaatgcaaaccaacagatgagcaagcttgggcatagagtgaaattattagaatcattgttcttgtgtttcttgcctagtgatttgctaattctctgcataataatacatgggaaagaggagtttttctttttctttttctttttctttttttttttttttttgagacagagtctcactctgttgcccaggctggtgtgcagtagcgtgatctcagctcactgcaacctccacctcccaggttcaagtgattctcctgcttcagcttcttgagtagctgggattacaggcatgtgccaccacaccttgctaatttttgtatttttagtagagatggggtttcaccatgttgaccaggctggtctcgaactcctgacctcaagtgatccacctgccttggtctcccat

SEQ ID NO: 59036 - DNA, 525 bp, Homo sapiens
tccagggtgcctcacccatgggagcttagtccggcacattctctggttctgttcttgccttctgcctcccatctgctgcctcctctcctacatcctcttccctgagttcacaccrccctctctcctccctactcacactgttcctgtttggccccaatctccatgagctggcttctggcacggggatgaccccagaccagggagacggcccaggtccctgtccacagccaccttgctaagctcaagtcccaggaaccatcagctaggcaaagcctggccacataaagcaaagagtggctcttgaaggccagcatccaggactgcaggctccaggcggtctgcctgagtgagaccacaccccaaatagcacctgaggggcatgagcagagaaagatgggaatggctcactggtcaaacccacaactctcacactatcacctgtcacacacattcgtcactcacacccgtggttctcaaaagctcacaccattaatctctcacacatcttcatgtctcacaccttca

SEQ ID NO: 59037 - DNA, 1103 bp, Homo sapiens
atgaccagcaactaccagaagctacaggagtggcatgcaacagactacccttacaacctcagaaggagcaaaccytatcaacatcttgattttggccttctcgcctccagaattgtgacagaacaaattattgttattttaagccattcagtttgtcatcttttgttacagcagccctagacagtcagggtatgctgaacagctgtaaccaacacacccaagatgtgtaatggctccaacacaaccaaagtttacagtaacagtccaaggccaagttccattggtgggcacctctactgcacacggtcatttagacatccaagctaacagagggtttgccatctttaacagtggtttcccaagactgccttggtcctaccattctagtccatgggaacagaaaacagaagaggtttgataagctggccaaaaatggctatatcacttctggtcacattttcttgaagagaacttagtaatatggctctactcagttgcaatagggacatatgcaatatggtgcagctggaggagagctagtgattcttctgcaatgatgaaagctgctatttgaaaagggggcagtgagagagcttatttccaggaatgcaaaagccagggagttagagaaacagtgtccaactcttccaccagtcttgaggataatgcaatttaagagatggatcaggtgaaggcttttgaaaaaaagaatagaaaactagggcaaagcaagggccctaggaagatggcaagcatcctgcaaggtttagctattagaaaactcatgggaatgccctattattatatccagatgttctaaggaaatttcaacccaactctgccccaaggcataggctccagaaagaatcatcctgcttacagcaccaggcctctgattcaaagaacttgagagagaataaaattagcacagcatagccagaactgaagtcctgtaaggacccccataaagtagacatcaggacccgagagattcatcaaaggagacccagtttgttaattggtttcctggtaaacagtcaagaacctgggtttggtggattcaggagtcagatagagctgggaataaatcctcctttatggct

SEQ ID NO: 59038 - DNA, 1103 bp, Homo sapiens
atgaccagcaactaccagaagctacaggagtggcatgcaacagactacccttacaacctcagaaggagcaaaccctatcaacatcttgattttggccttctcgcctccagaattgtgacagaacaaattattgttattttaagccattcagtttgtcatcttttgttacagcagccctagacagtcagggtatgctgaacagctgtaaccaacacacccaagatgtgtaatggctccaacacaaccaaagtttacagtaacagtccaaggccaagttccattggtgggcacctctactgcacacggtcatttagacatccaagctaacagagggtttgccatctttaacagtggtttcccaagactgccttggtcctrccattctagtccatgggaacagaaaacagaagaggtttgataagctggccaaaaatggctatatcacttctggtcacattttcttgaagagaacttagtaatatggctctactcagttgcaatagggacatatgcaatatggtgcagctggaggagagctagtgattcttctgcaatgatgaaagctgctatttgaaaagggggcagtgagagagcttatttccaggaatgcaaaagccagggagttagagaaacagtgtccaactcttccaccagtcttgaggataatgcaatttaagagatggatcaggtgaaggcttttgaaaaaaagaatagaaaactagggcaaagcaagggccctaggaagatggcaagcatcctgcaaggtttagctattagaaaactcatgggaatgccctattattatatccagatgttctaaggaaatttcaacccaactctgccccaaggcataggctccagaaagaatcatcctgcttacagcaccaggcctctgattcaaagaacttgagagagaataaaattagcacagcatagccagaactgaagtcctgtaaggacccccataaagtagacatcaggacccgagagattcatcaaaggagacccagtttgttaattggtttcctggtaaacagtcaagaacctgggtttggtggattcaggagtcagatagagctgggaataaatcctcctttatggct

SEQ ID NO: 59039 - DNA, 1103 bp, Homo sapiens
atgaccagcaactaccagaagctacaggagtggcatgcaacagactacccttacaacctcagaaggagcaaaccctatcaacatcttgattttggccttctcgcctccagaattgtgacagaacaaattattgttattttaagccattcagtttgtcatcttttgttacagcagccctagacagtcagggtatgctgaacagctgtaaccaacacacccaagatgtgtaatggctccaacacaaccaaagtttacagtaacagtccaaggccaagttccattggtgggcacctctactgcacacggtcatttagacatccaagctaacagagggtttgccatctttaacagtggtttcccaagactgccttggtcctaccattctagtccatgggaacagaaaacagaagaggtttgataagctggccaaaaatggctatatcacttctggtcacattttcttgaagagaacttagtaatatggctctactcagttgcaatagggacatatgcaatatggtgcagctggaggagagctagtgattcttctgmaatgatgaaagctgctatttgaaaagggggcagtgagagagcttatttccaggaatgcaaaagccagggagttagagaaacagtgtccaactcttccaccagtcttgaggataatgcaatttaagagatggatcaggtgaaggcttttgaaaaaaagaatagaaaactagggcaaagcaagggccctaggaagatggcaagcatcctgcaaggtttagctattagaaaactcatgggaatgccctattattatatccagatgttctaaggaaatttcaacccaactctgccccaaggcataggctccagaaagaatcatcctgcttacagcaccaggcctctgattcaaagaacttgagagagaataaaattagcacagcatagccagaactgaagtcctgtaaggacccccataaagtagacatcaggacccgagagattcatcaaaggagacccagtttgttaattggtttcctggtaaacagtcaagaacctgggtttggtggattcaggagtcagatagagctgggaataaatcctcctttatggct

SEQ ID NO: 59040 - DNA, 1908 bp, Homo sapiens
aataagcaagggacagaaagataaacttcacttgttctcattcacttgtgggagctaaaaattaaaacaattgaactcatggagatagagagtagaatgatggttaccagaagctggggaggggagttggaagtggaaagtcagggggaagtagacatggttawtgtgtacaaaaatataattagatagaatgaataagatccagtatttgatagcacaacagggtaattacagtcaacaataatttattgtacatttttaaataatgaaaaggtataattggaatgtttgtcacacaatgaaattacaaatgcttgagctgatggataccccatttaccctgatgtgattattatgcattgtatgcccgtatcaaaatacctcatgtaccccataattacatacacctactgtgtattcacagaccttttttttttttcaaggtatagaggctgggcgccgtggctcacgtctgtaatcccagcactttgggaggccgaagcgggcggatcacgaggtcaggagatcaagaccatcctagccaacatggtgaaactccgtcactactaaaaatacaaaaattagctgggcgtggtggcacgtgcctgtaatcccagctactcgggaggctgaggcaggagactcacttgaaccagggagttggaggttgcagtgagcagagatcatgccactgcactctagcctggcaacacagcaagactccatctcaaaaataataataataaaattaatttaaattaaaaagggatagagaagctaaaaaaaaacaaaatccactaccaggtaattcaaactatttaaaaataagcaagattcttgtgtccacggaagcttttgggtatggttctgtgggaagctggggagggagagaagatgagttacaaggatcctctctggctttaattctgtgagttctggaaattaacatgcttgccagcagacccagcggccgggggaagaggcaatggcttgctattttcaacatgccaacaaaagagaaagttttgcgaaactttctgggaaagtaatattgtccatcttccagcctctgaatgcaccacatcggttttgaaagccactcactgtcttcctggctttctctggagggccttgcctgtctcaccatgcttctttttgtctaactgatggctctcatgctgtagtgcaggcggcccattttctctcttcacaacctcgtggagatggagcacagctggtccttgctcctctggggaataacttttcagaggattgttttagtggaaacaccagggtcctgaggaattttcccctttgtttgaaaatgaatgacttcctcttagggctgctctgaggggcttccacctgagttgtggcaacttcaaaggctccccatgtttctgctccagaggccaggggatggctggggcctcctcctgctgcttctgcccaagactcagcagcctctgccttatactcaccacttgagcgtctagggaagggcggtgtgcacatgtgctgtgctgatgggcgtaggtgtctgcctctgcacagatgcatacattggcttgcattttggagtaggtgtgtgtgtccaaaacacatcacactctttgcattgttaagaattagctttggaaagcaaagaagtgagagggggaaacagcattcagctaaggtcttatatcctcagtttcagtttgtaataaatatttatgaccaagttacaacaagtcctgaaaaagaagcatttaatagaaacacagatacttaacccttgcgttaattacaggcctctgttgtcttattcaagatatgctttatgttcatttttaagccctttgcagtgattcttctcttccttttcaaaaaacgtgcctagcaagcagctgttttctatatacagct

SEQ ID NO: 59041 - DNA, 1972 bp, Homo sapiens
gaattttatttcaagttactgcctgaaagtgtattattaccagagtaacagacaaaactgtagccttagagcatataggaaaatttgtgttaaacatgaggtgacaatgtgctggagccctagcggccctcgctggctcttggtgcctcctcggcctcggcgcccactcgggctgcatttgaggagcccttcagcccaccactgcactgtaggggcccctctctgggctggccgaggccacagccagctccctctgctgtggacaggtgtggagggagaggcgtcagcgggaacaggggctgctgcgcacgggcgggaaccgggtctgctgtgggcgtgggcttggcaggcccccgcactcccgcactcggagcgactggccagcaccgctggccccagagagtaaggggcttggcacctgggccagcagctgcagagggtgcaccgagtcctccagcagtgctggcccaccggcgctgcactccaattctcgccaggcctcagctgcctccctgtggggcagggcttggcacttgcagcctgccatgcctgagcttcccccctgccatgggctcctgcaaggcctgagcctccccgaggagcactgcaccctgctccacagcgcccagtcccatcaaccatccaacggctgaggagtgcaggcgcatggcgcaggactggcaggcagctccacctgcggccaggtgcgggatccactaggtgaagccagctgggctcaacctggaacactgtttcttctatttatctcaataactccaaccccttctttataccctatttcaagcactgctccccaggaaagctctccctgccctctgcccagcccggggcctgtgattatgggtcttcgcagcaccaagggcctccccctcactgtacacatgggttgcatgtttctatttgtgcatgcaaatatttgattcaggtctacatcctccagcccccttacagaatatactgctaagggcaggtatggggtctggttttgcccacccctgcgtctccataacatagcacagtgcctgacacrgagaaaggagaaggtgctccatgaacatttcctgacccaatccctgaccaaattctctagaagggttgctgtgctctcattgcacagacatgctgcaggagcactctgctgttctccagaattctggctctccatctcaaaatgattctgtgagtggctgcataatgcatcctgaccaaagagtcaggagccctgcaatccttcaacacttctgcaattaatgagctttcagacacagggcaaaccatttaacgtctctatgtcttcttatatgtaaaattggatttttaatatcagctttatttaccttacctagttattcttctataacaagaacattaagagcctggcttgtattcgtttgagtgagagattgttggtgtgaaaagcattggttatatgcagtttcttacttctacacacagtggattcctacacatgtgtttcaaagttgaataacaaagaataatgagggagacatttccagagaactaaaaatacattctaaaattcctaatagtggttaattatgtgctgcctccctcagattcagacccatgaggcaggtgaggccttcaaatgcacacagcacagggggccaccagccatcctggggatgggaaaggtgacctgagcacctccttttcccggcctgaccactcctctgcccactgctgcagcggccacagcatttccacgtctttaggaagatttgggtggctggaaacagacatccagatatcgggaaaagcagttctatcttcttgccatctgtggtaaattgcaaatgtgaccccaaatgtttactgtttcctttttctccagcctttgccatgtaattttatagaggtcaccaagtttgactttgggcttagccctgtgaattagtctaggttctccagaaaaacagaaacaatagga

SEQ ID NO: 59042 - DNA, 1972 bp, Homo sapiens
gaattttatttcaagttactgcctgaaagtgtattattaccagagtaacagacaaaactgtagccttagagcatataggaaaatttgtgttaaacatgaggtgacaatgtgctggagccctagcggccctcgctggctcttggtgcctcctcggcctcggcgcccactcgggctgcatttgaggagcccttcagcccaccactgcactgtaggggcccctctctgggctggccgaggccacagccagctccctctgctgtggacaggtgtggagggagaggcgtcagcgggaacaggggctgctgcgcacgggcgggaaccgggtctgctgtgggcgtgggcttggcaggcccccgcactcccgcactcggagcgactggccagcaccgctggccccagagagtaaggggcttggcacctgggccagcagctgcagagggtgcaccgagtcctccagcagtgctggcccaccggcgctgcactccaattctcgccaggcctcagctgcctccctgtggggcagggcttggcacttgcagcctgccatgcctgagcttcccccctgccatgggctcctgcaaggcctgagcctccccgaggagcactgcaccctgctccacagcgcccagtcccatcaaccatccaacggctgaggagtgcaggcgcatggcgcaggactggcaggcagctccacctgcggccaggtgcgggatccactaggtgaagccagctgggctcaacctggaacactgtttcttctatttatctcaataactccaaccccttctttataccctatttcaagcactgctccccaggaaagctctccctgccctctgcccagcccggggcctgtgattatgggtcttcgcagcaccaagggcctccccctcactgtacacatgggttgcatgtttctatttgtgcatgcaaatatttgattcaggtctacatcctccagcccccttacagaatatactgctaagggcaggtatggggtctggttttgcccacccctgcgtctccataacatagcacagtgcctgacacggagaaaggagaaggtgctccatgaacatttcctgacccaatccctgaccaaattckctagaagggttgctgtgctctcattgcacagacatgctgcaggagcactctgctgttctccagaattctggctctccatctcaaaatgattctgtgagtggctgcataatgcatcctgaccaaagagtcaggagccctgcaatccttcaacacttctgcaattaatgagctttcagacacagggcaaaccatttaacgtctctatgtcttcttatatgtaaaattggatttttaatatcagctttatttaccttacctagttattcttctataacaagaacattaagagcctggcttgtattcgtttgagtgagagattgttggtgtgaaaagcattggttatatgcagtttcttacttctacacacagtggattcctacacatgtgtttcaaagttgaataacaaagaataatgagggagacatttccagagaactaaaaatacattctaaaattcctaatagtggttaattatgtgctgcctccctcagattcagacccatgaggcaggtgaggccttcaaatgcacacagcacagggggccaccagccatcctggggatgggaaaggtgacctgagcacctccttttcccggcctgaccactcctctgcccactgctgcagcggccacagcatttccacgtctttaggaagatttgggtggctggaaacagacatccagatatcgggaaaagcagttctatcttcttgccatctgtggtaaattgcaaatgtgaccccaaatgtttactgtttcctttttctccagcctttgccatgtaattttatagaggtcaccaagtttgactttgggcttagccctgtgaattagtctaggttctccagaaaaacagaaacaatagga

SEQ ID NO: 59043 - DNA, 292 bp, Homo sapiens
agaacatctgcagctctgattagagctcagactcgctctcacaaggcttgcttgctttctccttcaattcagttgccctarataaggaaggccctgctctcaaacctgcatcttaagaagcgaggccccagagtggcagggaaaggcaggagagcaggaaacgcaccacacctgagttagaaggcttgggttctacgttcagctgggacaatagataaatagaattgctattaataaaactcaaggcatgatttcaacaatgacaatccacactcactgagtgctttatacg

SEQ ID NO: 59044 - DNA, 1558 bp, Homo sapiens
actcgtgtctttctatagatattcagtgagcagtgataagacatccctgcataaggattagctcaagacagggaaacgctgttagaggagagaggtggagaacagacacacattttgcctgccatttaattcagctaaaagccatcaaatttcatggctaaacttcaaacatgactcagtcggagatttgattttccttcccttttcagcaaggcaacacatctgtatatttcagcccaagcagctatgtattttagtgagtgtatagtaaaagcagattctattaatcagtaataattcagaaattaaggctgcatccattaaaagttctacttaatggcagttaaaactcgagagcagtggtttgcaaacttgactgtgcataagaaacatctggaaagcataaaaaatgcagattctaggggcccacctgcagagtctcattgagtagatctggaatgaaatcccagaaattgcgttttttaacaagcaccccaggtgaaatgcatcccacagtctttctatcttaatgcgatttttataatccaaattgcatttaaatcttttgaagaaaatggaagtagggagacaatccaaaatgcatcttgacagttttgtagatagtctttctctggcttttagagattttaaatcaaaattttatggcatatcaagccataatatgaatgctttttttttgaaccaaacaaatcaaacaaagaaaagatgtgtccccagaaaattattcagctcccccaaagcaagcatctttttaggtgggctatttcaaggagctgagtttcatatgctcgtgttaacaatcttagccacattatttaatttaagcataaagctttaagtttttgcattcagaatggaagtgtaaaagtcgtgcaaccaactcaagatgctcacatatccatggcatgttcaatcaacagtgaaatatgacttcaactgttctgcaatatgaaccccaatatttgccatcatagtacctacattttttttattttaaaagtctgagaccctaactactaactttacgtaatagtaacattaagcgcagcaaatctaactagaccaatggtatataactctagtctgtatagtaattgctcttttcaaatcaacttcttctgggtcttgggaggaaatattacattgtattcarcaacttagaaatctgtgaggtattgttttgttttgttttgttttgttttttgtacttgaaattgggttttactttctacagtttttaaattttttctttctgctttttcactaggcttcatagatctcccttgcacatgtgcaattttgctgtgagccagaaatttgcacagttcgttctttgaatttgggtctcatgctttctgaggttggcttgttgccaaaactttccttttaaatttttagctgctttttaaggtctaaattctcatttctagcacttttaatcagggacttcatttttttctccattaataaaaattttaattttctactgatacataatggatgtagatattttggtagtacatgtgataatttaatg

SEQ ID NO: 59045 - DNA, 1558 bp, Homo sapiens
actcgtgtctttctatagatattcagtgagcagtgataagacatccctgcataaggattagctcaagacagggaaacgctgttagaggagagaggtggagaacagacacacattttgcctgccatttaattcagctaaaagccatcaaatttcatggctaaacttcaaacatgactcagtcggagatttgattttccttcccttttcagcaaggcaacacatctgtatatttcagcccaagcagctatgtattttagtgagtgtatagtaaaagcagattctattaatcagtaataattcagaaattaaggctgcatccattaaaagttctacttaatggcagttaaaactcgagagcagtggtttgcaaacttgactgtgcataagaaacatctggaaagcataaaaaatgcagattctaggggcccacctgcagagtctcattgagtagatctggaatgaaatcccagaaattgcgttttttaacaagcaccccaggtgaaatgcatcccacagtctttctatcttaatgcgatttttataatccaaattgcatttaaatcttttgaagaaaatggaagtagggagacaatccaaaatgcatcttgacagttttgtagatagtctttctctggcttttagagattttaaatcaaaattttatggcatatcaagccataatatgaatgctttttttttgaaccaaacaaatcaaacaaagaaaagatgtgtccccagaaaattattcagctcccccaaagcaagcatctttttaggtgggctatttcaaggagctgagtttcatatgctcgtgttaacaatcttagccacattatttaatttaagcataaagctttaagtttttgcattcagaatggaagtgtaaaagtcgtgcaaccaactcaagatgctcacatatccatggcatgttcaatcaacagtgaaatatgacttcaactgttctgcaatatgaaccccaatatttgccatcatagtacctacattttttttattttaaaagtctgagaccctaactactaactttacgtaatagtaacattaagcgcagcaaatctaactagaccaatggtatataactctagtctgtatagtaattgctcttttcaaatcaacttcttctgggtcttgggaggaaatattacattgtattcagcaacttagaaatctgtgaggtattgttttgttttgttttgttttgttttttgtacttgaaattgggttttactttctacagtttttaaattttttctttctgctttttcactaggcttcatagatctcccttgcacatgtgcaattttgctgtgagccagaaatttgcacagttcgttctttgaatttgggtctcatgctttctgaggttggcttgttgccaaaactttccttttaaatttttagctgctttttaaggtctaaattctcatttctagcacttttaatcagggacttcatktttttctccattaataaaaattttaattttctactgatacataatggatgtagatattttggtagtacatgtgataatttaatg

SEQ ID NO: 59046 - DNA, 1604 bp, Homo sapiens
gtctgggtggaaagcaaaggttctttccgcagtgcactgtgtacataaacttgcagccaaacaccgttataaaggctgtgaaagatgcagagaaatgcaacacttcttattagtttcctaatctcaaaatgcaggtagcctagttaaggagataaaattacatataagaaaaattaagtaacaacacaagatctgaagattaatatagtatctttgactccaatctaaacatattccaaaaatggtgaaatgattgggagaattccaaatgcaaacaattggagtactataaaatgtggttgatcccacagaatccagtctgcttcaggaaatactttttctaattggagcctctgagagactaaatccattctgcgaagtgtattctagctcttccatagtctcccaatgactcttgcctcagaaagctctgttaatttggttgatcgcttctggtttttctctatatttcatatattgatcaaattttgtaatacaatcttcagatccacactacccaaaagaaaaacatgcttcctgctatcattttgtttatttccctctaaataagtaggagcatggtactttgatcgataagaatgaaaaaaattattagggaacttgccatcatattccaggagaaatggagtatggcatgcacccagcactgaccttcaatcagaattaaagcacgtcagagaaaaggaattgtatagaattgctgggatcaaatgtaacacaaaatcatcggaactataataggatcacgaagcagaatcaccactgaagtccatctcatgattcagcagcaggagcaggggagcacagcagaaagaagcatgggtgaagggatccgagagtcaatcctacctggcaaataggagtgtgatcctggcatccagtttgtrtctcagagtctttgttcccaggtagaactgggagactgagctagatcaggggttcttagaaaacagttgagggggatcatgaacttaatgaaagaatgaatctttatttcctataatctttaactaaaatgtatagcacttcctccaattatgaatgtaagtcataaaccacaatactactaaccatacatgttatattgttccaatacaaattacagatattttcacattagtataatttttagttatctcagaatatcatttatgatcactagctcttcaaatttacaaagatcatctcagtcacagctgtttccctttacttaatgcattgggaaagaagcacatgcatgactgtatcaaaacatccttaaaaagtattgattagtgtttgagcataattggcttcctctataatcaaacgtgtgctagctgacgctttctgaaatgtttttcttagatgtgactttatcagactgcctatatggtccccttagacagtgcctaagggccatttccttgaacatggtggaattctcagcctcctgtctcagaagcagagatgcctaactggctgggatgcatttcaaggataagcaagagcaggagactggagtaactgccgaatggtgggaggtgacaactggaaacaacagtggtattaaattgatccaaatgcagcctcagggcatgtta

SEQ ID NO: 59047 - DNA, 1569 bp, Homo sapiens
aagctgatgggctaattctagtccaaatgctggtgggcttccaagggaaaatctgatgtttcagttcaggtccacaggcagaaacacaaaacacaaaacccaatgcccaggttcacagcagtccaagcagaaagagttccctctgacttgctccattcaggcctccagctgactggctgaggcccagccacatcgggtggggsggaggggacaacctgctgtgctcagtctgccaatgtaaatgctaatctcatttgcagtcaccctcccagacagacccagaataatgttgaaacaaatttctgggcaccctgtggcccagtcaagttgacacgtacaattaaccatcccaccatgagatttgctgtggccagtgggatgttcgcagatgagatgccagcagacccttgaaagactctagacccgtcaggccacccaggtagtcacttgggaatgcacgctgatggaggtgctttcgtggccactgtggcaggcgaagggagtgtggtgtcccctgtgctggtcctttgcaggaggtgacacgtgccgcttccactcatgattcctgcccgacttgcatgaacagactgtctgcacaaggtggggtgttccaaccaacttctacagatcttgtaattgatgatttgacatccactaatcacagggccaaactaatggccaaaggtgcctacatcacccttcagtcccacttttgaggtagcataaaagtcatatcacaaaccctccagccacaaacaaatctgtgacttgtttcctgcagaataagggccgtccctactttgtgacttctcccctctgtgttcatggaggcttcgatccgtgcttcctgtactcctgcctcctgcccaatcctggcgctgcctgggcagccctgtgtggcatgccaatgctcctttttcttaggaactgtaagaaacaagctcttatttcaaaggcagttgttcctgtctgtgtctatcactttaccatacctgaattaaacaaatcctgaactcaaattgtaaaacatggggaatgcaagcatattatatgagcagaaggagtggaatatctgtggacagtcctgatggctcagacccttagttcccacagtgttctgagcacaccagctgatctctgctgacactgacctccatgcatggcatttgcctgccgtccctggcaccataggaggttatggttgttgagtgcagtcattccttaaccactttgctatcctgccttattattgtcaataaacactataacatatgctaaattttagcattctgtgaaagagaaaaggtgtatgatattgtttctaaggcggaaaccgagacagcaagatcttactgcaccattctgtggcttcccagcgccaagtcattctgatgacccaggtctcacactggcaccttcagaaaaccatggtgccaggaagttaaaatcttatttgaatccaaataaaggacatattcagactcctagtggctcatgatctgaagtctaaggtttattcggaattggcggagatagcactggtaaatatatatgtttttttaaaatgaa

SEQ ID NO: 59048 - DNA, 1569 bp, Homo sapiens
aagctgatgggctaattctagtccaaatgctggtgggcttccaagggaaaatctgatgtttcagttcaggtccacaggcagaaacacaaaacacaaaacccaatgcccaggttcacagcagtccaagcagaaagagttccctctgacttgctccattcaggcctccagctgactggctgaggcccagccacatcgggtgggggggaggggacaacctgctgtgctcagtctgccaatgtaaatgctaatctcatttgcagtcaccctcccagacagacccagaataatgttgaaacaaatttctgggcaccctgtggcccagtcaagttgacacgtacaattaaccatcccaccatgagatttgctgtggccagtgggatgttcrcagatgagatgccagcagacccttgaaagactctagacccgtcaggccacccaggtagtcacttgggaatgcacgctgatggaggtgctttcgtggccactgtggcaggcgaagggagtgtggtgtcccctgtgctggtcctttgcaggaggtgacacgtgccgcttccactcatgattcctgcccgacttgcatgaacagactgtctgcacaaggtggggtgttccaaccaacttctacagatcttgtaattgatgatttgacatccactaatcacagggccaaactaatggccaaaggtgcctacatcacccttcagtcccacttttgaggtagcataaaagtcatatcacaaaccctccagccacaaacaaatctgtgacttgtttcctgcagaataagggccgtccctactttgtgacttctcccctctgtgttcatggaggcttcgatccgtgcttcctgtactcctgcctcctgcccaatcctggcgctgcctgggcagccctgtgtggcatgccaatgctcctttttcttaggaactgtaagaaacaagctcttatttcaaaggcagttgttcctgtctgtgtctatcactttaccatacctgaattaaacaaatcctgaactcaaattgtaaaacatggggaatgcaagcatattatatgagcagaaggagtggaatatctgtggacagtcctgatggctcagacccttagttcccacagtgttctgagcacaccagctgatctctgctgacactgacctccatgcatggcatttgcctgccgtccctggcaccataggaggttatggttgttgagtgcagtcattccttaaccactttgctatcctgccttattattgtcaataaacactataacatatgctaaattttagcattctgtgaaagagaaaaggtgtatgatattgtttctaaggcggaaaccgagacagcaagatcttactgcaccattctgtggcttcccagcgccaagtcattctgatgacccaggtctcacactggcaccttcagaaaaccatggtgccaggaagttaaaatcttatttgaatccaaataaaggacatattcagactcctagtggctcatgatctgaagtctaaggtttattcggaattggcggagatagcactggtaaatatatatgtttttttaaaatgaa

SEQ ID NO: 59049 - DNA, 839 bp, Homo sapiens
ccgcggctctgattcttaagggaaagcaacatgaccttggctggtggatcggctcacaagaggcttaaatagaggccccgttgctccctacaagaagtttggacacactgtgataaggcatttgaaagaaaacctttcgaatacagtgcaaatctgtatcataaacaaaagaagcctttggtatgccctgtgtgcccctgcacagtgcactcagtacataactacaygctgttctgcaaaaaaatgaaacagctggaatttttaatatcatgtctgagatttcctgtgagaacatggtgtacacgttctcctaagttcaaggtgcgattttcctctaattgttttcaatagttccttccactgttagcatctttcagaaaaatatcagcacattgctttccctagagggaatagaagagaataagatcctatgatttaatctttaaaaagttgagaaacaaaagtcaaaaacatccaaatttaatgctgccttttctagcttatgcatgttacgttaatacctaaatgatgtccagaagtatttacttgtgtcatatttacaaaactggctgacagagtttaagaaacttgttttggcttttgttattaatgttctcaggaacaattgacatgaaagttctggttttctataaaacagagttttgacatttttggagaaacttaaaataggtctactaggttctggtgaattcagaatattcagaggacatagcatgactgatgaggagcataggattttgtgcctcagagcacttaccattgattaaaggcctttaggttggattctgacctggagatagtgtccactgacttcacgg

SEQ ID NO: 59050 - DNA, 839 bp, Homo sapiens
ccgcggctctgattcttaagggaaagcaacatgaccttggctggtggatcggctcacaagaggcttaaatagaggccccgttgctccctacaagaagtttggacacactgtgataaggcatttgaaagaaaacctttcgaatacagtgcaaatctgtatcataaacaaaagaagcctttggtatgccctgtgtgcccctgcacagtgcactcagtacataactacacgctgttctgcaaaaaaatgaaacarctggaatttttaatatcatgtctgagatttcctgtgagaacatggtgtacacgttctcctaagttcaaggtgcgattttcctctaattgttttcaatagttccttccactgttagcatctttcagaaaaatatcagcacattgctttccctagagggaatagaagagaataagatcctatgatttaatctttaaaaagttgagaaacaaaagtcaaaaacatccaaatttaatgctgccttttctagcttatgcatgttacgttaatacctaaatgatgtccagaagtatttacttgtgtcatatttacaaaactggctgacagagtttaagaaacttgttttggcttttgttattaatgttctcaggaacaattgacatgaaagttctggttttctataaaacagagttttgacatttttggagaaacttaaaataggtctactaggttctggtgaattcagaatattcagaggacatagcatgactgatgaggagcataggattttgtgcctcagagcacttaccattgattaaaggcctttaggttggattctgacctggagatagtgtccactgacttcacgg

SEQ ID NO: 59051 - DNA, 839 bp, Homo sapiens
ccgcggctctgattcttaagggaaagcaacatgaccttggctggtggatcggctcacaagaggcttaaatagaggccccgttgctccctacaagaagtttggacacactgtgataaggcatttgaaagaaaacctttcgaatacagtgcaaatctgtatcataaacaaaagaagcctttggtatgccctgtgtgcccctgcacagtgcactcagtacataactacacgctgttctgcaaaaaaatgaaacagctggaatttttaatatcatgtctgagatttcctgtgagaacatggtgtacacgttctcctaagttcaaggtgcgattttcctctaattgttttcaatagttccttccactgttagcatctttcagaaaaatatcrgcacattgctttccctagagggaatagaagagaataagatcctatgatttaatctttaaaaagttgagaaacaaaagtcaaaaacatccaaatttaatgctgccttttctagcttatgcatgttacgttaatacctaaatgatgtccagaagtatttacttgtgtcatatttacaaaactggctgacagagtttaagaaacttgttttggcttttgttattaatgttctcaggaacaattgacatgaaagttctggttttctataaaacagagttttgacatttttggagaaacttaaaataggtctactaggttctggtgaattcagaatattcagaggacatagcatgactgatgaggagcataggattttgtgcctcagagcacttaccattgattaaaggcctttaggttggattctgacctggagatagtgtccactgacttcacgg

SEQ ID NO: 59052 - DNA, 1095 bp, Homo sapiens
ctcactcacagcttcctttgtctgaagcttccttctcactgacccgcttacctcgggtggcttctcttctgttgtatcttaagaggtagctgctgcaagtctttcttaattcactggggaataatggcagcctctccaggccttctgtgtcaagacctcagtcctggttggctgcaaagctcctcatccagccttgccagatagtcttgttttgctttcttcttctagtcttcaaatcccactctgattttgagattcttttgttaaagcccagcagcaaggatggtggagggtgcattgggtgtttgggtggcaggacagctggtttctactcttgggttggaaaatgccaagcgatttggctttggggaaatgactcccctttttggtgtgagggattatttctagtaaactgtaatgaagagatttcatatcagtcaacagaagtggttctgagcatgatcactaagtgggagcgggagtcacagggcctcaaggcttatctcctccagggcagttttatccctgccccaggaaggaagtatgtggtaatatatttcctggtctggctgctggtcggaatttgtgagggtgattgccaaatgaattctctatatgtaatccagatatcaactggcatttcctgctcctgtgatctagataagagaggcctagcaagcaggccacttgccgtaggtgccgagtttatggtccgcatcacttttttatgtaggctgaacctggcccacatgacatctgcccagatataaaattccacctcttccttgatttccacctaaaatgtcactcacctgaggcaaggatccatggagatttgaaggagacatgtgagagtacgcttcagaaaggcacgtcctcctagtaaatgttmaatactgagattcttaaatgtttcctcatgcccaagtctgtatgttctacattcttgagagggaacctaataaaaggagttatttttctcgacaaatggagtttataaaaaggactttgagatctttcaaaatatgatctaatataagaatcacttatttttggaaacacatttgtttattcattcacagttacattcattcc

SEQ ID NO: 59053 - DNA, 1095 bp, Homo sapiens
ctcactcacagcttcctttgtctgaagcttccttctcactgacccgcttacctcgggtggcttctcttctgttgtatcttaagaggtagctgctgcaagtctttcttaattcactggggaataatggcagcctctccaggccttctgtgtcaagacctcagtcctggttggctgcaaagctcctcatccagccttgccagatagtcttgttttgctttcttcttctagtcttcaaatcccactctgattttgagattcttttgttaaagcccagcagcaaggatggtggagggtgcattgggtgtttgggtggcaggacagctggtttctactcttgggttggaaaatgccaagcgatttggctttggggaaatgactcccctttttggtgtgagggattatttctagtaaactgtaatgaagagatttcatatcagtcaacagaagtggttctgagcatgatcactaagtgggagcgggagtcacagggcctcaaggcttatctcctccagggcagttttatccctgccccaggaaggaagtatgtggtaatatatttcctggtctggctgctggtcggaatttgtgagggtgattgccaaatgaattctctatatgtaatccagatatcaactggcatttcctgctcctgtgatctagataagagaggcctagcaagcaggccacttgccgtaggtgccgagtttatggtccgcatcacttttttatgtaggctgaacctggcccacatgacatctgcccagatataaaattccacctcttccttgatttccacctaaaatgtcactcacctgaggcaaggatccatggagatttgaaggagacatgtgagagtacgcttcagaaaggcacgtcctcctagtaaatgttcaatactgagattcttaaatgtttcctcatgcccaagtctgtatgttctacattcttgagagggaacctaataaaaggagttatttttctcgacaaatggagtttataaaaaggactttgagatctttcaaaatatgrtctaatataagaatcacttatttttggaaacacatttgtttattcattcacagttacattcattcc

SEQ ID NO: 59054 - DNA, 1332 bp, Homo sapiens
gattctgaaaaccaaagtctcattgttattctgacagcctcttttcactttcagggtttttgttgagatgaggcttgaatgtagtgtagggargatttcaattgtgcaactgtctttggctttatacaaatatttaaccaacaggaaacttcttgaggacaaataaaaaagcaaagagaaaaaggtgctgttagaccttcaatagtaagtcagtttcacaaaactatttttaaatttcctattaaaatatcgctctatttcttagtatatcactttggcatatctgcttctctctctgtattaataaatagcgcatatagtttgcctttggtactttgtacaatgttgtttatctcagtgtaaattggtagcgtgtccacaaaggcgattggagtgtgaggcgcgagtccttaggagcctgtctgccatctaagccctgttagcattttcctttactaatgttggggcggggggacctcagaaggggcagagcaagcatatgaaagttttgttacagagatgccagtatttgtccttagaacaggtccagttgacaaaggcgctgcaggatatgaaagattctcattacaatgtcacggcaacatgactgaaattattaactctccacgtgggatgatggatggtatagggtggagatgtccttggcagaacatattgcttaattatcttcttttagtaccagcttacagtcacgttcctatgatcgagtactattccaaatgaattcataaagagagaatatttaaagatcttatccaataaaagagcagattaaatgtcagatcttcattagtggttctttaatcaaagttctttttgtggttttatgacaaatgctttcatttttggcacttgaacctaagacccccaggtctaaaaggaacttttctcatttgaaataaaggaggatttaatgattttcaaaagtagaatttatggtctggtggataagacttataagtagaatctggagagcctttaattttagtgttggaatgaatgacacctcggatcttttacagggctgtaaagccctgtgacttagtttccctataggttagaaacagaaggccataaaatatacgaatacttgcaatgctgtagattggtaacatttatcaggcgacatcaggattcttaatagtctgcagtgggctcatgtcattcttaaaaaaatatagtcactacctttaagcaagttacccatgtaattgatttaattagttaatatttgagaaatattttagagatggaatggataatgcgatatcattatatccaggcctgcaccaaaacagactttagtagcat

SEQ ID NO: 59055 - DNA, 598 bp, Homo sapiens
gttagcaggcctcttcaggtaggctgtgggaggagagaagaggaaggatggttcaatagattattaagagaatgtttcaacattaaaaatatggggcaattatatgaacactacatgctgctaaaagtaaaatatacaatagaaatgttctgaggaagaaaaacacattcaaatgcaaatgaagaaaaccaaaatgagaaaataatgagccaaatagcaaaagttaaaacttgggtatgtttgtctggcaataaatctcttctccatttgaaaaacaactaaatgtctctattccattatactagatttaaaaattcttagagtttgagtagttttttttaataaagtcatatacacatccaagcataataatttactattcactacagtgcgttcagcatagtgtgttatattcagtatatacgtaaatgcctcaagaacatgatcataatgctgattaaactcctcagtaaaacattctctcaagacaaactttgcttttctatcgttcggattttgtttaggaagaaaatttcaasaagccggccacatagacaaacttcgaagacaaagacttttttgaaatagaaagttacag

SEQ ID NO: 59056 - DNA, 1305 bp, Homo sapiens
tagaaaaacttccactacatatccacaaaatgttcaaatgttcagtgttaatctgatggttacatatctgtaactctaaagtctgttgattaactaatgaaattcattttgagtggcttttaatcagtctttattaatacagtcatatataaatgtatacatttgtaaaaagcaaagtagaggttcctcttcagactctcctccccgtgtaattaggaataaatagtaacttctcttagaagcaaaatttattcaaasacctgtgctaacattcttaaacatctgctagccgtaataaagaaatcaatgtactttatgttcttagctcccacaatttagcctaaatatttgccccggcaagcttatactggtccaagcaagcgttaggtcatagcctgttcctcttccttatttgaaggtgtttttacctttctctacattccacaagttacttcctccttcctttgttctcctctgcctttgcctcttttaaaacaagattggctaagttgctagccaatcagaacaaatacagaatgtgaggtcctgttccagccaatggaaaccgggcatagcagcagggtggacgcatcaggttataaatgacccggtctcctttgttcggtgtactctcatggcaaaactgctggcgagtgtaccctttctgcagaaagtataaaaatggccttgctgaggaaattaaatttatgttcaagtgctacttctttacagcaccagggaacaagcattccaaagaggtttatcctatctttatgtaatagttatctaagaaatatttactgaatgtagttacaaattgacatgcaaagaatatgcaatgaatgaatgtgcacattatagtagcataacataattcatgaatatgacacaaatgcaaagaaagcagcctgtggccaccccttatctaggcaaggttgaaacacaatttgcctttggtgccctgccatatctctactcaacacctctctgttttcagtgcctctttatcttacttagctgtcaattctctgctaaggcatttattgacaactaaggaactggttaataaagggcttaaggtatgatccaacccagggtcatctgtgtttaaaagaacctcttcatgaccattcaatgaggaaaggacaatcttttcaacaaatggtgataggaaaactggatatcacatgcaaaagaagttggacctttacaccatgttaaaaaaaaacttaaagtgtacaaaagacataaatataagagctaaaactatcaaactcttgggagaaaacataaaagcttcatgac

SEQ ID NO: 59057 - DNA, 751 bp, Homo sapiens
ggatcctggacaggagggtcaggtcgattttgacccagagagacctgatctcatcactgtcctttagaggggagagaagttcgttccggccaaaggggaccagtgtgtagaactgctcctccagctccttggcgatgtcactggtggtcctggcgttgatggagcctacaggggccctaggaccactgcccccgttggcagcggcctccttcagcctctgatcattcccggaggaggcagaggcagccacggtctgtgctttggacagagggtactcctcctgctcsgactccaggtcggagtccgaggaggaggatgaagatgacgactctgtctcaatgaactccttggatttggggacgatcctgcttagcccccgcgtggcgcggcttctcgcaggtcacggaggagcgcatcttgcggtggctcgctctgttgttgccacagggcctggttttggtgggctccggggggaccaccacgctcgtccccagcgcgtccgcgccgcgctcctcgggccggtgcagttggcgccgtccccggtgaggtcctctcggtgcgcctggtggcttcttgccgcggacctccgggcaggcgcgcgcgttctccgcggcgcacagggcactgcgggtggcggggcggctgcgctcaccgcaggccacgggcgggcgggacttctgcttcacgcctttactcccaggggccttgttggctgtccttggcctttgctcctccttgcaagtgctcttga

SEQ ID NO: 59058 - DNA, 751 bp, Homo sapiens
ggatcctggacaggagggtcaggtcgattttgacccagagagacctgatctcatcactgtcctttagaggggagagaagttcgttccggccaaaggggaccagtgtgtagaactgctcctccagctccttggcgatgtcactggtggtcctggcgttgatggagcctacaggggccctaggaccactgcccccgttggcagcggcctccttcagcctctgatcattcccggaggaggcagaggcagccacggtctgtgctttggacagagggtactcctcctgctcggactccaggtcggagtccgaggaggaggatgaagatgacgactctgtctcaatgaactccttggatttggggacgatcctgcttagcccccgcgtggsgcggcttctcgcaggtcacggaggagcgcatcttgcggtggctcgctctgttgttgccacagggcctggttttggtgggctccggggggaccaccacgctcgtccccagcgcgtccgcgccgcgctcctcgggccggtgcagttggcgccgtccccggtgaggtcctctcggtgcgcctggtggcttcttgccgcggacctccgggcaggcgcgcgcgttctccgcggcgcacagggcactgcgggtggcggggcggctgcgctcaccgcaggccacgggcgggcgggacttctgcttcacgcctttactcccaggggccttgttggctgtccttggcctttgctcctccttgcaagtgctcttga

SEQ ID NO: 59059 - DNA, 751 bp, Homo sapiens
ggatcctggacaggagggtcaggtcgattttgacccagagagacctgatctcatcactgtcctttagaggggagagaagttcgttccggccaaaggggaccagtgtgtagaactgctcctccagctccttggcgatgtcactggtggtcctggcgttgatggagcctacaggggccctaggaccactgcccccgttggcagcggcctccttcagcctctgatcattcccggaggaggcagaggcagccacggtctgtgctttggacagagggtactcctcctgctcggactccaggtcggagtccgaggaggaggatgaagatgacgactctgtctcaatgaactccttggatttggggacgatcctgcttagcccccgcgtggcgsggcttctcgcaggtcacggaggagcgcatcttgcggtggctcgctctgttgttgccacagggcctggttttggtgggctccggggggaccaccacgctcgtccccagcgcgtccgcgccgcgctcctcgggccggtgcagttggcgccgtccccggtgaggtcctctcggtgcgcctggtggcttcttgccgcggacctccgggcaggcgcgcgcgttctccgcggcgcacagggcactgcgggtggcggggcggctgcgctcaccgcaggccacgggcgggcgggacttctgcttcacgcctttactcccaggggccttgttggctgtccttggcctttgctcctccttgcaagtgctcttga

SEQ ID NO: 59060 - DNA, 751 bp, Homo sapiens
ggatcctggacaggagggtcaggtcgattttgacccagagagacctgatctcatcactgtcctttagaggggagagaagttcgttccggccaaaggggaccagtgtgtagaactgctcctccagctccttggcgatgtcactggtggtcctggcgttgatggagcctacaggggccctaggaccactgcccccgttggcagcggcctccttcagcctctgatcattcccggaggaggcagaggcagccacggtctgtgctttggacagagggtactcctcctgctcggactccaggtcggagtccgaggaggaggatgaagatgacgactctgtctcaatgaactccttggatttggggacgatcctgcttagcccccgcgtggcgcsgcttctcgcaggtcacggaggagcgcatcttgcggtggctcgctctgttgttgccacagggcctggttttggtgggctccggggggaccaccacgctcgtccccagcgcgtccgcgccgcgctcctcgggccggtgcagttggcgccgtccccggtgaggtcctctcggtgcgcctggtggcttcttgccgcggacctccgggcaggcgcgcgcgttctccgcggcgcacagggcactgcgggtggcggggcggctgcgctcaccgcaggccacgggcgggcgggacttctgcttcacgcctttactcccaggggccttgttggctgtccttggcctttgctcctccttgcaagtgctcttga

SEQ ID NO: 59061 - DNA, 655 bp, Homo sapiens
gattagaagaacaaatagtctgaaatcatagctgaggtcctcaaaatatcagatgactagaagtaatttatttttgactttggcacctttcatgtgcgtccgtgtgaagagaccaccaaacaggctttgtgtgagcaataaagcttttaatcacctgggtgcaggcgggctgagtctgaaaagagagtcagcaaagggagataaggttgggggcgttttataggatttgggtagataaaggaaaattacagtcaaagggggttgttctctggcgggcagagtgggggtcacaaggtgctcagtaggggagcttttgagccaggatgagccaggagaagaaatttcacaagacaacgtcatcagttaaggcaggaacaggccattttcacttcttttgtggtggaatgtcatcagttaaggcaggaaccagccatctggatgtgtatgtgtaggtcacaggggatatgatggcttagcttgggcccagaggcctgacagcacccacaatggatttatttttctgtcatactgattttcttagttttgttttacttggcttgatggtgggtagtgcatcctacagcccaaatgtaggattttytacagaaaaacctcaaagcgaatgatctactcacagaagattgggtataaacaa

SEQ ID NO: 59062 - DNA, 743 bp, Homo sapiens
agccctctgcctccctcctcctttgaaagagcagtggcctgccccgcttgtaaaagccgaggggttccggaaagccgaccgtgctttacaggacaactgcaaagaggaagagaggcgaaatccagggggagaccatgtgaccacgcgtggcactggccaatcccacagcagttggtgttaacgtgtgacacctgaggtaaacggggcgacggtgaaacgaagggtggggtccatgcatgtgccggtggaagggggaaacgggtgacctttccgtcaatgccaaggaaaatcaaacaacacctgggacctggagggtgtgggggacgtctgcgcctgacccaagccacgttttcaaatgcctaccagaggaacaaagaggtttctgccaatttcgcaacacccycaatcctccaccggcctcgtagccctgacgcaacttcgctggcacaaacccacagagagtgggaaagaaacacacagagactgagagacagagagagaagagagaatgggagacacacacacacacacacacacacgcagagtcatacagcagaggcattgaaacacacacccccaggcaccccctgaggctccggggttctgctctggaggagaacgaccctcgggtgagagagcagcccaggggcacgcagcccgacacgtcctcgagatcacggacggcggcaaggcttttggcgagactcaccccaaccaacaccgtccgtgcaggcctgaggctg

SEQ ID NO: 59063 - DNA, 729 bp, Homo sapiens
cagmctcaggcctgcacggacggtgtttgttggggtgagtctcgccaaaagtcgcgccgctgtccgtgatctcgaggacgggtcggcctgcgtgcccctgggctgctctctcacccgagggtcgttctcctccagagcagaaccccggagcctcacggggttgctgggggtgtgtgtttcaatgcctgtgctgtatgactctgcgtgtgtgtgtgtgtgtctgtgtgtttctctcccattctctcttctccctctgtctctcagtctctgtgtgtttctttcccactctttgtgggtttgtgccagccgaagttgcttcagggctacaaggtcggtggaggattgggggtgttgcgaaattggcagaaacatctttgttcctctggtaggcatttgaaaacgtggcttgggtcaggcacagacgtcccccacaccctccgggtcccaggtgttgtttgattttccttggcattgacggaaaggtcacccgtttcccccttccaccggcacgtgcatggaccccacccttcgtttcgccgtcgccccgtatgcctccggtgtcacacgttaacaccaactgctgtggattagccggtgcacgcgtggtcacatgtctccccctggatttcgcctctgttcctctttgcagttgtccggtaaagcgcgttcggctttccggaacccctgggcttttacaagcggggcaggccactgcactttcaaaggagg

SEQ ID NO: 59064 - DNA, 729 bp, Homo sapiens
cagcctcaggcctgcacggacggtgtttgttggggtgagtctcgccaaaagtcgcgccgctgtccgtgatctcgaggacgggtcggcctgcgtgcccctgggctgctctctcacccgagggtcgttctcctccagagcagaaccccggagcctcacggggttgctgggggtgtgtgtttcaatgmctgtgctgtatgactctgcgtgtgtgtgtgtgtgtctgtgtgtttctctcccattctctcttctccctctgtctctcagtctctgtgtgtttctttcccactctttgtgggtttgtgccagccgaagttgcttcagggctacaaggtcggtggaggattgggggtgttgcgaaattggcagaaacatctttgttcctctggtaggcatttgaaaacgtggcttgggtcaggcacagacgtcccccacaccctccgggtcccaggtgttgtttgattttccttggcattgacggaaaggtcacccgtttcccccttccaccggcacgtgcatggaccccacccttcgtttcgccgtcgccccgtatgcctccggtgtcacacgttaacaccaactgctgtggattagccggtgcacgcgtggtcacatgtctccccctggatttcgcctctgttcctctttgcagttgtccggtaaagcgcgttcggctttccggaacccctgggcttttacaagcggggcaggccactgcactttcaaaggagg

SEQ ID NO: 59065 - DNA, 842 bp, Homo sapiens
tcaggggttgcctgggggtgtgtgtttcaatgcctstgctgtatgactctgcgtgtgtgtgcgtgtgtgtctgtgtgtgtgtctcccattctctcttctctctctgtctctcactctctgtgtgtttctttcccactctctgtgggtttgtaccagccgaagttgcgtcagggctaccaggtcggtggaggattgggggtgttgcgaaattggcagaaacctctttgctcctctggtaggcatttgaaaacgtggcttgggtcaggcacaggaggcccccctaccccacggttcccaggtgttgtttgtttttccttggcgttgacggaaatgtcacccgtttcccccttccaccggcatatccctggaccccacccttcgttttgccgtcgccccgtatgcctccggtgacacacattaacaccaactgctgtgggattggccagtgccacgcgtggtcacatggtctccccctgggtttcgcctctgttcctctttgcagttgtcctgtacagcgcgttcggctttccggaaaccctgggcttttacaagcggggcaggccactgcactttcaaaggaggagggaggcagagggctgatggatgagtgaatttgctctgacactaggccttgagacctatggggtcattgtgtgctgcagcgaggccctgccggcctgaccacatgtggtgagcccatcctatgtcactcggagggggccagaatgggatctcaacgggagtccagagaacacagcaggcgtcctgaagctctccctcccttggtggaagtcggctcaagcaggtcctgaggacaggagccctgggggtttgggcctggg

SEQ ID NO: 59066 - DNA, 842 bp, Homo sapiens
tcaggggttgcctgggggtgtgtgtttcaatgcctgtgctgtatgactctgcgtgtgtgtgcgtgtgtgtctgtgtgtgtgtctcccattctctcttctctctctgtctctcactctctgtgtgtttctttcccactctctgtgggtttgtaccagccgaagttgcgtcagggctaccaggtcggtggaggattgggggtgttgcgaaattggcagaaacctctttgctcctctggtaggcatttgaaaacgtggcttgggtcaggcacaggaggcccccctaccccacggttcccaggtgttgtttgtttttccttggcrttgacggaaatgtcacccgtttcccccttccaccggcatatccctggaccccacccttcgttttgccgtcgccccgtatgcctccggtgacacacattaacaccaactgctgtgggattggccagtgccacgcgtggtcacatggtctccccctgggtttcgcctctgttcctctttgcagttgtcctgtacagcgcgttcggctttccggaaaccctgggcttttacaagcggggcaggccactgcactttcaaaggaggagggaggcagagggctgatggatgagtgaatttgctctgacactaggccttgagacctatggggtcattgtgtgctgcagcgaggccctgccggcctgaccacatgtggtgagcccatcctatgtcactcggagggggccagaatgggatctcaacgggagtccagagaacacagcaggcgtcctgaagctctccctcccttggtggaagtcggctcaagcaggtcctgaggacaggagccctgggggtttgggcctggg

SEQ ID NO: 59067 - DNA, 842 bp, Homo sapiens
tcaggggttgcctgggggtgtgtgtttcaatgcctgtgctgtatgactctgcgtgtgtgtgcgtgtgtgtctgtgtgtgtgtctcccattctctcttctctctctgtctctcactctctgtgtgtttctttcccactctctgtgggtttgtaccagccgaagttgcgtcagggctaccaggtcggtggaggattgggggtgttgcgaaattggcagaaacctctttgctcctctggtaggcatttgaaaacgtggcttgggtcaggcacaggaggcccccctaccccacggttcccaggtgttgtttgtttttccttggcgttgacggaaatgtcacccgtttcccccttccaccggcatatscctggaccccacccttcgttttgccgtcgccccgtatgcctccggtgacacacattaacaccaactgctgtgggattggccagtgccacgcgtggtcacatggtctccccctgggtttcgcctctgttcctctttgcagttgtcctgtacagcgcgttcggctttccggaaaccctgggcttttacaagcggggcaggccactgcactttcaaaggaggagggaggcagagggctgatggatgagtgaatttgctctgacactaggccttgagacctatggggtcattgtgtgctgcagcgaggccctgccggcctgaccacatgtggtgagcccatcctatgtcactcggagggggccagaatgggatctcaacgggagtccagagaacacagcaggcgtcctgaagctctccctcccttggtggaagtcggctcaagcaggtcctgaggacaggagccctgggggtttgggcctggg

SEQ ID NO: 59068 - DNA, 842 bp, Homo sapiens
tcaggggttgcctgggggtgtgtgtttcaatgcctgtgctgtatgactctgcgtgtgtgtgcgtgtgtgtctgtgtgtgtgtctcccattctctcttctctctctgtctctcactctctgtgtgtttctttcccactctctgtgggtttgtaccagccgaagttgcgtcagggctaccaggtcggtggaggattgggggtgttgcgaaattggcagaaacctctttgctcctctggtaggcatttgaaaacgtggcttgggtcaggcacaggaggcccccctaccccacggttcccaggtgttgtttgtttttccttggcgttgacggaaatgtcacccgtttcccccttccaccggcatatccctggaccccacccttcgtttygccgtcgccccgtatgcctccggtgacacacattaacaccaactgctgtgggattggccagtgccacgcgtggtcacatggtctccccctgggtttcgcctctgttcctctttgcagttgtcctgtacagcgcgttcggctttccggaaaccctgggcttttacaagcggggcaggccactgcactttcaaaggaggagggaggcagagggctgatggatgagtgaatttgctctgacactaggccttgagacctatggggtcattgtgtgctgcagcgaggccctgccggcctgaccacatgtggtgagcccatcctatgtcactcggagggggccagaatgggatctcaacgggagtccagagaacacagcaggcgtcctgaagctctccctcccttggtggaagtcggctcaagcaggtcctgaggacaggagccctgggggtttgggcctggg

SEQ ID NO: 59069 - DNA, 842 bp, Homo sapiens
tcaggggttgcctgggggtgtgtgtttcaatgcctgtgctgtatgactctgcgtgtgtgtgcgtgtgtgtctgtgtgtgtgtctcccattctctcttctctctctgtctctcactctctgtgtgtttctttcccactctctgtgggtttgtaccagccgaagttgcgtcagggctaccaggtcggtggaggattgggggtgttgcgaaattggcagaaacctctttgctcctctggtaggcatttgaaaacgtggcttgggtcaggcacaggaggcccccctaccccacggttcccaggtgttgtttgtttttccttggcgttgacggaaatgtcacccgtttcccccttccaccggcatatccctggaccccacccttcgttttgccgtygccccgtatgcctccggtgacacacattaacaccaactgctgtgggattggccagtgccacgcgtggtcacatggtctccccctgggtttcgcctctgttcctctttgcagttgtcctgtacagcgcgttcggctttccggaaaccctgggcttttacaagcggggcaggccactgcactttcaaaggaggagggaggcagagggctgatggatgagtgaatttgctctgacactaggccttgagacctatggggtcattgtgtgctgcagcgaggccctgccggcctgaccacatgtggtgagcccatcctatgtcactcggagggggccagaatgggatctcaacgggagtccagagaacacagcaggcgtcctgaagctctccctcccttggtggaagtcggctcaagcaggtcctgaggacaggagccctgggggtttgggcctggg

SEQ ID NO: 59070 - DNA, 842 bp, Homo sapiens
tcaggggttgcctgggggtgtgtgtttcaatgcctgtgctgtatgactctgcgtgtgtgtgcgtgtgtgtctgtgtgtgtgtctcccattctctcttctctctctgtctctcactctctgtgtgtttctttcccactctctgtgggtttgtaccagccgaagttgcgtcagggctaccaggtcggtggaggattgggggtgttgcgaaattggcagaaacctctttgctcctctggtaggcatttgaaaacgtggcttgggtcaggcacaggaggcccccctaccccacggttcccaggtgttgtttgtttttccttggcgttgacggaaatgtcacccgtttcccccttccaccggcatatccctggaccccacccttcgttttgccgtcgccccgtatgcctccggtgacacacattaacaccaactgctgtgggattggccagtgccacgcgtggtcacatggtctccccctgggtttcgcctctgttcctctttgcagttgtcctgtamagcgcgttcggctttccggaaaccctgggcttttacaagcggggcaggccactgcactttcaaaggaggagggaggcagagggctgatggatgagtgaatttgctctgacactaggccttgagacctatggggtcattgtgtgctgcagcgaggccctgccggcctgaccacatgtggtgagcccatcctatgtcactcggagggggccagaatgggatctcaacgggagtccagagaacacagcaggcgtcctgaagctctccctcccttggtggaagtcggctcaagcaggtcctgaggacaggagccctgggggtttgggcctggg

SEQ ID NO: 59071 - DNA, 626 bp, Homo sapiens
tcaggggttgcctgggggtgtgtgtttcaatgyctctgctgtatgactctgcgtgtgtgtgcgtgtgtgtgtgtgtgtgtgtctcccattctctcttctctctctgtctctcactctctgtgtgtttctttcccaatctctgtgggtttgtaccagccgaagttgcgtcagggctaccaggtcggtggaggattgggggtgttgcgaaattggcagaaacctctgtgctcctctggtaggcatttgaaaacgtggcttgggtcaggcacagtcggcacccccacctcccggttcccaggtgtggtttgattttccttggcactgacggaaatgtcacccgtttcccccttccaccggcacatgcctggaccccacccttcgtttcgccgtcgccccgtatgcctccggtgacacacattaacaccaactgctgtgggattagccagtgccacgcgtggtctcatggtctccccctgggtttcgcctctgttcctctttgcagttgtcctgtaaagcgcgttcggctttccggaacccctgggcttttacaagcggggcaggccactgctctttcaaaggaggagggaggcagagggctgatggatcggtgaatttgctctgacact

SEQ ID NO: 59072 - DNA, 626 bp, Homo sapiens
tcaggggttgcctgggggtgtgtgtttcaatgtctctgctgtatgactctgcgtgtgtgtgcgtgtgtgtstgtgtgtgtgtctcccattctctcttctctctctgtctctcactctctgtgtgtttctttcccaatctctgtgggtttgtaccagccgaagttgcgtcagggctaccaggtcggtggaggattgggggtgttgcgaaattggcagaaacctctgtgctcctctggtaggcatttgaaaacgtggcttgggtcaggcacagtcggcacccccacctcccggttcccaggtgtggtttgattttccttggcactgacggaaatgtcacccgtttcccccttccaccggcacatgcctggaccccacccttcgtttcgccgtcgccccgtatgcctccggtgacacacattaacaccaactgctgtgggattagccagtgccacgcgtggtctcatggtctccccctgggtttcgcctctgttcctctttgcagttgtcctgtaaagcgcgttcggctttccggaacccctgggcttttacaagcggggcaggccactgctctttcaaaggaggagggaggcagagggctgatggatcggtgaatttgctctgacact

SEQ ID NO: 59073 - DNA, 626 bp, Homo sapiens
tcaggggttgcctgggggtgtgtgtttcaatgtctctgctgtatgactctgcgtgtgtgtgcgtgtgtgtgtgtgtgtgtgtctcccattctctcttctctctctgtctctcactctctgtgtgtttctttccsaatctctgtgggtttgtaccagccgaagttgcgtcagggctaccaggtcggtggaggattgggggtgttgcgaaattggcagaaacctctgtgctcctctggtaggcatttgaaaacgtggcttgggtcaggcacagtcggcacccccacctcccggttcccaggtgtggtttgattttccttggcactgacggaaatgtcacccgtttcccccttccaccggcacatgcctggaccccacccttcgtttcgccgtcgccccgtatgcctccggtgacacacattaacaccaactgctgtgggattagccagtgccacgcgtggtctcatggtctccccctgggtttcgcctctgttcctctttgcagttgtcctgtaaagcgcgttcggctttccggaacccctgggcttttacaagcggggcaggccactgctctttcaaaggaggagggaggcagagggctgatggatcggtgaatttgctctgacact

SEQ ID NO: 59074 - DNA, 626 bp, Homo sapiens
tcaggggttgcctgggggtgtgtgtttcaatgtctctgctgtatgactctgcgtgtgtgtgcgtgtgtgtgtgtgtgtgtgtctcccattctctcttctctctctgtctctcactctctgtgtgtttctttcccamtctctgtgggtttgtaccagccgaagttgcgtcagggctaccaggtcggtggaggattgggggtgttgcgaaattggcagaaacctctgtgctcctctggtaggcatttgaaaacgtggcttgggtcaggcacagtcggcacccccacctcccggttcccaggtgtggtttgattttccttggcactgacggaaatgtcacccgtttcccccttccaccggcacatgcctggaccccacccttcgtttcgccgtcgccccgtatgcctccggtgacacacattaacaccaactgctgtgggattagccagtgccacgcgtggtctcatggtctccccctgggtttcgcctctgttcctctttgcagttgtcctgtaaagcgcgttcggctttccggaacccctgggcttttacaagcggggcaggccactgctctttcaaaggaggagggaggcagagggctgatggatcggtgaatttgctctgacact

SEQ ID NO: 59075 - DNA, 615 bp, Homo sapiens
cagcctcaggcctgcacggacggtgttggttggggtgagtctckccaaaagccttgccgctgtccgtgatctcgaggacgggtcggcctgcgtgcccctgggctgctctctcacccgagggtcgttctcctccagagcagaaccccggagcctcaggggttgcctgggggtgtgtgtttcaatgcctctgctgtatgactctgcgtgtgtgtgtgtgtgtctgtgtgtttgtctcccattctctcttctccctctgtctctcagtctctgtgtgtttctttcccactctttgtgggtttgttccagccgaagttgcatcagggctacgagttcggtggaggattgggggtgttgcgaaattggcagaaacctctttgttcctctggtaggcatttgaaaacgtggcttgggtcaggcacagacgtcccctacaccctccgggtcccaggtgttgtttgattttccttggcattgacggaaaggtcacccgtttcccccttccaccggcacgtgcatggaccccacccttcgtttcgccgtcgccccgtttgcctccggtgtcacacgttaacaccaactgctgtgggattggccagtgccacgcgtggtcacatg

SEQ ID NO: 59076 - DNA, 615 bp, Homo sapiens
cagcctcaggcctgcacggacggtgttggttggggtgagtctctccaaaagccttgccgctgtccgtgatctcgaggacgggtyggcctgcgtgcccctgggctgctctctcacccgagggtcgttctcctccagagcagaaccccggagcctcaggggttgcctgggggtgtgtgtttcaatgcctctgctgtatgactctgcgtgtgtgtgtgtgtgtctgtgtgtttgtctcccattctctcttctccctctgtctctcagtctctgtgtgtttctttcccactctttgtgggtttgttccagccgaagttgcatcagggctacgagttcggtggaggattgggggtgttgcgaaattggcagaaacctctttgttcctctggtaggcatttgaaaacgtggcttgggtcaggcacagacgtcccctacaccctccgggtcccaggtgttgtttgattttccttggcattgacggaaaggtcacccgtttcccccttccaccggcacgtgcatggaccccacccttcgtttcgccgtcgccccgtttgcctccggtgtcacacgttaacaccaactgctgtgggattggccagtgccacgcgtggtcacatg

SEQ ID NO: 59077 - DNA, 615 bp, Homo sapiens
cagcctcaggcctgcacggacggtgttggttggggtgagtctctccaaaagccttgccgctgtccgtgatctcgaggacgggtcggcctgcgtgcccctgggctgctctctcacccgagggtckttctcctccagagcagaaccccggagcctcaggggttgcctgggggtgtgtgtttcaatgcctctgctgtatgactctgcgtgtgtgtgtgtgtgtctgtgtgtttgtctcccattctctcttctccctctgtctctcagtctctgtgtgtttctttcccactctttgtgggtttgttccagccgaagttgcatcagggctacgagttcggtggaggattgggggtgttgcgaaattggcagaaacctctttgttcctctggtaggcatttgaaaacgtggcttgggtcaggcacagacgtcccctacaccctccgggtcccaggtgttgtttgattttccttggcattgacggaaaggtcacccgtttcccccttccaccggcacgtgcatggaccccacccttcgtttcgccgtcgccccgtttgcctccggtgtcacacgttaacaccaactgctgtgggattggccagtgccacgcgtggtcacatg

SEQ ID NO: 59078 - DNA, 615 bp, Homo sapiens
cagcctcaggcctgcacggacggtgttggttggggtgagtctctccaaaagccttgccgctgtccgtgatctcgaggacgggtcggcctgcgtgcccctgggctgctctctcacccgagggtcgttctcctccagagcagaaccccggagcctcaggggttgcctgggggtgtgtgtttcaatgcctctgctgtatgactctgcgtgtgtgtgtgtgtgtctgtgtgtttgtctcccattctctcttctccctctgtctctcagtctctgtgtgtttctttcccactctttgtgggtttgtkccagccgaagttgcatcagggctacgagttcggtggaggattgggggtgttgcgaaattggcagaaacctctttgttcctctggtaggcatttgaaaacgtggcttgggtcaggcacagacgtcccctacaccctccgggtcccaggtgttgtttgattttccttggcattgacggaaaggtcacccgtttcccccttccaccggcacgtgcatggaccccacccttcgtttcgccgtcgccccgtttgcctccggtgtcacacgttaacaccaactgctgtgggattggccagtgccacgcgtggtcacatg

SEQ ID NO: 59079 - DNA, 615 bp, Homo sapiens
cagcctcaggcctgcacggacggtgttggttggggtgagtctctccaaaagccttgccgctgtccgtgatctcgaggacgggtcggcctgcgtgcccctgggctgctctctcacccgagggtcgttctcctccagagcagaaccccggagcctcaggggttgcctgggggtgtgtgtttcaatgcctctgctgtatgactctgcgtgtgtgtgtgtgtgtctgtgtgtttgtctcccattctctcttctccctctgtctctcagtctctgtgtgtttctttcccactctttgtgggtttgttccagccgaagttgcrtcagggctacgagttcggtggaggattgggggtgttgcgaaattggcagaaacctctttgttcctctggtaggcatttgaaaacgtggcttgggtcaggcacagacgtcccctacaccctccgggtcccaggtgttgtttgattttccttggcattgacggaaaggtcacccgtttcccccttccaccggcacgtgcatggaccccacccttcgtttcgccgtcgccccgtttgcctccggtgtcacacgttaacaccaactgctgtgggattggccagtgccacgcgtggtcacatg

SEQ ID NO: 59080 - DNA, 709 bp, Homo sapiens
cttgagcccaggagttcaagacaagcctgggtaacagggagagcctcatctctatagaaaatttaaaaatttaattagcctatcatkgtggctcacacctgtaatcccagatacttgggaggcttttttgaggttatagtgagttatgatccagctactgtactccagcctggtgacagaatggcatcttctctctataaaaataaaaataaaaataaaatctatgacatttaactgattacttatttaatcaattaattggaataaatgatatcctgattatgacatttcaatagacatattattatttattttaatatttgaatagagtaaataaagacctatttttctttcaatttgtcatttattttatgttgctttgaataaaaaactaatgctgcaattgtgtacaccattaaatcattaggttctaatttccttgatctattacgaaaagtgattttcaatttgaatatcaagggcattatttgcagaatattgttattctgcaaatatattctgcaaatacattctgtaatatttaaatatcataatcaagcaaactcttaaatgtgacacctgaaacaattataggcaaagaaaatactagtaatatagctcacagataaagcttatttagtataaagtatgcaaggaacttcggattcagaaaatatggcacagatccatgtttttcccgcctcttttt

SEQ ID NO: 59081 - DNA, 618 bp, Homo sapiens
tccctggttctgcatttcctcagccgccatgagcacattctattctatggtcattggatcggcattttaaatcctgtttggcagaaagagagtttcatgtttaggtccaagatgtaatgggtctctctaaaggacagcatgacatttcctgcgtaaaacaactaaaatccagaattcacttcctggtcaatatcgtggggactacctaagcagcatgtgagcacacacacacacacacacacacaccacacacacaacagaaaagtgagtgataatcgattttaaggactaactctggagccagactaactgggctctgattacagctatgattacagctctggtggtaactagctttacgatcttgggcacattatttaacctcttgtccctcagttgcttcatctgtaaaaccgagataacaattgcaattatctcataaaattattggaaggagttaatgaattagtatcagtaaagtgattggaacaattcctggcatataataagccccacatatatgctatataaatgctagttaaatgactagttaaacrcacaatgaaatgtaataaaagaaaataaaattaaagataatatattaccagttgggtagat

SEQ ID NO: 59082 - DNA, 565 bp, Homo sapiens
aagtctatgaaatggggcataacatcagtacatatgtaatgagttgtaatggttaagtcagttagggcctgacacatggtaatttctcaataagggttaattattattactactaatgctaattgtataaacatgctatatataatcttaaaactgattttattattttaatggaaattccattgagaatagacctacaggattcagaacatatataaatatgaagagtgctttgcttaatgttttaagcattaaaacaatccttatttgggtaaggattttcaagggagattgtagttgtcatttagattaatagcttgagaaactgctttttttttcctggcggtgccagtgtctctctgacattggggggatttttgtgctgctgctgctgctgctgcttgtttgcaatttgtattatatttcaacaaagagctttgcttgctcggagctattgaaattgtaaagcagcaaacatgatggggtracttatttcatccaattctcaataaccattgcaagttttttgtctctttatgaaaaatgtctgttcaattataaggta

SEQ ID NO: 59083 - DNA, 539 bp, Homo sapiens
tgtgactccaaaatgaagcaacttattccaaaattctatggtcaaatctcttgaatatcagtagtcagatgtgcttagaattttccgatatacattgcgtgtaatagaggaggaaggggaggtggaagacaagagaaagagaggaatgggaaggatttatataaaacaattctgagtcaatggctacttctgatcagatgcaataattccagtaagcctcaagcaaggcttccaccattaaagctaaagttatttcatttcaccaattatcttcaacacataaatgtggakcatttactaagtgtggctgcactacatgctgctaattcagtagcataaacagctaggagaaaaagaaacacacaaaccaccaaccatgtaacactgtcaagtgccacaatggaggaacaggaaggagaagagcacctgaagcaatctgtgtgtaggggaaatgatcctgaaggaggtgattctagagctaagcctttaaatgtctcctgttccccttcccacttaaacaggttagattgaaggctctt

SEQ ID NO: 59084 - DNA, 539 bp, Homo sapiens
tgtgactccaaaatgaagcaacttattccaaaattctatggtcaaatctcttgaatatcagtagtcagatgtgcttagaattttccgatatacattgcgtgtaatagaggaggaaggggaggtggaagacaagagaaagagaggaatgggaaggatttatataaaacaattctgagtcaatggctacttctgatcagatgcaataattccagtaagcctcaagcaaggcttccaccattaaagctaaagttatttcatttcaccaattatcttcaacacataaatgtggagcatttactaagtgtggctgcactacatgctgctaattcagtagcataaacarctaggagaaaaagaaacacacaaaccaccaaccatgtaacactgtcaagtgccacaatggaggaacaggaaggagaagagcacctgaagcaatctgtgtgtaggggaaatgatcctgaaggaggtgattctagagctaagcctttaaatgtctcctgttccccttcccacttaaacaggttagattgaaggctctt

SEQ ID NO: 59085 - DNA, 539 bp, Homo sapiens
tgtgactccaaaatgaagcaacttattccaaaattctatggtcaaatctcttgaatatcagtagtcagatgtgcttagaattttccgatatacattgcgtgtaatagaggaggaaggggaggtggaagacaagagaaagagaggaatgggaaggatttatataaaacaattctgagtcaatggctacttctgatcagatgcaataattccagtaagcctcaagcaaggcttccaccattaaagctaaagttatttcatttcaccaattatcttcaacacataaatgtggagcatttactaagtgtggctgcactacatgctgctaattcagtagcataaacagctaggagaaaaagaaacacacaaaccaccaaccatgtaacactgtcaagtgcyacaatggaggaacaggaaggagaagagcacctgaagcaatctgtgtgtaggggaaatgatcctgaaggaggtgattctagagctaagcctttaaatgtctcctgttccccttcccacttaaacaggttagattgaaggctctt

SEQ ID NO: 59086 - DNA, 600 bp, Homo sapiens
taatccatcaagcccccatggttggatctgattttttttttaataggagaaggaaagagaaaaggagattagcatttcatctctataactaagctatgagccaataaaatgacattttcatacacattttaagagctagccatagtaacttaaggaaccatggttagaatcctctgacatcttattaaaaccctgagtgataatagagtactgtgatggttaaggaggttattggtctttaaagagaaaaatgctctctgaayactgattctgattgtttctgattaaggctatcccttaaacatgactcaagaaaaaaattgttactctggagcttttattattctccattattttatttctggatacctttatttttaatcaatttcattaaacagaatattctcattctcataaggattgctgtccaaaatgcaatttacaatcccattcagagatctggttgtccttaatgactttcagtggacaaatttgccatccccttcagtaggcagatgtgtagctgcttttagtttggatgtttcaaatcaggtagaattgcctgacattccccatctccagtgtctgtaaagttactat

SEQ ID NO: 59087 - DNA, 702 bp, Homo sapiens
atccccaractggaatctggctgaccccaagagccggtgcttcctgtagcataatcccatgtaacagctggcaaactttctgcaaggggccaggcaggaaatatttgatctctgtgggccacacaaactacacacacagctttgccacggcagcctgaaagcagccgtagacaacgtggaaatgaacgagcatgactctgtctcaataaaactttctttctaaaagcaggcatcaggcaggattgggtctcagggctgtggttgccaatccctgctctataacatccaggactggctgcggaggggagctgagatctaggacacactggcaatagcagaacctcgaaagcctgaggcttgttcgtgccaaaaacaaaagccacagccagaaccccagctgcaggtgggcagggcagctccctcttgaagggctgcgtgtgaggacatgaatgaattcacgaaagcacttcgcccagccagctgccccataagtgttctctattatcatccacaaagagctccttgcggaggcccccgacaaaaggaatcgctgatgatcggaggcccccgacaaaaggaatcgctgatgatcgtgtctgtaacaggagggagcttccctgctcagtctccaaaccccttcctcggtgaatactccaagattctaaaataaaacaccccacgtttgcattttaacgtggtctg

SEQ ID NO: 59088 - DNA, 702 bp, Homo sapiens
atccccagactggaatctggctgaccccaagagccggtgcttcctgtagcataatcccatgtaacagctggcaaactttctgcaaggggccaggcaggaaatatttgatctctgtgggccacacraactacacacacagctttgccacggcagcctgaaagcagccgtagacaacgtggaaatgaacgagcatgactctgtctcaataaaactttctttctaaaagcaggcatcaggcaggattgggtctcagggctgtggttgccaatccctgctctataacatccaggactggctgcggaggggagctgagatctaggacacactggcaatagcagaacctcgaaagcctgaggcttgttcgtgccaaaaacaaaagccacagccagaaccccagctgcaggtgggcagggcagctccctcttgaagggctgcgtgtgaggacatgaatgaattcacgaaagcacttcgcccagccagctgccccataagtgttctctattatcatccacaaagagctccttgcggaggcccccgacaaaaggaatcgctgatgatcggaggcccccgacaaaaggaatcgctgatgatcgtgtctgtaacaggagggagcttccctgctcagtctccaaaccccttcctcggtgaatactccaagattctaaaataaaacaccccacgtttgcattttaacgtggtctg

SEQ ID NO: 59089 - DNA, 702 bp, Homo sapiens
atccccagactggaatctggctgaccccaagagccggtgcttcctgtagcataatcccatgtaacagctggcaaactttctgcaaggggccaggcaggaaatatttgatctctgtgggccacacaaactacacacacagctttgccacggcagcctgaaagcagccgtagacaacgtggaaatgaacgagcatgactctgtctcaataaaactttctttctaaaagcaggcatcaggcaggattgggtctcagggctgtggttgccaatccctgctctataacatccaggactggctgcggaggggagctgrgatctaggacacactggcaatagcagaacctcgaaagcctgaggcttgttcgtgccaaaaacaaaagccacagccagaaccccagctgcaggtgggcagggcagctccctcttgaagggctgcgtgtgaggacatgaatgaattcacgaaagcacttcgcccagccagctgccccataagtgttctctattatcatccacaaagagctccttgcggaggcccccgacaaaaggaatcgctgatgatcggaggcccccgacaaaaggaatcgctgatgatcgtgtctgtaacaggagggagcttccctgctcagtctccaaaccccttcctcggtgaatactccaagattctaaaataaaacaccccacgtttgcattttaacgtggtctg

SEQ ID NO: 59090 - DNA, 984 bp, Homo sapiens
gtgcaaaagttatataacattaaagaaatatttaagaagaaaaataaattttcccagrtcataccaccctaatagaattatttcattgttgtgtatgttcttagaatctttccattttcaggacttgtattcaatcagattgcactagtacactttcaccaggcattaaaatgttgatatcttatattacttgttggtaaatagccgccccaaaccctcaaagaacccccctccagttgtcttgtccacattggccattcaacaaagaaccctctggatctcatcacaatctaactcctaaaaaggttagcatgtaagaccctgttcaggccaggcacggtggctcacacctgtaatcccagcactttgggaggccgaggcgggaggatcacttgaggtcaggagttcgagaccagcctggccaacatggtgaaatcccgtctctactaaaaatacaaaaatcagccgggcgtggtgtcgcactcctgtagttccagcttctcaggaggctgaggcatgagaatcactttaacctgggaagcagaggttgcagtgagctgagatcacaccattgcacttcagcctgggcaaccaagcaagactctgtctcaaaaaaaaaaaaaaagaccccattcatctctctgattggtgtccattctgatggatcattacttatgctatttggactatactgtagtattttgaatatcactccatctatatttatgtatattttatatgcctacataaataatacatcatgattatagttgtatagggcaattttttaatatatttattcaatgttaaattataaagattttcccgtaatggtttacagtcttgagaactgacgttttgaatgattaaatagtatagtattccatcttgctgaggaatcaggattttctaaagcacttctctgttgtttgggactgaagtaatttgcagttttttgctcttacatttaacactgaaattaat

SEQ ID NO: 59091 - DNA, 1450 bp, Homo sapiens
atttctagaaacttatagggaaataaagatttgctcaaagacatatatatatatatatatgtgatatataaatgatccatgtatatatatatgatatgggtgatatatataaaataaatatgggtgatatatatatatacacacacacacacacacacacacacayacatatatatatgttctctgctgtatcatttatttatgttttcttttttttagaggcagaatctcactctgtcacccaggctagagtacagtggctcagtcataggtcactgcagccttgaactcctgggctcaagcgttcctcctgccatagcctcccaaagcactgggattataggtgtgagccacgatgcctggccctgcagtataatttacaattttttgaaatagtctagctatccaacaataagaaaatgtttaaataaattatcataagcacactattttcctaagtaaaatttctacattttctatattcaaaaacaaagtttaaagaattggtatatagtcaattatgtcataatgataaacctaattgaattatatatttacataaataaagatcattaagaacaaaaaaggctttacatctgataaaggacatgtacccagaacatacaagaactttcgtcagtcaataagaaaagatactaaatgttttaaatggacaaaagaattgaacaagcacatccccaaagaagatattcaaatggcccttaagcaagtagaaaggtcctcaacatcactactcatcagggaaatgcaaagtagagaacaaagagataccggtagacgttcactgtactggaataaaatttagcagatgagcaatattgagtgttgacaaggatatgaagtaactggaacccttacaccttgatggtgtgagggtaaatggtatcactttgtgaactgttgggtaaaaccaatgttgaccccataaactttcagtcccattcttgggtatatacctaagagaaaagagtgcttatgtccaccaaagcacacatagaattatattcatagcaactgtattcataatggctcaaattggaaagctgctctagtcatacattgtctgcccttacctttattaacgcagtagtgcttagcatgtagctacctgtgtttagtttaatatgtattattaatgaaaatttatttaggggatttcacccccaattttttaactttatggtttcaaatttcttaaaacctttctctttacatcagtttggttttggaagactaaaagaaagagcttgttgcacagatggcccaaagcacaaattattaaaatgctaacttttatctacatccagctccaaatattcccttactccttgatcattcttttttttttttttttttgagactgagtctgtgtcacctaggctggagtgatagatgtatatatggtcccctattctaaggtaatacagtc

SEQ ID NO: 59092 - DNA, 736 bp, Homo sapiens
ctcatatcgagaggtcagttaccgtcgtaaataatcgtagtaataaaaacaatttctaatgccagaattgaaaacggactgtggcacccaaatagggtccaaggtacatggcggcatgaaactatttctcgcttctgactcttctgcatcacggtctcccaaaggactagagaatctgaagctctcattgccacatctacaaatgaaagtatcatgtttaaagagctcacaggttctacgaatggtcagtatttaatgaacgcaccccactacacagaaactcacccagctgcaaactcagctgcaaactcaccayagcgtgctttcagactccacattaattttttttaattttagaagcaaacaactattttaaaaatattatgtaataatttaaactctggaaagccccatactcatcccagcagctcggaaaacggaaagcaaaattcgattagctccattgtacctagccaggctaacgtgcaagatcacacactcatcttcgtcagagcgtctctgccaataccaaagaacaacaaaggcaagttgagaagtctgcacaggcttaactcagcacttgttcgctttcccagcttcagaaagaagctcttcgaaggccccgggaaccaaggggaccttgtgcatcccatcaagccggccgctccgctcggcgccgctcgcgcagcttttgtctggcccggttgggagcccaggacgggagcccgggccgccc

SEQ ID NO: 59093 - DNA, 566 bp, Homo sapiens
ttgggggctgcttcaggcagtgcctgtgttgacctaggaggctgggccctatcattggatgctccagctgctctaggaaggatgcagtgggaggtggggtggacggctgttggtaagtgtcagctgagccccyggtggcctcagggccctccatcctcccagcatggtgagctcagcagcctggaggcagccaggagccagggccaggaaatggcgctggtctggcctgagatgaggccagattagggcagagcagagaaaccatgtggaaaggaagtccaggacggcagtcacctatgacataggggaagtcacgtgccgcagaaacgcatgggactgagtcctggaaaaaatgtaaagggtgatatacgggaaagttgggaggtgctctgcaaggtaggcgattgtttattagagcagcctggcccttatatgatctcagcgtatcaataggaacattgtgttgggagggaagagccataaaatgcctcgggagatgctgagtctttccctgtgtttgcaatgctgctgagtcataatccggctgctaagcatcacccagcaga

SEQ ID NO: 59094 - DNA, 1366 bp, Homo sapiens
tgcatgaaatactgcagccttctctccttattttattatttttttttgagacagggtcttgctctgtcaccaaggctgcaccgcagtggtacaatcatagctcactgcagcctcaacctcctgggctcaggtgatccttccacctcagcctcccgagtagctgggactacaggtgtgcaccaccacacctggctaatttttactttttgttgagatgagtctcactgtgttgcctggctggccttctctcattgagagcatgctgagccactccttctacagccatctccagctttgtttattttattagatactaaagttgtaataatgtttatcagactggctgtactcatgaaagggccaattattactgcttttcaaccagtttcttcacagggcaaatagaatgatagagagtttagcaaaagagtgttttaaaaggtagaaaacgttttttggctacggaaaaaggagaatgttgataaatttcatttgtggaaataaccagccaatatcactaattatcaagtatttttctttatatattatggtaatattttatttatttttgagacagagctttgctcttgtcacccaggctggaatgcaatggcacgatctcggctcactgcaacctctgcctcactgattcaagcaattctccttccgcagcctcccaagtagctgggattacaggcgcccgccaccatgcccagctaatttttgtacttttagtggagacggggtttcaccatgttggtcaggctggtctcgaactcctgacctcaagtgatccacccacctcggcctcccaaagtactgggattacaggcatgagccaccgctcccagccatgctaatattttagtatggccatgtccttacttgacccgtctgacttgttatcttagcttcttggtctctgtaaggtgttaggtgaataatttttttcttttttgatacagggtctcactctgttgcccaggctggagtgcaatggtgtgatcttagctcactgcagcctcaacctcccaggctcaagcaatcctcccacctcagcctcttgagtagctgggaccacaggcacgtgccatcacaaccccstaatttttttttttttttttgtagagatagggtttcatcatgttgctctggctggtctcaaactcctgggctcaagtgatcctcctgcctcagcctcccaaagtgttgggagtacaggcgtgaacggctatgccagctagatgaataatttagatgacatttcaaacttattttctaaactcactatttaagccaacaacaggaataggtaatttctttattaaaacaatcaagggttaaaaagtataaaaacatacatgca

SEQ ID NO: 59095 - DNA, 1025 bp, Homo sapiens
tgaagaacatatataaacatatataaatatatcatcaaggaagatttaggatatatgaatatgtggcaaggttggaaagaacataattctttcccagaaggggaagggggagctrtacttaatcggatccagctacaacatcactggaagtcatttcttaccaaaaagtatctccacggcaaattctggtggataaattttccaagctttttgtttatgtggattatccaattcatttcttggtagataaagcctaagaatagaaaaaaaattattacattttatattggggctcaccgaaaagccacgcagttgggtacccacgttagagctggaagaaacaaaaaaaagaaactcaccatgaatagaaccccagctccttttttgtgtctcggttggctccttccacctttttggtgagacttaaaaatactttaatcttcagcaacacatcagtaacacatgctgactctcttagcattgctttatatggcattaatgacttccaagtttaataaaatatctaaatttctctctgtgacagaaatcagtcaggatagacatgaatgaaaacccaggaataaaatactatatctctttcaatttatgtgtgaagttgcaattttttgaatttttacaatcagaccttggaaatgaccttgagcagtaggacataactcccacatgctgagcgttccaataatggaacactaggcataaattggttaacccatttatgcctagtgttctaaatgatacaagttagcatttttggctaaacaacaatcttataactaacaaaaacagctttaccaagttgtatgtaaatgtaaatgttacagaaatctttagaaatttatataaaagtaagaataaaagtgatctagcttatcacttctccaaaatgaacatagtgttttaaaggaaaaagactgtatcctttagcaagaaccactttcgaggagcagcatcaagtgaagttacatccaggtctcactttttgagggactttgctcatgttagaa

SEQ ID NO: 59096 - DNA, 708 bp, Homo sapiens
cttgagcccaggagttcaaggttacagtgagctatgctcagcctactgcactccagcctgggtaaccaagtgagacctggtctcagtaaaacaaacaaaaagatatggtcttgctcacaaatagtaaaacttaawgttgaaccttgtgacttattctatttatattattatctctttacctcttgtgttattttgaagagtctagaaagtaccttttactttcaaaattctacaacttctacaaaataaaaattcccaaattaagtttttgtcttgttttttttttttccaggcacttgaacacatgcagaagcaaacgatagaggaaagagaaagagttatagaagttgtggagaaacagtttgaccaacttttggctttttttgattccaggttagtaacttaaaaatatggactcaatgaaactgaagtttctaacactaacttgtcattgtattcctttgtttagaatggtaatgggtaacttttaaacaagtttgtaatgggtaactttcaaacaagtttggaagttggtagtccctacagactgatctttagaactgcaaaatgaaaaataatgtgtaagcttttaaaaattttgcctatttaccttctggtgctgaagctaatggtggtttgtttgagacagggtcttgctctgttgcccaggctggggtgcaatggtgtgataatagctcactgcagcct

SEQ ID NO: 59097 - DNA, 658 bp, Homo sapiens
acagcagcttcagaggggtcctggggcagacattgccacactgctgcagagcaaagctgttttgacacctgtgcagaagtggccactgtaatggtcagaagagtagggagtgacactgggaggatttgaaatggggcacaggagatatcccttgtacctcgcatatctgtcatggaccctctaaacctaatctgagtctttttcaaggctgcagcctttaccaggacttagtgtaagagtatgagtgacacaagttctgattcccctgcctcagctgatctcaagaccatacttggtatacaccacttatttctaccacccattctccatttccctcatcctcggtcagcatttagttagtgtaagttgcttgttttgtgcagtgacagagacccttatccccaagaggtctgatcccttacatacccttcccatgccatggttgttgaattgtgggtctgccatagttatgaggcaagagaacactgaaagtcactcctgtagatatcccgaggttcagacatagacctctctgccctcactggctagctagcagcaatccaacycctcaagtcaatggagtctagcacagtgtgaggaccacttcggtgctggccttggggagaaggtaagagagacagatggaccaaaagttatg

SEQ ID NO: 59098 - DNA, 603 bp, Homo sapiens
aggaacgtgaagatcacctactccatattcaaggcccaagatacacgagaagtggaagaaaaagcagctaccacttgatagagcctacagagaaagcagggtcatcagagtagagcttctatgatagacttttatattgaccctaaaacactgaaattcataaggtaactttctggatactttcagcttcctacatgaagtttttgatctgttacgtttttcatgaattgtatgtcatgaaacttgagtctgtttttcagtggattacttgatcaaattagtgttcttaytctcctacttaatctatttcacattcctaatgtataaggctgtataattggtcagttctggtttatttttgttttgtgagagaataaaggatgtgaatacttgccaggttagatttctaatttacaggaatcttgtcaccctaataggttgatatgtctcaccaaaaattataaaagagttgttgattaattgtagtataataatgactgctagtatccatgggagaacagaaagaatttgttctttttctaacttttatttgtcctttctgagtcttctaacaagcagatagcctcttttcttcattattca

SEQ ID NO: 59099 - DNA, 1251 bp, Homo sapiens
tgccatatagttccattgctgtatcctcaattctaattccccttggctctttgagttagtgattttaattttatttgaccccaaattaaatcatacatttccccatactgaatttgtacttagaattttctaatttaagttttgatcaagaccatcctggctaacacggtgaaaccctgtctctactaaaaatacaaaaaattagctgggtgtggtgacatgcccctgtagtcccagctactctggaggctgaggcaggagaatcgcttgaacctgggaggtggaggttgcagtgagccgagattgcaccactgcactccagactgggagacagaaygagattccatctcaaaaaaaaagaaaaacaaatagtatgtggcatctaataaacttgcagtatgtgttataagactgctttaagaattacttgagatatgtaatgtgccttgctcttgtgttagttttataactgaacaaacctccaattggttttgcagaagtgcctataatgctttgaatacttcagaaataattgatgctgattataaagcaatttgattgattgctacacagaaactattaagtgctatttgtagtctattattttggagcatggggtgatgaaaagttggttttagtagaagtttggggaataataaaactcactcattcttcaagcagggttttaactattagtacaaaagcaatactatctttttactaatcgccaaattgattagttagcaaatcacctcatcttccaatgaggtgaccctgtgtacccacactcaggctaagatgctggcaaaggctaagaaacagcagagtcctagctagctttgcttacttcctggaactgttaacactttttgaggcaagcattagacaaaaagggtccttttgagacaatataccccataataaaaatgccttacatttttgagcactatattttaagcactgttttttatacatattcattcatttaattttctcaacaactttaccaaggtgacactacaatgatgcctatttcaaagataaggcaactgagagctgagaggttaataacttaaatcatcctcaattcttctctttttttcttcctgtactttatatctaacctgtcaggaagatcatactgactctgtcttcaaagtatgtctagaatatgaccaccaccagaatctgccttcatctcctagtttctagctttgtccccttatgctgcatgctgcgcagcagtcactg

SEQ ID NO: 59100 - DNA, 927 bp, Homo sapiens
ccctggttatcattctctttctctctctctcttctacacacacacacacacacacacacacacccccctcactcccactgcccttggggactcagctgtgtccccagcaccactcacaggagacattgagctggacagttctctccgtggtcacctgagctccttggcgtttcacctgacaggtgaggttggtgccatggtcctcgggcctgggggtgagggtgagctccgaggagcgggtggtctcggggtccagggggctgagggcattccccgtccaggagaatgtgagaggtggtcccgcttcacaggatcctggaaggctgcagctcagccttgtggggcggccggactccagaggctccagaaagtggatgtcgggtttctctatcagggctgaggaggagacagggagatacctgggccccaggggcttgaggacgtaaggtgtgaccccgagagtggccaggcctcaggccccgacctgccccaagtcctacacctcctccagccgcccctgcccaactcctgtccctgttctcatacgggggtctccacgtcccagggtcctctcctagggtycctgccatacctgtcacctccaagttcagcttattctgttggtagctatattttacatcccttcctctctccacgcggaagaaatagcttcccgtgtcctccattctggcatctccgatgctcagggagcagttcttcttctggacatccccaaggaggcggaatcggccctgggtctctggcttcactcttctgtctgggttgtttgtggccacaacctcagcgtagtatgggatctccccgtcccggaaccagtagacgtagagtgggggagaggaataccaggatctccaggggtaagagaaggagcagggcacaaggacgcacaggccctcctgcaccgtc

SEQ ID NO: 59101 - DNA, 927 bp, Homo sapiens
ccctggttatcattctctttctctctctctcttctacacacacacacacacacacacacacacccccctcactcccactgcccttggggactcagctgtgtccccagcaccactcacaggagacattgagctggacagttctctccgtggtcacctgagctccttggcgtttcacctgacaggtgaggttggtgccatggtcctcgggcctgggggtgagggtgagctccgaggagcgggtggtctcggggtccagggggctgagggcattccccgtccaggagaatgtgagaggtggtcccgcttcacaggatcctggaaggctgcagctcagccttgtggggcggccggactccagaggctccagaaagtggatgtcgggtttctctatcagggctgaggaggagacagggagatacctgggccccaggggcttgaggacgtaaggtgtgaccccgagagtggccaggcctcaggccccgacctgccccaagtcctacacctcctccagccgcccctgcccaactcctgtccctgttctcatacgggggtctccacgtcccagggtcctctcctagggttcctgccatacctgtcacctccaagttcagcttattctgttggtagctatattttacatcccttcctctctccacgcggaagaaatagcttcccgtgtcctccattctggcatctccgatgctcagggagcagttcttcttctggacatccccaaggaggcggaatcggccctgggtctctggcttcactcttctgtctgggttgtttgtggccacarcctcagcgtagtatgggatctccccgtcccggaaccagtagacgtagagtgggggagaggaataccaggatctccaggggtaagagaaggagcagggcacaaggacgcacaggccctcctgcaccgtc

SEQ ID NO: 59102 - DNA, 576 bp, Homo sapiens
tatccccgttgtacagatgaggcaactgagtcacacagaggttcagcaatttgcccaaggtygtccctggaaagcagaggaacctggatttgaaccctaggaactgaatctctaaacctctagccctcgggagagccctgggggacagatagtgctctgccaccatacaggtggccaaactgaggactgattggccagaaggagtggcttgcacaagatcagcagcccatggtagaggactcttctctctgactttccagaggcatagcctggttctccttttccactgcccaactccccagcagagccaggtgccccagtaaatgttgctggaagagcccagaatcagaggaaaaagtactttctgtgtgccagacactactgtacaacaaccttaatatatatatataaatttttttttaaattgagacagggagccagaaactgtggctcacgcctgtaatcccagcactttgggaggcggaggcgggtggatcacctgaggtcaggagttcgagattagcctggctaacatggcgaaagcaaaatacaaaaattagccaggcttggtggcgc

SEQ ID NO: 59103 - DNA, 612 bp, Homo sapiens
gatgaccaaggctggaagcagcccagacaagtgctgaaagacagggagcagtgaagctgaacactcccacagcaggccggggctgktgttggagggacaggtagggacaccgcacccctcgctaacacccatggctcctagaaacccccattcctctggtggctgctctccagttcctgccctgggtccacagtggccttcccagcatttcagccatcatcaggaaacctcagggtacagcttacagaatacctggacagaaggagcacagggtgggagaggtaaggcaaaaatggagcaaaggcagaggagagaacattcattcattgtggggacatctcctgagccctggtggacagggctgggctgggcgatgccgggcacacagagatgactcagccctgggccctgcccttggggagatgccaatctggtggagaagacagctgtgtaaacagagggccacaaaacagtacaaggatgcaccaacccagcccaagagtcagggagggcttcctggaggaggtgatgctggctgatgaggcgttagccgtggtcagggtggtggtggacggtggggcaagaaaggggcatccaaggcaagaaatggtg

SEQ ID NO: 59104 - DNA, 612 bp, Homo sapiens
gatgaccaaggctggaagcagcccagacaagtgctgaaagacagggagcagtgaagctgaacactcccacagcaggccggggctgttgttggagggacaggtagggacaccgcacccctcgctaacacccatggctcctagaaacccccattcctstggtggctgctctccagttcctgccctgggtccacagtggccttcccagcatttcagccatcatcaggaaacctcagggtacagcttacagaatacctggacagaaggagcacagggtgggagaggtaaggcaaaaatggagcaaaggcagaggagagaacattcattcattgtggggacatctcctgagccctggtggacagggctgggctgggcgatgccgggcacacagagatgactcagccctgggccctgcccttggggagatgccaatctggtggagaagacagctgtgtaaacagagggccacaaaacagtacaaggatgcaccaacccagcccaagagtcagggagggcttcctggaggaggtgatgctggctgatgaggcgttagccgtggtcagggtggtggtggacggtggggcaagaaaggggcatccaaggcaagaaatggtg

SEQ ID NO: 59105 - DNA, 789 bp, Homo sapiens
aacagttttaatcctcataactttgcgaggtactgctgccattatcccccctttacagacaagaagactgaggcacagaatgaaataagtggctcaagtttacatagtcagcaagcagccagcctgggattgaaggcaggcagtttgcttgagggttggggctgtcaatgccatctccttgaggaaacctttcctattgcttttttgtcttgatgcgattggacctggctgttctcctggcgcctcacgctgtcttctcatggtgctgtgttcaccatcacctgggaattctktttttctctgtcaagtgtccagttccttgtgtcttgaatcctttcttgaatcctttggctttctcttccacggtttaccgttactctcatttcgtgaaagtgcatcccctaggagttcttggggacggtacacggcagtaaatcctgtgagaacttatctgaacatgtctgttcagataacggagactaaacttaagaataggagaatcacttgacccaggaggttgaggctgcagtgagctgtgatggcaccactgcactccatcctgggtgacagagtgacatcctgtctcaaaaaacaaaaacgaaaacaaaagacctgagaggtttacatatatgagcatgacatgaaagtgaaatgatatgaaaatgaatgatatgaaaatgtcacgccaaaaagcaaagatcatatatttgcatatttaatagaaagatgtcacggaaaatgacttgatttaccctcacactaagttgatctttgcctgggttcataggt

SEQ ID NO: 59106 - DNA, 789 bp, Homo sapiens
aacagttttaatcctcataactttgcgaggtactgctgccattatcccccctttacagacaagaagactgaggcacagaatgaaataagtggctcaagtttacatagtcagcaagcagccagcctgggattgaaggcaggcagtttgcttgagggttggggctgtcaatgccatctccttgaggaaacctttcctattgcttttttgtcttgatgcgattggacctggctgttctcctggcgcctcacgctgtcttctcatggtgctgtgttcaccatcacctgggaattctttttttctctgtcaagtgtccagttccttgtgtcttgaatcctttcttgaatcctttggctttctcttccacggtttaccgttactctcatttcrtgaaagtgcatcccctaggagttcttggggacggtacacggcagtaaatcctgtgagaacttatctgaacatgtctgttcagataacggagactaaacttaagaataggagaatcacttgacccaggaggttgaggctgcagtgagctgtgatggcaccactgcactccatcctgggtgacagagtgacatcctgtctcaaaaaacaaaaacgaaaacaaaagacctgagaggtttacatatatgagcatgacatgaaagtgaaatgatatgaaaatgaatgatatgaaaatgtcacgccaaaaagcaaagatcatatatttgcatatttaatagaaagatgtcacggaaaatgacttgatttaccctcacactaagttgatctttgcctgggttcataggt

SEQ ID NO: 59107 - DNA, 789 bp, Homo sapiens
aacagttttaatcctcataactttgcgaggtactgctgccattatcccccctttacagacaagaagactgaggcacagaatgaaataagtggctcaagtttacatagtcagcaagcagccagcctgggattgaaggcaggcagtttgcttgagggttggggctgtcaatgccatctccttgaggaaacctttcctattgcttttttgtcttgatgcgattggacctggctgttctcctggcgcctcacgctgtcttctcatggtgctgtgttcaccatcacctgggaattctttttttctctgtcaagtgtccagttccttgtgtcttgaatcctttcttgaatcctttggctttctcttccacggtttaccgttactctcatttcgtgaaagtgcatcccctaggagttcttggggacggtacacggcagtaaatcctgtgagaacttatctgaacatgtctgttcagataacggagactaaacttaagaataggagaatcacttgacccaggaggttgaggctgcagtgagctgtgatggcaccactgcactccatcctgggtgacagagtgacatcctgtctcaaaaaacaaaaacgaaaacaaaagacctgagaggtttacatatatgagcrtgacatgaaagtgaaatgatatgaaaatgaatgatatgaaaatgtcacgccaaaaagcaaagatcatatatttgcatatttaatagaaagatgtcacggaaaatgacttgatttaccctcacactaagttgatctttgcctgggttcataggt

SEQ ID NO: 59108 - DNA, 656 bp, Homo sapiens
tttggtggatagggtcctccatgattggtctttggtcacctctggcctcatagctttcttacacaccatgtattctaatgattttcatatgcttacccattgtttactcttgccctgcgatgcctgtcccctctttgctaccttaagcgcctgctccccatatccagttgaaatccttttcctctaaatttgctccctactcagttacacactaatcaaggcacacgccacacagtagttgctgatttacttactggtctcttcaattagactgtgaacttattaggggcagaggcaatgcttagttgatttcttcctctataactagtgttcagatacaargaaggcactaaatagatgcttatttaatgagcaataaatctgaaatataattttcaaaggtagaagaatagattaattgttttaactaatggcaaagagaggagtcctggatttagaatcagatatttgagatcccatcccaacctactgttaaccagtgatctgtcactgggtagatcacttaacttattttagcctctgtcttagtctgtttgtgctgctataacagaatacctgagacttggtaatgtgtaaagaacagaaatttattttcacacacttgtaaaggctgtgaagtctaagatcaaggggct

SEQ ID NO: 59109 - DNA, 590 bp, Homo sapiens
ggaataataaagctgatttgggaaaggtagagagaactggaagtatctctagacagaatgtaaaagatatagaccagaaagaaatgggaagtggcaaaactggggactgcctttacctatttcattcacttcatgcttattctgactctagttaccagggaaggagggaagagagcaaacatagaatacctttgcagtgtttctyggcttgcattatgccaagcattgggctgggtgctttataaacatccttgatgtaattctcttaacttagatagatgctattatgcctactttataggttaggaaaaagtaattcatttgtccaaagtcacacagctagtaaatcttggggtctggactgaaagcaattcttttccaaaaccattttctttttaaaatgtatacctaactgagttgtgggtatcacttctgtttcaggagcaaggcatgagaagctctatctttgcaaataatttgctttggataaagctatttcttttgcagaagcatcacatgtcatctgaacatttaaaaaatattttttgtgtctcttagaaattctcgtgacatttccatcatatagcctt

SEQ ID NO: 59110 - DNA, 531 bp, Homo sapiens
attcttggctcacagatgcatggctccagtcatatggctgtcttttccccatgtgttgtcacatcagattccttctgtgtgtgtctgtctctgtatccagattcccccgtttataaggacaccagtcatgttggattagagcccagtctaattacatcattttaacttgactatttctgtaaaggcactattttcaaataaggtcacattctgaggtaccggggttaggacttcaatatattaatacctttctgtggggacacagttcaacccatagcaaagtactttgcccaggcttgggtacagagtgaacrctcagtaaatatttttcttaccaaagagcctcgtctatcaaagcagagctcagtcctgaggaacaagactgacagctttggctcagcaaggctcacattactcaattatacattcagctctggaggaaggtggcctctgtgttctcagagaacatcatcaatattgtgacactccaacatgtgtcagccactgggtttcccagggctccttctctgg

SEQ ID NO: 59111 - DNA, 1879 bp, Homo sapiens
aaagcaggagggttgaaagaacaccagccccattctctaaggctcatcacacactgtaccacacttctggtcccgaaattggaaccttttctcatcactagaatgtatccttggccctatatgggtacccatattgagtatgcattaacacacttttggttgaaaataacagagaacctaatttaaactgactaaaaaataaaaggaattcattggctgatgggcataaaacctcagaagtagttcagttcaggtaaagctagatccagcagcagctcaatgacatcaccaaggatctgatttctttctctctgttagctctgtattcttcagggttgccctcatcttaaggctatttccttagtattcccaagatagtttcaagtgcattctaaggctatatgtttccaattttctatcccggcggaaagaatagctctttatactagaattcctagcataatttgaacagattcactcttactagaccagcttaggtcccacctttggttggttcaagagaaccatggtggggttaattccaaataaaccacatgttgtaaaacggggaagagatagttccaaggaaatgtgggatcctattacattaaagaaagggggaagattcctggccaacagtcaaaagatgtccattatcagaattttgaaggaattatgctcaaattgtacctggaagtgagccaaaatttgtctggattctcagagatattcagctctctctttttacctaacctctcttttggaattgggaggtgattcattgaaattattcagcttgagtctgggtaaggagtatattggagttctttgtactattcttgcaaattttctgtaagcctgaaactatttccaattaaaataacttgttaaagtaatatggtagtgcataatcaccattttccccccttaaccataggtaagatacatgtaatattgatatttgcctcacctttgcttcaggagtgatggaagaatttcaggggagaattcacccaacttgactgggataccgggagcacggatctggaaagaaacttttgagctttaggtggctgagtgtgcataaagtaacacacataccaaagtcttccaaacaaagattaagggatggaacctctcaaataaactcctccaaattgggaacaaatgttgcggtatcaggatcacatctcctgtcccagttaccccattgctcaacatgggatgtgggttgtcagggtgaagttcttttagcaattatctttgtttgcttcattatgtaaggaggagaaataacttacctgtttaggtaactggcctttaaattaagggcaatagtactcaaagaactgtacccaatgcactgcaccagaggagcctcatccacagctaaacctgatttagatgacaagactctagaccttgagcctgctcctaacgacataatagatgggacttgggggaagcattagtagaagtgagtatattttgcatatgggaaaaacataaataacatggccagatggtgaactgtagttattttaaaacatggtcccccattcttttacatccttctcatagagaagtagaatccatttcccttgaatcagtgatgctgacaaatagagtagggaaaaagacactatttgattttttttktgtgttacttcatatacttattcattcgtgacaagaacacttaaaaatctactctcttagcaattatccagtatacaattcattattcctaactatagtcactatgttgtacagtagatctctcgagctcacccttttgttcattatttgacctttggggctggataagaaagagccatgtgactcagcctggtttccttgaaatgctcattcttgggat

SEQ ID NO: 59112 - DNA, 1879 bp, Homo sapiens
aaagcaggagggttgaaagaacaccagccccattctctaaggctcatcacacactgtaccacacttctggtcccgaaattggaaccttttctcatcactagaatgtatccttggccctatatgggtacccatattgagtatgcattaacacacttttggttgaaaataacagagaacctaatttaaactgactaaaaaataaaaggaattcattggctgatgggcataaaacctcagaagtagttcagttcaggtaaagctagatccagcagcagctcaatgacatcaccaaggatctgatttctttctctctgttagctctgtattcttcagggttgccctcatcttaaggctatttccttagtattcccaagatagtttcaagtgcattctaaggctatatgtttccaattttctatcccggcggaaagaatagctctttatactagaattcctagcataatttgaacagattcactcttactagaccagcttaggtcccacctttggttggttcaagagaaccatggtggggttaattccaaataaaccacatgttgtaaaacggggaagagatagttccaaggaaatgtgggatcctattacattaaagaaagggggaagattcctggccaacagtcaaaagatgtccattatcagaattttgaaggaattatgctcaaattgtacctggaagtgagccaaaatttgtctggattctcagagatattcagctctctctttttacctaacctctcttttggaattgggaggtgattcattgaaattattcagcttgagtctgggtaaggagtatattggagttctttgtactattcttgcaaattttctgtaagcctgaaactatttccaattaaaataacttgttaaagtaatatggtagtgcataatcaccattttccccccttaaccataggtaagatacatgtaatattgatatttgcctcacctttgcttcaggagtgatggaagaatttcaggggagaattcacccaacttgactgggataccgggagcacggatctggaaagaaacttttgagctttaggtggctgagtgtgcataaagtaacacacataccaaagtcttccaaacaaagattaagggatggaacctctcaaataaactcctccaaattgggaacaaatgttgcggtatcaggatcacatctcctgtcccagttaccccattgctcaacatgggatgtgggttgtcagggtgaagttcttttagcaattatctttgtttgcttcattatgtaaggaggagaaataacttacctgtttaggtaactggcctttaaattaagggcaatagtactcaaagaactgtacccaatgcactgcaccagaggagcctcatccacagctaaacctgatttagatgacaagactctagaccttgagcctgctcctaacgacataatagatgggacttgggggaagcattagtagaagtgagtatattttgcatatgggaaaaacataaataacatggccagatggtgaactgtagttattttaaaacatggtcccccattcttttacatccttctcatagagaagtagaatccatttcccttgaatcagtgatgctgacaaatagagtagggaaaaagacactatttgattttttttgtgtgttacttcatatacttattcattcrtgacaagaacacttaaaaatctactctcttagcaattatccagtatacaattcattattcctaactatagtcactatgttgtacagtagatctctcgagctcacccttttgttcattatttgacctttggggctggataagaaagagccatgtgactcagcctggtttccttgaaatgctcattcttgggat

SEQ ID NO: 59113 - DNA, 478 bp, Homo sapiens
aaatcccagctgtgctacgaacaagatgagatgtgacatcggagcctcagtttccctacttagatagtaagatgaccaacttagcatgcccgtaaggattccatgagatgaaacacgcaaggcgtttataccagcaccagacaggaaaccgcaagaaatgtttgttatttttcgttgtcacaattagtaagcatatcaaatagcccaggaagcctgcccccagcccctgcgggaattcagcagtcggaagtgtgtggggatgcgggtgagctggggtagggaggatgaaaaggaggagcgggcttcagtgaatgcaaggacacttyctagggagtgagggctgctgatcgagaactgagctcatcagcaccgagcctgccaccgccttgccaggttccgcagctgacggcaccgccccagctgccccctcgcccccatttatgggctgtccggcagctggacagcgaaggcatgggtc

SEQ ID NO: 59114 - DNA, 518 bp, Homo sapiens
atctagtcttttattattttcccaggatgaagttggggaagggggttgtaggtctcctttatcagtgtggttataaaggggcacaaaagcttggaatctttcatttaagagtgatagtctaatcccagcactttgggaggccaaggagggcagatcaggagatcaggagatggagaccatcctagccaacatggtgaaaccccatctctactaaaaatacaaaaattagctgggcatggtggcacatgcccrtagtcccagctactcagaggctgaggcaggaggatggcttgaacccgggaggcagaggttgcagtgagcatagatcgtgccactgcactccagcctggcgacagatcaagactccatctcaaaaaaaaaaaaaaaaaaaaaagagtaatagtcacagtctgctaattccattatttccaatagatagaaaaaaaatcagtaaatgggcaagttgaggagtctctgggcccatgtaaagtatgttcctaaggtctcctacatgaaaa

SEQ ID NO: 59115 - DNA, 674 bp, Homo sapiens
ctgtggtgccaggmagaaatggcctgctagaggacccagtgagctccctgggcctttctgctgcttcctctacctttgaattttgctcggctctccaaattgactcagctccaggtaaagttggaaacttctcccacaaatagaccttcagcttctccagtggtgatgtgtgttcgggagaggagggtttccctttcccacatcagcagttggggtactcacaattttggcgggatctcctgtgtcctgccggagcagtccacttccttcagaatttttgtgggtcctcttgggattgctggttagttcttgcagtcaatctggagctaaaattcacaatgctagcccccgcatgctgctctgtctggagctgcaatctaatcttgcctcccatccaccatgatcgccatttccccaaggcactatattctgaaaaatatatattgttttaatttcttattaagtagaaaataaaccgaaagggatagtgatgttcataattttcaatgttcctcaatatgcatttccttaaatagttcttccctgagatagtttttggaaacactgctttcttatcaaatttaggagacattgaatcctgtatctccactttgataattataagataaattaacaaattaatggtattgctaacaaactgtttgcatttcaat

SEQ ID NO: 59116 - DNA, 670 bp, Homo sapiens
agccttggattagtgtctgaacattggaagtggtcacctcttccagtccttagatattagttttcattgggaaagactttcatcaatagctttcagagattctgggttgatgtgyttctggagtactcatgtgactgtgtacttcctagctccttggtagtttggcctgaagtctgggtccatggtgtccaaaatggcaccagcaaccactggagtggacttagagactagttctatagtggttggcctggagcttggaaccacaggggctggtctgttgttaggttctacaagggcattcctggagcctgaatgtgggctggggtgaagcatgaatcttcaggggtgatcttgggctcgggtgggtccaaaaggataacataattcttattttagtagcacttattcatgtattttgaaaaaaaacttatcaaaaattgatttaatccaaactctattttaccatgttgcatgacaaatgaaaactaagcatttattttctttaatgagaattagatatgtcaattaacactccagtgaattctcaacctttagtatagacaattttattgatttgatctagggtcagcaaactatgctttattggccaatttgctaacatcttctgatcttttcagcaataatatataacatatataagtcaggatcc

SEQ ID NO: 59117 - DNA, 670 bp, Homo sapiens
agccttggattagtgtctgaacattggaagtggtcacctcttccagtccttagatattagttttcattgggaaagactttcatcaatagctttcagagattctgggttgatgtgcttctggagtactcatgtgactgtgtacttcctagctccttggtagtttggcctgaagtctgggtccatggtgtccaaaatggcaccagcaaccactggagtggacttagagactagttctatagtggttggcctggagcttggaaccacaggggctggtctgttgttaggttctacaagggcattcctggagcctgaatgtgggctggggtgaagcatgaatcttcaggggtgatcttgggctcgggtgggtccaaaaggataacataattcttattttagtagcacttattcatgtattttraaaaaaaacttatcaaaaattgatttaatccaaactctattttaccatgttgcatgacaaatgaaaactaagcatttattttctttaatgagaattagatatgtcaattaacactccagtgaattctcaacctttagtatagacaattttattgatttgatctagggtcagcaaactatgctttattggccaatttgctaacatcttctgatcttttcagcaataatatataacatatataagtcaggatcc

SEQ ID NO: 59118 - DNA, 712 bp, Homo sapiens
tacaaatgtatatacattatatacaattaatactattgaaaaataatgaaggaagaaattgcaaaaataattgtgatttgtagatcatgaaaggattcatcaaacattttttaaatatataatttattctgagggaaaatggaaattaatatcaacttcctataagctttttcttaaagttttcagctccttcagaaccaccccccttcctttctatccatccatattaataagcctcttagacttgatgtcatccatactttatatgcttatcacccacacttctatgaaaactttgtaagccacaccatttaattaactttcataaccttagtgcctagcaaagagcctggaatgtaataacatctcataatgatgttgatgactagaatttaatctaytgtaaaacatttggaggtaaattatatcatatatgctatatatgttctagtaactgtgtaactttttttctcaagcaagaaaaaataattataaagatattaaatattttggctaaaataaaaagtataaaatcaaactcatataatgctgcaaagtgtatggatttaatagattattatttttctcagcaactatgaataaaagcaaagtaagaaaacacaaaagaatgttattgctttctgctgtatttgtgcaatattatgtttttcctatacgattgaataatttgtgacaatgaaaatctattgta

SEQ ID NO: 59119 - DNA, 712 bp, Homo sapiens
tacaaatgtatatacattatatacaattaatactattgaaaaataatgaaggaagaaattgcaaaaataattgtgatttgtagatcatgaaaggattcatcaaacattttttaaatatataatttattctgagggaaaatggaaattaatatcaacttcctataagctttttcttaaagttttcagctccttcagaaccaccccccttcctttctatccatccatattaataagcctcttagacttgatgtcatccatactttatatgcttatcacccacacttctatgaaaactttgtaagccacaccatttaattaactttcataaccttagtgcctagcaaagagcctggaatgtaataacatctcataatgatgttgatgactagaatttaatctattgtaaaacrtttggaggtaaattatatcatatatgctatatatgttctagtaactgtgtaactttttttctcaagcaagaaaaaataattataaagatattaaatattttggctaaaataaaaagtataaaatcaaactcatataatgctgcaaagtgtatggatttaatagattattatttttctcagcaactatgaataaaagcaaagtaagaaaacacaaaagaatgttattgctttctgctgtatttgtgcaatattatgtttttcctatacgattgaataatttgtgacaatgaaaatctattgta

SEQ ID NO: 59120 - DNA, 1283 bp, Homo sapiens
taacacggtgaaaccctgtctctactaaaaatacaaaaaaattagccaggcatggtggcacacgcctgtaatctcagctacttgggaggctgaggcaggagaatcgcttgaacccgggaggcagaggttgcggtgagccgagattgtgccattgcactccagcctgggcaacaagagtgaaactccatctcaaaaaaaaaaaagaaaacatggccaggcgcggtggctcacgcctgtaatcccagcactttgggaggtcgaggcaggcagatcatgaggtcaggagatcgagaccatcctggctaacacagtgaaaccccgtctctactaaaaatacaaaaaattagccggccgtggtggcgggtgcccgtagtcccagctactcaggaggctgaggcaggagaatagacagggtgacagagtgagcgtctgtctcaaaaaaaaaaaaaaaaaaaaawaaaaaaaaaaaaaaaaaaaaagaaaaagaaaacatgaaagatcaagggaaattaaacatttgagaaacatattaaaattattaaatatttacgttacaggtaattttcttatacattgtaccatttaatcctaagtgcgtgtcagtgaggctgttgttgttattcccatttcacagatgcaataactgaggctcagagcaactggctaataacatgtagctagcaagaagcatccctaggacttggatcctggtcttctatgcctttttatctacatttagggctttagaataaagatccactttcatcaatgaggtctctatctctcaagcctgaatctctaataacccacctagatatggcggttggtggaggcaatatctttttagtttttccgggatgggtgctaaaattcagaggaagcacctcaagttctctcagagctctctggcaaaatctgtcattatgagcttagttaaattaatattcttgtgtgatgggctaccgggagcagggctttgtgaggttcatggactttcaccactttctttcctgagcctgtgtggaaaaatacatgtgagtgcttgcagcaatggcatctttgagcaattaaaactttcaaaagtctatttttttttcttttccctccatagcttcttacaaaaaacaatggcaaatgaggagagttttaaagtgagatggaggccgggctcggtggctcacgcctgtaatcccaacactttgggaggccaaggtcaggagtttgagaccagcatggccaacttggtgaaatcccctctctactaaaaatacaagcattgggcc

SEQ ID NO: 59121 - DNA, 1283 bp, Homo sapiens
taacacggtgaaaccctgtctctactaaaaatacaaaaaaattagccaggcatggtggcacacgcctgtaatctcagctacttgggaggctgaggcaggagaatcgcttgaacccgggaggcagaggttgcggtgagccgagattgtgccattgcactccagcctgggcaacaagagtgaaactccatctcaaaaaaaaaaaagaaaacatggccaggcgcggtggctcacgcctgtaatcccagcactttgggaggtcgaggcaggcagatcatgaggtcaggagatcgagaccatcctggctaacacagtgaaaccccgtctctactaaaaatacaaaaaattagccggccgtggtggcgggtgcccgtagtcccagctactcaggaggctgaggcaggagaatagacagggtgacagagtgagcgtctgtctcaaaaaaaaaaaaaaaaaaaaaamaaaaaaaaaaaaaaaaaaaagaaaaagaaaacatgaaagatcaagggaaattaaacatttgagaaacatattaaaattattaaatatttacgttacaggtaattttcttatacattgtaccatttaatcctaagtgcgtgtcagtgaggctgttgttgttattcccatttcacagatgcaataactgaggctcagagcaactggctaataacatgtagctagcaagaagcatccctaggacttggatcctggtcttctatgcctttttatctacatttagggctttagaataaagatccactttcatcaatgaggtctctatctctcaagcctgaatctctaataacccacctagatatggcggttggtggaggcaatatctttttagtttttccgggatgggtgctaaaattcagaggaagcacctcaagttctctcagagctctctggcaaaatctgtcattatgagcttagttaaattaatattcttgtgtgatgggctaccgggagcagggctttgtgaggttcatggactttcaccactttctttcctgagcctgtgtggaaaaatacatgtgagtgcttgcagcaatggcatctttgagcaattaaaactttcaaaagtctatttttttttcttttccctccatagcttcttacaaaaaacaatggcaaatgaggagagttttaaagtgagatggaggccgggctcggtggctcacgcctgtaatcccaacactttgggaggccaaggtcaggagtttgagaccagcatggccaacttggtgaaatcccctctctactaaaaatacaagcattgggcc

SEQ ID NO: 59122 - DNA, 1102 bp, Homo sapiens
tgttgttgatgctggtggttgcagcatgcacccccctgtagcgcacatacctgattgctgttttttcttctccaatgtgctatgggaattttgcaagtaaagaccatatcttgcccatcactgactccccagctcccagatgaggcacaaaaatagtgctcagatagtttgctgaggactgagtgagtaaagatgacagctttccttttggaagaatggcaccagccaccctttatatctctggaaaaagcaaagaggaagaggaagacgcagtgggaagcttgcagattacacagtaggaagtgattccaagaccttccgaccccctccccgaaacaacagcaccaacgtacactaataaacatctttgctaaggtcatctctctgcatgttttggagtggattgaaaattaggagaagaaaaacctgtaaatcacggaatccagggtctagtccttctttttccatagactctataaatggctttgggtgagctttcgcttcttagttcataaaattcaggaagatgagatgagtgatatctcaggttctcagcatctcagacatttaaaaataaataaaatacagaataaaaattagacacattgtggttctaaggacttcataatcttccttgaaacccatagatgggatcggacaatcatkaaaggttgcaattaatttccacaatgacatgacttaccttgggactgggggcttcatagacccaagacaagtgtggagagtagggcatggatccagggatccttggtgtctggcctcatcctgttacccgagaatgatgagccctttggcaagctattgaaatgccctaggcctcaatgttctcatctgtaaaataaggagatagaacctactttatagggtagttataagagtcaggtatggacgtggtacatggtaagtccccactcctccactatggctattaatggagagaagagtccctgttgattacagtcatcagggggtggaatttgagatggagcttgaaagatgaatactaatcaactggacacagagaggtgaggaacgagatgtatccaagcctagtaaatgacgatgatgtgagggtagtggt

SEQ ID NO: 59123 - DNA, 1171 bp, Homo sapiens
ttttctacttagtatttccctgcgtcctgtccatgtcagtatcatcaggctgtgctcagagtgttgtggaatgagaggtccctagttcaatatggtgggtggactgcaggaggaaccttctgaaagaggtgatggccaggaatgaaatgataagcaggtgctatctgaagaggagacacttcaagcaggaagtttcgatttttttttttaaagagggttgtcatagcagcatcattcatgatagctaaaatgtggaatcaatataagygtccactgacagatgaatggattagcaatatattgtttatcccattgatggaatgaaattcagctttaaaaaggaagggaattctgacatgttacaacatggttgaacctcgaggtcattatgctaagggaaataagtgacacacactgtatgagtccacctacacggggatacttggaatagtcacattcatagaggcagagagtagaatgaaggttgccaggagctggagggagtggggaaagggaagttactgcttaggagatatagagtttcagtgttacaagatgaaaagagttcagagttctggaaattggttgcccaacaacgtgaatgtatttaataccactgaactgcatccttgcaaatggctaggaaggtgcattttatattatgtgtattttaacacaataaaaatttggaaaaaaatatgaaaaagaaggagtgggtgagaatcagtatggtttgtgggaggaatggtaagcaggtggtgttgctgagaataaaatgagaagtagaaagagagagaggtgaggagagaacagagaccaggtttattcagtctggagatgttctttcgggccatgtgctgttctaagaaatggagatattgtggagcttagaatccaaagaggcttgaccccggtgtttaggtgtttgggtcttctcattcaggcaagaaggagtcattgatgtttaggcaggaaagcagcaagatccaatttgcatttaaaactattcctcaggctgctgaatgcaaatgagtttggagggggcggcatggaggagggaggcagagtcactagtaaccaaaaaacatgatatgggcttgaaccgggagtaaggtctccgcgcgcccctgatttcccaaggtgagctggatctgggatgcagggcggttgg

SEQ ID NO: 59124 - DNA, 1171 bp, Homo sapiens
ttttctacttagtatttccctgcgtcctgtccatgtcagtatcatcaggctgtgctcagagtgttgtggaatgagaggtccctagttcaatatggtgggtggactgcaggaggaaccttctgaaagaggtgatggccaggaatgaaatgataagcaggtgctatctgaagaggagacacttcaagcaggaagtttcgatttttttttttaaagagggttgtcatagcagcatcattcatgatagctaaaatgtggaatcaatataagcgtccactgacagatgaatggattagcaatatattgtttatcccatygatggaatgaaattcagctttaaaaaggaagggaattctgacatgttacaacatggttgaacctcgaggtcattatgctaagggaaataagtgacacacactgtatgagtccacctacacggggatacttggaatagtcacattcatagaggcagagagtagaatgaaggttgccaggagctggagggagtggggaaagggaagttactgcttaggagatatagagtttcagtgttacaagatgaaaagagttcagagttctggaaattggttgcccaacaacgtgaatgtatttaataccactgaactgcatccttgcaaatggctaggaaggtgcattttatattatgtgtattttaacacaataaaaatttggaaaaaaatatgaaaaagaaggagtgggtgagaatcagtatggtttgtgggaggaatggtaagcaggtggtgttgctgagaataaaatgagaagtagaaagagagagaggtgaggagagaacagagaccaggtttattcagtctggagatgttctttcgggccatgtgctgttctaagaaatggagatattgtggagcttagaatccaaagaggcttgaccccggtgtttaggtgtttgggtcttctcattcaggcaagaaggagtcattgatgtttaggcaggaaagcagcaagatccaatttgcatttaaaactattcctcaggctgctgaatgcaaatgagtttggagggggcggcatggaggagggaggcagagtcactagtaaccaaaaaacatgatatgggcttgaaccgggagtaaggtctccgcgcgcccctgatttcccaaggtgagctggatctgggatgcagggcggttgg

SEQ ID NO: 59125 - DNA, 1171 bp, Homo sapiens
ttttctacttagtatttccctgcgtcctgtccatgtcagtatcatcaggctgtgctcagagtgttgtggaatgagaggtccctagttcaatatggtgggtggactgcaggaggaaccttctgaaagaggtgatggccaggaatgaaatgataagcaggtgctatctgaagaggagacacttcaagcaggaagtttcgatttttttttttaaagagggttgtcatagcagcatcattcatgatagctaaaatgtggaatcaatataagcgtccactgacagatgaatggattagcaatatattgtttatcccattgatggaatgaaattcagctttaaaaaggaaggraattctgacatgttacaacatggttgaacctcgaggtcattatgctaagggaaataagtgacacacactgtatgagtccacctacacggggatacttggaatagtcacattcatagaggcagagagtagaatgaaggttgccaggagctggagggagtggggaaagggaagttactgcttaggagatatagagtttcagtgttacaagatgaaaagagttcagagttctggaaattggttgcccaacaacgtgaatgtatttaataccactgaactgcatccttgcaaatggctaggaaggtgcattttatattatgtgtattttaacacaataaaaatttggaaaaaaatatgaaaaagaaggagtgggtgagaatcagtatggtttgtgggaggaatggtaagcaggtggtgttgctgagaataaaatgagaagtagaaagagagagaggtgaggagagaacagagaccaggtttattcagtctggagatgttctttcgggccatgtgctgttctaagaaatggagatattgtggagcttagaatccaaagaggcttgaccccggtgtttaggtgtttgggtcttctcattcaggcaagaaggagtcattgatgtttaggcaggaaagcagcaagatccaatttgcatttaaaactattcctcaggctgctgaatgcaaatgagtttggagggggcggcatggaggagggaggcagagtcactagtaaccaaaaaacatgatatgggcttgaaccgggagtaaggtctccgcgcgcccctgatttcccaaggtgagctggatctgggatgcagggcggttgg

SEQ ID NO: 59126 - DNA, 1171 bp, Homo sapiens
ttttctacttagtatttccctgcgtcctgtccatgtcagtatcatcaggctgtgctcagagtgttgtggaatgagaggtccctagttcaatatggtgggtggactgcaggaggaaccttctgaaagaggtgatggccaggaatgaaatgataagcaggtgctatctgaagaggagacacttcaagcaggaagtttcgatttttttttttaaagagggttgtcatagcagcatcattcatgatagctaaaatgtggaatcaatataagcgtccactgacagatgaatggattagcaatatattgtttatcccattgatggaatgaaattcagctttaaaaaggaagggaattctgacatgttacaacatggwtgaacctcgaggtcattatgctaagggaaataagtgacacacactgtatgagtccacctacacggggatacttggaatagtcacattcatagaggcagagagtagaatgaaggttgccaggagctggagggagtggggaaagggaagttactgcttaggagatatagagtttcagtgttacaagatgaaaagagttcagagttctggaaattggttgcccaacaacgtgaatgtatttaataccactgaactgcatccttgcaaatggctaggaaggtgcattttatattatgtgtattttaacacaataaaaatttggaaaaaaatatgaaaaagaaggagtgggtgagaatcagtatggtttgtgggaggaatggtaagcaggtggtgttgctgagaataaaatgagaagtagaaagagagagaggtgaggagagaacagagaccaggtttattcagtctggagatgttctttcgggccatgtgctgttctaagaaatggagatattgtggagcttagaatccaaagaggcttgaccccggtgtttaggtgtttgggtcttctcattcaggcaagaaggagtcattgatgtttaggcaggaaagcagcaagatccaatttgcatttaaaactattcctcaggctgctgaatgcaaatgagtttggagggggcggcatggaggagggaggcagagtcactagtaaccaaaaaacatgatatgggcttgaaccgggagtaaggtctccgcgcgcccctgatttcccaaggtgagctggatctgggatgcagggcggttgg

SEQ ID NO: 59127 - DNA, 3501 bp, Homo sapiens
gttgtaaatatctaatgcaacaaggtccccacacattctggagtgtttgctggcagatcaggggatgcaaacgcaatttttctcacagcacctttcatcactgctcattaaactttctgcaaagggctaaatcaaaaatatttccagcttcggatgccacttggtctttgtagcaactactcaaccttgacattgtagtgggaaagcagccatagacaacttataagtggatgggcgtggctgtgttccaataaaatttcatttacgaaacaggtggcaggctggatttggcctttgggctatagcttttgttttgacctctgcccttagtaataatcatagcaaccccatgggacaggcacagaagaggacactgagtagttaggatcctgaaacacgcatgtaagatttgatcatttgtgataatactagaaagagtgttgaattaggaatcaggagactgacttccagactcttctctgccattaatttatttcatggccttcacctctctggttcagtctgctccaatggcaccaggggagttgtattagctgaattctagtgattgcagttaacaaaactttactgcatgcttraaatttgcaaaaagggtagatcttaagagtgtgtgtgcttgtgtgtgtgtgcgtgtgagacattcacatggaaatggtaactatttgaggtaacaaacaagttatttagcttgtatatgcatatcaaatcatcaaattgtacactttaaatatatacaatttttaattgccaaatatgcctgaataaagtttaaaaagtctatccctggctacagcatccttttgcccatttgaagctgaaggctttggcatcatggaaacatttccctgaattcatctgcagccattacagtgatgatttggctctagtaaacatgccacgtggataggtgtatacagatgttgctatgattagcaaaatgcaaagtcatttacacatgttcagaattcacagtagctttctgggactgtgaatcttctgaactgacagacactaaaagtgcaactactagtacatgacagtctgcctagtttttaatgtgaaagagggtgctcccactccaggcattgtaagagagctagtgcaatggaagtcaggcaaacctggattggaaatccaacactttcttagctctgtgacctacggtcaagttatccaccttctttcaccctccattttccatcagagaaatagaagcagttcctaattttattttgaggactcaacaaggagaatatggacaaagcaatcaatgcagtgcttgacatgtaggaagcacatgttaatgttcactattatttttgagattactaatattaatagttattactatagtagcagcaataatagtaggaatggtaataaatactgacaatagtgacagctacttaaagtaatgagagtagcaatgtgtcattggtgattttcctgacaattggtgacttgaatgaaactccaccaatctactgtaacttttctaaatatcctcttctcttgaacatttgaacacagaaccctagtgtcatgagatgtttctcaaagtccttaactattattctgaaatctgtgctttagagaagaacagtgaagtataattccactccttgtgcagcactgcattactagaagaatgccacaagcacgatgaattttaaatcaaatatgaatatattgattcataacacaacatggagacaaggaagggatcccaaagactgccggttgacttcctgggagtacaaagaaaataaatcatgaactatggtcctaagtgagtagcagagaggacatgcagtctgcctgcatgacatggatgggtctatgtgtggatattctgggagaggacatggctcagagcaactcacatgtcaactagaagagtggactctggtcttggaaaattccactcatgaggttttcttttttggtctgtataaaatgaaggccatataattttttaaaaattgttttttttttcagcatttacattagggcacaaaaaggtaatacgattttattatatgttttaaataaaatgtctgattgaacaagggttgtagtgggcaggtgcattaatttattagaattttagagtgtcttgtatttactgtgtgtctgtgtgctaagcacctcgttttactcagttttatataatcatttcaacagtcctttgagccacatccatatccccacggtgcagataaggaactgagcaggagtcactgagttacagggatgatgactgtcagagtcaaagtctgaccaatccccaagctctcagcctttccagcattcctatatttatttttgtttaattttattttactgtggtaagaacacttaacaggacatctaccctcttacatttttaagtattcattgttaagtattaaggtttataggtagaatgttgttcaacagatttctagagctttttcccctggcttgactgaaatctctgtgtctgctgattaataatcccccatttattcctcttgccagccctgtaactaccatttcacagttgtaccattttgaattccaaccaacagtgtgcaagaactccaacttctctatgttatcaccaacatttatctttttctttctaatagtcatcctgaaaggtgtgaggtttctcactgtggttttgatttgcattttcctaacgattagtcacactgaacctcctttcatatacctgctggctatttgtatgtctgtcttcttcggacaaatgtctattcaagtccttaattctaaaatctggttgttagtttttgggtttttttttcctattgagttataggaggttctcgtatattctttagattaacattttatgaaacatatagtttgcaatttttaaaaaagtttgtaggttgccttttcattctatttatcttgggtttctcaacattttatttggtgaccactggtacaaataccctggattgctagtaaaaatgcagaataacacacactacagtatttttattcattaaggatttctaacaccaaactacatttctagtaaactcctcagaagattcttgtacacataaatgtttaataattactgcatgacactttcttacctgttggggagtcttctacccagcattccaaatttgtgcttacatgtctaggaagtggaagaattccttaggattttcagttattgttctttttcctctaactctagaaaatggaaaacaggtacagattttctttttttctacactggaggcttattaataatataatattagtggccctattacacactgtctgaaaaacctctaaatattcattgtgtgtggtgctacaggaaatctcctataaatcactgaaaatattataactcgaaggtaaatttcaaaagaatagggagttctttaggactgctttgaagcaaaattgtttcacactgtgaaatcttttgcttaagcagacgaaagagtg

SEQ ID NO: 59128 - DNA, 3501 bp, Homo sapiens
gttgtaaatatctaatgcaacaaggtccccacacattctggagtgtttgctggcagatcaggggatgcaaacgcaatttttctcacagcacctttcatcactgctcattaaactttctgcaaagggctaaatcaaaaatatttccagcttcggatgccacttggtctttgtagcaactactcaaccttgacattgtagtgggaaagcagccatagacaacttataagtggatgggcgtggctgtgttccaataaaatttcatttacgaaacaggtggcaggctggatttggcctttgggctatagcttttgttttgacctctgcccttagtaataatcatagcaaccccatgggacaggcacagaagaggacactgagtagttaggatcctgaaacacgcatgtaagatttgatcatttgtgataatactagaaagagtgttgaattaggaatcaggagactgacttccagactcttctctgccattaatttatttcatggccttcacctctctggttcagtctgctccaatggcaccaggggagttgtattagctgaattctagtgattgcagttaacaaaactttactgcatgcttaaaatttgcaaaaagggtagatcttaagagtgtgtgtgcttgtgtgtgtgtgcgtgtgagacattcacatggaaatggtaactatttgaggtaacaaacaagttatttagcttgtatatgcrtatcaaatcatcaaattgtacactttaaatatatacaatttttaattgccaaatatgcctgaataaagtttaaaaagtctatccctggctacagcatccttttgcccatttgaagctgaaggctttggcatcatggaaacatttccctgaattcatctgcagccattacagtgatgatttggctctagtaaacatgccacgtggataggtgtatacagatgttgctatgattagcaaaatgcaaagtcatttacacatgttcagaattcacagtagctttctgggactgtgaatcttctgaactgacagacactaaaagtgcaactactagtacatgacagtctgcctagtttttaatgtgaaagagggtgctcccactccaggcattgtaagagagctagtgcaatggaagtcaggcaaacctggattggaaatccaacactttcttagctctgtgacctacggtcaagttatccaccttctttcaccctccattttccatcagagaaatagaagcagttcctaattttattttgaggactcaacaaggagaatatggacaaagcaatcaatgcagtgcttgacatgtaggaagcacatgttaatgttcactattatttttgagattactaatattaatagttattactatagtagcagcaataatagtaggaatggtaataaatactgacaatagtgacagctacttaaagtaatgagagtagcaatgtgtcattggtgattttcctgacaattggtgacttgaatgaaactccaccaatctactgtaacttttctaaatatcctcttctcttgaacatttgaacacagaaccctagtgtcatgagatgtttctcaaagtccttaactattattctgaaatctgtgctttagagaagaacagtgaagtataattccactccttgtgcagcactgcattactagaagaatgccacaagcacgatgaattttaaatcaaatatgaatatattgattcataacacaacatggagacaaggaagggatcccaaagactgccggttgacttcctgggagtacaaagaaaataaatcatgaactatggtcctaagtgagtagcagagaggacatgcagtctgcctgcatgacatggatgggtctatgtgtggatattctgggagaggacatggctcagagcaactcacatgtcaactagaagagtggactctggtcttggaaaattccactcatgaggttttcttttttggtctgtataaaatgaaggccatataattttttaaaaattgttttttttttcagcatttacattagggcacaaaaaggtaatacgattttattatatgttttaaataaaatgtctgattgaacaagggttgtagtgggcaggtgcattaatttattagaattttagagtgtcttgtatttactgtgtgtctgtgtgctaagcacctcgttttactcagttttatataatcatttcaacagtcctttgagccacatccatatccccacggtgcagataaggaactgagcaggagtcactgagttacagggatgatgactgtcagagtcaaagtctgaccaatccccaagctctcagcctttccagcattcctatatttatttttgtttaattttattttactgtggtaagaacacttaacaggacatctaccctcttacatttttaagtattcattgttaagtattaaggtttataggtagaatgttgttcaacagatttctagagctttttcccctggcttgactgaaatctctgtgtctgctgattaataatcccccatttattcctcttgccagccctgtaactaccatttcacagttgtaccattttgaattccaaccaacagtgtgcaagaactccaacttctctatgttatcaccaacatttatctttttctttctaatagtcatcctgaaaggtgtgaggtttctcactgtggttttgatttgcattttcctaacgattagtcacactgaacctcctttcatatacctgctggctatttgtatgtctgtcttcttcggacaaatgtctattcaagtccttaattctaaaatctggttgttagtttttgggtttttttttcctattgagttataggaggttctcgtatattctttagattaacattttatgaaacatatagtttgcaatttttaaaaaagtttgtaggttgccttttcattctatttatcttgggtttctcaacattttatttggtgaccactggtacaaataccctggattgctagtaaaaatgcagaataacacacactacagtatttttattcattaaggatttctaacaccaaactacatttctagtaaactcctcagaagattcttgtacacataaatgtttaataattactgcatgacactttcttacctgttggggagtcttctacccagcattccaaatttgtgcttacatgtctaggaagtggaagaattccttaggattttcagttattgttctttttcctctaactctagaaaatggaaaacaggtacagattttctttttttctacactggaggcttattaataatataatattagtggccctattacacactgtctgaaaaacctctaaatattcattgtgtgtggtgctacaggaaatctcctataaatcactgaaaatattataactcgaaggtaaatttcaaaagaatagggagttctttaggactgctttgaagcaaaattgtttcacactgtgaaatcttttgcttaagcagacgaaagagtg

SEQ ID NO: 59129 - DNA, 644 bp, Homo sapiens
cacacacacacacacacacgccccttacaaccctgggctctcctatgctctgcctgtgaccacgtcttcacatttatctcctgtgttatcacattctcatcacatacctgcatcactcgtacacctcctcatacactacctaacccactcatcacacttataaggctccgttcacagactaacacacatccaagtgtatcgccaacccaccgcaaacacaaattccctattcagtcaccacataccacagtcatagtgaacaaacccactgcaaacacatattccctattccatcaccacataccacaatcatagtgaacactcactctcttgaagtcttctcatgctacccattgtttcttctttatatttcccccacacccttccactmattcactctcttctcctacacacctacaagcccctcacacactatttcacactcgaactacccacatcatacccaatcatacctcatctcagaaggaacaatatgtaaaatcttagactatgtgaaaacttcacagtgataggtttatcttcgagctctctccaatttttttcttctctcttctgaacaatgtttataactcagaggtgttcctgacaaccatttggggatacttctattctttctgggtacc

SEQ ID NO: 59130 - DNA, 680 bp, Homo sapiens
gatccatagaaataaatgggtccagtgccgaccctttaggagcttatattccagtgggggaagagagacattaatccaataatttcactgtgaatgcattaggttrgcccaaaagtaattgcattttttggccattatttttaaatgctgttattttgaaatggcagaaacggtaattacttttgcgccaacccaacagaatggcaaactaagaaaacgttgtgagaaaaaaatatgtactaaatgtaagcataacaaagccttgattcggctgggtaaaataaagtaaaagcatttagataaattaaaaaaaaaaaacacagcaaaaaacccaaaaagcagaaaaataacttccctgaggaactagttctatgtaaaatagtattaaaaagacaaacctttgattaagcaattttgtgtgaatcaaatttgtggaaataatcattaatgcctgtaaatattcatgtccaagccttttagttattgtgttgttaatagtaacagaaatttggagacaataaccagcaatgggagaatatttaaagtatggtataaacacacaaggaaaccccatgcggtatttaaaaatcaggaattcaaagactctttagggacatggttacatgttagtatagcgttaagtgaaaaatacagctacaaaactgcacacatcgtatgat

SEQ ID NO: 59131 - DNA, 1095 bp, Homo sapiens
taccagatttctatcttgtcacataaagctaaaaagagacatttcagttgactcattttcagacatttgaaagttaaagtgtwttttcagttcaccttatggattttgttttttgattaggacagtttattaaggctgttttctccaaatttccaaacttctgattgcataccagctcttttgttatcttttttctctaatgctgcttatttgcattgcatccagagttttatatttttgctaccataggcttgtatgtttgatttttttttttctttttctgaaagactcttccttttaaggaagggcctaggggctgtggggaaaaaagtgattactaatactttctcttcagaatgaaactccaggattccctggctgttatttgctagagttggatctgtacctatttagatcctaatttagggtttggcacattatggctggcaggctaactaagtggctaagaattaatgggttttacatttttaaagggttggaaaaaaacaaacatgatatgcaaagcctaaaatatttcatatttagaaaaagtttgcctatccctgtctcacatcacagcaagactgaaaaatagagttttcactaaaatatctatatgttttgttgttgttgttgttctagcatttggtggtatgggattggtaaacaattagcaacaactttatatcatcacttttcttttgtataaagtcagttttctatacatcttgcaacatcagagctgttaaagggagtgcaagaaaaacttatagatgtctgatcagaacctaaatcaacaccgttcaagataattttccgtggagatagaagtgctctctatcttcattgcccacatggtagccactagccacacttaactattgagcacttgaaatatggaaagtatgactaaggaactgaattataaattttattaattttaactaatgcaaatttaaaccatgtttggctcgtggctataatattggatattgtagacctaatttcttttttttttaagagagacagggtctcgctttatcatctaggctggagtacagtgctatgatcaaagcttactacagcctcaaactc

SEQ ID NO: 59132 - DNA, 1477 bp, Homo sapiens
aaagagatagattaaaagtgaggaaactagaaacctagttcatgtagattgggtgatcaacaccagaaaactaattgcaccgagcctcaatttctcctctgtaacattaagaaactgggtcaggtgtcttaagttattttcagtgctaaaattttacaaaatagggaactacacctataatacaggagaaccatgtagacaaggggccagaatccccaccccaccatgtgccattaggagctacagtaggtattctcatagcctcagaaagaggagagtagtcatgtgtatctcacaacttaaagtataccaaataaatgctttcttttgctttttgtaaacaacttgtttaaaaggttccttctttggcagaaagtccttaaaataattttaatataagaaattatttcaaagccaggcatggtagtgcacatctgtagtcccagctgctcaggaggctggaggcaagagtgattgcttaagcccaggggttcaaggctgtaatgcacaatgatcacacccgtgaatcgccacagcactccaacctgtacagtaaagcaagacctcatcccttaaaaaaaaagaagttactttcaaaatgcaagcatttatgattctattattttatttctaggattctatttcataagattttaaattattttaaaaatgttttatgagtctaatatcactttaatcaaaatagcaatttgaagtagttagcaattcccaggcagatacatttattatctttagcaaaatatttgaaaattcaaacataaattaaaatcatcaatttataatgcatttacctttctaatgccaagtratttccatacccaatgacaaacaacagaaatacctgaatggcccagtgaggtggtacttgacagcaatagaaaatcttcaggcgttccaatacagatgtagttttatcttcaaattggtctgcaagagccttaaaggacatatatcacaatcagaatctatatgtataacttataatataaataagtccttattgtaatagttatacaaatgcacatataaacaacaaagaacttaagtcattttgataaggtgataggatgtgtgaattttttctcgaatttctttaaatgttcaaaaaactttaaacctaatccacatttacataaacatgtacattaaaaacttaccagaaaaagttttaatttcctataatagttctttcaaagagctagccttattgataagcctttttacttcttctatgaagaactgttctttagcttatctatttcacaacataatgccactttgaccatggcactttataatataaatcagagaaaaattacatgaagaactctatgtaggattatttgctcaggaataaaatgaaaggaaaaagtagcctatttgatcacagagagcaagttctctcactcttcagcaacagagcaataaggctggacattcactcatgtgagaccat

SEQ ID NO: 59133 - DNA, 689 bp, Homo sapiens
agtctctgccatttgctagttgcgttagcttgggagcactacttaacctctctgtgcttccagtttccttatctgaaaataaggaagtagaaataataatagtayctacctcacaaagtgattgcaagaattgaaaaagttaacaagcataaacactcagaattgtgctatttgctatttattattactctttttatggctagttctttgctgcaaatattgtgcaaaaccacagcctatatctgtttactaagtagagagatggatatttttttatcgcgttaactttttcttcctcttctctccatcatgttcccataatggaagaaaatgtactctgtggctggttctgtggccactcagaagtcatggcaacactgaactgagaagtagacctagtgccaggcaaggccaaatgataatataaacggacttagcagattagaaatatgaacagcacataatgaaatgagatttatcttgggaggaaatgcaaactagtttatctaggaagaaatagttcaatatatagtcaacctggaagcaaagaagagtgcatctaagggaggcagagataaggaacaaggagagtgaaggacactggcaggaatatggccagattgtccctgctgtatacagcatggccccagggtaagaagataactcctcatgaggtgctcactgattaa

SEQ ID NO: 59134 - DNA, 1092 bp, Homo sapiens
aatgctctccttccccttgccccccacccgctgacaggccctggtgtgtgatgttcccctccctgtgtctatgtgttcttatggttcaactcccacttatgagtgagaatatacggtatttgggtttctgttcctgccacatccactcttaatacattaacaaactattttagaaagcagtatctatcagttgagaaaaggaaccactggtttgaaagttcmgcacaggtatgatttgttgataattttgtggcaagggctgtaccttactcatttttgtatccctaacacctatcatgatgtctggcaggtagtaagtgcctaataaattttgtgtaatgattgatgaacactatccaggatataatgatggccatgtctaccacctgtgctctaattctcaaaaccaatgattatgctaataaaatctacttagttgggtagaaagaaaattgaaatgacaccaaacaactctggcctgaatttctcagggaattgcctcaacttttaactttttaaatatttaacattcgtagcattctgattttaagaagcaattctcttattgctgagtaagtttctagaccaatctataaaatttttttattctaacacagaataataatagagtccagtagcattatagaaccatattctcattatgtcaaccctaatttggaattccaatatgagatggcagtaagagcccatttcctagagtcacagcttcagattcaggaacttctttttaacactcttttcattctgtctgaccttccactatgtgtccccacccaccctgctctgcaactaaatgaaacctgcttcttctcttgctttccgaatctccatgagtggcatcactaactacccagttattcaagtttgatgctctggaaacatccaccctgaatattccccacactcccacaacacacatccacgcccacacacatatgcctaatatgtgtatcaggtaccaatgattctacacccactatcactgtagttcaggacatcatctttctggactattacaaaatgtgtctgggttccagagagaaggaagccttaagttttaagaagaaggta

SEQ ID NO: 59135 - DNA, 1092 bp, Homo sapiens
aatgctctccttccccttgccccccacccgctgacaggccctggtgtgtgatgttcccctccctgtgtctatgtgttcttatggttcaactcccacttatgagtgagaatatacggtatttgggtttctgttcctgccacatccactcttaatacattaacaaactattttagaaagcagtatctatcagttgagaaaaggaaccactggtttgaaagttcagcacaggtatgatttgttgataattttgtggcaagggctgtaccttactcatttttgtatccctaacacctatcatgatgtctggcaggtagtaagtgcctaataaattttgtgtaatgattgatgaacactatccaggatataatgatggccatgtctaccacctgtgctctaattctcaaaaccaatgattatgctaataaaatctacttagttgggtagaaagaaaattgaaatgacaccaaacaactctggcctgaatttctcagggaattgcctcaacttttaactttttaaatrtttaacattcgtagcattctgattttaagaagcaattctcttattgctgagtaagtttctagaccaatctataaaatttttttattctaacacagaataataatagagtccagtagcattatagaaccatattctcattatgtcaaccctaatttggaattccaatatgagatggcagtaagagcccatttcctagagtcacagcttcagattcaggaacttctttttaacactcttttcattctgtctgaccttccactatgtgtccccacccaccctgctctgcaactaaatgaaacctgcttcttctcttgctttccgaatctccatgagtggcatcactaactacccagttattcaagtttgatgctctggaaacatccaccctgaatattccccacactcccacaacacacatccacgcccacacacatatgcctaatatgtgtatcaggtaccaatgattctacacccactatcactgtagttcaggacatcatctttctggactattacaaaatgtgtctgggttccagagagaaggaagccttaagttttaagaagaaggta

SEQ ID NO: 59136 - DNA, 730 bp, Homo sapiens
ttcctgtacctaggatacttttccagtggcttggtctgtgttctaacaatgccaacacatgtggtgagggcatctcttgggtcaggcccatgggacagaaaggtctaagacctagtcatcctactggcccacgtctttaggaagatgcagtagtctgtaaggakcactgcaaggaaaaactgtaactgtgagaagaagagaccgttgttgagctggaatcctttggggaacaccagtgaagtttagaaagcagacctgggccgccttggagactaatgggttaaataaaccaaacgtaattagaaggtcagacatgcggaggagggcagacaggaacatccctgcactccaaagccaacagacattatctggatttttttttttttttaggttttaataagcccattaataccaatcaagcccatacttttaaaaactccaggggctttctgtattttaattcattagcccttgaaacactaagtaaaaggcacattaagatgaggtggattgattctggcctacttaacaagctgctggtgggactggagcagagctgcgcctggtgaggcgtgggccgctcagaggtgccagtgcttctgggtttcacagggttggcagacaggagtagggtgtggtaagcacgaatcctgacagtggccagccagcagacagtggctgggagggtcagatgaagaggaggctctttggagggctttttttttttttt

SEQ ID NO: 59137 - DNA, 548 bp, Homo sapiens
tttaaatttattttaaataaatggcagttttctttacaacagaataagtcccttagatatcagatctataaagtacagtaaggcatagaatactgttttcttctgaatgtcctaaaactcattcaagaggtgctgccctggcctagcgcttagaatttgataacccagattaccctggttgataccgaagcagataaggaattatttagaggtgggttttgttaytgtttgcatcttgcttacacttgagtggctctgcagtcaaaggcttttcccatttcatttggagtgtttttctatttagctttacctttttagtgtatatgtattggcatcttgagctctgctagtaactatgtattggcatcttgaactctgctagtaactggcaaagttcatgagtggtggtatttgttttgtttttatactgtatttccttctgggaacttgtgtttacttatgcatatgatttgcataaaactatttccttccattagaatgcaactcagatttatttcttaagcctgtggttccttgaactatttgtt

SEQ ID NO: 59138 - DNA, 548 bp, Homo sapiens
tttaaatttattttaaataaatggcagttttctttacaacagaataagtcccttagatatcagatctataaagtacagtaaggcatagaatactgttttcttctgaatgtcctaaaactcattcaagaggtgctgccctggcctagcgcttagaatttgataacccagattaccctggttgataccgaagcagataaggaattatttagaggtgggttttgttattgtttgcatcttgcttacacttgagtggctctgcagtcaaaggcttttcccatttcatttggagtgtttttctatttagctttacctttttagtgtatatgtattggcatcttgagctctgctagtaactatgtattggcatcttgaactctgctagtaactggcaaagttcatgagtggtggtatttgttttgtttttatacygtatttccttctgggaacttgtgtttacttatgcatatgatttgcataaaactatttccttccattagaatgcaactcagatttatttcttaagcctgtggttccttgaactatttgtt

SEQ ID NO: 59139 - DNA, 756 bp, Homo sapiens
taggtaggctatataatacacagaaaacatttatacaaaattaatgtccaggctgggagctgtggctcacacctgtaattccagcactttgggaggccgaggtgggtggatcacgaggtcaggagatcragaccatcctggctaacacggtgaaaccccgtctctactaaaaaatagaaaaaatgagccgggcgtggtggcgggcgcctgtagtcccagctactcgggaggctgacgcaggagaatgacgtgaacccgggaggcggagcttgcagggagccaagatggcgccaccgcactccagcctgggcgccagagcgagactccgtctcgaaaaaaaacaaaaacccagaaagactgaatatttggatggaagttttaccagaagcacaaatgccgttcacaggcacatgtatgcaacgaggaaagctaatttacaggcatcccattgaactgtgggaaatgctaggaaacttttaagaagcaaggaattataagggtaagtgaaatgtaatgccccatacctcgcataccttgcactaatttaattattgatacatcattagtattttaaggtccctttacggaattggttgtcattattgttttaattattatgtaaaaataatttttagagtgcattactggtttacttgggacttttattcttatcctgtttatttcacaaggccgactggaaattcctctgcaatggggtttttagaagtctcacccttcgggttggagagaactgat

SEQ ID NO: 59140 - DNA, 1437 bp, Homo sapiens
aaacatttagcagtaggagccaggctactctattcctctttttgtaaggcaccaagaacttacaaaaatcaaataataggaaatgtttccatttctctaatgactggcttttgtgatttgcggtctccccacagagtatctggaccttcttcattgagaacaatgtttcccatagtacactggtggcattgttctatcattttgttcaaatagttcataagaagaatgtcagtgtacagtatcgagaatatggccttcatgccgctgggctttactttttgctactagaagtaccaggtatgtagacctgatatgataggataaatcttctgtcatttttttctttctacagttttcaattcttatactttgtttcttgtttcttcacttataaatggggcagtgctaacccatggcagagagttgttgcgaggagcaagtctctaaagtacatggcatgttataggtcttggaaaaccttcccccttttttttttcatccgaagttatgctatctataaactaataaaaatagtctgagaaggagtgcaagagttccacgcccaccctccaccacggccgtctaaaattctgatattgccctttcttctcatgattccttgtctagactgagaaatactgctgtggggagtcattgctttttacctctccgatgttggtattgaaaaatagattaaaaccattctaatcaagaaagcaggaaagcagctagtaatacttgaaggagagcactgaccaggagtctgttttcgagcactgttttacttgattgtcagagcactgaggaggctgttcctcctatgacagtgaaatccattctcttccctactccaaacacagggtgagagagagtggaacatagagattgagtcagataacctgaagttcatatggaaaagagaatggcaagatcagtcaccttgctgcttatctttgtttaattacaaatgtttagcaaaggatttattccatgtgatctgggaatgggcaaaaaggtcttatatttaaagccctgaacattgatttgtgttgttgttaatgctcccatcatgactttggaaatgagtaagttcctaaaggattttgttgctaagcagtgtctcggttgtaactaggccctctctcaaaaaagtagtggttttagaaacccagtttcactctcctcttgccagatgcagtttcttctgattaaggttgagatttatgccagagcaaagaggtggctgttactaattgcgtgggccacttgcagctttccagcaagccgtattcctgccagttaccttctgtttttaaatgtttcgggtttatgattgggatgctgtcgatacttaayattcgatcacagtatattctttttcaggatcgttttggttgttctgcctcccttgcatttccatgtgaattttaggatctg

SEQ ID NO: 59141 - DNA, 639 bp, Homo sapiens
tagacagaggcgctctgcgcagcacagcagagcctcatgctgtgcatttaaagcatatccagactttcgaaatctaggaaaaaattgtggctggttttgaaatttactgggtgtcctggctagctccaccctctgccttcatctttaacgaggctgttttataactctgtagagatagatatttgcctgtaggaaactaatggtcataatccctgtccataggaatgtaaattgtgtccagtggaatgcagctgatgatcaccctgtggacagtgaacagttttgccagtttttcagccatttgtcaatgcatttcagcattcctcatctgactataaatgtgaggaattttgagttctcttttgaactctcttttgtaatagctacaacatcacctgctttaaatgctgggttcccttgttaattaatgagttaaataaaaaatctttgacatgtgatcattttatatttgtatgaaagtaatgattttacctttttattacatatactttttaaaaataaggttctttcrgctaataatttttatttatttatttatttttgagatgtgctcttgctgtgtcacccaggctgcagtgcagtgatgcaatcgtagctcagtgtaaccgttagctccag

SEQ ID NO: 59142 - DNA, 603 bp, Homo sapiens
ggatcccatttatataaaatggccagaataagcaagtccatagagtcagaaattagatatgtgggctgkgcacagtggctcacgcctgtaatcgcagctactcgggaggctgaggcaggagaatcgcttgaacccgggaggtggaggttgtggtgagatgagatctgccattgcaccccagcctgggcaacaagagcgaaactctgtctcaaaaaaaaaaaaaaaaaagaagaaagaaagaaagaaagaaactagatttgtggatgccaggaactttggaggggagaggtatagatagttactgcttaatgggtataaggtttcttttggggtgatgaaaatgtcctggagttagaagtgatggttgtgcaacactgtcaatgtcctggaagtcattaaattgtacactttaaaatggttaaaataaaactctcttttcttctctgcctcatccagacttatcaatcaaaggaaaaatgttaccagactatggagtatttgcatttattagggaatttttgaaggccaaaacgtagtaagttcagcagtgtgaatcctgaatggagccgttttaggcaccttgagaagggggagagaagatga

SEQ ID NO: 59143 - DNA, 2167 bp, Homo sapiens
ccgtgcttaaaaagggaagccaggcaaaataagcttccttggtatgcctgtggccccgtttcctggtctcatcctgccgtctttcaaggtgagccttccaggtaagggggctgggcctggaatccgcaacatgcagtcaggagctgattttcaaagaacccggtgcagcaggaagaccaaggagacagccgcctcccctgctcgactcctgctgactgtggaactgagcgggagccgcgtagccatggtgacggtggcagtcggctgacagcccgggagggggtcggggagagggaagagggagcgagaagccgggcggaggcctcctgccggggatgggcaaacgggtttctggaagccgctcgtgggggaggggcgcgtggggagacagcgctcccctccccgcgaagcccggcgccctgccgcgccgcccacctgccttctcggcctcctcccctgactcaccacgcaggtgggtgactcacagcacctgcggtgtaagcgaggccgaggcgggcagggaagcctcccgctggggcgcttggcctccggagtagggaggggagagaaggtgacgctgagggtgactcttctgccttctgtccctgtcccttcccccagctccaccatctcctcgcccacgtcccccccccgccccgggacgcccttatccgtggacactgcttgacaaggagggcggaggggccccagcccatcacttgcactgtactgggcgccccaagacctgaaggccactcctactccagtctctcgccggcttccccaggctcccagcataaacacgaacttgacccgtggctgtggcccaggtgctctgcactggcctccccccacatcctgtctcctgcctggtcccctgacctctctgccctgggccacactggtggccttcccatttcctgagctctccctcacagccattgcccaggccctctcctctacctgggatgccgtcacttccatcccgcgtttgccccttctggtatcagcccaaacatcacttttccaggacagcctgtcctgttcccaccccacccaggcgggtaacttcagtcactccagtcactccaccccgcaggacccagaaactctttgtagcattcctcacagctgccatgtcttggcaagaggcctctcctccccactggactggaagggccaggagggcagagccaggcctcctctctgtaccttggattccccgaattttgcacaatgtctggcagaagatcctcactcaaaaaatgttggaagggaggaaaggaaagagggaaggaaggagggagggagagagggaaagaggaagagagggagaaaggagacatcattttgcccttctgggcaaggagctgatggagtgcgctgccttgcacctgccccagctgggaggtagaaaccaaagtgatgcttcccctcccctgctgctcttccagctgaccaggggccaggatgatggtgaaaatactatgagtattaagaggtgtgggcttctcaaattaaatgatcatttgttctgctttcaaaaatgcatttcacaaaggygggagcagctagtactgctagcatgaaaggaagtgttcttgagccccctgccttgtgtgggggacctgccatctggctcacattcagagcgtttgctttctttcctgcaagcactggccctgattctcatgtcccccccagctgtctggtttcctcaaagtcatgtgcccctaaaggccataggaaaagagcttgtggaaaagacactgagcccttactggggctatattccccaaaggcaggaggctgggtttctagctggagggtatggggcagagtggagtttagaaggcccttccctgaagaggctagagaagccggttcctgctcagccctgcaatcccagcccagtccttgcaaggggctccagggagtgagtcaaatctgataaacccagccaggataagatagaaggaaggttgtttacacaccggcccttcaataccaggtggggctgctgttttggaggccaaagaacatccattggaataggagaagtcctgttagaaaccagacgaagacagaggagcccaactgtcattttcttgaatttattttattatttttatttttgatttttcaaaatgggttttgctctgttgcc

SEQ ID NO: 59144 - DNA, 2167 bp, Homo sapiens
ccgtgcttaaaaagggaagccaggcaaaataagcttccttggtatgcctgtggccccgtttcctggtctcatcctgccgtctttcaaggtgagccttccaggtaagggggctgggcctggaatccgcaacatgcagtcaggagctgattttcaaagaacccggtgcagcaggaagaccaaggagacagccgcctcccctgctcgactcctgctgactgtggaactgagcgggagccgcgtagccatggtgacggtggcagtcggctgacagcccgggagggggtcggggagagggaagagggagcgagaagccgggcggaggcctcctgccggggatgggcaaacgggtttctggaagccgctcgtgggggaggggcgcgtggggagacagcgctcccctccccgcgaagcccggcgccctgccgcgccgcccacctgccttctcggcctcctcccctgactcaccacgcaggtgggtgactcacagcacctgcggtgtaagcgaggccgaggcgggcagggaagcctcccgctggggcgcttggcctccggagtagggaggggagagaaggtgacgctgagggtgactcttctgccttctgtccctgtcccttcccccagctccaccatctcctcgcccacgtcccccccccgccccgggacgcccttatccgtggacactgcttgacaaggagggcggaggggccccagcccatcacttgcactgtactgggcgccccaagacctgaaggccactcctactccagtctctcgccggcttccccaggctcccagcataaacacgaacttgacccgtggctgtggcccaggtgctctgcactggcctccccccacatcctgtctcctgcctggtcccctgacctctctgccctgggccacactggtggccttcccatttcctgagctctccctcacagccattgcccaggccctctcctctacctgggatgccgtcacttccatcccgcgtttgccccttctggtatcagcccaaacatcacttttccaggacagcctgtcctgttcccaccccacccaggcgggtaacttcagtcactccagtcactccaccccgcaggacccagaaactctttgtagcattcctcacagctgccatgtcttggcaagaggcctctcctccccactggactggaagggccaggagggcagagccaggcctcctctctgtaccttggattccccgaattttgcacaatgtctggcagaagatcctcactcaaaaaatgttggaagggaggaaaggaaagagggaaggaaggagggagggagagagggaaagaggaagagagggagaaaggagacatcattttgcccttctgggcaaggagctgatggagtgcgctgccttgcacctgccccagctgggaggtagaaaccaaagtgatgcttcccctcccctgctgctcttccagctgaccaggggccaggatgatggtgaaaatactatgagtattaagaggtgtgggcttctcaaattaaatgatcatttgttctgctttcaaaaatgcatttcacaaaggtgggagcagctagtactgctagcatgaaaggaagtgttcttgagccccctgccttgtgtgggggacctgccatctggctcacattcagagcgtttgctttctttcctgcaagcactggccctgattctcatgtcccccccagctgtctggtttcctcaaagtcatgtgcccctaaaggccataggaaaagagcttgtggaaaagacactgagcccttactggggctatattccccaaaggcaggaggctgggtttctagctggagggtatggggcagagtggagtttagaaggcccttccctgaagaggctagagaagccggttcctgctcagccctgcaatcccagcccagtccttgcaaggggctccagggagtgagtcaaatctgataaasccagccaggataagatagaaggaaggttgtttacacaccggcccttcaataccaggtggggctgctgttttggaggccaaagaacatccattggaataggagaagtcctgttagaaaccagacgaagacagaggagcccaactgtcattttcttgaatttattttattatttttatttttgatttttcaaaatgggttttgctctgttgcc

SEQ ID NO: 59145 - DNA, 2437 bp, Homo sapiens
ccccgctatctcacacacacacacacacacacacacacacacaaacacagacatccataagtgcctcctctccagccaccctgtactgtgactgttgagccccacataccctgcatgacaaagtactctgccttctgccagtagagacattgggtgtagccaggtggaccaagtactgaagaaaaggtccttgtgtggcattaaagttgctgcaggggactcagcctctggcagagcccctgtgccgtagcacaaaaccagtttctggatctcattcctctagggtctctgggcatgcatttctggtagctccatgccacctccaacattcctgagcaggaatgaacctcatgcctgtccacgggctgcagtcaccctgcaggtgaaggcaccacgggtggggcgccctcccaggaggttggccaaagaacacctgttcggagaaatggtgccgatgactcagcaagtggcactcttcctcagatgcatccctgactctgtgcctggcctgctggtggggacttggagcaatctagggggtggctcttgggtgagtcagaaaccaagaggctgactctttatactcccagggacccaagactttctcagaaaaaaagcaggcagaatgaacttctattcactctttctccttttggcctctgtccgcctgtggtgatcataggaagtgcttatatgctttttcactgcttctaaaactgttgctgaaagtttttgggccttgtgaaataagaaaagttaattaagaaggttccatagtagatcaatgtggatgaccaaattataaagctaatgacctgtatctataccattctatatgatagccactagccacgcatgaccatttcaataaaattaattaaaatgtaaaatttggttctccagccawaccagccacatttgaagagctcagtagctgcctgcggccagtggccgcagcattggacagcacagctatagaacatctctatcatcacagacatttccactgcacagaggtaatccaaatacatagtgttagagatccactcaacttctcattcattcatttactcaagtatttacagagggtcggctgtgttttagtggctgtgggtgaacaaagatggcaaacaggtggtccctgcacactctaagagtttataactggttgggaattcaaatgtgtaaccaaagatacagaactctttcattctgggactgaaacaagcgatacacaaatgaatagaatgcttctaaaaggtcagcttccaaaaagaagaggagggaaatgagtcggcctggttggacttcagattattaatcttttacttagcatctgcctaaggaagtgtgggtagtaagttagcttagacctgagtgacagatgtgacagacacagggcaattaggccaaaaggaggaaagtccagacccacagctctcctgggaaatttctgactatgcatcctgaggagggcaactgcatgaacaccactggtagaggagagggccattgtctcaggcagtcatatcccagggctgcaaaggctaacattgccattcacctcctggaactctgggacgtggtgctttccaccgtacttctgagaaagtagcaagcaactggctggctctttctccaatccagctgctccttgtttgcaagattttcacagagtgatttcaaaggtttttataaggtgttcaagttgggcaagcacattggatatgcaccaagtacagcgtctggaaaagggatcccaaagcccagagagggtgagaacctctcacagaacttctcagccaggtcatcttagggcagagatgctcagggaagaaagataccaaaataaagggcatggagacaccacctgaaactgatgaattgtgtgggagagaagcaggtagagaaacgcagacacgtaactcagagcccccagagagaccagcgggtcatcttcaacctggaaggagttgtaatggctcacagatgggtgacccctggcagctgctcgctaaaggtgtccaagaatttgtttgggggagttattttttaacacttgagatcaccagagatggtttgtgagtcataaagctggatgctgggctccccgggcagttgagctacagaagagctattctgaaaaaaagactgtgggaataagcaattcattttttatgtgatgttttgaatagggtacgtagttgcgtgattcaaatctgaggaaatgtgtattaaaaggttcacggtgaacagttgccttgcccctgctgcctatctgcctagttcccacacttctccgacctgcacttgggcaaccactattacgttcttttgcacccatccgagttatttttaaaacttttatttatttatttatttgagacagggtcttgctctgtcatccaggctgtagtgcagtggcatgatctcagtt

SEQ ID NO: 59146 - DNA, 913 bp, Homo sapiens
attctaaaaatttgatattatgtctaggtttttggaaacaaaccaaatcaaaacaaataaacaaaaaatctacatttattgtgtggctctggggaaaacacgggaaagatatttagttcagttcaggcagattataccacagggagcctaaatgaaggataatcattaaagttgtcacttatgaaacgtaatggtagattgtgactgaacttagaacagtcttgtgtcgcgcagtgcctttcaaagtccaacaggtactatttcaactacaacaggagtgacattgacctggggtggcctctctacttccaagtcacttttcaaaacgtagttcagatatactcagttctgatggtgtctttcctgacctccttccaggctgggttaagaccattctgtcctctacgcttctgagcattcataccttttctcatccatttttgtattccactgataggaacagagaagctacctaatagagttcattaaattgaaggaattactacctgcattctggtggctcagattcatcctaatgtatgaatcttctcctaaatatacataacttattccataaagaagctgggcaccagaagaagttggctcagtatctgcttgtacataatgtcaaatatgagtgataaatgggaaaccgatttcactaatttactttctgcaagtatctgcatatcagatatccaccccccacctcctcctcaggaagaaaaaataaacacagaggaagtggctttaatttagtttawtttttaaaaataggggttagtatgctttttctgtagagggccagagagtaaacttaaaaaaaaaattcaacttttattttagattcgggggtacatgtgcaagtttgttgcatggatatactgtgtgatgctgaggtttggggtatgat

SEQ ID NO: 59147 - DNA, 939 bp, Homo sapiens
tgcatagcatttgggccctcattatagactgtgtacaagcaattgcaacaacagcctgtaggaatttctkaccaaggaggagaacaaaataagttattaagtcaggcaaaacttcctgtacactatgatgataatgcttatttggcctttgatgaatatagaaacctaaataaactactcacaaacaattctcttgtagactcatttgaaagtcagtgttttatgggaaatatgtttggagtagtaggtataatatggttaacttactacttaaggtagatatactcaaggactcaggcccaccctcagccatcacaatgcatgaagacaattgggattgtaatacaggatacagtaaaagaacagaaagagagaaccctgtgttcaaatgcttctctgcccaatgatgtcacttttctaagtctcagttttcttacttgaaagtggtataaccaccttatagcattattgtggggactgaatgatatgaaatgctctgtgtggcacctgaaatcctgtaaatgcttgaaaaaatagggtttccccctctgtctggcctctgagagttccaactctctgaaaacactaccttccattcaacaagtgttcatggagggtggaccactttccaagcactgtgctaggcctataatgtccacatgaaacaagatatccagaggaaagggtgactttcagggcaattgcatctagtttctgacactgtcatttataaccataaagaataacgtctctggttcccagttatctctcatagcctagctatgtgaagtaggctacagcaagaaacacctggtttgcatttcctggaacataagggacgcaggttcatttaactgacaaatgtctgagaaatttaaagtggggaagagatccagacagcccacggtggcagagtgaagagagatgctaagtgggtat

SEQ ID NO: 59148 - DNA, 939 bp, Homo sapiens
tgcatagcatttgggccctcattatagactgtgtacaagcaattgcaacaacagcctgtaggaatttctgaccaaggaggagaacaaaataagttattaagtcaggcaaaacttcctgtacactatgatgataatgcttatttggcctttgatgaatatagaaacctaaataaactactcacaaacaattctcttgtagactcatttgaaagtcagtgttttatgggaaatatgtttggagtagtaggtataatatggttaacttactacttaaggtagatatactcaaggactcaggcccaccctcagccatcacartgcatgaagacaattgggattgtaatacaggatacagtaaaagaacagaaagagagaaccctgtgttcaaatgcttctctgcccaatgatgtcacttttctaagtctcagttttcttacttgaaagtggtataaccaccttatagcattattgtggggactgaatgatatgaaatgctctgtgtggcacctgaaatcctgtaaatgcttgaaaaaatagggtttccccctctgtctggcctctgagagttccaactctctgaaaacactaccttccattcaacaagtgttcatggagggtggaccactttccaagcactgtgctaggcctataatgtccacatgaaacaagatatccagaggaaagggtgactttcagggcaattgcatctagtttctgacactgtcatttataaccataaagaataacgtctctggttcccagttatctctcatagcctagctatgtgaagtaggctacagcaagaaacacctggtttgcatttcctggaacataagggacgcaggttcatttaactgacaaatgtctgagaaatttaaagtggggaagagatccagacagcccacggtggcagagtgaagagagatgctaagtgggtat

SEQ ID NO: 59149 - DNA, 939 bp, Homo sapiens
tgcatagcatttgggccctcattatagactgtgtacaagcaattgcaacaacagcctgtaggaatttctgaccaaggaggagaacaaaataagttattaagtcaggcaaaacttcctgtacactatgatgataatgcttatttggcctttgatgaatatagaaacctaaataaactactcacaaacaattctcttgtagactcatttgaaagtcagtgttttatgggaaatatgtttggagtagtaggtataatatggttaacttactacttaaggtagatatactcaaggactcaggcccaccctcagccatcacaatgcatgaagacaattgggattgtaatacaggatacagtaaaagaacagaaagagagaaccctgtgttcaaatgcttctctgcccaatgatgtcacttttctaagtctcagttttcttacttgaaagtggtataaccaccttatagcattattgtggggactgaatgatatgaaatgctctgtgtggcacctgaaatcctgtaaatgcttgaaaaaatagggtttccccctctgtytggcctctgagagttccaactctctgaaaacactaccttccattcaacaagtgttcatggagggtggaccactttccaagcactgtgctaggcctataatgtccacatgaaacaagatatccagaggaaagggtgactttcagggcaattgcatctagtttctgacactgtcatttataaccataaagaataacgtctctggttcccagttatctctcatagcctagctatgtgaagtaggctacagcaagaaacacctggtttgcatttcctggaacataagggacgcaggttcatttaactgacaaatgtctgagaaatttaaagtggggaagagatccagacagcccacggtggcagagtgaagagagatgctaagtgggtat

SEQ ID NO: 59150 - DNA, 540 bp, Homo sapiens
aggccagttacagctccccaccatttgcacgctggaggctgggtctyctatcccaccatggctaataagccatctgggccgatatctaggccactatctccctaagccatcatggcaccagctcgcatgggtaccactctggtgcaagctgcccttcatggctggtacctgggaaattctcttctttatggcttggccatggatttgaacttttaaatatatataatttttttaagacagggtcttgctttgtctcccaggctagattgctttgtctcccaagtagcctaatctcggctcactgcaacctctgcctcagcctcccaagtagctgggattacaggtgcatgccaccacacctggctaatttttgtattttcagtagagacagggtttcaccatattagccaggctagtcttaatttctgacctcaagtgatccgcctacctcagccacccaaagtgctgggattacaggcgtgagccaccgtgcctggcctaaaaaatatatttttaaatttattattggcaggaagaggg

SEQ ID NO: 59151 - DNA, 1494 bp, Homo sapiens
tcccacctgagcttcctgagtagctgggactacaggtgcttgccgccatgtctggttaatttttaaaaaaataataagaagaaataggatctcactgttgagcaggctggtctcaaactcctggcctcaaaaaatcctctcacctaggcttcccaaggtgctgaaattacaggtgtgagccacctcctggccctcctttccaatttaaggtatttagcattccattttatgacaatgtgatggccaaaaagtctatgtgagaaaggtaagagggaagtcaatctataatgaagatcaacagtgaagagtctttcctgatgccctttagtcatttgaaacattttacaaaacaatgtaggtaagtaakaagactaatctataatcagaagcaaagggttacagctgcctaagttacagttgcctgtcaggtaacattcctctaaggctcaaaataatttagagttccaatagcttagatttttaattattttcagagatcttatttgcatggcttcaatatttgtcacttttttgcacatactttttgttttcttttttccttattttcaattttaatttttttcaccttctatttcttatcaggcaatacttgtagcatttatctacttttttgttgttgttgttgagacagggcctcactatgtctgtagtacagtggcacaatcacagctcactgaagtctgtgcttaagtgatcctcccacctaagccaccggaatagctgggattattggcacacaccatcatgccgggctaattttttttaatgtttggtagagatggggtttcactatgttgctcaaactcctgagctcaagcaatcttcctgcctcagcctcccaaagtgttgggattacaggtgtgagccactgtgcccagcttatttatttacttttgttttccttctggtttagtttcatttctgaaataaattttttatttattactattttttccttgagttttatcacctaattgctatatttttctagttctgatttacgtatgtatgttgttctttgtatctttcaaaatgtcttttagctagtttcaaaatactagtttatactgtttatctgttttgtggaagggagcttggttgattagtgctgtagcttgaatatttaaacctccaaacttcatgttgaaatttgatccccagccgggcagtggctcacgcctgtaatcttaacactttaggaggccacttgaggccaggagtttgagaccagcctggccaacatggtgaaaccctgtctctactaaaaatacaaaagttagctgggcgtggtggctcacacttgtaatcccacctactcagtaagccgagggaggagaatcacttgagccgagattgtgccgtgtactcctgcctgggcaaaagagcgagactccgtctcaaaaaaaaaaaaaagatatctgatccccagcgttggcagcaaggcctaacaggaggtgtttgggttatgggggt

SEQ ID NO: 59152 - DNA, 642 bp, Homo sapiens
attaatcttgaaattaattccaggtttaattgttaatgaaatttcacaagcctaatttaacacttgtctggataactcattttgatactgagtaaatagtcactggtcaaaattcttccaatgatgctattccaataaaattcatttaatgaggytatattttaagtatatttttataggttcccttttttttgaggtctcagcaaaaaaataaagattgatttttggtttatggtatcttcaaccttaagtattgttattttttcttccatcagatgctgtgccacttttcctgaggcttctccattcaccccatcagaatgtctgtgagcaagcagtgtgggcattgggaaatatcataggtttgtataaaacttgtaatactagtctaaaaattgttatcatatactaagtaataaaaatagctactagtaatccaaaagagaaaacagtttgccttcagtactagtttttgtgaaatagcttacagaaatttgaactgtattactgtaaaagcataaagtcatagtaaatagaatttttgttgcttaagataccatttttttggtatatagttagctcttaattatttgaataattatgcaagatgtatacaatttagaccttctgtctcatgctagg

SEQ ID NO: 59153 - DNA, 716 bp, Homo sapiens
tgcatcaatgaacaataaagagaaatggagatcattcatattattagtgagggaagttgggtacaacttttcatcaaccaaaaagagggagaaaaaaatcacaccaccaaataatgaaatactgtaactagaatgtcttggctctaagatcattggcakagaattagagattatgttcagcagattaaaaaaaaaaagaaaacagctgtgatcatgccactgcactccagccagggctgcagagcaagaccctgtctcaaaaaaacaaaaagccaaaaatacgagatgtttaaaaaaagaactgttgttcaagagatcattttcactttttaatagggttttgaaaactgtgaaagtatctcaaactgaagtctaaaaggaaaataatagaagcttcaaagttcaggggccaggttatatctatataaaagggaagctaacttatttccagaactgattcatttattaaacatggggctaaggaatagaggtggcaatatacaagtcaggataatgcctttgtcttctgaagctgcatctacattggtgcccctcaaaatagctaaaattgaaaatagtttatctgtcacctgggatttcttctacaaataaccttcccaaaaaaatattgcctaacatttttctgaatttatcaagccaaccatctgatcaattttctaaatgaagatttattcttggcaataatctagctcagg

SEQ ID NO: 59154 - DNA, 716 bp, Homo sapiens
tgcatcaatgaacaataaagagaaatggagatcattcatattattagtgagggaagttgggtacaacttttcatcaaccaaaaagagggagaaaaaaatcacaccaccaaataatgaaatactgtaactagaatgtcttggctctaagatcattggcatagaattagagattatgttcagcagattaaaaaaaaaaagaaaacagctgtgatcatgccactgcactccagccagggctgcagagcaagaccctgtctcaaaaaaacaaaaagccaaaaatacgagatgtttaaaaaaagaactgttgttcaagagatcattttcactttttaatagggttttgaaaactgtgaaagtatctcaaactgaagtctaaaaggaaaataatagaagcttcaaagttcaggggccaggttatatctatataaaagggaagctaacttatttccagaactgattcatttattaaacatggggctaaggaatagaggtggcaatatacaagtcaggataatgcctttgtcttctgaagctgcatctacattggtgcccctcaaaatagctaaaattgaaaatagtttatctgtcacctgggatttcttctacaaataaccttcccaaaaaaatattgcctaacatttttctgaatttatcaagccaaccatctgatcarttttctaaatgaagatttattcttggcaataatctagctcagg

SEQ ID NO: 59155 - DNA, 1090 bp, Homo sapiens
tatgttttcatcacaatttcagaaggcatagccaaattcagatatatgttcagagatcttcatgaaaaaaatagtttgttctatttatattgtaactccggtactaaaccaaattgttaagagatacaaagcttcatgaatacctttcttaccactttcagtcagctactatataatttctagaacaaacactaatgatgtctatttatcttcagcatcagccacaattttccattcatggtaatgactaaagaagcgaagtcgagtatgtaaacatgcaaaaatgagagatcatttttcactaatttgcattttcatctcccctgagccataccacttgaatacaaatatcttaaattttgaatagaaattgttagaaataacatttatttcagtaattatttgtctctcattcagtaacatccttctacataccaagcatttttgttgatgcaatatgatttatagaaataagttcctaaaattattcatagttcaagaatttcacccaagtcctaaaactattaatataaataatttgtatgcaatgttacaggagctaaacagaataaacaaaatataccagaattaaagacgaggaagatacaaatgcttcagtgaagaattgactatagttctctgaggttagggacattcagtttgaactggaatttttgtttgtttgtttgtttgtttgtttgagacagagtgagacyccatcacacaggctgtactgcagtggcacaatctcagctcactgcaacctccgcctcccaggttcaagcgatccttctgcctcagcctcccgagtagctgggactataggcgagcaccaccacgcccagctgatttttgtattttcagtagagacggggtttcaccatattggccaggcaggctggtctcaaactcctgacctcgtgatcctcctgcctcagcctccaaaagtgctgggattacaggtgtgagccaccacgcctggccctggaattctttagaatttatgaaaaagaagaaaagaactaatattcaagacaggtttaagggcactttcaaactacaaaagtgacataaacaagctataccatgc

SEQ ID NO: 59156 - DNA, 765 bp, Homo sapiens
tttctgtttgaataatatatagtaatctgccttcaatattactgattctgcctctgccatctccagtctgttgataaattgccaaaggaatctttcacctccaatactgcttttcatttctagcattttcatttgagcttcttatatagtttctatctctctgctaaaatttcctgagcatgttatttatcttttccactagaattttaacacattaatcataattatttttaaaggttctgtctgataatttcaacctctgggccattattttctcttaacaatgcctgggtttttgtatgtgtgtatacatatttacagtaaatcctgagataaatcctgagataaatattacccctcaaaaatgggctgccttcttattctgtcagactactaagtgtgtgaaattgtatcaatccaatctgtagtttatctgtatttagattcaaatggctccagtggtggaatgccagtaacttgtgttttggggaagactggagtgccaaagggattctcagtgtttgtgctcagcttcaagagtccacacatgcactatagagaaggctctttctayacttgtgtccctctcccagtatagtggcattgcttgttaatcagagaaaagttcatggtggggcaatgggagctctttgttcttctctagcaactgcccctgtctacgtacctttgcctcagacgtgggacttttttaatgctcctaccactcccacaacaagaaaaactgcctaaaatcagtgaaggatc

SEQ ID NO: 59157 - DNA, 765 bp, Homo sapiens
tttctgtttgaataatatatagtaatctgccttcaatattactgattctgcctctgccatctccagtctgttgataaattgccaaaggaatctttcacctccaatactgcttttcatttctagcattttcatttgagcttcttatatagtttctatctctctgctaaaatttcctgagcatgttatttatcttttccactagaattttaacacattaatcataattatttttaaaggttctgtctgataatttcaacctctgggccattattttctcttaacaatgcctgggtttttgtatgtgtgtatacatatttacagtaaatcctgagataaatcctgagataaatattacccctcaaaaatgggctgccttcttattctgtcagactactaagtgtgtgaaattgtatcaatccaatctgtagtttatctgtatttagattcaaatggctccagtggtggaatgccagtaacttgtgttttggggaagactggagtgccaaagggattctcagtgtttgtgctcagcttcaagagtccacacatgcactatagagaaggctctttctatacttgtgtccctctcccagtatagtggcattgcttgttaatcagagaaaagttcatggtggggcaatgggagctctttgttmttctctagcaactgcccctgtctacgtacctttgcctcagacgtgggacttttttaatgctcctaccactcccacaacaagaaaaactgcctaaaatcagtgaaggatc

SEQ ID NO: 59158 - DNA, 579 bp, Homo sapiens
gaaaattctatgcccagcaataacatttttcaagcccattttttggatatacaaaaggctttaagtatcagatatcctttctctactctgccttcatttattacattccagtaaagatggcttatttctcatatctccagcatagttaaattcattcttaactgggaaactttayacttgctttctgtttccctaaaatgttcctttctcagactttcacggcctatcttctatcattaacaggtctaagctggagccttctttgaccttagctataattaaaaaatcagaactaatttaacagcaagtttatggagctttatacaaagaatatgtgaacattctttccaaatacacaagaaaggagttacaatttttattaccctcaaaaaacatatgaattatcaatttacacgtattttgagggtaataaaaatttatggtagattatgtatttatggtaggttacccaatagcaataaaagaaacttactttgctgaaagataagtaaactgacaggatttgctgatggttgtgtgaaaataggaaaacttaagaatgaccccaggtttttttga

SEQ ID NO: 59159 - DNA, 579 bp, Homo sapiens
gaaaattctatgcccagcaataacatttttcaagcccattttttggatatacaaaaggctttaagtatcagatatcctttctctactctgccttcatttattacattccagtaaagatggcttatttctcatatctccagcatagttaaattcattcttaactgggaaactttatacttgctttctgtttscctaaaatgttcctttctcagactttcacggcctatcttctatcattaacaggtctaagctggagccttctttgaccttagctataattaaaaaatcagaactaatttaacagcaagtttatggagctttatacaaagaatatgtgaacattctttccaaatacacaagaaaggagttacaatttttattaccctcaaaaaacatatgaattatcaatttacacgtattttgagggtaataaaaatttatggtagattatgtatttatggtaggttacccaatagcaataaaagaaacttactttgctgaaagataagtaaactgacaggatttgctgatggttgtgtgaaaataggaaaacttaagaatgaccccaggtttttttga

SEQ ID NO: 59160 - DNA, 579 bp, Homo sapiens
gaaaattctatgcccagcaataacatttttcaagcccattttttggatatacaaaaggctttaagtatcagatatcctttctctactctgccttcatttattacattccagtaaagatggcttatttctcatatctccagcatagttaaattcattcttaactgggaaactttatacttgctttctgtttccctaaaatgttcctttctcagactttcacggcctatcttctatcattaacaggtctaagctggagccttctttgaccttagctataattaaaaaatcagaactaatttaacagcaagtttatggagctttatacaargaatatgtgaacattctttccaaatacacaagaaaggagttacaatttttattaccctcaaaaaacatatgaattatcaatttacacgtattttgagggtaataaaaatttatggtagattatgtatttatggtaggttacccaatagcaataaaagaaacttactttgctgaaagataagtaaactgacaggatttgctgatggttgtgtgaaaataggaaaacttaagaatgaccccaggtttttttga

SEQ ID NO: 59161 - DNA, 1215 bp, Homo sapiens
ggcatatgcagtgctagctactcagaaagctgaggcgggtggcttgctcaagcgcaagagtctgaggctgcagtgagccatgttcacaccactgcactccagcctgggcaacagagtgagaccctatctcaaaacaacaaaacaaaacaaaacaaaacaaaagcaagatatatattgacttcattctgattcttctgtctttactgtttgtcacttctcattccctgcctctatccaagctaaaatcatttttgatggactattgcaaaatctttataaataatctttccattttactattagtcccctgaaaaacttattctttcttcagaagccaaagttatttctttgacatataatacaaaatactttacttcttggcttaaaaccactcaatgatttctgtcttagaataaaatctaaactataatagtggcctctaccttcctacccagtgtcaatctatgtgctatcctcccytttcaatatattttagtcatattgtttgtgtatattgggatggtggtagtggtggtggatggagataggctattatatgatcctaaactgttgatcaaaggatttaagaatacctaaaagagtccaattatgctaaatgaaataagccaggcacaggaaacaaatagtgcatgttctcacttgtttgtggaatctaaaacaatcaaacttatagaagatgaagtagaatgatgactacaaaaggctggggagtgggaggagtggggagtacagtgccgagtgtacaacattccagttaaacaggaggaataaatgataaatatttgagacaatgactacattaactggcttgattcaatcattccacactgtgtgtatagatatcatggcatcactttgtgccccgtaagtatatgcaattataatttgtccatattcaataaaataaattttaaaaaagaatgaagagtctgcatatcttttgatgcttagcaaacctcacatctctgaaataaacactagcaagtttgagctgagtagtacaggattatggttttctcctcagctgatagcttataatgcaaataatctgtattggcaattgcagttggacctatttgctttggaaaatacataaacataactcttgtctgaatggagaggcagtctacctccctgtagaggagaccctggtgaacatggagaacaatgcataaagatacacaaatgtatcat

SEQ ID NO: 59162 - DNA, 618 bp, Homo sapiens
agaaataaatcctaaaggtgaaaagaaaaatctgttagatttcttctaaaactgtctactatcattgcaatctccaagggatatattttatttttattcaagtatttttatatacatttgaaatatgtttctgaataatatatataggaacttcaaagttaactttcaatattttctaatcaataaatttcctaatattgatatgtgtggctagaattttgtctcagtatcttcctttagggtacagattttacattatgcaagtgtcatatttttgtgaatgacaattcaacttttatcaagacatttataaattagtaacttaataattactaataatttaataattactaatttataaataatttaagtgaattactggtatcttgatatggacttactaacaattcayatgttatcatcaattgcattgtaaaacaagtgttaatacctcctctttgctgtgcaaattcttgccactagatacttcttacccacaaatgtggtaaccaacctcagttcagtgcatctttctctctttccaggaaattatgtgatctctctcttccatgacaccacaatccttttgcaataaaggctcaattccaagttataaaa

SEQ ID NO: 59163 - DNA, 835 bp, Homo sapiens
taattggtacaagctttctttagggatgatgaaacattctaaaattagsttatgtgatggctgtaaaactccgtagatatactaaaaatcactgaatcatactctttaattgggtgaactatatggcatgtaaactatattttaatgaagctgttgaaaaaaagtctggaacagaaatgaccatggaggcacagccttctagccaagtctcacagaagggcccacgaagagcagggctgggatggaagtgtcgtggctttctcattcattcataatattaaagtcatttatagcaaagatagagatagtaataattaatatcatgaagacttaacatgtgtcaggtatgtttccaaataattttcttattttgtttcactttattctcatcacgaacatcatgaaaactgtgttatttcacagaggagagctgaggttctatgagtggaacacattgtctttattctttttttatcccttctgttctttgtttctttgtttttactttccagtttgtagttttgggagggaggaggggatataaatgagtaggctttagtatctctctactggctttttagctatgacttttaaaattattttatagtcattgctctgagaattacaatatgtatgcttaacttatcatgatctaccttaaattaatatttcatatatctctcacatactgtaagaaattttaattgactttttaaaaatttagaagaaaaaataaccttttatatttaccctttcatttgccattattggggttctttattccttattagatctggatttccatctggcacttcatctctttagcttacaaaac

SEQ ID NO: 59164 - DNA, 636 bp, Homo sapiens
taggtcttgtctatgtggatctggatttaaaatatatatactaaacataagcaaagtagaagagagatggagagattatgcagagtgatttttttcttatattgaaaagctttctttactacaagtatatttaatatacctaaatacatgatgtaagcctgctttataataaccaaagggtatttgtttaaaaatggagagtcttattttttaaattattgcttcagttgaattataaatgaaataacccacttcaaaaagaagatagggaaggtaggcagtctctttggccattggttatcccaatgcttcctgcctagctaaatttctrtggccatatttgtatctctagctatctcttttcttttatactcatgatcagatttgtgtctcaagtgcacattaaggtatacttcataccttataacaattcaaaaatcaaaaatatatattttctttgttctcagcaaagaaacacaaatttattagaagaaacttgtaatgtaaatgtactagaagatattacacaatattgctaaaacaaacaacacaagaattccatattatacatgtcacactaattgtaaaatactaaagatactgtcattctaaaataaattgccaattatagaacat

SEQ ID NO: 59165 - DNA, 852 bp, Homo sapiens
gcatatcctacaaggacatgttgaatataatctacatttataaactatagaaactacttcttccttttgcaggtacagatgattcattataataattttattaagaattattattattattattattattttgagacagagtctcgctctgtcgcccaggctggagtgcagtggcgcgatctcggctcacggcaagctctscctcccgggttcacgccattctcctgcctcagcctcccgagtagctgggactacaggtgcctgccaccatgcccagctaattttttgtatttttagtagagatggggtttcaccgtgttagccagatggtcttgatctcctgacctcgtgatcctcctgcctcagcctcccaaagtgctgggattacaggcgtgagccaccacgcctggcctaagaattatttcttttcatactcctgaataatgagtccccttttttctgcaccctcactgccgtgtctaaggtcttgatcttagcctttctgggaaaatttgggggctcataaagacatctgctccactctttgccttccagccgtctaccatctacaattcatactcattaaggattcaatagctgtattcagtcaatatgtttcttcctctaaaataatggcattttagtttcttatagttttgtgagggtgaagaagccctagatgttttctcttgcattattttcttcccttgccttggctttccgtttttattctccttcaaaaaagttttcatttttctctagatggtctcctaatgtgtctcctttcagacacatttgttagaatgatcttaacctgttctcccagacagcagagcttaacaaaaaagacca

SEQ ID NO: 59166 - DNA, 1168 bp, Homo sapiens
catcttgtatgattttgaataaatatattatctactcaaaaaattaactcttaaaaaataatcataggaatatggccctgctctctattttgaagaattattttaaatagtagattaaatttatgtttctacttggttttagatgatacgattacatatgaagaaaaataagatttactggatacatttgatgtaagaggctttatatatttctcaactataagacaaaaaacagtaattaataaacgttaattattgtctccacctcttcgtgggggaacagtatcccttgtttayttcatatatcattgaagactgggataaactactggaaaactgagtttgtaactgtttggaatataaaaattctttaattttctgctaggaagaacaaggggaaaaaaacctttttactccagaagtcattactgtactgggttacctgtatactaactttagtggaatatattaaatttatcaggcaacagaaaagaaatgttataaaaatctattttgtcaattctttttttaaaatacaaaagatgtaagcacattcaattcttcacagctacagaatcaattctccaagtaacagatttatattcacatttattaacaatttgatagattgttgccaggtttttaactaaatacagcctgtttgtatattctaggtatatttttatttcaaattcagccatctcacatatactttaaagtgagagggaaaaaagtcatattttagccaagaagaactacctatatgacattactataagtaagtgtatatattccgtttctgagaaaacggactaacagcttgaatatttaaacatatttgactctaaataattattacagaaaacaaataaaatataatattgttatgagactcatatcaagtattgcatccagatttcatgttggcaattccatatttataaattctttttttaaaaataagagacatgatagtaagttgtggtacattctaattgcaagacagaaagactccatccacaagagaaaactatataagccaagtcagaatttttagctgaatctttcagcatgcagctctgtaagattcatccccagtgatggttacattggtcatatttaggaaaacaaaaatcaaatactaatctcatttccaaggacatgcaaa

SEQ ID NO: 59167 - DNA, 2427 bp, Homo sapiens
atcctcgtctcaggactgcaatctcccacttgttcaggagattgataggaacgcttaatcagggaagcactgcctgcttctctgcaggggtccttccctgcaccagccattttcccatactttaaaggagggctagatgcttcagaacatattctccactaatgagaaagctctttatatcttataaagcacatccatattcagcacttaatttgttcctcaagatgaccctctggaggaggcaagaaatgatattattttcttttcactgattaggaaaatgacgttcacagtggtctgcattgtccaaggctatgtgacaaagtaagtggctgtcaaaataactcaagcttactgaaaatgagcatgttgcctttcactatgctggttccctactccacaggtgacttctatggctactactacttagcaatctcttcttccctaattagcaaaaagaactcttttctgtacttactctattctatgaaattgaagagagggagtacacaagtcaaatgaacaatctgacatagctttgagaatcagtttcagtgtcatctctgggaagctacatctagtatcctcaacccaaaactccccctctgctttttgtttccgtagcatcctgtgtatacatttacattgtatgtaaataatctatttgtgcatttgtccttttcccttagatgtaaggccattgagttcaaggaccatgtcttactcattcttgtattttctggtacctgaacatggtaaacacaagtgtttgatcgaatggctgattgaataagcaatgcagtcaacagtattaagagtaaagtggtatctaaaggcaatgcacattgattgtcattttactgaggagaactctgatcttacagagtgaagaggacatatttaaggtcagaaaaaataagacccaggagcagaattactcaagttctctgtccttccaaattaccctgttctgtaacctgtaaacataataaagcatgtcccaaactacattgctgcaggagatctactcctccagaagtacttccgaacatttcttggaaatgtttacaggttctgattatccagactatgagtaaagtctgctttttggtccaccttctgtggttccatggccactttgatcagctacttgttctctccccttagggattcctctaatcatggacgtggcccttctgccattccccaaatgttgaacacaaggttcaaaaacatttaccaagtacaagaagatagcaaaagaaaattggaaagccagaatgggaaaactgaatattggatattagacaacaatgcttcctggagcccacctgcaaatcacatcaggagagggttagggctgcctgtgtctctctgcggctcctgccttcccacactgttagtgcctgctcttcagaggcacacctgtcagatcttttccctgaggattagcctgatacccccaactctgatcttcagtactgcaagcagagacctaaaagaaacttttaatatagaaagggaaaatcttaggaaggtggatttcactccccacttgcatgactcattaagcaaaatctgtcaaggcaggtctggggactttgcattgacatttcttcaccagtattggctccccaaaggtcaaagagtaggtgcttacctgtgcatagccagaacattccaaagagtgaactcgcccagaagtgagagtggtatgcctcaaagaaaaattcttacttccttatttaactacagggaaaaaaaaaatcacagtaagcttagaacatacccattttgttccagtttcagtaaatcaaatattcaaatattcagccttagagcagttttttcaaaacttggggactacctgactaagtacagatagccaatggcaaatatttgtcatctgtgtgtattattartaataattaatatttattgagtgagtactatatgccagtgacggtgcttagcactttacatgcattctcttctttaatcctcagaaaagtttatggaaaggcacaatgacgcattcagggtgtggtttagggtgcggctggcttggcacccaaatcctaccatttatttttcctcttctctggagttcccagccaaaaagcatattcaccaaagaatcagcagccatatgggtaagtaagtgctgatgtttttaatgtctcttatgaaataggattagagaagaatgctgaagtttaggagagtgaagtctttgtaggagaagcagacctggtgctacccccgcctcagccttcagcttgactagaggctggaacaaatcacagtgttgtctgcttcctaaagtggaaccaataatgggggaaagggtcttgaaatgtgactttaagatattgccactatgcccagtgaactcaggttctggctaatagatgaacctaggaagga

SEQ ID NO: 59168 - DNA, 2427 bp, Homo sapiens
atcctcgtctcaggactgcaatctcccacttgttcaggagattgataggaacgcttaatcagggaagcactgcctgcttctctgcaggggtccttccctgcaccagccattttcccatactttaaaggagggctagatgcttcagaacatattctccactaatgagaaagctctttatatcttataaagcacatccatattcagcacttaatttgttcctcaagatgaccctctggaggaggcaagaaatgatattattttcttttcactgattaggaaaatgacgttcacagtggtctgcattgtccaaggctatgtgacaaagtaagtggctgtcaaaataactcaagcttactgaaaatgagcatgttgcctttcactatgctggttccctactccacaggtgacttctatggctactactacttagcaatctcttcttccctaattagcaaaaagaactcttttctgtacttactctattctatgaaattgaagagagggagtacacaagtcaaatgaacaatctgacatagctttgagaatcagtttcagtgtcatctctgggaagctacatctagtatcctcaacccaaaactccccctctgctttttgtttccgtagcatcctgtgtatacatttacattgtatgtaaataatctatttgtgcatttgtccttttcccttagatgtaaggccattgagttcaaggaccatgtcttactcattcttgtattttctggtacctgaacatggtaaacacaagtgtttgatcgaatggctgattgaataagcaatgcagtcaacagtattaagagtaaagtggtatctaaaggcaatgcacattgattgtcattttactgaggagaactctgatcttacagagtgaagaggacatatttaaggtcagaaaaaataagacccaggagcagaattactcaagttctctgtccttccaaattaccctgttctgtaacctgtaaacataataaagcatgtcccaaactacattgctgcaggagatctactcctccagaagtacttccgaacatttcttggaaatgtttacaggttctgattatccagactatgagtaaagtctgctttttggtccaccttctgtggttccatggccactttgatcagctacttgttctctccccttagggattcctctaatcatggacgtggcccttctgccattccccaaatgttgaacacaaggttcaaaaacatttaccaagtacaagaagatagcaaaagaaaattggaaagccagaatgggaaaactgaatattggatattagacaacaatgcttcctggagcccacctgcaaatcacatcaggagagggttagggctgcctgtgtctctctgcggctcctgccttcccacactgttagtgcctgctcttcagaggcacacctgtcagatcttttccctgaggattagcctgatacccccaactctgatcttcagtactgcaagcagagacctaaaagaaacttttaatatagaaagggaaaatcttaggaaggtggatttcactccccacttgcatgactcattaagcaaaatctgtcaaggcaggtctggggactttgcattgacatttcttcaccagtattggctccccaaaggtcaaagagtaggtgcttacctgtgcatagccagaacattccaaagagtgaactcgcccagaagtgagagtggtatgcctcaaagaaaaattcttacttccttatttaactacagggaaaaaaaaaatcacagtaagcttagaacatacccattttgttccagtttcagtaaatcaaatattcaaatattcagccttagagcagttttttcaaaacttggggactacctgactaagtacagatagccaatggcaaatatttgtcatctgtgtgtattattaataataattaatatttattgagtgagtactatatgccagkgacggtgcttagcactttacatgcattctcttctttaatcctcagaaaagtttatggaaaggcacaatgacgcattcagggtgtggtttagggtgcggctggcttggcacccaaatcctaccatttatttttcctcttctctggagttcccagccaaaaagcatattcaccaaagaatcagcagccatatgggtaagtaagtgctgatgtttttaatgtctcttatgaaataggattagagaagaatgctgaagtttaggagagtgaagtctttgtaggagaagcagacctggtgctacccccgcctcagccttcagcttgactagaggctggaacaaatcacagtgttgtctgcttcctaaagtggaaccaataatgggggaaagggtcttgaaatgtgactttaagatattgccactatgcccagtgaactcaggttctggctaatagatgaacctaggaagga

SEQ ID NO: 59169 - DNA, 2427 bp, Homo sapiens
atcctcgtctcaggactgcaatctcccacttgttcaggagattgataggaacgcttaatcagggaagcactgcctgcttctctgcaggggtccttccctgcaccagccattttcccatactttaaaggagggctagatgcttcagaacatattctccactaatgagaaagctctttatatcttataaagcacatccatattcagcacttaatttgttcctcaagatgaccctctggaggaggcaagaaatgatattattttcttttcactgattaggaaaatgacgttcacagtggtctgcattgtccaaggctatgtgacaaagtaagtggctgtcaaaataactcaagcttactgaaaatgagcatgttgcctttcactatgctggttccctactccacaggtgacttctatggctactactacttagcaatctcttcttccctaattagcaaaaagaactcttttctgtacttactctattctatgaaattgaagagagggagtacacaagtcaaatgaacaatctgacatagctttgagaatcagtttcagtgtcatctctgggaagctacatctagtatcctcaacccaaaactccccctctgctttttgtttccgtagcatcctgtgtatacatttacattgtatgtaaataatctatttgtgcatttgtccttttcccttagatgtaaggccattgagttcaaggaccatgtcttactcattcttgtattttctggtacctgaacatggtaaacacaagtgtttgatcgaatggctgattgaataagcaatgcagtcaacagtattaagagtaaagtggtatctaaaggcaatgcacattgattgtcattttactgaggagaactctgatcttacagagtgaagaggacatatttaaggtcagaaaaaataagacccaggagcagaattactcaagttctctgtccttccaaattaccctgttctgtaacctgtaaacataataaagcatgtcccaaactacattgctgcaggagatctactcctccagaagtacttccgaacatttcttggaaatgtttacaggttctgattatccagactatgagtaaagtctgctttttggtccaccttctgtggttccatggccactttgatcagctacttgttctctccccttagggattcctctaatcatggacgtggcccttctgccattccccaaatgttgaacacaaggttcaaaaacatttaccaagtacaagaagatagcaaaagaaaattggaaagccagaatgggaaaactgaatattggatattagacaacaatgcttcctggagcccacctgcaaatcacatcaggagagggttagggctgcctgtgtctctctgcggctcctgccttcccacactgttagtgcctgctcttcagaggcacacctgtcagatcttttccctgaggattagcctgatacccccaactctgatcttcagtactgcaagcagagacctaaaagaaacttttaatatagaaagggaaaatcttaggaaggtggatttcactccccacttgcatgactcattaagcaaaatctgtcaaggcaggtctggggactttgcattgacatttcttcaccagtattggctccccaaaggtcaaagagtaggtgcttacctgtgcatagccagaacattccaaagagtgaactcgcccagaagtgagagtggtatgcctcaaagaaaaattcttacttccttatttaactacagggaaaaaaaaaatcacagtaagcttagaacatacccattttgttccagtttcagtaaatcaaatattcaaatattcagccttagagcagttttttcaaaacttggggactacctgactaagtacagatagccaatggcaaatatttgtcatctgtgtgtattattaataataattaatatttattgagtgagtactatatgccagtgayggtgcttagcactttacatgcattctcttctttaatcctcagaaaagtttatggaaaggcacaatgacgcattcagggtgtggtttagggtgcggctggcttggcacccaaatcctaccatttatttttcctcttctctggagttcccagccaaaaagcatattcaccaaagaatcagcagccatatgggtaagtaagtgctgatgtttttaatgtctcttatgaaataggattagagaagaatgctgaagtttaggagagtgaagtctttgtaggagaagcagacctggtgctacccccgcctcagccttcagcttgactagaggctggaacaaatcacagtgttgtctgcttcctaaagtggaaccaataatgggggaaagggtcttgaaatgtgactttaagatattgccactatgcccagtgaactcaggttctggctaatagatgaacctaggaagga

SEQ ID NO: 59170 - DNA, 693 bp, Homo sapiens
tcctcattcccatcccagtgtatttgcaaacccttcccagttccagctgttggtgagttgcatcagaccatccctatgtttcagaaaaaaagatgccaaaaatgcaaatgaattgttctctgttaagtatacagctttacaaagaaccatttaaactagggctggtaatatatttttttaaaaaaaacctattccaaaatgtctccagtctcttaaagaatcactggaaaaaaaaatctctggttaagagattaagttggccatcttttttcagatgaacttgcttcctgttttactgagaatctggaaattcccaaacacagatttgcttatcttctttgcttgtactttcaagtttcttctccttccatagggcaagctacctgatggtactaagtcttggttttctctatttgtaaagtgggaatgataatatctacttcacagaattgttctgaggtggggtgtgtagatcagggttatcctttctctatggccccacctccatgccctggcttggacctcyaggagccatgtctgtggtacatgatcttgccctcctggccacagctgcttgatccaggtatgagcacctgacccaggacgagccaatcattgcctcattccgaaatttgaaacttacaatggagagtcttattttgtctggtgatgagcagagagggtgtgtgggat

SEQ ID NO: 59171 - DNA, 746 bp, Homo sapiens
gaagggaattctcagtggatcctgtccaatgcagtgctttcatgaaaaataaaatgctctgtgttttcagtmtacatacaaactacacaggaattcttatctcttatccaaagtctctggttacttaacaaatgtactaggctgaattctgaatagtaaacatcataacttaaacttccaagccagagaataacatcaggtttcttaatgcaattaaatactatttaagacagctgtgcgcggtggctcacacctgtaatcccggcactttgggaggctgaggcaggaggatcacgaggtcaggagttccagaccatcctggccaacatggtgaaacctcgtctctattaaaaatacaaaagttagctgggcatggtggtgtgcacctgtattcccagctactcaggaggctgaggcaggagaatctcttggacccgggaggcggaggttgcagtgagccgagatcaccccactgcactccagcctgggtgacagagcaagactccgtctcaaaaaacaaaaacaaaaactatttaagacaattaaaaataattttatttaacttaatacaaattaatttaaattaaagaaagaaatataacactcttgtaatggtttttcttctctaatttggtattgtatgccaactcaggctttgttcctcgggctgagctgttgcatataagaaaagtgagcttaattctgcatggacattgtgttggaaatctgtccttgtatgtgcaaga

SEQ ID NO: 59172 - DNA, 746 bp, Homo sapiens
gaagggaattctcagtggatcctgtccaatgcagtgctttcatgaaaaataaaatgctctgtgttttcagtatacatacaaactacacaggaattcttatctcttatccaaagtctctggttacttaacaaatgtactaggctgaattctgaatagtaaacatcataacttaaacttccaagccagagaataacatcaggtttcttaatgcaattaaatactatttaagacagctgtgcgcggtggctcacacctgtaatccyggcactttgggaggctgaggcaggaggatcacgaggtcaggagttccagaccatcctggccaacatggtgaaacctcgtctctattaaaaatacaaaagttagctgggcatggtggtgtgcacctgtattcccagctactcaggaggctgaggcaggagaatctcttggacccgggaggcggaggttgcagtgagccgagatcaccccactgcactccagcctgggtgacagagcaagactccgtctcaaaaaacaaaaacaaaaactatttaagacaattaaaaataattttatttaacttaatacaaattaatttaaattaaagaaagaaatataacactcttgtaatggtttttcttctctaatttggtattgtatgccaactcaggctttgttcctcgggctgagctgttgcatataagaaaagtgagcttaattctgcatggacattgtgttggaaatctgtccttgtatgtgcaaga

SEQ ID NO: 59173 - DNA, 653 bp, Homo sapiens
ccctgctttcccattagggctggatgccgcgggacctttgtttgagggaagtgcccccagcaatcgtctttctccagatgatgccaattttgtggatgccattcatacctttacccgggagcacatgggcctgagcgtgggcatcaaacagcccataggacactatgacttctatcccaacgggggctccttccagcctggctgccacttcctagagctctacagacatattgcccagcacggcttcaatggtgagaatgaagtcatgggccgggagcaccggcctacatttcaatggggcctctggaattcagcggaatctaccaacatacgggactcagggaagagttcagcaaggataggggcccagggtgtatggtcaccaagcccacccagagagaaggaatgctggagtgggcaagggtgcctgtcccccagcaggccactcctggcaacaggccaacgccacgccctgaggatgaacagagggcaccaacaggaaccyccacttctcactccagccccatgtgcccaggcaaaccctctcccggggtaccagctcttctgagagttgagtccggatgcctgtggttattcttccttctctggaagtttcctcgttccagggaccgcctctattctgaaccacatga

SEQ ID NO: 59174 - DNA, 653 bp, Homo sapiens
ccctgctttcccattagggctggatgccgcgggacctttgtttgagggaagtgcccccagcaatcgtctttctccagatgatgccaattttgtggatgccattcatacctttacccgggagcacatgggcctgagcgtgggcatcaaacagcccataggacactatgacttctatcccaacgggggctccttccagcctggctgccacttcctagagctctacagacatattgcccagcacggcttcaatggtgagaatgaagtcatgggccgggagcaccggcctacatttcaatggggcctctggaattcagcggaatctaccaacatacgggactcagggaagagttcagcaaggataggggcccagggtgtatggtcaccaagcccacccagagagaaggaatgctggagtgggcaagggtgcctgtcccccagcaggccactcctggcaacaggccaacgccacgccctgaggatgaacagagggcaccaacaggaacctccacttctcacyccagccccatgtgcccaggcaaaccctctcccggggtaccagctcttctgagagttgagtccggatgcctgtggttattcttccttctctggaagtttcctcgttccagggaccgcctctattctgaaccacatga

SEQ ID NO: 59175 - DNA, 710 bp, Homo sapiens
atcccggcagtgcccgggattttgcctgacactacatgactcagagggtctacttcccttagtttcagtcagttgtcacatcctgctcttgtcaaggggtctgccttgacaagcccacccttgcctgttctgtgtgctactgctaacctcctgtgggatgagaaccaaggtgatcctctgagttgaggctgctttgggttaaggggtgataacgtccttcttgccctgtgttccagccatcacccagaccataaaatgctcccacgagcgatcggtgcaccttttcatcgactccttgctgcacgccggcacgcagagcatggcctacccgtgtggtgacatgaacagcttcagccagggcctgtgcctgagctgcaagaagggccgctgcaacacgctgggctaccacgtccgccaggagccgcggagcaagagcaagaggctcttcctcgtaacgcgagcccagtcccccttcaaaggtgagtgtggagctggggagccttcagaagggcaggatgcagtcccctgtccaaagggctcagaagtccccttggcttctttcctggaggtgcttcagctctgctgttgcsgtgtttctgaaactgtgcaggctccagacagcaacgttgacacagcctttctcctgtcccaagagtgtggccaccttgccgccaagggctaggaggagaaacctcgaccatttctgaaac

SEQ ID NO: 59176 - DNA, 710 bp, Homo sapiens
atcccggcagtgcccgggattttgcctgacactacatgactcagagggtctacttcccttagtttcagtcagttgtcacatcctgctcttgtcaaggggtctgccttgacaagcccacccttgcctgttctgtgtgctactgctaacctcctgtgggatgagaaccaaggtgatcctctgagttgaggctgctttgggttaaggggtgataacgtccttcttgccctgtgttccagccatcacccagaccataaaatgctcccacgagcgatcggtgcaccttttcatcgactccttgctgcacgccggcacgcagagcatggcctacccgtgtggtgacatgaacagcttcagccagggcctgtgcctgagctgcaagaagggccgctgcaacacgctgggctaccacgtccgccaggagccgcggagcaagagcaagaggctcttcctcgtaacgcgagcccagtcccccttcaaaggtgagtgtggagctggggagccttcagaagggcaggatgcagtcccctgtccaaagggctcagaagtccccttggcttctttcctggaggtgcttcagctctgctgttgcggtgtttctgaaactgtgcaggctccagacagcaacgttgwcacagcctttctcctgtcccaagagtgtggccaccttgccgccaagggctaggaggagaaacctcgaccatttctgaaac

SEQ ID NO: 59177 - DNA, 710 bp, Homo sapiens
atcccggcagtgcccgggattttgcctgacactacatgactcagagggtctacttcccttagtttcagtcagttgtcacatcctgctcttgtcaaggggtctgccttgacaagcccacccttgcctgttctgtgtgctactgctaacctcctgtgggatgagaaccaaggtgatcctctgagttgaggctgctttgggttaaggggtgataacgtccttcttgccctgtgttccagccatcacccagaccataaaatgctcccacgagcgatcggtgcaccttttcatcgactccttgctgcacgccggcacgcagagcatggcctacccgtgtggtgacatgaacagcttcagccagggcctgtgcctgagctgcaagaagggccgctgcaacacgctgggctaccacgtccgccaggagccgcggagcaagagcaagaggctcttcctcgtaacgcgagcccagtcccccttcaaaggtgagtgtggagctggggagccttcagaagggcaggatgcagtcccctgtccaaagggctcagaagtccccttggcttctttcctggaggtgcttcagctctgctgttgcggtgtttctgaaactgtgcaggctccagacagcaacgttgacacagccyttctcctgtcccaagagtgtggccaccttgccgccaagggctaggaggagaaacctcgaccatttctgaaac

SEQ ID NO: 59178 - DNA, 1443 bp, Homo sapiens
gatccccccaggagagacacagggaccagttcctaggtgctcagagaaaccggagcggaagagttgatccactgggatcaacttatagggttcggtggctgactggacatagtttctaaggaagaaatgggaatctggtttagagatagaggagactattggttcttttcaggttgatggtagaagaattatgaaagctgcttcagggaaacacagatcttccctttcctgttacatactcattcctaaagaatcctagtttagggcctgggagattggacacatagttaacagagacacaagacttgtaacccaggagtctggtggttcccactatgtgtgagtctgtttttgagccagcataacattaaagtagactcagcctcttttggctctacccccaaagaatctgctgtccccaaaggcattgtttagaggcaggcgacaaagtacaaaattcttaggggtggtaaggaattttaagagctgcctctgagaacacttgctcaaatcaggatcgrtgtgcatgttccctggtgttctcgccctgccccagcctgtcactggcaggcactgtctctccattcttcccaccccagcctggcctctcttgtgccgagtaatcctgctctgcctgacacgtgcttttccatgctcagcgaagcaaggccgttgacaggcccagcctccttgggagatggtttaatgtgttgcttttgctactcaacaatgccctgtggagtattgctcactcctatttgtataaacaaccccctcatgtatctcttccaagcacgcacagcattctttccctggcagttttggttgtaactttgtctctttcagtacagaagctgaagtgggtgtggctgggaaggcctgaagttactgcagagctaggatttgaacctgggttttgtgactcccagtctaatgcttcttccacagtatcagatggtgtgggctgcaggtctctgcaggtgagggcttctggctcagctgctggggagtaagcaccaagtaggcacttgggccaggtcagtgtttctcaatgttttatcatgattgcccccctaaagagtctttctagacatttttaccccctaattgtctacccgtgaagttttagcaccagggatatactgcaccctgtttgtgtactgtatatatatgtgtgtgtgtatatatatatatctgctttataataaaaacttttttcatcacccacctcaagatacaatttcaccctcttgggggcaatatggcccctattgataacgcaggggctcaaagtgattctcagagtgagggcctcggaccagcagcggcaacatcaccaggaatttgttagaaatgcagattgtaagtcccgctctagacctattgaaccacatccttgcgaggtggggtccagctggctgtgacttaacaaacccttccgag

SEQ ID NO: 59179 - DNA, 1443 bp, Homo sapiens
gatccccccaggagagacacagggaccagttcctaggtgctcagagaaaccggagcggaagagttgatccactgggatcaacttatagggttcggtggctgactggacatagtttctaaggaagaaatgggaatctggtttagagatagaggagactattggttcttttcaggttgatggtagaagaattatgaaagctgcttcagggaaacacagatcttccctttcctgttacatactcattcctaaagaatcctagtttagggcctgggagattggacacatagttaacagagacacaagacttgtaacccaggagtctggtggttcccactatgtgtgagtctgtttttgagccagcataacattaaagtagactcagcctcttttggctctacccccaaagaatctgctgtccccaaaggcattgtttagaggcaggcgacaaagtacaaaattcttaggggtggtaaggaattttaagagctgcctctgagaacacttgctcaaatcaggatcgatgtgcatgttccctggtgttcwcgccctgccccagcctgtcactggcaggcactgtctctccattcttcccaccccagcctggcctctcttgtgccgagtaatcctgctctgcctgacacgtgcttttccatgctcagcgaagcaaggccgttgacaggcccagcctccttgggagatggtttaatgtgttgcttttgctactcaacaatgccctgtggagtattgctcactcctatttgtataaacaaccccctcatgtatctcttccaagcacgcacagcattctttccctggcagttttggttgtaactttgtctctttcagtacagaagctgaagtgggtgtggctgggaaggcctgaagttactgcagagctaggatttgaacctgggttttgtgactcccagtctaatgcttcttccacagtatcagatggtgtgggctgcaggtctctgcaggtgagggcttctggctcagctgctggggagtaagcaccaagtaggcacttgggccaggtcagtgtttctcaatgttttatcatgattgcccccctaaagagtctttctagacatttttaccccctaattgtctacccgtgaagttttagcaccagggatatactgcaccctgtttgtgtactgtatatatatgtgtgtgtgtatatatatatatctgctttataataaaaacttttttcatcacccacctcaagatacaatttcaccctcttgggggcaatatggcccctattgataacgcaggggctcaaagtgattctcagagtgagggcctcggaccagcagcggcaacatcaccaggaatttgttagaaatgcagattgtaagtcccgctctagacctattgaaccacatccttgcgaggtggggtccagctggctgtgacttaacaaacccttccgag

SEQ ID NO: 59180 - DNA, 1443 bp, Homo sapiens
gatccccccaggagagacacagggaccagttcctaggtgctcagagaaaccggagcggaagagttgatccactgggatcaacttatagggttcggtggctgactggacatagtttctaaggaagaaatgggaatctggtttagagatagaggagactattggttcttttcaggttgatggtagaagaattatgaaagctgcttcagggaaacacagatcttccctttcctgttacatactcattcctaaagaatcctagtttagggcctgggagattggacacatagttaacagagacacaagacttgtaacccaggagtctggtggttcccactatgtgtgagtctgtttttgagccagcataacattaaagtagactcagcctcttttggctctacccccaaagaatctgctgtccccaaaggcattgtttagaggcaggcgacaaagtacaaaattcttaggggtggtaaggaattttaagagctgcctctgagaacacttgctcaaatcaggatcgatgtgcatgttccctggtgttctcrccctgccccagcctgtcactggcaggcactgtctctccattcttcccaccccagcctggcctctcttgtgccgagtaatcctgctctgcctgacacgtgcttttccatgctcagcgaagcaaggccgttgacaggcccagcctccttgggagatggtttaatgtgttgcttttgctactcaacaatgccctgtggagtattgctcactcctatttgtataaacaaccccctcatgtatctcttccaagcacgcacagcattctttccctggcagttttggttgtaactttgtctctttcagtacagaagctgaagtgggtgtggctgggaaggcctgaagttactgcagagctaggatttgaacctgggttttgtgactcccagtctaatgcttcttccacagtatcagatggtgtgggctgcaggtctctgcaggtgagggcttctggctcagctgctggggagtaagcaccaagtaggcacttgggccaggtcagtgtttctcaatgttttatcatgattgcccccctaaagagtctttctagacatttttaccccctaattgtctacccgtgaagttttagcaccagggatatactgcaccctgtttgtgtactgtatatatatgtgtgtgtgtatatatatatatctgctttataataaaaacttttttcatcacccacctcaagatacaatttcaccctcttgggggcaatatggcccctattgataacgcaggggctcaaagtgattctcagagtgagggcctcggaccagcagcggcaacatcaccaggaatttgttagaaatgcagattgtaagtcccgctctagacctattgaaccacatccttgcgaggtggggtccagctggctgtgacttaacaaacccttccgag

SEQ ID NO: 59181 - DNA, 1443 bp, Homo sapiens
gatccccccaggagagacacagggaccagttcctaggtgctcagagaaaccggagcggaagagttgatccactgggatcaacttatagggttcggtggctgactggacatagtttctaaggaagaaatgggaatctggtttagagatagaggagactattggttcttttcaggttgatggtagaagaattatgaaagctgcttcagggaaacacagatcttccctttcctgttacatactcattcctaaagaatcctagtttagggcctgggagattggacacatagttaacagagacacaagacttgtaacccaggagtctggtggttcccactatgtgtgagtctgtttttgagccagcataacattaaagtagactcagcctcttttggctctacccccaaagaatctgctgtccccaaaggcattgtttagaggcaggcgacaaagtacaaaattcttaggggtggtaaggaattttaagagctgcctctgagaacacttgctcaaatcaggatcgatgtgcatgttccctggtgttctcgccctgccccagcctgtcactggcaggcactgtctctccattcttcccaccccagcctggcctctcttgtgccgagtaatcctgctctgcctgacacgtgcttttccatgctcagcgaagcaaggccgttgacaggcccagcctccttgggagatggtttaatgtgttgcttttgctactcaacaatgccctgtggagtattgctcactcctatttgtataaacaaccccctcatgtatctcttccaagcacgcacagcattctttccctggcagttttggttgtaactttgtctctttcagtacagaagctgaagtgggtgtggctgggaaggcctgaagttactgcagagctaggatttgaacctgggttttgtgactcccagtctaatgcttcttccacagtatcagatggtgtgggctgcaggtctctgcaggtgagggcttctggctcagctgctggggagtaagcaccaagtaggcacttgggccaggtcagtgtttctcaatgttttatcatgattgcccccctaaagagtctttctagacatttttaccccctaattgtctacccgtgaagttttagcaccagggatatactgcaccctgtttgtgtactgtatatatatgtgtgtgtgtatatatatatatctgctttataataaaaacttttttcatcacccacctcaagatacaatttcaccctcttgggggcaatatggcccctattgataacgcaggggctcaaagtgattctcagagtgagggcctcggaccagcagyggcaacatcaccaggaatttgttagaaatgcagattgtaagtcccgctctagacctattgaaccacatccttgcgaggtggggtccagctggctgtgacttaacaaacccttccgag

SEQ ID NO: 59182 - DNA, 713 bp, Homo sapiens
aaaaatattcatgtgttacttaaatttatctgaaatttatttctacagaatgattttagaaaaatatccccttctttaaagaatctaaaacagagcctgttctatttgatccataatgctctatgtgtcctattcaaacccttgtattttgactttctcttctagtctcagtggttaattaccattccatcccaagaggaaaataattttcttatgatccagttttaataacatattttactccatggaatgccaacatttatgcttgagatatttttgtaacaaaagaaaatagctaaaggtgttgtcatcacttgaacctaatggaatttgcgtttttttttttttttgacatgactctaagaattcagtcagtgtgacaaatcccatatcctccattgtctatgctatgtttcaaaaaaaggtaaggtgttctcaaatctggtaaactaatttattactttgaaaaaacaaaacaaacctcttaacaactagaaagtaygtgtaagcgtgtatgtatgtatgtgtgttttatcagaatgaaattattttcctgttaccaattaatgatccatacaagttttagtttaaactaacttttcctgattatttttgaatgaatcactgaaatacttatgtaggtaaattgaaattccttagtctttgatcttcttaagcttaattgcaatcttcatggcaaatttgcgtattct

SEQ ID NO: 59183 - DNA, 354 bp, Homo sapiens
ggtggtagctgttaaaaggttttgtgccctccacacacctccttaatggtcagactatttggaacctgaacaaacccatctctgaaaactgttttgcttttttttctcctkcattatgaggtttatttacattcaaaattatagagagacactggagaaataggatgcctattgatttatttccaaacttagcacaggatcggttaatgcatagttgacattcatttatgattaagtttgctacagcattttaagaccaagacaataaatctgccttagaatagtcaagaatactgatgttttgagctgtggttaggtaaaagaatgtaaaaaaatacactctcaaatggatcc

SEQ ID NO: 59184 - DNA, 850 bp, Homo sapiens
aggaaatgttccctgaagccccatcagaccaagggcttccacactgagctctcactgctccagaactctccatcagtcccaaaactaacagcatgagaactcragtatgtattagaattctgagtcatttttcacatacagtgtgatgtcactactttatctttggtgatagattgagtaagaacacaatagtgccaaatgaacctctctcattattataccagctataacttatggagtactcatatgctaggcattgtactaaatcatgtacatttaaaaaaaatccttataacaacataaggtggatcttattgtcccattttacaaaggagaaaagtaagataaattgtataaagttatcaggtaatttgggaaggagcctacattcaaaccttggtctgacaccaaagctgatgctctaaatgactatttgtttttaaagtagagcttcctataaatagcaaaataatatgctttgcttttcctggcttttctcttggcagcatcaccagaatgtaagtagaataaatctagaatttttttttttttttttagagtctcgctctgttgcccaggctggagtgcagtggtacgatctcagctgactgtagcctccacctcccaggttcaagcaattctcctacctcagcctcctgagtagctgggactataagcacatgccaccacacccggctcatttttgtatttttagtagagacgaggtttcaccatgttggccaggctggtcttgaactcctgacctcaggtgatccatccaccacggcctcccaaagtgctgggattacaggtatgagccaccgtgtctggcctagaaatttatttattt

SEQ ID NO: 59185 - DNA, 850 bp, Homo sapiens
aggaaatgttccctgaagccccatcagaccaagggcttccacactgagctctcactgctccagaactctccatcagtcccaaaactaacagcatgagaactcgagtatgtattagaattctgagtcatttttcacatacagtgtgatgtcactactttatctttggtgatagattgagtaagaacacaatagtgccaaatgaacctctctcattattataccwgctataacttatggagtactcatatgctaggcattgtactaaatcatgtacatttaaaaaaaatccttataacaacataaggtggatcttattgtcccattttacaaaggagaaaagtaagataaattgtataaagttatcaggtaatttgggaaggagcctacattcaaaccttggtctgacaccaaagctgatgctctaaatgactatttgtttttaaagtagagcttcctataaatagcaaaataatatgctttgcttttcctggcttttctcttggcagcatcaccagaatgtaagtagaataaatctagaatttttttttttttttttagagtctcgctctgttgcccaggctggagtgcagtggtacgatctcagctgactgtagcctccacctcccaggttcaagcaattctcctacctcagcctcctgagtagctgggactataagcacatgccaccacacccggctcatttttgtatttttagtagagacgaggtttcaccatgttggccaggctggtcttgaactcctgacctcaggtgatccatccaccacggcctcccaaagtgctgggattacaggtatgagccaccgtgtctggcctagaaatttatttattt

SEQ ID NO: 59186 - DNA, 850 bp, Homo sapiens
aggaaatgttccctgaagccccatcagaccaagggcttccacactgagctctcactgctccagaactctccatcagtcccaaaactaacagcatgagaactcgagtatgtattagaattctgagtcatttttcacatacagtgtgatgtcactactttatctttggtgatagattgagtaagaacacaatagtgccaaatgaacctctctcattattataccagctataacttatggagtactcatatgctaggcattgtactaaatcatgtacatttaaaaaaaatccttataacaacataaggtggatcttattktcccattttacaaaggagaaaagtaagataaattgtataaagttatcaggtaatttgggaaggagcctacattcaaaccttggtctgacaccaaagctgatgctctaaatgactatttgtttttaaagtagagcttcctataaatagcaaaataatatgctttgcttttcctggcttttctcttggcagcatcaccagaatgtaagtagaataaatctagaatttttttttttttttttagagtctcgctctgttgcccaggctggagtgcagtggtacgatctcagctgactgtagcctccacctcccaggttcaagcaattctcctacctcagcctcctgagtagctgggactataagcacatgccaccacacccggctcatttttgtatttttagtagagacgaggtttcaccatgttggccaggctggtcttgaactcctgacctcaggtgatccatccaccacggcctcccaaagtgctgggattacaggtatgagccaccgtgtctggcctagaaatttatttattt

SEQ ID NO: 59187 - DNA, 850 bp, Homo sapiens
aggaaatgttccctgaagccccatcagaccaagggcttccacactgagctctcactgctccagaactctccatcagtcccaaaactaacagcatgagaactcgagtatgtattagaattctgagtcatttttcacatacagtgtgatgtcactactttatctttggtgatagattgagtaagaacacaatagtgccaaatgaacctctctcattattataccagctataacttatggagtactcatatgctaggcattgtactaaatcatgtacatttaaaaaaaatccttataacaacataaggtggatcttattgtcccattttacaaaggagaaaagtaagataaattgtataaagttatcaggtaatttgggaaggagcctayattcaaaccttggtctgacaccaaagctgatgctctaaatgactatttgtttttaaagtagagcttcctataaatagcaaaataatatgctttgcttttcctggcttttctcttggcagcatcaccagaatgtaagtagaataaatctagaatttttttttttttttttagagtctcgctctgttgcccaggctggagtgcagtggtacgatctcagctgactgtagcctccacctcccaggttcaagcaattctcctacctcagcctcctgagtagctgggactataagcacatgccaccacacccggctcatttttgtatttttagtagagacgaggtttcaccatgttggccaggctggtcttgaactcctgacctcaggtgatccatccaccacggcctcccaaagtgctgggattacaggtatgagccaccgtgtctggcctagaaatttatttattt

SEQ ID NO: 59188 - DNA, 1532 bp, Homo sapiens
tttcaagaaattctaacaagattccagcaatctctgaaatgcttctacctattggaaaagtgggtttggtgggagcgatttaatgaagactaaaagtatgatttaggaaatcattttatgacatcacatttttaggatctgaacagtctaaaggttttttgaaagaatccaatgatatggctagacaatctctgtaaatggagccaccgctcaaaacataaaagaagagagcaaggccgggtgcggtggctcatgcttataatcacagcactttggggggatgaggcaggcggatcatgaggtcaagagattgagaccatcctggccaacatggtgaaaccccatgttttgtattttgtaaaaatacaaaaattagctgggcatggaggcgcgtgcctgtagtcccagctactcaggaggctgaggtaggagaatcgcttgaacccgggaaggggaggttgtagtgagccaagatcgtgccactgcactccagcctggtaacagagtaagactccatctcaaaaaaaaaaaaaaaaaaaagaaaagaggagagcaaattcctatacaagcaacatttatgatcatcttcttgcctttccagtaacctttaaaatgaccttccctaacatgcaactgattcctacgaatatctttcatgaagtggcttttttttcccccatacagtcaggcaaattaaaatctactacagaaaaatgcttgtcattcagtttctcatgcctaattaagagatttcttagggagaataaatatgatgatcacacacataaatatttgggatccttgaaacatccaggcattatgatgctgatgctatataaataacaaatttaattaatagtggaattataaggggaaaaataattcaagacaactgctagtgcattatctgtaytgcaaattttctgtgcttgtgaggaaaacactcactgttgccatcaacactgctaggagcaattcgaagaaggtgggctgggacttttgccatgctacttctagaagcccgtcaataggtgtgacagttaatttacagaatggcctgaaatgaatggacatttatagttttctgtttgtgttttgtctcagaagggtaaatacaaggcctacttaaccggagtactttataggtatatatgtatatacacctatatatatatacacacacacacctatacatatatacacacacacctatatatatacacacctatacatatacctatatatatatatatatacacctatatatatatacctacatatatatatagatatatatttgtttttcttttcttttctttttttttgagacagggtctcattctgttgtccaagttggagtgcagtggcacgatcaaagctcactgcagcctcaaactcctgggctcaagcaatcttcctgcctcagcctcccaagtggctgggaccatgagcacacaccaccatgcctggctaatttttgtattttttttgtagagacaggggtctcactgtcttgcccaggctgatcttga

SEQ ID NO: 59189 - DNA, 1532 bp, Homo sapiens
tttcaagaaattctaacaagattccagcaatctctgaaatgcttctacctattggaaaagtgggtttggtgggagcgatttaatgaagactaaaagtatgatttaggaaatcattttatgacatcacatttttaggatctgaacagtctaaaggttttttgaaagaatccaatgatatggctagacaatctctgtaaatggagccaccgctcaaaacataaaagaagagagcaaggccgggtgcggtggctcatgcttataatcacagcactttggggggatgaggcaggcggatcatgaggtcaagagattgagaccatcctggccaacatggtgaaaccccatgttttgtattttgtaaaaatacaaaaattagctgggcatggaggcgcgtgcctgtagtcccagctactcaggaggctgaggtaggagaatcgcttgaacccgggaaggggaggttgtagtgagccaagatcgtgccactgcactccagcctggtaacagagtaagactccatctcaaaaaaaaaaaaaaaaaaaagaaaagaggagagcaaattcctatacaagcaacatttatgatcatcttcttgcctttccagtaacctttaaaatgaccttccctaacatgcaactgattcctacgaatatctttcatgaagtggcttttttttcccccatacagtcaggcaaattaaaatctactacagaaaaatgcttgtcattcagtttctcatgcctaattaagagatttcttagggagaataaatatgatgatcacacacataaatatttgggatccttgaaacatccaggcattatgatgctgatgctatataaataacaaatttaattaatagtggaattataaggggaaaaataattcaagacaactgctagtgcattatctgtattgcaaattttctgtgcttgtgaggaaaacactcactgttgccatcaacactgctaggagcaattcgaagaaggtgggctgggacttttgccatgctacttctagaagcccgtcaataggtgtgacagttaatttacagaatggcctgaaatgaatggacatttatagttttctgtttgtgttttgtctcagaagggtaaatacaaggcctacttaaccggagtactttataggtatatatgtatatacacctatatatatatacacacacacacctatacatatatacacacacacctatatatatacacacctatacatatacctmtatatatatatatatacacctatatatatatacctacatatatatatagatatatatttgtttttcttttcttttctttttttttgagacagggtctcattctgttgtccaagttggagtgcagtggcacgatcaaagctcactgcagcctcaaactcctgggctcaagcaatcttcctgcctcagcctcccaagtggctgggaccatgagcacacaccaccatgcctggctaatttttgtattttttttgtagagacaggggtctcactgtcttgcccaggctgatcttga

SEQ ID NO: 59190 - DNA, 1532 bp, Homo sapiens
tttcaagaaattctaacaagattccagcaatctctgaaatgcttctacctattggaaaagtgggtttggtgggagcgatttaatgaagactaaaagtatgatttaggaaatcattttatgacatcacatttttaggatctgaacagtctaaaggttttttgaaagaatccaatgatatggctagacaatctctgtaaatggagccaccgctcaaaacataaaagaagagagcaaggccgggtgcggtggctcatgcttataatcacagcactttggggggatgaggcaggcggatcatgaggtcaagagattgagaccatcctggccaacatggtgaaaccccatgttttgtattttgtaaaaatacaaaaattagctgggcatggaggcgcgtgcctgtagtcccagctactcaggaggctgaggtaggagaatcgcttgaacccgggaaggggaggttgtagtgagccaagatcgtgccactgcactccagcctggtaacagagtaagactccatctcaaaaaaaaaaaaaaaaaaaagaaaagaggagagcaaattcctatacaagcaacatttatgatcatcttcttgcctttccagtaacctttaaaatgaccttccctaacatgcaactgattcctacgaatatctttcatgaagtggcttttttttcccccatacagtcaggcaaattaaaatctactacagaaaaatgcttgtcattcagtttctcatgcctaattaagagatttcttagggagaataaatatgatgatcacacacataaatatttgggatccttgaaacatccaggcattatgatgctgatgctatataaataacaaatttaattaatagtggaattataaggggaaaaataattcaagacaactgctagtgcattatctgtattgcaaattttctgtgcttgtgaggaaaacactcactgttgccatcaacactgctaggagcaattcgaagaaggtgggctgggacttttgccatgctacttctagaagcccgtcaataggtgtgacagttaatttacagaatggcctgaaatgaatggacatttatagttttctgtttgtgttttgtctcagaagggtaaatacaaggcctacttaaccggagtactttataggtatatatgtatatacacctatatatatatacacacacacacctatacatatatacacacacacctatatatatacacacctatacatatacctatatatatatatatayacacctatatatatatacctacatatatatatagatatatatttgtttttcttttcttttctttttttttgagacagggtctcattctgttgtccaagttggagtgcagtggcacgatcaaagctcactgcagcctcaaactcctgggctcaagcaatcttcctgcctcagcctcccaagtggctgggaccatgagcacacaccaccatgcctggctaatttttgtattttttttgtagagacaggggtctcactgtcttgcccaggctgatcttga

SEQ ID NO: 59191 - DNA, 636 bp, Homo sapiens
agctctagaagctttttacagttataaacacttactgaatatcagctacatgcgtgccaggtactgtgctatgccatggataaataaggataccctattctcataaaacgtcccaccctacaggaaacagaaccctaacatcagaagcaaagcaaccacataccccactgtcaactttattttcaaatgatgcctctgctcttttaataatatcgccagtgattttcaacaagttaatcattgtaaagatattgggaaaattaaataggcatatggaatgttctcatcttccctaaaataacaatacaaacaaagcataaaattaactctttaattttttttccaatccctgtggtgtaagtgacaggctcttttatatgcaaagttatcaaaggtcaaacgtctaagcagtaacacttcagagggtttctgatagctcactatctcgcttccaaagcaaaagcattgctgagaactggcatggaaacttttctcttttcttttattgcctttttgttgtcacagaagttttttaaaagggaaattcctctcaytctcaagagggattcatccgaaatacacataaccaatgcatatgtagtactctggatttcattcattagagcaaaaatggga

SEQ ID NO: 59192 - DNA, 850 bp, Homo sapiens
cttatataaaatattggaagtctcaaattttgtagttactcactatttcggcttgcaagtattagattcctgtaagaggaggtatatggagactatgttcccagcaacagatctgatctccagttaaagaaattgaactaagttcacctgctacagcctgctctgctccctcttggctttcaggcttccctaatagctttcacatacaacatagagaaagacgtatgaagtttttagtcgtaagaagcaatgtcttttttttttcattactgtctcttctagtgtaggtatgcagcccattattcttgagtggcatcatattctaacttgagataaaattaagattatttaacttgcccctttaaaagtatattttaaacacatgctgttttgtccgtgattattttcatgcttcaaaagcagggagtgatcagaaaagaaaatatttgatcttcacggaatttcaaggttcattcattccacaaatatttattgagcacctactgtggataagagctgagaaataatcatgaccaattttaaagaaaaccctactctcttagagctctttggagcatggcatatgtgacgaactaaaagaacaaagaaaatggcatggagagaacgaggttcctcctggtaaagatgagaccagaaagggaggttagagggacactaaacggggctgtgyaagccatgctgctcgttaggcttagtctttttaaggcagtgataataaccgcattcgtgatctattgctgcaggacaaattactccaaaacttaagtgatttaaacaacacgtttttcatctcacagttttagtcaggaatctgggcatcccttagtca

SEQ ID NO: 59193 - DNA, 850 bp, Homo sapiens
cttatataaaatattggaagtctcaaattttgtagttactcactatttcggcttgcaagtattagattcctgtaagaggaggtatatggagactatgttcccagcaacagatctgatctccagttaaagaaattgaactaagttcacctgctacagcctgctctgctccctcttggctttcaggcttccctaatagctttcacatacaacatagagaaagacgtatgaagtttttagtcgtaagaagcaatgtcttttttttttcattactgtctcttctagtgtaggtatgcagcccattattcttgagtggcatcatattctaacttgagataaaattaagattatttaacttgcccctttaaaagtatattttaaacacatgctgttttgtccgtgattattttcatgcttcaaaagcagggagtgatcagaaaagaaaatatttgatcttcacggaatttcaaggttcattcattccacaaatatttattgagcacctactgtggataagagctgagaaataatcatgaccaattttaaagaaaaccctactctcttagagctctttggagcatggcatatgtgacgaactaaaagaacaaagaaaatggcatggagagaacgaggttcctcctggtaaagatgagaccagaaagggaggttagagggacactaaacggggctgtgcaagccatgctgctcgttaggcttagtctttttaaggcagtgataataacygcattcgtgatctattgctgcaggacaaattactccaaaacttaagtgatttaaacaacacgtttttcatctcacagttttagtcaggaatctgggcatcccttagtca

SEQ ID NO: 59194 - DNA, 997 bp, Homo sapiens
ttttaaataataaaatatattacgtaattaaataattaattattatttatttaattaataattattaacaatttaatagttatattttctaaactactacttttttattgtggcttctagaaaatgttaagtgatatctgtggccacattttattttcattggacaatatggccctagattacagttcagtayacccatagctgcagattttgagtgggatctcagactgaatggagggtgaaggcactttaggtaaaatagtgagaacacagatatagagatggagaatcatatgctttagagaagtggaggctaaatgtcttatagaaaatgaaacagtggaagaacttgagaatcacattgtgaaatactgattataacaaagtggaacaaatgctatatttcagctgagaaaacaggaaaacaggactatagtcttctgatactagcttgtgtgaatttggacagttctcagtctctgttgcagtcttcctctctctttcttgttttcccctttggtaaaatgaggggctaaaccagaagatcttgaaggtccttctctttctagcttgcatcgtctaggtctttgaggggccaggttttgcctgtgtgaagagtgtgggggtgtgtacatgtagacacaagcatgtctgagagcccatcacagtcaaagctgggctttagggaggtccatctaacacctcagagcaggttgatgtggagtaaaatgagactggaaacaggactgagcagaactgaaccaaactgaaataatcagctgaaatcaacttgacttctatgcttaccaggagggcaaagtgaagcaccacccatacaacgccaagcgacgtcaccaggagatcgtatcggtttcttctgctttgccagaagccagcaggcgacattgctatgatcttcatggtaacctggagaaaaagcaaagaagaaaataaacagagagagtgtttagtacatatttaaatgtattaacttgag

SEQ ID NO: 59195 - DNA, 997 bp, Homo sapiens
ttttaaataataaaatatattacgtaattaaataattaattattatttatttaattaataattattaacaatttaatagttatattttctaaactactacttttttattgtggcttctagaaaatgttaagtgatatctgtggccacattttattttcattggacaatatggccctagattacagttcagtatacccatagctgcagattttgagtgggatctcagactgaatggagggtgaaggcactttaggtaaaatagtgagaacacagatatagagatggagaatcatatgctttagagaagtggaggctaaatgtcttatagaaaatgaaacagtggaagmacttgagaatcacattgtgaaatactgattataacaaagtggaacaaatgctatatttcagctgagaaaacaggaaaacaggactatagtcttctgatactagcttgtgtgaatttggacagttctcagtctctgttgcagtcttcctctctctttcttgttttcccctttggtaaaatgaggggctaaaccagaagatcttgaaggtccttctctttctagcttgcatcgtctaggtctttgaggggccaggttttgcctgtgtgaagagtgtgggggtgtgtacatgtagacacaagcatgtctgagagcccatcacagtcaaagctgggctttagggaggtccatctaacacctcagagcaggttgatgtggagtaaaatgagactggaaacaggactgagcagaactgaaccaaactgaaataatcagctgaaatcaacttgacttctatgcttaccaggagggcaaagtgaagcaccacccatacaacgccaagcgacgtcaccaggagatcgtatcggtttcttctgctttgccagaagccagcaggcgacattgctatgatcttcatggtaacctggagaaaaagcaaagaagaaaataaacagagagagtgtttagtacatatttaaatgtattaacttgag

SEQ ID NO: 59196 - DNA, 2008 bp, Homo sapiens
agttgagcttttaatatatttataacagggctttataatctaacaaaccttgatgttaatcaaaactagactttgtaagtattaaaagaacttgtaaatgatgagatttctgaaagagtgaagataataattaaataatctcaagtttcacaatttatttgggggtagaaatgttttataacactttgtagaaagtcaatatccaaaaaaataaattcattttctattggtttagcttcgccctttggcctcagagttgtagctctttttgaataggagcacttagttttcacaggtgcatttcctccggcagattcatatgcctcataaatgctttatatagctcataaatgcagactttcaatcctacaggtactgctgatctggaagttttattttatctttcaggctgatgaaaatgacacatccttgttgggagatgctactatgaatggcagcaacattggtataaaaagaggagagtgatcctgatgagaaaagagccaggaaaggaactgtgaagtagaagtccacagggagagaggaagctgctaaccaggagctgcaggggtggagagattcacagtgagaacccagaggagtgctgttgcgtgagaaaacagagtcaggaaatgggatcacgaatcaagtgaaaaaggaaccaggctgaaaacacacactgtatatttagaattccttatgatgatgcgtattgattctcagtacagtctaggtgctttcacataacaggctcgtgcaattcaggaaaaaaaaatgttaaaagctggtggatattttcaaaatatctattacatcgaaagcagatttttctggaaatgtagatatactaataaacacaagtaaatgcttattatatatgtggtgaaacagaaacaacatgcataatatttctcagtatagagaagtaggattagaagtagggaaaggatcaaagaagagacaagataaggatttgtttttacagtccaggaagaattaaatctaaatccggtaatgggtgcaggcagtagagatggggcaaaggattgaggaagattttgaatatgaaattccatatttagtgcttaatgcacaccagaacttttccaagagttttacacatatttttttcactcagttctcacaaggatctaataaagtagatactttaattatcacttttttttttacagaaaagggaatgggtttgaagagcttaagctaaatcatatagctgcaaagtgttagagccaagattttagggccttcatgtatggctttgtcattcattcattccacaagagaagctggcaatagtttcagttgggctgaaatccagctcatgtccactaactaagccttgttgcacctgtcacttaaacaaatgaagcctcttctttaaatacctttaagtgaaggtatttaaagatatccttgggctaatgacaaccctgtaggctatggacccaggcaatttgacaccagattctgtattataaatgccatgctaaatacactatatatgggaaataaaggagtgtacggaatcaaagatgattcccaagtttctgttttaagcaattggttacatgttagtgctatttactgttaaaagtgaatagttcaaaatttggctgtggttattatgcaaatgatattttagaaattgaatacatacttggactatgagttttaatatattttcatcctatgtttaccaaatcccagtaggatatgaaaaaaatgacttcattctttgcaaacttgcttaatgtcctagaggctgactcgcagggataatattaagcattggctctggmatctgggtgagacccgcaaacgggaagcactggagagagacagaaggagggaggagaggaacatcagggcatttattttctcagctggaaacatccctcaaccaaaatgtagagctcctgccatacagccctttccactcacccccaaccttcttgtgttcctcctcttgccttttcatgagtaagaa

SEQ ID NO: 59197 - DNA, 1262 bp, Homo sapiens
caggtagggaggggagggtatgaggtcaaaggcccagtgcgaggtggagacagctctgccgacaccctgcttggcaaataatgcttgggctgggtttcaagccccatccatgcctgaggccatgagctgcctacacaatgtgtggaattggaggcgggggtgccctgaatagccccacatcaatttacctaaaaaggaaagacggaagtcacttttccctaggccacggtggctttggcttcaatgggattgccgacagcctctgggcacacaagttccatttctgaatccccactacctcccactccttccacgcagtcccttgcttctatacaaagggctcccagcatctcacatgtttgcaagtgaccacagtgatcctgctggctccccagggcatcatttttctttgccacttccaaagcttgccagcatcactgaaagcatgtcattaaccaggggtgcctctaggtccttgtgcagagctcttggccccagggtcaactgtctgtcctagggcatgatgggcagcacaggctctctcatgagggttcctgacccttgtggcagactctgagctgggatccttgttgcagaagccacccagagtggacggagcagagcataactattggagtcagaaaaaacaagrcctacactgaattcactctgccatcagcttttagcttcacagtgaattggctgtacaaccttgggcttgttgcttaactgtttgtgtttaaaatgggaattataatagcacctcgtccctactcatggcagttttgcaaggagtaaatgacacaatacatattaagcacttagcacagtggctggcacataataattactctataaatatatattttaaaccttccaaattttctggaacagtactaatctaaaatattttcttgagaaacaggtgtgaagtacaaattagtacatttctgttttttaagttggtgatgcatatcaagagatttaaaatgtttttatcctattatgcagtatttcttcttcttgatcacacagtggaaatttccaaaactgtgaacaaagatgtatatataacaatgtttaccacggtatttttaataatagtaaaaaaaagatggcaactacatgtttgatgatatgtgtagtgggtaaaaataattatatattctatctttgctgtatatgcagagatagaatattatgcagccattaaaaagaaactccacaaagaatatttaatgatgtgataaaatccttgtaac

SEQ ID NO: 59198 - DNA, 1262 bp, Homo sapiens
caggtagggaggggagggtatgaggtcaaaggcccagtgcgaggtggagacagctctgccgacaccctgcttggcaaataatgcttgggctgggtttcaagccccatccatgcctgaggccatgagctgcctacacaatgtgtggaattggaggcgggggtgccctgaatagccccacatcaatttacctaaaaaggaaagacggaagtcacttttccctaggccacggtggctttggcttcaatgggattgccgacagcctctgggcacacaagttccatttctgaatccccactacctcccactccttccacgcagtcccttgcttctatacaaagggctcccagcatctcacatgtttgcaagtgaccacagtgatcctgctggctccccagggcatcatttttctttgccacttccaaagcttgccagcatcactgaaagcatgtcattaaccaggggtgcctctaggtccttgtgcagagctcttggccccagggtcaactgtctgtcctagggcatgatgggcagcacaggctctctcatgagggttcctgacccttgtggcagactctgagctgggatccttgttgcagaagccacccagagtggacggagcagagcataactattggagtcagaaaaaacaaggcctacactgaattcactctgccatcagcttttagcttcacagtgaattggctgtacaaccttgggcttgttgcttaactgtttgtgtttaaaatgggaattataatagcacctcgtccctactcatggcagttttgcaaggagtaaatgacacaatacatattaagcacttagcacagtggctggyacataataattactctataaatatatattttaaaccttccaaattttctggaacagtactaatctaaaatattttcttgagaaacaggtgtgaagtacaaattagtacatttctgttttttaagttggtgatgcatatcaagagatttaaaatgtttttatcctattatgcagtatttcttcttcttgatcacacagtggaaatttccaaaactgtgaacaaagatgtatatataacaatgtttaccacggtatttttaataatagtaaaaaaaagatggcaactacatgtttgatgatatgtgtagtgggtaaaaataattatatattctatctttgctgtatatgcagagatagaatattatgcagccattaaaaagaaactccacaaagaatatttaatgatgtgataaaatccttgtaac

SEQ ID NO: 59199 - DNA, 1262 bp, Homo sapiens
caggtagggaggggagggtatgaggtcaaaggcccagtgcgaggtggagacagctctgccgacaccctgcttggcaaataatgcttgggctgggtttcaagccccatccatgcctgaggccatgagctgcctacacaatgtgtggaattggaggcgggggtgccctgaatagccccacatcaatttacctaaaaaggaaagacggaagtcacttttccctaggccacggtggctttggcttcaatgggattgccgacagcctctgggcacacaagttccatttctgaatccccactacctcccactccttccacgcagtcccttgcttctatacaaagggctcccagcatctcacatgtttgcaagtgaccacagtgatcctgctggctccccagggcatcatttttctttgccacttccaaagcttgccagcatcactgaaagcatgtcattaaccaggggtgcctctaggtccttgtgcagagctcttggccccagggtcaactgtctgtcctagggcatgatgggcagcacaggctctctcatgagggttcctgacccttgtggcagactctgagctgggatccttgttgcagaagccacccagagtggacggagcagagcataactattggagtcagaaaaaacaaggcctacactgaattcactctgccatcagcttttagcttcacagtgaattggctgtacaaccttgggcttgttgcttaactgtttgtgtttaaaatgggaattataatagcacctcgtccctactcatggcagttttgcaaggagtaaatgacacaatacatattaagcacttagcacagtggctggcacrtaataattactctataaatatatattttaaaccttccaaattttctggaacagtactaatctaaaatattttcttgagaaacaggtgtgaagtacaaattagtacatttctgttttttaagttggtgatgcatatcaagagatttaaaatgtttttatcctattatgcagtatttcttcttcttgatcacacagtggaaatttccaaaactgtgaacaaagatgtatatataacaatgtttaccacggtatttttaataatagtaaaaaaaagatggcaactacatgtttgatgatatgtgtagtgggtaaaaataattatatattctatctttgctgtatatgcagagatagaatattatgcagccattaaaaagaaactccacaaagaatatttaatgatgtgataaaatccttgtaac

SEQ ID NO: 59200 - DNA, 1262 bp, Homo sapiens
caggtagggaggggagggtatgaggtcaaaggcccagtgcgaggtggagacagctctgccgacaccctgcttggcaaataatgcttgggctgggtttcaagccccatccatgcctgaggccatgagctgcctacacaatgtgtggaattggaggcgggggtgccctgaatagccccacatcaatttacctaaaaaggaaagacggaagtcacttttccctaggccacggtggctttggcttcaatgggattgccgacagcctctgggcacacaagttccatttctgaatccccactacctcccactccttccacgcagtcccttgcttctatacaaagggctcccagcatctcacatgtttgcaagtgaccacagtgatcctgctggctccccagggcatcatttttctttgccacttccaaagcttgccagcatcactgaaagcatgtcattaaccaggggtgcctctaggtccttgtgcagagctcttggccccagggtcaactgtctgtcctagggcatgatgggcagcacaggctctctcatgagggttcctgacccttgtggcagactctgagctgggatccttgttgcagaagccacccagagtggacggagcagagcataactattggagtcagaaaaaacaaggcctacactgaattcactctgccatcagcttttagcttcacagtgaattggctgtacaaccttgggcttgttgcttaactgtttgtgtttaaaatgggaattataatagcacctcgtccctactcatggcagttttgcaaggagtaaatgacacaatacatattaagcacttagcacagtggctggcacataataattactctataaatatatattttaaaccttccaaattttctggaacagtactaatctaaaatattttcttgagaaacaggtgtgaagtacaaattagtacatttctgttttttaagttggtgatgcatatcaagagatttaaaatgtttttatcctattatgcagtatttcttcttcttgatcacacagtggaaatttccaaaactgtgaacaaagatgtatatataacaatgtttaccacggtatttttaataatagtaaaaaaaagatggcaactacatgtttgatgatatgtgyagtgggtaaaaataattatatattctatctttgctgtatatgcagagatagaatattatgcagccattaaaaagaaactccacaaagaatatttaatgatgtgataaaatccttgtaac

SEQ ID NO: 59201 - DNA, 701 bp, Homo sapiens
acatctgtttctagctaggagactgctctcgggaaacactttggcaaatgttcccctcccacctcgcagccccacccttaggccaacccctcctcaccgcccgctccacgtaaaaagcaagaacaaggggcacgaagtccaggaggtctgtggtcctggctgctggagcccgcgcctggctctcggtgctcagcgctgagtttccatgaggctccccasgtgaggacctgccagagcacagcaacgcggcatgggcaggcacctccaggcctggctggcagcgccctgggagtggtcccctggtacctctgcggcggaaagagggtaacaacaggcttcctatctgaggctaacccctaggtcgacgtaccaggtctccagctgttattctgactgcctccatctccagctgcggtgtgattgctggagcccccgtccttcaccgtcggccctggaaacttcccagtgaaagatacaagaaacagggagaggtggccggcttagtccgatttgtgctgctctaacagaatacctgaaactgggtaatttataaaggaacagatatttatttcttacagttctggagactgggaagtccaagatcaagggcctgcatctggtaagggcctccttgtggtgttatcccatggacgaaggtagaagagcaagagaggaaggaggccgaatttatcctcatgtca

SEQ ID NO: 59202 - DNA, 701 bp, Homo sapiens
acatctgtttctagctaggagactgctctcgggaaacactttggcaaatgttcccctcccacctcgcagccccacccttaggccaacccctcctcaccgcccgctccacgtaaaaagcaagaacaaggggcacgaagtccaggaggtctgtggtcctggctgctggagcccgcgcctggctctcggtgctcagcgctgagtttccatgaggctccccaggtgaggacctgccagagcacagcaacgcggcatgggcaggcacctccaggcctggctggcagcgccctgggagtggtcccctggtacctctgcggcggaaagagggtaacaacaggcttcctatctgaggctmacccctaggtcgacgtaccaggtctccagctgttattctgactgcctccatctccagctgcggtgtgattgctggagcccccgtccttcaccgtcggccctggaaacttcccagtgaaagatacaagaaacagggagaggtggccggcttagtccgatttgtgctgctctaacagaatacctgaaactgggtaatttataaaggaacagatatttatttcttacagttctggagactgggaagtccaagatcaagggcctgcatctggtaagggcctccttgtggtgttatcccatggacgaaggtagaagagcaagagaggaaggaggccgaatttatcctcatgtca

SEQ ID NO: 59203 - DNA, 701 bp, Homo sapiens
acatctgtttctagctaggagactgctctcgggaaacactttggcaaatgttcccctcccacctcgcagccccacccttaggccaacccctcctcaccgcccgctccacgtaaaaagcaagaacaaggggcacgaagtccaggaggtctgtggtcctggctgctggagcccgcgcctggctctcggtgctcagcgctgagtttccatgaggctccccaggtgaggacctgccagagcacagcaacgcggcatgggcaggcacctccaggcctggctggcagcgccctgggagtggtcccctggtacctctgcggcggaaagagggtaacaacaggcttcctatctgaggctaacccctaggtcgacgtaccaggtctccagctgttattctgactgcctccatctccagctgckgtgtgattgctggagcccccgtccttcaccgtcggccctggaaacttcccagtgaaagatacaagaaacagggagaggtggccggcttagtccgatttgtgctgctctaacagaatacctgaaactgggtaatttataaaggaacagatatttatttcttacagttctggagactgggaagtccaagatcaagggcctgcatctggtaagggcctccttgtggtgttatcccatggacgaaggtagaagagcaagagaggaaggaggccgaatttatcctcatgtca

SEQ ID NO: 59204 - DNA, 701 bp, Homo sapiens
acatctgtttctagctaggagactgctctcgggaaacactttggcaaatgttcccctcccacctcgcagccccacccttaggccaacccctcctcaccgcccgctccacgtaaaaagcaagaacaaggggcacgaagtccaggaggtctgtggtcctggctgctggagcccgcgcctggctctcggtgctcagcgctgagtttccatgaggctccccaggtgaggacctgccagagcacagcaacgcggcatgggcaggcacctccaggcctggctggcagcgccctgggagtggtcccctggtacctctgcggcggaaagagggtaacaacaggcttcctatctgaggctaacccctaggtcgacgtaccaggtctccagctgttattctgactgcctccatctccagctgcggtgtgattgctggagcccccgtccttcaccgtcggccctggaaacttcccagtgaaagatacaagaaacagggagaggtggccggcttagtccgatttgtgctgctctaacagaatacctgaaactgggtaatttataaaggaacagatatttatttcttacagttctggagactgggaagtccaagatcaagggcctgcatctggtaagggcctccttgtggtgttatcccatggasgaaggtagaagagcaagagaggaaggaggccgaatttatcctcatgtca

SEQ ID NO: 59205 - DNA, 702 bp, Homo sapiens
agaagggagatgccacagtatttcttctctccctctctgtctccagcagcttctcctgctgcagctaagtctcttttattgctctagtttctgccagataggtctactgtggtttcaacttcttccaggcaactctggcctcctaattctgataacaccactttttccctttatccctccagcctaagggtgacagtagcttcctgctatrgctgatctctaggttgtttcacagcgtgaggttggcttcacagatctttcatcacccatttataaacccctgcatctggtacaaaaacacaaaagcagtttctgttttcctagttagacctgacaaatacattgactaacttgagaagcaaaagggtttattggaagactgatgtgatagtttacgaattgaaatgagagctgaaaaaaaacacagtttggaaattacaggaactaggatggttttaggaaatgcggtaccaggaatctaaggacaatttcttcatcactgccattatatgactcagctgcaactgccttctgcctgtatctccactggagattcaaattcccagaagaattaaggtcaagattggggcacaggcctactcctgttgtggtggtgttggtgactgagagccaaaagaatcccaaataatggaaggcaggagttcatcagaggatgggatgtcggacagacaaaatagcagg

SEQ ID NO: 59206 - DNA, 717 bp, Homo sapiens
tgaaagagtccaagcacaygtgaaaagaagacatattatgcaatgctctttgtacaaagttctagaagaagcaaactaacatatagttttaaagaaattagaaagtgtttgccttgggtatgggtatgttaactggaagagaagaggaggaatttctgagactgtgtttgttctacattttgataaaggctggttacataagcatacacatttgtcaacactcctccaattgaacacataaaatttgtgcatttcactgaaaatatacttaagttaaatgtcactgtaaaatattgaaatttaattgttttcaatttagctgtgctgtcagcgattctgaagctatctatctatagaaagagagagtgtgtgtgtgagagagagaatgaataatgaataatgaataattggagacagatctcttactgttagagaagtgagttacaaatatggaaaggaataccacatgtattataccacaaaggaataccaatgtaccacaacacttagaattgggggtatcatggtgaactcatagattttaattaagacagatatagaaatatataggtaaaggttgagaaataggcatagttatttacaagttctgtccactttgtgggtttagagaaataacacaccagaagaaacatgtttaagtttgtatgcaacattctggaaagtcatttctaatgaagtgatatatttgtataaagc

SEQ ID NO: 59207 - DNA, 717 bp, Homo sapiens
tgaaagagtccaagcacacgtgaaaaraagacatattatgcaatgctctttgtacaaagttctagaagaagcaaactaacatatagttttaaagaaattagaaagtgtttgccttgggtatgggtatgttaactggaagagaagaggaggaatttctgagactgtgtttgttctacattttgataaaggctggttacataagcatacacatttgtcaacactcctccaattgaacacataaaatttgtgcatttcactgaaaatatacttaagttaaatgtcactgtaaaatattgaaatttaattgttttcaatttagctgtgctgtcagcgattctgaagctatctatctatagaaagagagagtgtgtgtgtgagagagagaatgaataatgaataatgaataattggagacagatctcttactgttagagaagtgagttacaaatatggaaaggaataccacatgtattataccacaaaggaataccaatgtaccacaacacttagaattgggggtatcatggtgaactcatagattttaattaagacagatatagaaatatataggtaaaggttgagaaataggcatagttatttacaagttctgtccactttgtgggtttagagaaataacacaccagaagaaacatgtttaagtttgtatgcaacattctggaaagtcatttctaatgaagtgatatatttgtataaagc

SEQ ID NO: 59208 - DNA, 753 bp, Homo sapiens
gaggggaggggaaaaaataccattatttttcagtgaaaatatcacaggtgattgttatgtttgcaatgcttcagaatagaacagttgttttcaatggttaagaacagaccaattaggacatgcttatgtagctaattatgaagagctgttaatgaaaatttgaatattcaaacctctcaccaattattccacagaagcatggaaatgatatgaattgatgaaaaaggaagatactggagctcctttaaagaatgctgtcacgccataagtggaagtactgtggtagaagagagactataaaatattgatggactattgacctgaggtagcaaaggaagataaaagcaaattctctgagtgcacaaagaagctaccygtctccatagtgtggaaaagaacttcaatattaacatcaataatgagttatcgttgtctgaaatacatttttcttgttaccatatcagaattgtattcatttcagtttcagagaaaaaaaacatatttttttaaatttcataattatgttttctgttgcataagaacagttcacgtggagaggtgcttcgaaatatacatcttattatcattaaatcctagccattgtggctatcttcataagacagtccaacagttgagctgtttgggagtttatttgcttggtgtcttgattttaagttattaaaaagttgtacctgcccaaatgttgttcatgcctgaaaataatgttcattgaacttaaattttcctattcta

SEQ ID NO: 59209 - DNA, 753 bp, Homo sapiens
gaggggaggggaaaaaataccattatttttcagtgaaaatatcacaggtgattgttatgtttgcaatgcttcagaatagaacagttgttttcaatggttaagaacagaccaattaggacatgcttatgtagctaattatgaagagctgttaatgaaaatttgaatattcaaacctctcaccaattattccacagaagcatggaaatgatatgaattgatgaaaaaggaagatactggagctcctttaaagaatgctgtcacgccataagtggaagtactgtggtagaagagagactataaaatattgatggactattgacctgaggtagcaaaggaagataaaagcaaattctctgagtgcacaaagaagctacccgtctccayagtgtggaaaagaacttcaatattaacatcaataatgagttatcgttgtctgaaatacatttttcttgttaccatatcagaattgtattcatttcagtttcagagaaaaaaaacatatttttttaaatttcataattatgttttctgttgcataagaacagttcacgtggagaggtgcttcgaaatatacatcttattatcattaaatcctagccattgtggctatcttcataagacagtccaacagttgagctgtttgggagtttatttgcttggtgtcttgattttaagttattaaaaagttgtacctgcccaaatgttgttcatgcctgaaaataatgttcattgaacttaaattttcctattcta

SEQ ID NO: 59210 - DNA, 753 bp, Homo sapiens
gaggggaggggaaaaaataccattatttttcagtgaaaatatcacaggtgattgttatgtttgcaatgcttcagaatagaacagttgttttcaatggttaagaacagaccaattaggacatgcttatgtagctaattatgaagagctgttaatgaaaatttgaatattcaaacctctcaccaattattccacagaagcatggaaatgatatgaattgatgaaaaaggaagatactggagctcctttaaagaatgctgtcacgccataagtggaagtactgtggtagaagagagactataaaatattgatggactattgacctgaggtagcaaaggaagataaaagcaaattctctgagtgcacaaagaagctacccgtctccatagtgtggaaaagaacttcaatattaacatcmataatgagttatcgttgtctgaaatacatttttcttgttaccatatcagaattgtattcatttcagtttcagagaaaaaaaacatatttttttaaatttcataattatgttttctgttgcataagaacagttcacgtggagaggtgcttcgaaatatacatcttattatcattaaatcctagccattgtggctatcttcataagacagtccaacagttgagctgtttgggagtttatttgcttggtgtcttgattttaagttattaaaaagttgtacctgcccaaatgttgttcatgcctgaaaataatgttcattgaacttaaattttcctattcta

SEQ ID NO: 59211 - DNA, 753 bp, Homo sapiens
gaggggaggggaaaaaataccattatttttcagtgaaaatatcacaggtgattgttatgtttgcaatgcttcagaatagaacagttgttttcaatggttaagaacagaccaattaggacatgcttatgtagctaattatgaagagctgttaatgaaaatttgaatattcaaacctctcaccaattattccacagaagcatggaaatgatatgaattgatgaaaaaggaagatactggagctcctttaaagaatgctgtcacgccataagtggaagtactgtggtagaagagagactataaaatattgatggactattgacctgaggtagcaaaggaagataaaagcaaattctctgagtgcacaaagaagctacccgtctccatagtgtggaaaagaacttcaatattaacatcaataatgagttatcgttgtctgaaatacatttttcttgttaccatatcagaattgtattcatttcagtttcagagaaaaaaaacatatttttttaaatttcataattatgttttctgtwgcataagaacagttcacgtggagaggtgcttcgaaatatacatcttattatcattaaatcctagccattgtggctatcttcataagacagtccaacagttgagctgtttgggagtttatttgcttggtgtcttgattttaagttattaaaaagttgtacctgcccaaatgttgttcatgcctgaaaataatgttcattgaacttaaattttcctattcta

SEQ ID NO: 59212 - DNA, 753 bp, Homo sapiens
gaggggaggggaaaaaataccattatttttcagtgaaaatatcacaggtgattgttatgtttgcaatgcttcagaatagaacagttgttttcaatggttaagaacagaccaattaggacatgcttatgtagctaattatgaagagctgttaatgaaaatttgaatattcaaacctctcaccaattattccacagaagcatggaaatgatatgaattgatgaaaaaggaagatactggagctcctttaaagaatgctgtcacgccataagtggaagtactgtggtagaagagagactataaaatattgatggactattgacctgaggtagcaaaggaagataaaagcaaattctctgagtgcacaaagaagctacccgtctccatagtgtggaaaagaacttcaatattaacatcaataatgagttatcgttgtctgaaatacatttttcttgttaccatatcagaattgtattcatttcagtttcagagaaaaaaaacatatttttttaaatttcataattatgttttctgttgcrtaagaacagttcacgtggagaggtgcttcgaaatatacatcttattatcattaaatcctagccattgtggctatcttcataagacagtccaacagttgagctgtttgggagtttatttgcttggtgtcttgattttaagttattaaaaagttgtacctgcccaaatgttgttcatgcctgaaaataatgttcattgaacttaaattttcctattcta

SEQ ID NO: 59213 - DNA, 753 bp, Homo sapiens
gaggggaggggaaaaaataccattatttttcagtgaaaatatcacaggtgattgttatgtttgcaatgcttcagaatagaacagttgttttcaatggttaagaacagaccaattaggacatgcttatgtagctaattatgaagagctgttaatgaaaatttgaatattcaaacctctcaccaattattccacagaagcatggaaatgatatgaattgatgaaaaaggaagatactggagctcctttaaagaatgctgtcacgccataagtggaagtactgtggtagaagagagactataaaatattgatggactattgacctgaggtagcaaaggaagataaaagcaaattctctgagtgcacaaagaagctacccgtctccatagtgtggaaaagaacttcaatattaacatcaataatgagttatcgttgtctgaaatacatttttcttgttaccatatcagaattgtattcatttcagtttcagagaaaaaaaacatatttttttaaatttcataattatgttttctgttgcataagaacagttcacgtggagaggtgcttcgaaatatacatcttattatcattaaatcctagccattgtggctatcttcataagacagtccaacagttgagctgtttgggagtttatttgcttggtgtcttgattttaagttattaaaaagttgtacctgcccaaatgttgttcatgcctgaaaataatgttcattgaacttaaattttccyattcta

SEQ ID NO: 59214 - DNA, 906 bp, Homo sapiens
accctttccatcatgtgaagacaaagcaataaagcactgtctatgaggaactgtccctcaccagacaccattctggtggtgccatgatgttggactgctccagaaatgtgcaaataaatttttgttgtccataaactacccagtttgggcatatatggttataacagcctgaatggactaaaaaattgatacaaagaagggggtatcaagagctgaagaattacaacagagaggaagctgctgcccagccctgcttcacatcatgggcttcacttcttaccctttacagccgtgttcctccactgccccaggggtggmtccagcaggccataatgctgcaagtgctattcccagtggagctgtggtggcagggccacttccaggacctcaaatctgtagagctctcagcaagtaattccagcatggaaaagttgtaggcatgttactccaacctgtgagagctgtgatgtggccttcactcagcaaaaccatgagccctactcctacacagaagctgtaggtccagggtctccactgcagtgggcctgaaagtggatctacagccattagtgggccaaaggcagagcatcaagccaaagaagatagtcagataagattattcttaattgttaagattgaatgttaggttttagatctgcttgagatctgtcatttctttttttgttgtttgtttctctcttttggaatgacagtgcctatttttttgcccatcttatacaacatgtttaatttcagagttttacaactcaagatcaatttgcatcaaaattaaagataccttaagtcccacccatatctgagttagaaaatatttagataatacgtcaaacttttaagttgataatggaacgagttaggacttttgagcctagtgggatgaaatga

SEQ ID NO: 59215 - DNA, 906 bp, Homo sapiens
accctttccatcatgtgaagacaaagcaataaagcactgtctatgaggaactgtccctcaccagacaccattctggtggtgccatgatgttggactgctccagaaatgtgcaaataaatttttgttgtccataaactacccagtttgggcatatatggttataacagcctgaatggactaaaaaattgatacaaagaagggggtatcaagagctgaagaattacaacagagaggaagctgctgcccagccctgcttcacatcatgggcttcacttcttaccctttacagccgtgttcctccactgccccaggggtggctccagcaggccataatgctgcaagtgctattcccagtgragctgtggtggcagggccacttccaggacctcaaatctgtagagctctcagcaagtaattccagcatggaaaagttgtaggcatgttactccaacctgtgagagctgtgatgtggccttcactcagcaaaaccatgagccctactcctacacagaagctgtaggtccagggtctccactgcagtgggcctgaaagtggatctacagccattagtgggccaaaggcagagcatcaagccaaagaagatagtcagataagattattcttaattgttaagattgaatgttaggttttagatctgcttgagatctgtcatttctttttttgttgtttgtttctctcttttggaatgacagtgcctatttttttgcccatcttatacaacatgtttaatttcagagttttacaactcaagatcaatttgcatcaaaattaaagataccttaagtcccacccatatctgagttagaaaatatttagataatacgtcaaacttttaagttgataatggaacgagttaggacttttgagcctagtgggatgaaatga

SEQ ID NO: 59216 - DNA, 1107 bp, Homo sapiens
tgcttgtttacatatgtatatatatttatctatggtgaatgtatattccaattttccttcaataatgacttattgagtaaactcctgtattcaaaatgtttaggttccttttgaagggatattttgtaccctatgttattatattttgaggttggtttccaatctccctctgtctcttctctcacccctgcccctctatgattttgcattttccctacaaccccagctttcatctctttcatgtaccccggacattacatcttccagttggagatccrtagcagaggatagtatggctcagcttctggccaggagcctgtttctgtttctcctcatttggcccagcagtttgctagaggctgtagctttgcctctttcaataagcagctaagagttatccgttaatcagactctgagacttaagcctggcttcaggtcactcatcttgaatgaaacacatttttgtcccattgcttatctctgatcctagagtcctctcctagtttcaatgctattgtccccatcgtatgtctgtctgtcttatttcatttgttcatgtttgtgtttttgtttgcttttttttctagtccacattgatatttgaattatttgttcatctaaccattcattgttatttatgtagctatcgaccaaataggtcattagggttttaacttactgtatttttgcaccagaatttttttgtattatttttatagtattgtttttctgccacattttagtatactggatattgcgaatcatgataatgtcattctggagagattcatctacatataaaaagctttggatttaaagtttgaatgattaacctggaattaaaataatgccatgatcaaaatctaaattctttttttttttttttgagatagggtctcccgttgcccagtgattctcctacctcagcctccctagtagtggaactacaggtgttcactaccacagccagctagtgttttgtatttttctttagaagagatggggtttcaccatgtttcccaggctggtcttgaactcctggactcaagcaacctgcctgcctcggcctcccaacatgctgggattacaggtgtaagccaccgttcc

SEQ ID NO: 59217 - DNA, 2085 bp, Homo sapiens
ctcccttcccatgactcacccagccttggtggggagaaataccaagtgcagtctcagggcccaacaggccacaatatacagatgctccttgacttagcacaaggttatgtcctgataaacccatcgtaagttgaaaatattaagtaaaaaatgcatctaatacacaatctactgaacatcatagcttagcatagcctatctcaaacgtgctcagaacactgacattagcctacagtcgggcaatgcatacttgcaccatcataaagtcaaaaatcaaagccaaaccatcatgagttatggacccactgtaggtaagggtctaacgggccttcatgcatcttcaaggtcaggctgcttcaaaacgggcatctgtctgctgcctttggtcacaatggaaactgacaaaccatgagttcatgctgagctgaaaggcccagatgagccacagaaacaagatgtaactgaacctgcaggaagggtaaaattaaaatcaccccagccctgactacctctgagacctcatttcctctggctctcaccttcattcacttggttccaagcactgcagcctccttgctgttcttccatcatgccaaggacactcttgcttccaggatgttgcctttgcccttccctctgcttggaatgctctttccctagttgtttcccctccctcagttttcagttctttgttcaaatgttacttctccagggcagtcttcctggaccactctatctacattaagacccccacatatgtcctgccattccctagtccattagcctgcttttttttcctcatgatctatctacctttaatttgtgtgtctatcttccaactctaacatgggctctatgagggcagggatttgactatttgtttaaaactatatacccggctgggtgcggtggctcacgtctgtaatcccagcactttgggaggccgagatgggtggattacgaggtcaggagacygagaccatcctggctaactcagtgaaaccccatctctactaaaaatacaaaaaaatttagctgggtgtggtggtgggcacctgcagtcccagctacttgggaggctgagacaggagaatggcatgaacccaggaggcagagcttgcagtgagccaagatcgtgccactgcactccagcctgggcgacagagcgagactccatctcaaaaaaataaaaaaaaaacactatatacccaatgctggtgacaatgctgcacaacacaaccaggagatagtcaataaatatttcttctattagtgaatttactagatgtcttctatacattgtaaatgtatcaccaatagtgttctacatcagtggttcatgaaaattatgaagttgtaacctctataaagacagatgctgtatggatcttgtcattatgaactatatgtaaaaataactgacatttgtaaagtacttaccctgcactgagccctatgctaggatcttttatgcatttttccaagttttcttcccaaccactttatgaagtgggtatgattaccatcccctttctacagatgagaaaactgaggctcaaagagaaaagtcacttgctcaaggtcacagcaaagatttcagtctggctccggaacccaagcttttaaccccaatgctatacttccaggtaggaaacagaatgaatgaatgactggataatgaactagagatgcccatcagacacactctggttgcatgctcttcttgcagactctgtacaaccaccgccaagctccatgtcacgtggccctactcctcactctccttcttctagcggctaaatgatcaagggatgggactctcacccctggcctggctgggccatcagatgcctcacttagaaaattagaattggaaactgagaggctgagccaggcaatggaggaggcaaaattgcaaagaactgctcaggaagagctggggccttgcaagccaaagcctgaggaaagtccaagttctgaggaagcacagtggacacacaggaagagtgcggaaagcagatagtgaagacaggagcacagagtagggaagtcatagaaatgccctaaaggagcagtgaacttgga

SEQ ID NO: 59218 - DNA, 575 bp, Homo sapiens
aatgtaaatcattctattataaagatacatgcatgcatatgttcattgcagcactattcacaatagcgaagacatggaatcaacccaaatgcccatcaatgatagactggataaagaaaatrtgttatatacacacatggaatattatgcagccataaaaaggaatgagatcatctcatttgcagggacatggatggagctgcaagccattatcctcagaaaactagcacaggaacagaaaaccaaacaccacatgttctcacttataactgggagttcaacaatgagaacacatggccacagggaggagacaacacacactggggcctggcaggggagccgtggggggaggaagagcatgaggataaatagctaatgcatgtggagcttaatacttaggttgataggctcagcaaactaccatggcacacgtttacctgtgtaacaaaactgcatgtcctgcacatgtatcccgaaacttaaatttaagttaaaaataaaaataataaataaataaataaaactgaaggagcctgcagagaaatgcactaatgagactcagaaatagtgtcaga

SEQ ID NO: 59219 - DNA, 1185 bp, Homo sapiens
atctccatattattccctgtatctggcacctgacccccctccagctggaacggtgtcttcttattccagcaccattccctgcctccctcctgagccaatgatctcccccacatactggtctcttccagctcatcacagatcttgttgttggcacaggcaaagtcgcggaccgtctgcccgtcaccctcactcttggagagccagcagtcacactggaagtggaaggtctcgtcgcgggagttgtccttcacatcgacatagctcagatgccagccaggaaatatccctgtggaaaagacaccatgggggttggaagctggatgtgccttccctcccctttcagacttctacatccccacaacccattggctgtgtggccctggacaagttatctgtcctctttgggccttgatctccttgttgataaagtgaggggttgggttaggtggtctcagagggttcctccagcacagaggatataattttctgcaaagcccttaactttgggttcatgaaccctagaggatttgtgtatggaacttaagcagtccatgaccccaagaaattgtgctgtaattatacatgaacattttaccagggagagagctcatagctgtcattaatttataattgagatctctgacccaaaatagaactttctggagctcaccaagatgaaggatgacttctatcacttcctgacaccagtatttacttagtccatgcccattatccttccagaatcagttcaggtgtcagctcctccaagaagccttccctgatgtcccctgatcacctgctaggcctgcatcaggtgttctccatgctcctatagccccctgcatctgccgtggccacacmctgtccaccttgtgttgtcagtatttacatgtgtctcatcctccaggccatgagctcttgaaggcagggagtaggtcttacttgttttcgtttcttgcatgcctagcataatgactggcaagtagcagttgctcaatgaatgctgaatgaattaatgtgtcatgacttggctaagctgttcaacaatcatagaagaaatccaaagctgctatttcttttgggtatgttgctaatattgaacacatagctgcccttgttataattggcagggcttccctcggaagtgtgcccaccatagcacagctatcaaatatgaattgatgt

SEQ ID NO: 59220 - DNA, 1124 bp, Homo sapiens
atctcagcctcattctggtcacataccatttgaaagtatcaccttgcacaatagcaagctgtgcccatgacacatgcccagtgggtctttctatctatcttcctagtcaagatacagacattcttaacaaggacttcaagacacaggtgaaacatcaggccacatgcaaatgaaaaaatcaaaacatgtctcgggtaacagcyctgagcttgcaaaccagggtaatcaagaaatgatggctcccctcacaaaataaatctttattcagaaaaaaaaaatcttttaactagcaaggtggctcaaagcatttacaatatggttgtatttataatgatgtgattttcaagcaacatttttggaatttagatacttccagaaacgagatgcctcttccaccagcaattaagccttgtacatctggaaaacaagttggaatgtaggagtgggatagttaatcagagaaaatccaggaatatggggttgggtagagattagagtcacagtacagaagtaaagactataggagactgaatatgcaaacaatagtagccagaccatgtatgataatagaactctgagctgcctcctctgcagcgaccatcccaagaaaccacggtctctacagaaattggtccagaatggtcaggacttgggcaatggcccccagcttccctattttgtccctgctcccaactcaggactaaccagaccgacggaccaaatccagatatgctccccaatgcaatcacgtatgaaatcccgattctggctaccctacctccagctttaccacaccaaaaataatgcttcactataaagctcctcctcctctcacagccttcaaatctctaccaaaccaagtgatggtaactgagtctcttgttgtagcaagctctaagtagagagtttctgttctcatttggtcctcctttatttctagaaccaagttcaaatcccagttcccctacttacttgctgtataaccttgggcaagttatttcacctctatgtgtctcaggcatcttactggtggagacgataagagtacaaagagtgataagaggggtgttgtgagttaatatatattaaaaagcacttgcaacagtgcctgacatggaataaat

SEQ ID NO: 59221 - DNA, 1308 bp, Homo sapiens
acacagagggaaggaaccatctatgaggaggcggacccttaccagacaccaaatctcccaacaccttgatcttggactgcccagcctccagaactgtgattagtgcatttctgttgttcataagctcccagcctatggccttctgttagagcatccaaaacagactaagacggggggcctcccagggaggaggacagtgcagaaatagggccaggacaccaagaggacacactgggtgcagtcaggaggctcctctggccagcagatgaggggagtggaatgagggctgagcctgggcaggagcaaagagccaggccaagaagtcagatgccagggaccgtggaaggcagcaaggcttcttcagggaagactgactcccgagctggaggtcctgatgctccagccccaggacttgctctggaggaaagtggagtttcatcctcaagactccagggctgagaggcactgccttccagtcctccaaggaaaagggggctgaaagaggggaagaacaggcagcctgaaaggccccacagggcacctgacatctctacctggcctgccacccacccggggctaccccagkgatgatggccttctgctggtgggcaattcaagcacaggtctgcccagggtccctgttgcaggcctgccagctgaccagagccagctctgcctgctccagggatgtgggatcctgggagagtaggatgggatccaaaccctcccaggcttctctggggttccccggaagcccgagttcccgcctcctcaggccagctctcaggtgtcaggtttcccgctgtgctcagctactgagccagcctcactcttccccagtgttggggcagaacagggaggggacactggaggcagggccctgatggtcagaaaggaggggaaggcccgagactccctctccaaaggcaccagggaggggcagggagaaagaagacaggacagccggccacagggctggagaggctcagcctcaagagccggggttcagcgctggctcctttttgaaaagcccacacaagcagcaaagaaagccagccttttgaaaagcaggtctctgcccacagaggccagtgaggaaggcatcactaccaagaagtcttcaaagccaggcagagtcacccggtgtaaggtctctgtcccaaaggccagggcacttcccctcacagtcagacctggacagccccatggacttctccaggccctagtttcctggacttgtgacctgcagtgatgctgctgatcccacacacctgctgaaatctctttgctggcaggggcctcaaatag

SEQ ID NO: 59222 - DNA, 1308 bp, Homo sapiens
acacagagggaaggaaccatctatgaggaggcggacccttaccagacaccaaatctcccaacaccttgatcttggactgcccagcctccagaactgtgattagtgcatttctgttgttcataagctcccagcctatggccttctgttagagcatccaaaacagactaagacggggggcctcccagggaggaggacagtgcagaaatagggccaggacaccaagaggacacactgggtgcagtcaggaggctcctctggccagcagatgaggggagtggaatgagggctgagcctgggcaggagcaaagagccaggccaagaagtcagatgccagggaccgtggaaggcagcaaggcttcttcagggaagactgactcccgagctggaggtcctgatgctccagccccaggacttgctctggaggaaagtggagtttcatcctcaagactccagggctgagaggcactgccttccagtcctccaaggaaaagggggctgaaagaggggaagaacaggcagcctgaaaggccccacagggcacctgacatctctacctggcctgccacccacccggggctaccccagggatgatggccttctgctggtgggcaattcaagcacaggtctgcccagggtccctgttgcaggcctgccagctgaccagagccagctctgcctgctccagggatgtgggatcctgggagagtaggatgggatccaaaccctcccaggcttctctggggttccccggaagcccgagttcccgcctcctcaggccagctctcaggtgtcaggtttcccgctgtgctcagctactgagccagcctcactcttccccagtgttggggcagaacagggaggggacactggaggcagggccctgatggtcagaaaggaggggaaggcccgagactccctctccaaaggcaccagggaggggcagggagaaagaagacaggacagccggccrcagggctggagaggctcagcctcaagagccggggttcagcgctggctcctttttgaaaagcccacacaagcagcaaagaaagccagccttttgaaaagcaggtctctgcccacagaggccagtgaggaaggcatcactaccaagaagtcttcaaagccaggcagagtcacccggtgtaaggtctctgtcccaaaggccagggcacttcccctcacagtcagacctggacagccccatggacttctccaggccctagtttcctggacttgtgacctgcagtgatgctgctgatcccacacacctgctgaaatctctttgctggcaggggcctcaaatag

SEQ ID NO: 59223 - DNA, 704 bp, Homo sapiens
cctgactccccaactcacacgctcagctgctgaacctgtgtctcctcctctgttctgggtcagaagttcatggctaacagatgagccccagctggaaacctctgccatcagacccacaacctatttgagcatggacttaatattatgcctgactcccacttcccagcactgcacttgttaatttcagggaggaaaggaaggcttcatctgctgcatgcaaagcacttgacacacattattgctttggatcttcacaaccacctgtcaagtgacaacactgaagctcagagaggtkaagcacctgcccagggtcacacagcagggaggtggagcgagccaggcctaactccacagcctctcacttgcatagcctgctgcctgtgccctgctctcagaggcagtctggtggaggagggtgtgttgggaacagagcagggaacgtgtgagggcctcaggaccagagacagagagaagactgaagccagatggggtggggcttctgcagtcgggggcctttgctccctcccctgtgtggtgcggcagggtggctgtaggactttgctagcccagacctgtgtgaacaggggctcatccgaccctgtccacatgaggctgtagcctggtagcccacagatgcacagtcagtggctgtgcctttcttagaggctggtgcttgttgggtggccagagcctccaccaggccc

SEQ ID NO: 59224 - DNA, 548 bp, Homo sapiens
tttgcatgttatattttataacaccatactatgcattgtattcttaaagtaggttagggaaaagaaagtgttacttaaaaagtcataaagaagagaaaatagctttacagtactgtatggtgtctattgttatggaaagtttaagtcgtgtctgaaagtttaatcacgtctgaaatggcaggcaaccgcagctgcagtcctcaatctacagtacatatcaagcaattcaactttttcttgtaatgctatgacttttctctgcttcctgggagcacttccagcatcactagaggcacttcatatgggtctcatagtgttattcaatgtttatggtattgcactaaacmcagtgaaaaataggcaagaaccttgaaaaatcattttttactgtgatatgcaatttactgaagagatgaactgctcactcagagataattagaatcacatgatgttgtaagcagatacttgtaacacttgagctcactgcaatagcaacaggaggtggctaggaaattattacagtggtacagtgtgtactacagtaactt

SEQ ID NO: 59225 - DNA, 877 bp, Homo sapiens
ggtggtggaggttggcagtgagccaagatcgtgccactgcactccagcctgggtgaaagaatgagattccgtttctctctctttctgtgtgtgtgtgtgtgtgtgtgtgtgtgtgtgtgtgtgtgtgtgtatagtaaaattacggagttcatgacctcctggagagatgactagcaggaattgcaatggattctgaaaagatttggagaatgtggatatcatgggaygaagccaagacttgcacctggagatgaaggttcaagctgtgttttccaggacgtcatccttggcaagtcactcaacatctctgtgccttaacttcctcatctgtacagttggaaatataacaatgcctgccctgcttatctcatggagctcctgggaggatcaaaattaccagtgtatatgaccatgccagaaatcagttaagtgtgaggcacgttaaagcattttaaagcattatgtttggaaataatttcaagtttacaaaaagttacaaaatgagaaatggtacaaagaatattcatattcattttatccagatttacttattgtttgtagtttaacccatgtattatttattcttattctctgtctcatgtatatatactatatggacatgtggttatatatgtatgtttatacataattttttcctgaaccatttttatattatgtatattatggctctttacccctgaatacttaacagtgtgtttttcctaagaataagattattatatgccacagtatagttaacggttgtatacatttacattgttacaaatactcttatctaatccatcacccgtattacaaattttttgcttggtctaataatactctttatagcattctcccttccagtgcaggatcc

SEQ ID NO: 59226 - DNA, 877 bp, Homo sapiens
ggtggtggaggttggcagtgagccaagatcgtgccactgcactccagcctgggtgaaagaatgagattccgtttctctctctttctgtgtgtgtgtgtgtgtgtgtgtgtgtgtgtgtgtgtgtgtgtgtatagtaaaattacggagttcatgacctcctggagagatgactagcaggaattgcaatggattctgaaaagatttggagaatgtggatatcatgggatgaagccaagacttgcacctggagatgaaggttcaagctgtgttttccaggacgtcatccttggcaagtcactcaacatctctgtgccttaacttcctcatctgtacagttggaaatataacaatgcctgccctgcttatctcatggagctcctgggaggatcaaaattaccagtgtatatgaccatgccagaaatcagttaagtgtgaggcacgttaaagcattttaaagcattatgtttggaaataatttcaagtttacaaaaagttacaaaatgagaaakggtacaaagaatattcatattcattttatccagatttacttattgtttgtagtttaacccatgtattatttattcttattctctgtctcatgtatatatactatatggacatgtggttatatatgtatgtttatacataattttttcctgaaccatttttatattatgtatattatggctctttacccctgaatacttaacagtgtgtttttcctaagaataagattattatatgccacagtatagttaacggttgtatacatttacattgttacaaatactcttatctaatccatcacccgtattacaaattttttgcttggtctaataatactctttatagcattctcccttccagtgcaggatcc

SEQ ID NO: 59227 - DNA, 877 bp, Homo sapiens
ggtggtggaggttggcagtgagccaagatcgtgccactgcactccagcctgggtgaaagaatgagattccgtttctctctctttctgtgtgtgtgtgtgtgtgtgtgtgtgtgtgtgtgtgtgtgtgtgtatagtaaaattacggagttcatgacctcctggagagatgactagcaggaattgcaatggattctgaaaagatttggagaatgtggatatcatgggatgaagccaagacttgcacctggagatgaaggttcaagctgtgttttccaggacgtcatccttggcaagtcactcaacatctctgtgccttaacttcctcatctgtacagttggaaatataacaatgcctgccctgcttatctcatggagctcctgggaggatcaaaattaccagtgtatatgaccatgccagaaatcagttaagtgtgaggcacgttaaagcattttaaagcattatgtttggaaataatttcaagtttacaaaaagttacaaaatgagaaatggtacaaagaatattcatattcattttatccagatttacttattgtttgtagtttaacccatgtattatttattcttattctctgtctcatgtatatatactatatggacatgtggttatatatgtatgtttatacataattttttcctgaaccatttttatattatgtatattatggytctttacccctgaatacttaacagtgtgtttttcctaagaataagattattatatgccacagtatagttaacggttgtatacatttacattgttacaaatactcttatctaatccatcacccgtattacaaattttttgcttggtctaataatactctttatagcattctcccttccagtgcaggatcc

SEQ ID NO: 59228 - DNA, 626 bp, Homo sapiens
aagtaatccgcctgcctcggcctcccaaaatgctgggattataggcatgagccaccacacctggccttggtgagatattttccaaactcatccccctcacccagctccccaaggggccatgcaggggagagaggagttgcaggcatggccaagtagccaacactccatccactggaggtaagagcgtgggggaagtggtccagcccaagtctgtacaaacgagggtctctgtggatttgttcctctgcaccaaggttttttccagcctccttctcccctccacctccctccccagggttctttagcctactggaaggagcccactcatggtaccatggcagacaggcagtcaggatatactggaaggaaccctgggtcctaatctgggatcatcagctgcttcatcttgtcagcctcacttgagagctccaggcgatcagataagagcatgtgtgacatgagggactgctcaatgggtgatctccagaccctatgcaatcctcacttcaaggctgggccctccgccagcrgaacaggagtctgtcctaagtttatctccaccacctctctgtgccttgggaagcctgggagggaactaactcactctccccaccagcttcccagca

SEQ ID NO: 59229 - DNA, 2275 bp, Homo sapiens
gcctcagcctcctgagtggctgggactacaggtgcatgccaccatgcccagctaatttttttttattttttattttttagtagagacggggtttcgccatattggccaggctggtctcgaactgctgaccttgtgatccgcctgcctcagcctcccaaagtgctgggattacatcacctgggttctttaaaagaaaaaacaaaaccaaaacgactgctgcctgactcccaccctgagatattctgatttcactggtagggtgtgcagcccaggcactgggaattttcaaagctccccaggtgattgtgaggtgcggcaaagctgggagccactgagctgcggcattctttcagagctgtggctcggtcagcctgatggccttcactcagcctctgggcagggcttgcagtaatgcaggatggccatctgatagctccaagctactgagtctgcaagcctcacctgggctccaggctatgtgtcctccagtgggttgacractgtgactgctttgctgcgtcaaggtccagagcagtagtgtgggagagagttagactgtcagaactctgacgcgggtagaggcaaacaggtgggaagggctggagagagggggctggatagggttgggaatcagacagaagccttggtcccatcccacacagggaggctcactgctgccctgggtggactgtcaggacaaggatggctgctcctgctctgaggggctggccagcaattttggcacttcaaggagaaggttaagatgaagagctcaaggatcctccaggctcagtactgacttttctgcatgaccttgggtccgttgttcaatgtctttgagtccaagtttagcagagaggatccttgctgaaatgctgtgtgagccacaattgcaaagctaacagctcctatgtcttgagcccttaacacagtatctaatacagagtaaggatgtcataggcactactaactgtgggatatgtgctattattatccccattttatagatgaagaaatgaaggtctggagagatcaagtagcttgcccagggtgaacctgctaataagtggtaaaccaagtctgtctcattcagtctggactgttctccccaacgtgatcaaatggcaaacaaggctcttcccaagtagatgaggacttttcccaaatcactgcaaatgagtttggtacaagaaacacaaaaagcgtgacttcccaggctggagtgcagtagtacaattgcagctcagtgcagcctcagctcctgggctcaagtggttttcctgcctcagcctccttgaatagctgggactacaaggcacacaccagcgtgctccgctaatttttaaattttttgtagagacaggggtctcgtttggcctgaagatttcatattcctggtttcaagcgataagcctgcctcagcctccccaaatcctgggattacagatgtgagccaccacaccgagccgaagtctttttcttataggaaaaatcattccttctagaccaaactttcttatggaaatctgacaaacactatgaggcatggggccttgagaactgagaggtgacccaccctagaaggatctggacatagaagctgctgtggccagtgcaggcagtgagtgagtggcctgggtgagggtaaggctattctcccccacactgcactctccaactccaccccgtcctaggccaatggagaaacctggagttaaagggacttgggaaagctggtttcctttcggtgtcttccactcccaattccctcccttgctgatgaaattggagatgccagaggtgggtatgaaatggtagcttctgggtcagaggctaacctgaaaatcagactttagaaacctgggtggaggtctgaaccactgtagagattcaaatgaggtgctcacaatctccagatgcattttctaactgggcagtcagatgaccagcataccctcactccaatccccagcaccccacccccgccatcagccactactgccagcacatcacagctacctgggtacttcttagcctctcccttcagatcacagcaataaaaaccttccagatgtagctaaaggctataaaagctcagccctacccattgcctttcactgtcctggccacagccagggaagtctctctgcaggattctagtgcagccacaagatgacatccagtgggcagggggttgggagcctcacagcctggcctaaggctaactttcaaggacaaagggcttggacagaagattagatccccgattcctgat

SEQ ID NO: 59230 - DNA, 2275 bp, Homo sapiens
gcctcagcctcctgagtggctgggactacaggtgcatgccaccatgcccagctaatttttttttattttttattttttagtagagacggggtttcgccatattggccaggctggtctcgaactgctgaccttgtgatccgcctgcctcagcctcccaaagtgctgggattacatcacctgggttctttaaaagaaaaaacaaaaccaaaacgactgctgcctgactcccaccctgagatattctgatttcactggtagggtgtgcagcccaggcactgggaattttcaaagctccccaggtgattgtgaggtgcggcaaagctgggagccactgagctgcggcattctttcagagctgtggctcggtcagcctgatggccttcactcagcctctgggcagggcttgcagtaatgcaggatggccatctgatagctccaagctactgagtctgcaagcctcacctgggctccaggctatgtgtcctccagtgggttgacaactgtgactgctttgctgcgtcaaggtccagagcagtagtgtgggagagagttagactgtcagaactctgacgcgggtagaggcaaacaggtgggaagggctggagagagggggctggatagggttgggaatcagacagaagccttggtcccatcccacacagggaggctcactgctgccctgggtggactgtcaggacaaggatggctgctcctgctctgaggggctggccagcaattttggcacttcaaggagaaggttaagatgaagagctcaaggatcctccaggctcagtactgacttttctgcatgaccttgggtccgttgttcaatgtctttgagtccaagtttagcagagaggatccttgctgaaatgctgtgtgagccacaattgcaaagctaacagctcctatgtcttgagcccttaacacagtatctaatacagagtaaggatgtcataggcactactaactgtgggatatgtgctattattatccccattttatagatgaagaaatgaaggtctggagagatcaagtagcttgcccagggtgaacctgctaataagtggtaaaccaagtctgtctcattcagtctggactgttctccccaacgtgatcaaatggcaaacaaggctcttcccaagtagatgaggacttttcccaaatcactgcaaatgagtttggtacaagaaacacaaaaagcgtgacttcccaggctggagtgcagtagtacaattgcagctcagtgcagcctcagctcctgggctcaagtggttttcctgcctcagcctccttgaatagctgggactacaaggcacacaccagcgtgctccgctaatttttaaattttttgtagagacaggggtctcgtttggcctgaagatttcatattcctggtttcaagcgataagcctgcctcagcctccccaaatcctgggattacagatgtgagccaccrcaccgagccgaagtctttttcttataggaaaaatcattccttctagaccaaactttcttatggaaatctgacaaacactatgaggcatggggccttgagaactgagaggtgacccaccctagaaggatctggacatagaagctgctgtggccagtgcaggcagtgagtgagtggcctgggtgagggtaaggctattctcccccacactgcactctccaactccaccccgtcctaggccaatggagaaacctggagttaaagggacttgggaaagctggtttcctttcggtgtcttccactcccaattccctcccttgctgatgaaattggagatgccagaggtgggtatgaaatggtagcttctgggtcagaggctaacctgaaaatcagactttagaaacctgggtggaggtctgaaccactgtagagattcaaatgaggtgctcacaatctccagatgcattttctaactgggcagtcagatgaccagcataccctcactccaatccccagcaccccacccccgccatcagccactactgccagcacatcacagctacctgggtacttcttagcctctcccttcagatcacagcaataaaaaccttccagatgtagctaaaggctataaaagctcagccctacccattgcctttcactgtcctggccacagccagggaagtctctctgcaggattctagtgcagccacaagatgacatccagtgggcagggggttgggagcctcacagcctggcctaaggctaactttcaaggacaaagggcttggacagaagattagatccccgattcctgat

SEQ ID NO: 59231 - DNA, 2275 bp, Homo sapiens
gcctcagcctcctgagtggctgggactacaggtgcatgccaccatgcccagctaatttttttttattttttattttttagtagagacggggtttcgccatattggccaggctggtctcgaactgctgaccttgtgatccgcctgcctcagcctcccaaagtgctgggattacatcacctgggttctttaaaagaaaaaacaaaaccaaaacgactgctgcctgactcccaccctgagatattctgatttcactggtagggtgtgcagcccaggcactgggaattttcaaagctccccaggtgattgtgaggtgcggcaaagctgggagccactgagctgcggcattctttcagagctgtggctcggtcagcctgatggccttcactcagcctctgggcagggcttgcagtaatgcaggatggccatctgatagctccaagctactgagtctgcaagcctcacctgggctccaggctatgtgtcctccagtgggttgacaactgtgactgctttgctgcgtcaaggtccagagcagtagtgtgggagagagttagactgtcagaactctgacgcgggtagaggcaaacaggtgggaagggctggagagagggggctggatagggttgggaatcagacagaagccttggtcccatcccacacagggaggctcactgctgccctgggtggactgtcaggacaaggatggctgctcctgctctgaggggctggccagcaattttggcacttcaaggagaaggttaagatgaagagctcaaggatcctccaggctcagtactgacttttctgcatgaccttgggtccgttgttcaatgtctttgagtccaagtttagcagagaggatccttgctgaaatgctgtgtgagccacaattgcaaagctaacagctcctatgtcttgagcccttaacacagtatctaatacagagtaaggatgtcataggcactactaactgtgggatatgtgctattattatccccattttatagatgaagaaatgaaggtctggagagatcaagtagcttgcccagggtgaacctgctaataagtggtaaaccaagtctgtctcattcagtctggactgttctccccaacgtgatcaaatggcaaacaaggctcttcccaagtagatgaggacttttcccaaatcactgcaaatgagtttggtacaagaaacacaaaaagcgtgacttcccaggctggagtgcagtagtacaattgcagctcagtgcagcctcagctcctgggctcaagtggttttcctgcctcagcctccttgaatagctgggactacaaggcacacaccagcgtgctccgctaatttttaaattttttgtagagacaggggtctcgtttggcctgaagatttcatattcctggtttcaagcgataagcctgcctcagcctccccaaatcctgggattacagatgtgagccaccacaccgagccgaagtctttttcttataggaaaaatcattccttctagaccaaactttcttatggaaatctgacaaacactatgaggcatggggccttgagaactgagaggtgacccaccctagaaggatctggacatagaagctgctgtggccagtgcaggcagtgagtgagtggcctgggtgagggtaaggctattctcccccacactgcactctccaactccaccccgtcctaggccaatggagaaacctggagttaaagggacttgggaaagctggtttcctttcrgtgtcttccactcccaattccctcccttgctgatgaaattggagatgccagaggtgggtatgaaatggtagcttctgggtcagaggctaacctgaaaatcagactttagaaacctgggtggaggtctgaaccactgtagagattcaaatgaggtgctcacaatctccagatgcattttctaactgggcagtcagatgaccagcataccctcactccaatccccagcaccccacccccgccatcagccactactgccagcacatcacagctacctgggtacttcttagcctctcccttcagatcacagcaataaaaaccttccagatgtagctaaaggctataaaagctcagccctacccattgcctttcactgtcctggccacagccagggaagtctctctgcaggattctagtgcagccacaagatgacatccagtgggcagggggttgggagcctcacagcctggcctaaggctaactttcaaggacaaagggcttggacagaagattagatccccgattcctgat

SEQ ID NO: 59232 - DNA, 648 bp, Homo sapiens
tcccatgctcaacagccacagtgtgtccttctggaatgaccctctgtgtcctctaccccaaggggcctctcccagggattctggtccacccggctaatgggctgtgctgaatcaggatggcctgcaaagccctcccggggggtgctccctggctgcttctttctcaggcccctmatggcttaggtgtgggttgggttgcaggacaagaatggtgaaaataattcaggaaactgctcactcgttctgcttcttggacagtcacacttgggacttgaatgagcctaggcacccggaggcacaaatactgttccagtagctctctctgggctaagctttgccctagatctgatgctcttcagggtcaggaacttcagtgtgatcctgggagttggggaaagcctccctcaggctcaagagagacccctgaacttagataatggttctcactggagacactaatgtgggagagaacaggagagagccactcttttcctcactaggaataaaggctcctgacctgattccctctgcattgacacttcctccatcaaattattttaaagttagcataggaaactatgagtctcataaaaataaacgagctagtcctgatatttgggctaataccaatactttcaaggataaagc

SEQ ID NO: 59233 - DNA, 922 bp, Homo sapiens
gttttaccaaagcttaaaaaaaaagatgtttgtattctttgatgccaaagagtctgctagaaatcctttcaagagcatgactagctacgatctgcccaaagacctatgtgcaagcataacacaggatgtaaatgatcaatgaacaaatagtgaagtccaaatatcatggtacatccacatactggagtactatactgtcatcagcagtcatatttatgcagagctatttctggattgggaaatgcttatactgccacattgactttaaaatgcaggatacaaaataatacatatggtatgatctcagcttggtaaattaaaaaagcacagaaaacatatggcacacaagaaggctaaaatatgaacctctgtggaggtgatattagaaggaattttttcctttttccttagcatttctctatcttttccaagtctacaatgagcacatattacaagaaaactattttgtagaaaaatagtcaaaaagcaaattaagaagcaaagatacggccgggcgcggtggctcacrcctgtaatcccagcactttgggaggccgaggagggcggatcatgaggtcaggagatcgagaccattctggctaacatggtgaaaccccgtctctactaaaaatacaaaaaattagccgggcagccaggcgtagtggcaggcgcctgtagtcccagctacttgggaggctgaggcaggagaatggcgtgaacccgggaggcagatcttgcagtaagctgagattgtaccactacactccagcctgggtgacagagtgagactctgcctcaaaaaaaaaaaaaaaaaaaaaaagcagcaaaaatatgctcattacttgagagtcttctgctactctccgagtaatacagataaaaaatgtgcctccctcctgcgtgcaggacaagagagaaatgc

SEQ ID NO: 59234 - DNA, 651 bp, Homo sapiens
gttctgtttgtgagattcacccacactgctatgtctcgcaccaggtcattcattttggttactgtgttgtatcccattgtagaatagattatggtttacttattcattatttctgttgctgagcatttgggttgtttccagttctggtctattacaaataacactgctatgtggagtgaaagaagtcagatacataaaaatgcatacagtgtgcttccattccactggctcacycagtctattggggtgtgtgtgtgtgtgtgtgtgtgtgtgtgtgtgtgtgtgtatgtgtgtgtgttctgagacaaggcctggctctgttgcccaggctggggggcagtggcacaatctcacctcactgcaacctccacagcccaggctcaaacatcctcccacctcagccttccaagtagctgggaccacaggtacgtgccaccacacccagttcatttttgtatttttggtagagatgggttttttccacgttggccacgctgatcttgagctcatgagctcaagtgatccacccgtcgcggcctcccaaagtgctgggattataggcgtgaggcaccatgcccagcttccagtctacggttttaaagggaaaggatggtacctggcagaggacatgagggaggctcttctgtttct

SEQ ID NO: 59235 - DNA, 651 bp, Homo sapiens
gttctgtttgtgagattcacccacactgctatgtctcgcaccaggtcattcattttggttactgtgttgtatcccattgtagaatagattatggtttacttattcattatttctgttgctgagcatttgggttgtttccagttctggtctattacaaataacactgctatgtggagtgaaagaagtcagatacataaaaatgcatacagtgtgcttccattccactggctcacccagtctattggggtgtgtgtgtgtgtgtgtgtgtgtgtgtgtgtgtgtgtgtatgtgtgtgtgttctgagacaaggcctggctctgttgcccaggctggggggcagtggcacaatctcacctcactgcaacctccacagcccaggctcaaacatcctcccacctcagccttccaagtagctgggaccacaggtacrtgccaccacacccagttcatttttgtatttttggtagagatgggttttttccacgttggccacgctgatcttgagctcatgagctcaagtgatccacccgtcgcggcctcccaaagtgctgggattataggcgtgaggcaccatgcccagcttccagtctacggttttaaagggaaaggatggtacctggcagaggacatgagggaggctcttctgtttct

SEQ ID NO: 59236 - DNA, 651 bp, Homo sapiens
gttctgtttgtgagattcacccacactgctatgtctcgcaccaggtcattcattttggttactgtgttgtatcccattgtagaatagattatggtttacttattcattatttctgttgctgagcatttgggttgtttccagttctggtctattacaaataacactgctatgtggagtgaaagaagtcagatacataaaaatgcatacagtgtgcttccattccactggctcacccagtctattggggtgtgtgtgtgtgtgtgtgtgtgtgtgtgtgtgtgtgtgtatgtgtgtgtgttctgagacaaggcctggctctgttgcccaggctggggggcagtggcacaatctcacctcactgcaacctccacagcccaggctcaaacatcctcccacctcagccttccaagtagctgggaccacaggtacgtgccaccacacccagttcatttttgtatttttggtagagatgggttttttccacgttggccasgctgatcttgagctcatgagctcaagtgatccacccgtcgcggcctcccaaagtgctgggattataggcgtgaggcaccatgcccagcttccagtctacggttttaaagggaaaggatggtacctggcagaggacatgagggaggctcttctgtttct

SEQ ID NO: 59237 - DNA, 619 bp, Homo sapiens
ccgctggtgggcaggaggacgctgtggccggcaggaggctgcagaggggacagcccctgcctcctaactggagcaccggggaccctcaccagccatccacaccgccagcgaggtttcctgacttgcctagccttccgggtggcattttggaatataaagcaggaggaaaattagcagcaagtcagattctctcactttgatttctagaaggaaagctagagttgaggccgtgttcgaaaatataggtcagatctcggtttctgtggttaccaaacactgtcarccaccagtgactccctccctcgggggcgatgccagggttccgaggctgggcagtcgggcctggcccccgccggggtccccggtcggctgccccgcgagcctggagggtctgcaccggggcgagggcccgcgggcaccccgcccttcacttcttctcgggggaggggccggagggcttggcggagctgccgacggggtccggggtcgcgccgatcccgcctggctccccgcgcctggggctgcagggtgggcacgggccgggcccgcgggaggagggggaggccgggcgccgcgggaacaatgtgctcggttgttgccgactgtcagcctcgttccc

SEQ ID NO: 59238 - DNA, 585 bp, Homo sapiens
ggctcagggtcagaaaactggatcataacttggcttagaagtgtttttgattatatatatacttggggatgtttctgccggcagcccatttatctttcccctaggaacaccgtgttctatgattcacagatccctcagatccctgagtctgtagaacccttagttcactccccacccccatggccattccaactttgcagctcataacagtaattatactcaccttttttatgagacttatgggctgccatccgccctctgctaggcctgtagccagtggctctcaaagtctagtatctggatgagcaacagcagcatcacctgggaacgttttagaaatgtacactctctagccccggcccagacctgcggatgaaaccttgtgtgttttgacaagcctccagttgatttgaatgcatgctagtttgagagccactgctgcgtcttctcatgcccaccagagaggccagctctgtaacagcgtctcttctgtcagtccctcccctccagaggacaggtaccactcmgcttctcagtggggtggtgcccctcaccagctgcttccttatcactgtgatagatgga

SEQ ID NO: 59239 - DNA, 528 bp, Homo sapiens
ctttccatccagcayggtgaactgtctaaactagagcttcccaggagaaaaggcagtcccagcaccaataccaaagacagctaccagcctgtgcccacccactcccacccgcccatttatgcaggggccagatgcaggctgaggagaccctctggagacaccctttacagtcaatccaattcctctgcaagaactacaaacactaaggaaatcaaggaattaatgccagacttcatgatgaaaatggagccaaataaaagcagcagccttacccaggttgtagtctttgtgttatgatcaatgaagaagggccggccgtttggcgctatcctcatttcccagccgggtggcaagaagctctgtgtgactttgtgttgtggtttgggggagttgtaaggtgatggctgtggggactgtgggttggaaagggtgtctttcacagcccgacgtacgggtgagtccttggcaccctaaagaataacaatgaggattagaactctttagcatgtgcgattccaatgtgccaaa

SEQ ID NO: 59240 - DNA, 641 bp, Homo sapiens
caggatagctaggactacaggcatgagccaccatgcctgggcagatttcattttagaaatggaatttttgaagcacattttgctttcttaactatctaaaacgtgtacatcaagtagctgtgaaccaggtgttccaactatgaaaatgaacactatcatgttaagtccttaaggtaccttcagaagtgacactataattcagtgcagtcattctcaaatttaccctctctgaaacttgtatggtatgttgactggttaaaaggtgttcttaagaatcctttctgcagtattcaattgaaactccagatttttaatagctggacgttaatagaatatttgaattggaggagccttatacaataactcatttaactcctgttrttgtcgatgagaagaaccaggtctagagcctttacataaacacatcagtcagtggaggtgccagggtctgacctgctggcctcctaagtcccagcccagtgatagtttgggaatgtattgaatctcatatgattagtattattctccaaaagagaaaactaacagattttggcctaccatcctagtatcttttccattaaagtatgggatgttgggtgatgaacagtcgtacagtgtaactaaaccacttttgttgtatg

SEQ ID NO: 59241 - DNA, 989 bp, Homo sapiens
agagaaaaaaaaaaaaaaaaaagcctaagaagtaggatttattatcacgcttgaaaatgtcaaggaaatggatgagttatgacatgtgtgagtcattaaatgtattttaaaagtctaccagctctcgaatgaccaatagaagaaagagaaactaaatctatcagaaacgatttgaatttcaaagtatttaacatgcttaataacaaccccagcccatctaacccccaagaaagaagtaagcaagataatgagtgatgatgtgggttgcaagtaggctcctcaaagttattatacagggaagtaaaagtcacttgactcactgtgatctacaaaaattaagtcacaaaagaaggctgtgtaaactctaggaacctgtgaaaagctgatctgcctgggggaaattccagtctcttgctacctggaggaatttactctgctctgcttactggatacgtggcataatgcttaacattaaaacaaacactgaatggtttccagaaatagggaggttgtgcaggcacttaagggaaccaatacaaagtttccgaatactaaagtgtagcaacgagtcaaatcagagataggagggcccccttccagctcaattatgatccgtccttttatttgatttcatgacctgtcccttcacagagatttaatcactgtactcaaaagtgtcagaacagtccacagttctaaaattgtcagggcataaaaaacaggcttcttgaaatacaattgattccatcctccatcctgaaagaaactaagcttcctgtcaaaacatggtgatgcctagagaccaggaaagtgcccgtttaggacatggcatgaaaccagccaggacatcaggggctaactttcaggcccactcacatcaggccacctgtctcactgagttactcatttattctcctctgtatcctagttggcccaaggaagccacagcrgaataatcaagagattccaaaggagaactccagtgagaa

SEQ ID NO: 59242 - DNA, 541 bp, Homo sapiens
tagttcattgattctgaattattggttgagggtaaagacccatttaagacctatcatttctgttttaaacacacttcccaggtaagtgttctgtccattgacgtttatgaaacatacaccaggctgggtgtggtggtgcacacctgcaatcccaacactttgggagcctgcggcaggcagatcacctgagatcgggagctctagaccagcctgaccaatatggagaaccccatctctactaaaaatgcaaaattagccaggcgtggtggtgcatgcctgtaatccctgctactcaggaggctgaggcaggagaatcacttgaacccaggaggtggaggttgcggtgagccgagatygagtcattgcactccagcctgggccacaaaagtgaaactctgtcttaaaaaagcaaaacaacaaaaaacatccacctaagctatgacacaggaagtaggaaagctggagctgtggaagggaaatattagataatatctgttgggctggcctcatagaagaaaacaaaacaacactaactctccac

SEQ ID NO: 59243 - DNA, 1310 bp, Homo sapiens
tttgggctggtttctttgctacatcagcagggtggtgaccaaggctgggaaaacaaatcctgctgatcttctacctccactctgcaacgcaggccccaggaaggacatctacttctgtgcccctctgttttcagctctaaagaaaaayagacgcgtgacatagtcacagagttcttcactcaccacatcatttttcctttctgcacttccctcctcgagtgcatgtcctgaggggaattcatcagctttcagttgggcccatctctaagccctgtaggccacgaactgtaggaacatattcatttttgcacataagctccgaagacctgtacttaggattagtcccaagaaacatcagtttaagcgtggcgacaggggggttcaatttgttcccctacacggatccggagcgccttctaaaggaggcgctctaatgtggggcatgtttgccccacatttactcctgaattaccagttgctgtcttaatgagctatttgctcaagggaatgtgtcataaacctcaggctggctactggggaaaaaaagatgagaatctgtgctttggagtaatcagacactcccccactccggcctggcgttatagaaagttgcctggccagctccaggcaggccaacctgctctggcaggaccatgaagcgtagggtgtaatttttggtttcacccctgctgcagcagttggataatgaaccctatatctctttaacctttgtttctgccaggctagactgcgagcaccaatgaataaacagctgtctaccgtcaaaaataacataggctgaagtttgtggaaagatagactctaactagatggttttagtttttaaaatcctccactctggtccaagaaatcaactgtacgtgcacagagcagaaagctgcatccacagcagctcagcaaaggaggctgagaggtttaattcatgaatacttcaacagatgtcagtggcatgacttctttttaactgtaggcccagtatagcatcatctagatcaaggaaagaagaaagatcataatttctctgcactttacaatttgtttagtctagggcaccatactagagacggtttggaagagaaccaaaactgtcttatgaagaattgttgaagaaattgagaatatttaggctgaacaagaaaagatctgggggtgtgaagatatccataacagttatatccaagtatttgaagacttgtcctgttaaaaagaaattaaacatgtttgctgttgggtcattgccgtggcatttgtaaactgtcatggtgcccgtgggagtcttatgcaaatgc

SEQ ID NO: 59244 - DNA, 1310 bp, Homo sapiens
tttgggctggtttctttgctacatcagcagggtggtgaccaaggctgggaaaacaaatcctgctgatcttctacctccactctgcaacgcaggccccaggaaggacatctacttctgtgcccctctgttttcagctctaaagaaaaatagacgcgtgacatagtcacagagttcttcactcaccacatcatttttcctttctgcacttccctcctcragtgcatgtcctgaggggaattcatcagctttcagttgggcccatctctaagccctgtaggccacgaactgtaggaacatattcatttttgcacataagctccgaagacctgtacttaggattagtcccaagaaacatcagtttaagcgtggcgacaggggggttcaatttgttcccctacacggatccggagcgccttctaaaggaggcgctctaatgtggggcatgtttgccccacatttactcctgaattaccagttgctgtcttaatgagctatttgctcaagggaatgtgtcataaacctcaggctggctactggggaaaaaaagatgagaatctgtgctttggagtaatcagacactcccccactccggcctggcgttatagaaagttgcctggccagctccaggcaggccaacctgctctggcaggaccatgaagcgtagggtgtaatttttggtttcacccctgctgcagcagttggataatgaaccctatatctctttaacctttgtttctgccaggctagactgcgagcaccaatgaataaacagctgtctaccgtcaaaaataacataggctgaagtttgtggaaagatagactctaactagatggttttagtttttaaaatcctccactctggtccaagaaatcaactgtacgtgcacagagcagaaagctgcatccacagcagctcagcaaaggaggctgagaggtttaattcatgaatacttcaacagatgtcagtggcatgacttctttttaactgtaggcccagtatagcatcatctagatcaaggaaagaagaaagatcataatttctctgcactttacaatttgtttagtctagggcaccatactagagacggtttggaagagaaccaaaactgtcttatgaagaattgttgaagaaattgagaatatttaggctgaacaagaaaagatctgggggtgtgaagatatccataacagttatatccaagtatttgaagacttgtcctgttaaaaagaaattaaacatgtttgctgttgggtcattgccgtggcatttgtaaactgtcatggtgcccgtgggagtcttatgcaaatgc

SEQ ID NO: 59245 - DNA, 1310 bp, Homo sapiens
tttgggctggtttctttgctacatcagcagggtggtgaccaaggctgggaaaacaaatcctgctgatcttctacctccactctgcaacgcaggccccaggaaggacatctacttctgtgcccctctgttttcagctctaaagaaaaatagacgcgtgacatagtcacagagttcttcactcaccacatcatttttcctttctgcacttccctcctcgagtgcatgtcctgaggggaattcatcagctttcagttgggcccatctctaagccctgtaggccacgaactgtaggaacatattcatttttgcacataagctccgaagacctgtacttaggattagtcccaagaaacatcagtttaagcgtggcgacaggggggttcaatttgttcccctacacggatccggagcgccttctaaaggaggcgctctaatgtggggcatgtttgccccacatttactcctgaattaccagttgctgtcttaatgagctatttgctcaagggaatgtgtcataaacctcaggctggctactggggaaaaaaagatgagaatctgtgctttggagtaatcagacactcccccactccggcctggcgttatagaaagttgcctggccagctccaggcaggccaacctgctctggcaggaccatgaagcgtagggtgtaatttttggtttcacccctgctgcagcagttggataatgaaccctatatctctttaacctttgtttctgccaggctagactgcgagcaccaatgaataaacagctgtctaccgtcaaaaataacataggctgaagtttgtggaaagatagactctaactagatggttttagtttttaaaatcctccactctggtccaagaaatcaactgtacgtgcacagagcagaaagctgcatccacagcagctcagcaaaggaggctgagaggyttaattcatgaatacttcaacagatgtcagtggcatgacttctttttaactgtaggcccagtatagcatcatctagatcaaggaaagaagaaagatcataatttctctgcactttacaatttgtttagtctagggcaccatactagagacggtttggaagagaaccaaaactgtcttatgaagaattgttgaagaaattgagaatatttaggctgaacaagaaaagatctgggggtgtgaagatatccataacagttatatccaagtatttgaagacttgtcctgttaaaaagaaattaaacatgtttgctgttgggtcattgccgtggcatttgtaaactgtcatggtgcccgtgggagtcttatgcaaatgc

SEQ ID NO: 59246 - DNA, 1310 bp, Homo sapiens
tttgggctggtttctttgctacatcagcagggtggtgaccaaggctgggaaaacaaatcctgctgatcttctacctccactctgcaacgcaggccccaggaaggacatctacttctgtgcccctctgttttcagctctaaagaaaaatagacgcgtgacatagtcacagagttcttcactcaccacatcatttttcctttctgcacttccctcctcgagtgcatgtcctgaggggaattcatcagctttcagttgggcccatctctaagccctgtaggccacgaactgtaggaacatattcatttttgcacataagctccgaagacctgtacttaggattagtcccaagaaacatcagtttaagcgtggcgacaggggggttcaatttgttcccctacacggatccggagcgccttctaaaggaggcgctctaatgtggggcatgtttgccccacatttactcctgaattaccagttgctgtcttaatgagctatttgctcaagggaatgtgtcataaacctcaggctggctactggggaaaaaaagatgagaatctgtgctttggagtaatcagacactcccccactccggcctggcgttatagaaagttgcctggccagctccaggcaggccaacctgctctggcaggaccatgaagcgtagggtgtaatttttggtttcacccctgctgcagcagttggataatgaaccctatatctctttaacctttgtttctgccaggctagactgcgagcaccaatgaataaacagctgtctaccgtcaaaaataacataggctgaagtttgtggaaagatagactctaactagatggttttagtttttaaaatcctccactctggtccaagaaatcaactgtacgtgcacagagcagaaagctgcatccacagcagctcagcaaaggaggctgagaggtttaattcatgaatacttcaacagatgtcagtggcatgacttctttttaactgtaggcccagtatagcatcatctagatcaaggaaagaagaaagatcataatttctctgcactttacaatttgtttagtctagggcaccatactagagacggtttggaagagaaccaaaactgtcttatgaagaattgttgaagaaattgagaatatttaggctgaacaagaaaagatctgggggtgtgaagatatccataacagttatatycaagtatttgaagacttgtcctgttaaaaagaaattaaacatgtttgctgttgggtcattgccgtggcatttgtaaactgtcatggtgcccgtgggagtcttatgcaaatgc

SEQ ID NO: 59247 - DNA, 1597 bp, Homo sapiens
atgggctggtcctaccagctggaacagtgtttgttgctctttgtgtggggaaactggggacaaatggaaactcaggctgggaagtgaggttggtactagagatgcattagagatttgatcatctgagcaagaacaaaactagccttagagagtgctcccctcccaaacagatcctccaggcggctggggagagctgcagcaacaaaggacgcttctgatttgcaccctagtgctccagaaagaatctaacactgcccccctaccaccccttctctatttgtcctggccagttcaggcagtcacagaattgggtaaataaaaatttttttttttttttttttttttttgagacggagtctcgttctgtcgcccaggctggagtgcagtggcacaatcttggctcactgcgacctccgyctcccgggttcacgtgattctcctgcctcagcctcctgagtagctgggattacaggcgcacaccaccacacccggctaattttttgtgtatttttagtagagacagggtttcactatgttggccaggctggtcttgaactcctgagcttgtgatccatccaccttggcctcccaaagtgctgggattacaggcgtgagccaccgtgcccggcctaaaaaatcttattttattttatttttttgagatggagtctcgctcttttgcccagattacagtgcaatggcatgatcttggctcaacgcaacctctgcctcccgggttcaagtgattctcccacctcagcctcccgaatagctgggactacaggcgcccaccaccatgcctggctaattttttgtattattagcagagacgtggtttcaccatgttggccaggctggttttgaactcctgacctcaaatgatctgcctgcttcagcctcccaaagtcctgggattacaggcatgagctaccgtgcccggcaaaaattcttaaaattgatatttgagttgtgaatagaatgacagatttgtttcaaggtttcaatgatttatatccaaacagaggttttcctgaaagaaaatgtctgaaaattaattttttgtttgcatcctgcattttctttaagaactagaaatacacagaagccccttgcattatggctatttaaaaatgctcaacaatctcccacacttccaaaagtagagtacgaatgtcagggaaaaaccactacttatcattcgttccagaatgatccttacagcatgaaatgaatgaatgtactgtgcatttaaatgttaatatgctggcaggtcacggggctggccgtcaagactgaatacacttgtttaagtttaaggtggccgcagagacccccccccgcccttcaggaaggcacaactaaagcgaaccatcattacagctgttccccaccggggcctcccagccccactccaagacaggagggaactttggtgtttacaggctgtaggggttttatgacaggggtgcttcctgccttcctgcccggctgaacagagagcgccaatcctccagactttgtgagtcttcctcctgcaccttttcttccacctgccacacaatgagtccttattattcctttaattactgagctggat

SEQ ID NO: 59248 - DNA, 1597 bp, Homo sapiens
atgggctggtcctaccagctggaacagtgtttgttgctctttgtgtggggaaactggggacaaatggaaactcaggctgggaagtgaggttggtactagagatgcattagagatttgatcatctgagcaagaacaaaactagccttagagagtgctcccctcccaaacagatcctccaggcggctggggagagctgcagcaacaaaggacgcttctgatttgcaccctagtgctccagaaagaatctaacactgcccccctaccaccccttctctatttgtcctggccagttcaggcagtcacagaattgggtaaataaaaatttttttttttttttttttttttttgagacggagtctcgttctgtcgcccaggctggagtgcagtggcacaatcttggctcactgcgacctccgcctcccgggttcacgtgattctcctgcctcagcctcctgagtagctgggattacaggcgcacaccaccacacccggctaattttttgtgtatttttagtagagacagggtttcactatgttggccaggctggtcttgaactcctgagcttgtgatccatccaccttggcctcccaaagtgctgggattacaggcgtgagccaccgtgcccggcctaaaaaatcttattttattttatttttttgagatggagtctcgctcttttgcccagattacagtgcaatggcatgatcttggctcaacgcaacctctgcctcccgggttcaagtgattctcccacctcagcctcccgaatagctgggactacaggcgcccaccaccatgcctggctaattttttgtattattagcagagacgtggtttcaccatgttggccaggctggttttgaactcctgacctcaaatgatctgcctgcttcagcctcccaaagtcctgggattacaggcatgagctaccgtgcccggcaaaaattcttaaaattgatatttgagttgtgaatagaatgacagatttgtttcaaggtttcaatgatttatatccaaacagaggttttcctgaaagaaaatgtctgaaaattaattttttgtttgcatcctgcattttctttaagaactagaaatacacagaagccccttgcattatggctatttaaaaatgctcaacaatctcccacacttccaaaagtagagtaygaatgtcagggaaaaaccactacttatcattcgttccagaatgatccttacagcatgaaatgaatgaatgtactgtgcatttaaatgttaatatgctggcaggtcacggggctggccgtcaagactgaatacacttgtttaagtttaaggtggccgcagagacccccccccgcccttcaggaaggcacaactaaagcgaaccatcattacagctgttccccaccggggcctcccagccccactccaagacaggagggaactttggtgtttacaggctgtaggggttttatgacaggggtgcttcctgccttcctgcccggctgaacagagagcgccaatcctccagactttgtgagtcttcctcctgcaccttttcttccacctgccacacaatgagtccttattattcctttaattactgagctggat

SEQ ID NO: 59249 - DNA, 1144 bp, Homo sapiens
gcatttaatattatggttaaagcaamaattgatcaatttcagaggacagttacaataagcttgatttttgcgtaagaattcttcataaattgaaacatctcatcaaattgatgtgaaataatatattacttgctacataataaattataatgtattaatcactactgtctaattagcatcatgcgttattgaattttaattccctttggttagatacccaagtattcaaaatatgtttaaacagtttacactggcatctggaatgcaagtgtgtgatcacacacacacacacacacacacacacacatacaaagggatgtgcctctgtctctctgtgtacctgtatcatttctgtggttggttggtttgtctgtctgtctagctatgcctatacctgtatcagctctcaattatccactggcaggtaaaatactataaagctggtggtcaactgggcctgtatttttgcctcccgctactccttgtggacagtatttccatgttttatgccctcacacctgttcaaccaatgcccacgatgaccagctctgagtcggccacctttggttgctcaacgcgtcctcctcccaagggagcaattccctggagaacaggcgcctagtgagggccgagggcagcattctaaggctggtgtgtgcatgagctgagacacgagtcaggaggagcctggcaaggtgtggaatgggaaaggctgccaccatcccagatcttcctgaattaggtcgaggtggcaggggctcagagtctgccgtgaaagactgtgatttctccatgaaggcaggaacctgtgcctctctgttcggtaacacagcctgcctccctgccttccttctcagaatgagctgcccacgcttggaggatgctgtgtgctgttgcttcccattgaggtggccccaaagcaccctgtgctcgtttcaggaggcacatcatggatgcatgtggacgtgacccagtaaagccagggtgtatggaatgaaaggcagtggttctccccaccttgagtataaaacatcttttaaaaagggaagcaaattacattataataataatgactgtggtctggtttaccctggttaaagagggtaataaaataagacacttcatctttctgaaagacagactc

SEQ ID NO: 59250 - DNA, 1144 bp, Homo sapiens
gcatttaatattatggttaaagcaaaaattgatcaatttcagaggacagttacaataagcttgatttttgcgtaagaattcttcataaattgaaacatctcatcaaattgatgtgaaataatatattacttgctacataataaattataatgtattaatcactactgtctaattagcatcatgcgttattgaattttaattccctttggttagatacccaagtattcaaaatatgtttaaacagtttacactggcatctggaatgcaagtgtgtgatcacacacacacacacacacacacacacacatacaaagggatgtgcctctgtctctctgtgtacctgtatcatttctgtggttggttggtttgtctgtctgtctagctatgcctatacctgtatcagctctcaattatccactggcaggtaaaatactataaagctggtggtcaactgggcctgtatttttgcctcccgctactccttgtggacagyatttccatgttttatgccctcacacctgttcaaccaatgcccacgatgaccagctctgagtcggccacctttggttgctcaacgcgtcctcctcccaagggagcaattccctggagaacaggcgcctagtgagggccgagggcagcattctaaggctggtgtgtgcatgagctgagacacgagtcaggaggagcctggcaaggtgtggaatgggaaaggctgccaccatcccagatcttcctgaattaggtcgaggtggcaggggctcagagtctgccgtgaaagactgtgatttctccatgaaggcaggaacctgtgcctctctgttcggtaacacagcctgcctccctgccttccttctcagaatgagctgcccacgcttggaggatgctgtgtgctgttgcttcccattgaggtggccccaaagcaccctgtgctcgtttcaggaggcacatcatggatgcatgtggacgtgacccagtaaagccagggtgtatggaatgaaaggcagtggttctccccaccttgagtataaaacatcttttaaaaagggaagcaaattacattataataataatgactgtggtctggtttaccctggttaaagagggtaataaaataagacacttcatctttctgaaagacagactc

SEQ ID NO: 59251 - DNA, 1666 bp, Homo sapiens
ttgggaggccgtggtgggtggttctcttgaggtcaggagtttgagaccagcctggccaacatggtgaaaccctgtctctactaaaaatacaaaaattagccggtgtggtgcaggtgcctgtaatcccagctactcaggaggctgatgcaggagaattgcttgaatccaggaggcagaggttgcagtgagccaagactgcgtcactgcactccagcgtgggcgacagagcaaaactctctctcaaaaaaaaaagaacttaattaaccaaataccacctgtaccccaataacttatggaaaaaaaatcagcattgtttaaactatgtaataaaaggtaggtccaggttttgtgggcccgaaacccacaaaagggaggctgagataggagaattgcttgaaccttgtggagggtggaggatgcagtgagccaagattgcrccattgcactccagcctgggtaacaagagtgaaactccatttcacaaacaaaaaaacaaaagtttgcagccaggtgcagtggctcatgcctgtaatcctcacactccgggaggccgaggctgggcgggccacctgaggtctggagtttgagaccagcctggccaacatagtgaaaacccgtctctactaaaaatacaaaaatcagcctggcatggtggcacacacctgtagtcctagctactcaggaggctgaggcaggagaatcgcttggatccagcaggcagaggttgcagtgagccaagattgcgccactgcactccagcctgggtgacagagcgagactctgtctaaacaaaacaaaacaaaaacagaagctttcaatgctgacttctgagtcctttgggactgctatatttcagtgttttctcggacagtaggaggtggccagggagttggggcagccactgggctttgtgtctgcatcagacgtgattcttgttagcagctgaaatttcactagtatgaaaacaggactcagacaagggcactgggttttttggtgctacttcagcaaactaatgcatgtcagccacctgctgtgacttgaaggccacctcctgtggatgctcccatccagataccagggggaaagcttagctccctgtactttctgcaatgcccaaaggcagggaaaagccaatctccccaccaacactaagctcacaggctgcactcttaagcattagagagactgtggcttatgtgccttttctcgacttagtggtgtagacgttcgcctttctaataacttcttggaccctcttttcctcatctgtcaaatgaggacagtgacatctacacaaggcagggctgttttgggatttgggatcacgcatttggatgacaccatggccacagtggttcccctgcaaacagcggctgtcacgactgaagaaaacaacctctctgataattcaatgttatgtgagcacacaggagctcacccgtggaagcggcacgtgtgggggaagtgctggtggcacggggccgcgggtaccgaaggcctgctgggcacgggaggcttctaaatcacggctgtgtgtacatacgagcttcacgcaactcctcatgctcagcatggtaggggggatgctcttggccagaggtcttgccaagcctgctggcatcttgtgagctcccccgagggtgcagaggatcctgagactctg

SEQ ID NO: 59252 - DNA, 972 bp, Homo sapiens
aaccaaaacaatgttatctaacctaaaacccaaccttgatcaccagatccggtgtctcatgacttccagctttttgcaaaatcaaagtcattctcggaaggaggccaggcctaaggtttactcggagctggctctgtgctggatccctctggagacatttgcacatatgctatctcgtttgctccttgcaacaaccttagttcattctttatcacattctgcatgaccaggttggtctgcagtttgcttttaaattggaagcatttgagctagtgacagttgtgttatctttcagtaacagttgttaataataactactgtttattgagtgcctggtacttatgtgctggattttgtrcttaacatgttaacatgtgcaacctctgtaatcctcacaaccgtctgtagagatcgatgctattagccttattcatctggtttgcagatgagacacgtaacacataaatcgcacagctaggatctgtctgtctcaagactctgtgctcctaattaggaggacatactgcttctctcattatttcttactctgttgccttctactaatggaccaaacagtcacgttcagttggaatgtgcaccccaagtggaggattgttcactgccaatcatcagacagctcctactaaagtgaaactacatttaatgctcatattgactggaagcttgtgagagatccttcagccagaatgcactcaaaaagccagaatttgctcaactgccgtgaatatatacccatacatgtgttaaattctgaaaaagctgccccgagaaggagggatgcattttctcctgctgatgtttgtttgatatagtgagttccaacaatatagcaaatggacccccataatcagtgataactcctcttaacagtttatcatttattccttcagatgcttttctgaatattcttacccatcttttaaaaattaacagcatggggtgagtcatacc

SEQ ID NO: 59253 - DNA, 715 bp, Homo sapiens
ataatgtcctaaagtccttgagaggaatttctcaaggaccattttccccttaaatctccacctctgccagttttgttcaggtcacttccctctctagagattctttacgtttcctcctgtccagggcatctgaaaccaccctcacaggttaacaagaatgacaagccatgctttargcagaattttagttaggcattgaccagggtgcacaggtgcactttgacccacttccctgcaccagctaactaaccgagagtcacagagcaggctgaccaccagctcctctattgttcctatcgatggaatctgtgacatttgacctttttacccaagaactgcttaaagtgtttttcagaacctgaattcctgcagaacggctgccaccaatcggtttaaagacccccaccaagaaactcactcagcacaggaatgttgtttcttcatctccctgtcccatgacttcactcctcacttctggaccaatcaacaatccccacactttagccatttgcccatacagagcccttaaaaacctcatccccaatcctctcagggaggtggatttgaggtttcctcttgtctcctcatttggctgccctaccattattaaaccctttctctgttgcaactccttctgttttggtgtattgatctattactgcacaatgggaaatcaaacctggtgttcctataatatatatgatcctctggcccc

SEQ ID NO: 59254 - DNA, 555 bp, Homo sapiens
ccaaatgagaaagaaaaccaaatttacttttcaatagaataatcatcagttggaagcctcaagaatttcctgacggtttttcaaactaaaatgtaatgccttctgaagtgctccttctctgcagtcaccttgaactttctgcactagtcctcaaagaggttcttcaaacttttagctttttgttaaacacccccaccacctcaacacatttatgtttatttcygattagagcctgtctatatgagcattctgaatcgtaactgcatatttaaaagtcaaactagagctgaaatggggtttgacgcaataaccgagatgattggtgataataaaaagtgatacattaagacaacgattttccaatataaaacatctaaagccccaataaattattttatgatttctggattgtatccccattctaaacttcatttttgaatccaaaggataagaggaacaacatacaaaagaaaataataaaacagatgcctttctgtatcacaacactgattccaaggataaaactgtatcagcttactaactttgaatagcatc

SEQ ID NO: 59255 - DNA, 528 bp, Homo sapiens
taggatttaagtctttaaatggcatttaccactagcataagataaaaattttcttttcttgcttttaaaaacttttgatactctaccttaagggtaagagtttcagggagcttagaatttgaggaatggcaggcagggcacggtggctcatgcctgtaatcccagcactttgggaggccgaggcgggcggatcacaaggtcaggagatcaagaccatcctggctaacacggtgaagccccatctctactaaaaatacaaaaaattagctaggcatgctggcgggcgcctgtagtcccagctactaaggaggctgaggcaggagaatggcgtgaactcaggaggcagagcttgcagtgagccgagatcgcggcactgcactctggcctgggtgacagagcaagactccgcctcaaaaaaaaaaamaaaaaaacaatttgaggaatggctgggtattttatgaaatactaatttcttaatatctactcctagaggtaaaaacaatgcttaattaggaaacaatacagttc

SEQ ID NO: 59256 - DNA, 1175 bp, Homo sapiens
cagaaggagatagacacaccggcgcccaagggaaggtgggcatcccttgatggggggagtggcattttctttccccaagtctgaggctgctgctcttgctgctgacacccccagaaactccagagggtgcagccctcactgaagggcccactccaaattgtgctgaatatcctccaaaagaaaacttattcttagtaaaggctttcccgtgacctttctcagagaggaaaacacacacactcttcactattgctattccccgccagctttccaaagaactactcccacactggcctcaggagggggagaaaccccagggaccaagggttaggagcagtacttcagaaagatttccagggaacagagaagaggatctgattaaagtccatcaactatgaggttttcttccaggcaattaaattwagcaagaacattccagttcgttcaggttgttccactgacagacacctttttttatagggaaaaaataatcttggtagtatggtaaaagatgattaattaagaccaccacaaggcatttatttgatttggggtttagaaaagcccatcaatttcacacagcaaaaaccaatttatctgtacctttaatatctaagttatcactaaatccattatgtgggagaggatcctatttttttgataatggcataaaatatggacaaaacatgaataattatgaaaaataaaacaagaacagcacacacaaaaacaaaactgttaataacaactcatcaggggaagcagatggctcaaaggcttgtgatggcaagccctgggcttcaccttctggctccagcaggtgccacagccaagcagacctgatgatgttcacagggatcagagagatcatcccatacccaggctccagaagtccaactcatacgacatcttatcctgtgcaccttctcctttcctacacccatgtcctgctttccagaggggcagtaaatactttgagagcagggaccacatctcattcatggctctgaagataatgagtcaatatgtagtttccagccatctagtcctgagctggaaacacagaaataaacattccacagatgtgctgatgagccctgattcttctgtctggccttcagcccgatgcctaggctccttccctgtgccagcgtcctggtccctgttaagcccag

SEQ ID NO: 59257 - DNA, 1175 bp, Homo sapiens
cagaaggagatagacacaccggcgcccaagggaaggtgggcatcccttgatggggggagtggcattttctttccccaagtctgaggctgctgctcttgctgctgacacccccagaaactccagagggtgcagccctcactgaagggcccactccaaattgtgctgaatatcctccaaaagaaaacttattcttagtaaaggctttcccgtgacctttctcagagaggaaaacacacacactcttcactattgctattccccgccagctttccaaagaactactcccacactggcctcaggagggggagaaaccccagggaccaagggttaggagcagtacttcagaaagatttccagggaacagagaagaggatctgattaaagtccatcaactatgaggttttcttccaggcaattaaattaagcaagaacattccagttcgttcaggttgttccactgacagacacctttttttatagggaaaaaataatcttggtagtatggtaaaagatgattaattaagaccaccacaaggcatttatttgatttggggtttagaaaagcccatcaatttcacacagcaaaaaccaatttatctgtacctttaatatctaagktatcactaaatccattatgtgggagaggatcctatttttttgataatggcataaaatatggacaaaacatgaataattatgaaaaataaaacaagaacagcacacacaaaaacaaaactgttaataacaactcatcaggggaagcagatggctcaaaggcttgtgatggcaagccctgggcttcaccttctggctccagcaggtgccacagccaagcagacctgatgatgttcacagggatcagagagatcatcccatacccaggctccagaagtccaactcatacgacatcttatcctgtgcaccttctcctttcctacacccatgtcctgctttccagaggggcagtaaatactttgagagcagggaccacatctcattcatggctctgaagataatgagtcaatatgtagtttccagccatctagtcctgagctggaaacacagaaataaacattccacagatgtgctgatgagccctgattcttctgtctggccttcagcccgatgcctaggctccttccctgtgccagcgtcctggtccctgttaagcccag

SEQ ID NO: 59258 - DNA, 1175 bp, Homo sapiens
cagaaggagatagacacaccggcgcccaagggaaggtgggcatcccttgatggggggagtggcattttctttccccaagtctgaggctgctgctcttgctgctgacacccccagaaactccagagggtgcagccctcactgaagggcccactccaaattgtgctgaatatcctccaaaagaaaacttattcttagtaaaggctttcccgtgacctttctcagagaggaaaacacacacactcttcactattgctattccccgccagctttccaaagaactactcccacactggcctcaggagggggagaaaccccagggaccaagggttaggagcagtacttcagaaagatttccagggaacagagaagaggatctgattaaagtccatcaactatgaggttttcttccaggcaattaaattaagcaagaacattccagttcgttcaggttgttccactgacagacacctttttttatagggaaaaaataatcttggtagtatggtaaaagatgattaattaagaccaccacaaggcatttatttgatttggggtttagaaaagcccatcaatttcacacagcaaaaaccaatttatctgtacctttaatatctaagttatcactaaatccattatgtgggagaggatcctatttttttgataatggcataaaatatggacaaaacatgaataattatgaaaaataaaacaagaacagcacacacaaaaacaaaactgttaataacaactcatcagggraagcagatggctcaaaggcttgtgatggcaagccctgggcttcaccttctggctccagcaggtgccacagccaagcagacctgatgatgttcacagggatcagagagatcatcccatacccaggctccagaagtccaactcatacgacatcttatcctgtgcaccttctcctttcctacacccatgtcctgctttccagaggggcagtaaatactttgagagcagggaccacatctcattcatggctctgaagataatgagtcaatatgtagtttccagccatctagtcctgagctggaaacacagaaataaacattccacagatgtgctgatgagccctgattcttctgtctggccttcagcccgatgcctaggctccttccctgtgccagcgtcctggtccctgttaagcccag

SEQ ID NO: 59259 - DNA, 1175 bp, Homo sapiens
cagaaggagatagacacaccggcgcccaagggaaggtgggcatcccttgatggggggagtggcattttctttccccaagtctgaggctgctgctcttgctgctgacacccccagaaactccagagggtgcagccctcactgaagggcccactccaaattgtgctgaatatcctccaaaagaaaacttattcttagtaaaggctttcccgtgacctttctcagagaggaaaacacacacactcttcactattgctattccccgccagctttccaaagaactactcccacactggcctcaggagggggagaaaccccagggaccaagggttaggagcagtacttcagaaagatttccagggaacagagaagaggatctgattaaagtccatcaactatgaggttttcttccaggcaattaaattaagcaagaacattccagttcgttcaggttgttccactgacagacacctttttttatagggaaaaaataatcttggtagtatggtaaaagatgattaattaagaccaccacaaggcatttatttgatttggggtttagaaaagcccatcaatttcacacagcaaaaaccaatttatctgtacctttaatatctaagttatcactaaatccattatgtgggagaggatcctatttttttgataatggcataaaatatggacaaaacatgaataattatgaaaaataaaacaagaacagcacacacaaaaacaaaactgttaataacaactcatcaggggaagcagatggctcaaaggcttgtgatggcaagccctgggcttcaccttctggctccagcaggtgccacagccaagcagacctgatgatgttcacagggatcagagagatcatcccatayccaggctccagaagtccaactcatacgacatcttatcctgtgcaccttctcctttcctacacccatgtcctgctttccagaggggcagtaaatactttgagagcagggaccacatctcattcatggctctgaagataatgagtcaatatgtagtttccagccatctagtcctgagctggaaacacagaaataaacattccacagatgtgctgatgagccctgattcttctgtctggccttcagcccgatgcctaggctccttccctgtgccagcgtcctggtccctgttaagcccag

SEQ ID NO: 59260 - DNA, 914 bp, Homo sapiens
cagtggaggataggagggtctataatcatcatatactgtgaaaattaaaaagtttaaatagtttatctcaaccaggtgcagtggctcacgcctgtaatcccagcagtttgggaggccaaggcaggcagatcactggaggccaggagttcgagactagcctgggcaacatggcgaaagcccatgtctactaaaaatgcaaaacttagctgcacatgatggcatacacctgtattcccagctacttaggaggctgaggcatgagaatcaattgaacccgggatgtgtgggttgcagtgagccgagatcgcgccactgtactccagcctggaagacagagactctatctcaaaaataaataaataaatagtttatctcaattttgttcaaagcagccagcccatgaactgcttgctactattggtttataatgatgtaagaaacttgtgggagtagctaaatcaatataatgctttgttcattgagaaagtcttgctatgaaaaattaaaatgttagctataataaagagctagacagttgatttacatttacatttcacatttgcatttactaaagacagttgatttacatcctgatacaaggtccttatccccttgtagacaagtaacagctggttcccacaccwgcagtggtctgcaaatcacactgaaagaggtactcacctaaattacccttaaaaagtccataaagtacagtattcatgattttgtgtatatatgaacatttcagtttgagaaagattgatctaaagatctagagcgaaaaaaaaaaaagaacaaaaggaaagtgactatccaaagttatagggcatttggaacttcctgcccgtctgtgagagctataaactggaagccactcaaatgccatcaacagtagaataaataaattccaacat

SEQ ID NO: 59261 - DNA, 3857 bp, Homo sapiens
aacgccgagcagactggctctgtgatgtcttcagggaagaatttgagggccttgagcacgccaagacctgccttctacatgctgtgatgggacccacgtgtcctctagaagccataaaaagagccatctcagcccctgttttctagtatggagctcggggaaaacttctatgtgctgtcttcccatcacaagcacctgggatggaagatgcatatcccctaggccttccagcaaagaattaaaagctgtttggaagactccgtctgcaaaaatgtctgatgtttaagtctagtgggtaaagcctgagactatggcctatccctaggaggaagtacttgggatttgaggaaagcactgtttctacattcaggaacgctaagaggagtcttgccacttgcagagaatctgagtcacgaccttttccttcctaagacgtcatcccttcagttataaaaggagaggatgttccaaattggcagttcataaacagcatgcattagaatctacttgggagctttttaaatgcctaagccaggcccccacctccagcatatcttaggtggcctaggcatgggaagttaaaaaatttctgcagctgactctgacgtgtccccaacaacctgtagttccatgaacggaacttaacattctactcatgcaaatgtggccgtggcatgatattgcagttaggtcaatttcctgacatcagcctagttgaggtgctttggttatgcccaagtacaagctgcacattagggacaaaaccacatccccaaggctgagcttgaagatcacaggccattgatgaggccacggccacctctgcacaggccagcacagctaggttcaaaacaaaagtatcccttacgtgtctctccttccatggctcccaagatccctgctctcatcccttccccaacctggtgcagtcctctcttcccatcactcaatgaggaaggagaggctgtgtttattccacgatagtggcaacacttgctatccagttataccagtttgaaacctctaagtctccttggccttcaccctccgtgaattctatttcaagcctctccatcccaatgccactgtatttctgggtcaacttctcccttgccaggaataaaacaaaagcccacagacagatgtccttccagccactccaccaatctgtcctctaggatgaacttttcaaactgaggttctgacttcagggatccctgctctggcatgtaaaatgccgtggggagggagtgtatttgtacatttttacagaggatccactgttttcatcagactctcaaaagagtttctggcctaacaaaagtagatgaaagtggataccaggctgcaccccattctatgttctgaccaaggtggtcttgagggcaggaaccacatcttcaccacctctgtttccctgtggtctggctcagtgtctggcaccaaggaggaagttccaggggtgttgaactgaattactagccacagcccagcatgatttcagcagcatgggagtgatgccttaaagaactctccctcgtgggctggaaacacacagaaaactcttggccctctcctagcaagataacagcctttaactctgaaggaaacattccatgtgcatcagctttgccaacgaaagtgagccaagcaaaggtgtctccagcccgtggaagagccttgaggacaccgtgccagctgcagcaggtgatccactctcaggcatgactgcgcaccacagcagtgccaaaccacctgcccattcaaccagctacagaatcccaggcctgctgttggatcagtgggtcagatccaaaaatccccaccagccccaaagctatctgccaatcattactacagtcttgtgctcccctacagatgccaagctgtgtgcgtcttgttgggagatgtttatagctcaagttccagagacaacttggagggctctcaggctgtaatctacttaagacaaaaatctatgacatctccttggactcctgcagcttcccaagggacattccaactgtacttaggaatatttgattttcctgcatgttgtacttccaggtaagaaatcataaaggtagaacagaagatggctggacatgataagaatgcaaaacatgtgtttgctaagggggaaacaagagtcatggaatcctaattcctcaggttgattccagcagtgcaagccaagtacaaagagatttacagaagaaccagtttgcctcatctacatggtgtcttcccccagacagcaggcagtcaagaccaatttctcagcccacagcatgggtattatcttcaatgcccaggatccctgaacttagcttcttctggaccgcaatggtgaatagcaagagtcccggctgaagcctatgtgggaatccagacatgttcagggcagaattctcagaactctaactgcataaagaactgaatttctttcgggaagagaattcatcctaaggcaagactcagcaatggagacttagatatgaaatttccacatcttagcaaaggagtgattctgaatgtactctggctctgatcctcagatctcttccccatctagtcctacagatttatgtctgttgtctttaaactttttaagacaagctggtaactggaaagggcacaggccagccttcagtttcaggctaggagggcccctgcgcatcagtgctgcagctaacaaggaccacagttcctgatgagaggagtcaggtagcaggagtgaccacgggagactgtggagcccacagaagatgacaacagagtccaaagccatgttcagatggcatgccaggaccccatggtgggagggaaactcagtgatggggaggcagttcctggaagaaacagaagcacaaagtggctaccagacatgctcaggagcacacaagagacatccaggggaatccagaaatattcagtggaaactttgcaagggagtcaagaccctataaacagatgggaaggttagtaaaattctgattattattattaatatgaatttatccatatgcacaagttagaaaattgatagaatctcaagtcataatagaaaaagcatggttgatggacttactcttttgacagcctacacgggccttctgtggacttactttcctgatacaaagatgggaattgctgtttgaaaacaggtgagtacaggcttagccacttctccataagccactgggagtgagcccttgacccctgaatcatttgggtaattcagcatctgggctgcaggtgaagagggactttggtgagagcacctagatgccatttccatcacagggtactaaaggggtctttaggggtctgtgtgggctagagacccagcaccttcctgctgagcaatggtaagttatttgtgatcactgtctcccgagccatcatcctcaaccttcagctcctccttcccctgcccacaaaatcttgggatatgagagaaggatcatgttgatcacagaatggtagcagagcaccattcattcattcaatcattcactatttagtaaatatgtcccacatgtcaggcactaaccaggctccaactcgcactaatgaacaatacagttgtgctccctgctctcagggagcttacagtctagtggggcagacaggctttaaacaaggagrcacaaaagaaccacaaagtgtgatcgggatttcaaaggaaaagaacgggtctctataggagaggacaacaacagaaaaactgctcaggattagggtgtcatggaagccccttgcagaaatgctacttatcctgagatgtgaagacaagtagggttggtgtgggggagagcgtggctcaaggcaaaaagaccttaaagccaaaagga

SEQ ID NO: 59262 - DNA, 1553 bp, Homo sapiens
cccggggccagcacaggggcacgttgcacatggaaaaaatgttaatggtttgaagtgtggttgtggcagtgatgttgtgaccttggcagactgtattttcaacagatgccacaacaatatcttccatcccacgcgctctttttgmaatgtgaccttgccagtccactgttgagaggcagaatctgtgtcccttcaccttcaacctgggtgggtctttgccactgtttcaactcatagaatgtggtgaagcaacgctatggacatccagggttaggccctaaaggttgatgcagttttggactggctctccctcttttagggacacttgctttggggaagtctgggccttggggaggggccacacgtaggagtttgagctgcagcatcaattgccagacatctgagtgagcaagcctttgatctccagttctgtctgaccacaactgcatggcagatcctgacagaaaaccaactagctgagcacagtcaaccctcaaaactgcaagagatatattaataataatattaatagaggatttttgtatgccccaaagtttgggatggttttttacatacaataaataatgataactgttgaaattggagatcccaggggaatcttaactgtccacaactttgagatgagctgaggctgtggctacttaaattctaaaatagattttaagaacaacaatgtggattagagggaggctgccctgtgagtagggttaatcagagaagtcaaagcaggcatcaaacaggtagttgaatttttgaggggggacattttggctaaaagtgttattaaaaacatggtcagaaagatcctatatccctcagaaacttccctctggagggtgaagatgtaggaatagaatcaagtgacaattttatttttagttctcattttcccacatcacctgattaagttcaggtttagttctggaggattataactgtgggaaccttaatgaggactccatcagctctcatgatgggagacatttttgctgataatctttcaagtcctcccaatacctcaaagccttccctgattggcctgccctcagtggtctctccctggaatgagcatctaccctacatggctaagtgcttaattacagcatttcccttcactgccctcgggacaaatgccttagtggggcaggcagtgctactcaccagccaggctgtcttctcatccacagccttccagaacatttggtggctccatgaacaatgcactgcaccttctcttgcctcatgggcctttgctgaggctgttccttctgtcagaaatactattccctttgctctcttttctttccttccctccccactgccaccacttcccactgggaaacatatacatgctcctatcctcatctacccctcttcatctagctaatggctactcacctcccaggagtccattaagaagccccttccttgaggaagccttccataactgccaggggtgggatagggctcatccttccttacactttctcttacatacatttctctcactcttttgtaattgtctggttcct

SEQ ID NO: 59263 - DNA, 1553 bp, Homo sapiens
cccggggccagcacaggggcacgttgcacatggaaaaaatgttaatggtttgaagtgtggttgtggcagtgatgttgtgaccttggcagactgtattttcaacagatgccacaacaatatcttccatcccacgcgctctttttgcaatgtgaccttgccagtccactgttgagaggcagaatctgtgtcccttcaccttcaacctgggtgggtctttgccactgtttcaactcatagaatgtggtgaagcaacgctatggacatccagggttaggccctaaaggttgatgcagttttggactggctctccctcttttagggacacttgctttggggaagtctgggccwtggggaggggccacacgtaggagtttgagctgcagcatcaattgccagacatctgagtgagcaagcctttgatctccagttctgtctgaccacaactgcatggcagatcctgacagaaaaccaactagctgagcacagtcaaccctcaaaactgcaagagatatattaataataatattaatagaggatttttgtatgccccaaagtttgggatggttttttacatacaataaataatgataactgttgaaattggagatcccaggggaatcttaactgtccacaactttgagatgagctgaggctgtggctacttaaattctaaaatagattttaagaacaacaatgtggattagagggaggctgccctgtgagtagggttaatcagagaagtcaaagcaggcatcaaacaggtagttgaatttttgaggggggacattttggctaaaagtgttattaaaaacatggtcagaaagatcctatatccctcagaaacttccctctggagggtgaagatgtaggaatagaatcaagtgacaattttatttttagttctcattttcccacatcacctgattaagttcaggtttagttctggaggattataactgtgggaaccttaatgaggactccatcagctctcatgatgggagacatttttgctgataatctttcaagtcctcccaatacctcaaagccttccctgattggcctgccctcagtggtctctccctggaatgagcatctaccctacatggctaagtgcttaattacagcatttcccttcactgccctcgggacaaatgccttagtggggcaggcagtgctactcaccagccaggctgtcttctcatccacagccttccagaacatttggtggctccatgaacaatgcactgcaccttctcttgcctcatgggcctttgctgaggctgttccttctgtcagaaatactattccctttgctctcttttctttccttccctccccactgccaccacttcccactgggaaacatatacatgctcctatcctcatctacccctcttcatctagctaatggctactcacctcccaggagtccattaagaagccccttccttgaggaagccttccataactgccaggggtgggatagggctcatccttccttacactttctcttacatacatttctctcactcttttgtaattgtctggttcct

SEQ ID NO: 59264 - DNA, 642 bp, Homo sapiens
taccatccctaggccaaccctggctcctgtgccacccccactttttttcaggttatgtaagttctcccagaacttacatacttcttacacttcatacaacttacactgccttcttcccagtgcagtgactgaccagaccaaagctttcatagaaaaaaggccacccaagagtgaaggcgtggactcttcctggcctctgaatcacctcagttatacccatgcacagctgagctgattctgcctggagctggggcctgctrgctttctgaaggctcagtgtgtccttctgatctgcagggtgtgggatgctgcagccagaacttgggagaaagggcagatcctattaatccaggctctttcccatcaaagagagtcctggatttccttctagtgcacaatggtccccacatgctgctctcttccttagaccataacttctcctggctccaacaatattgctgcactgtgcgctctataaagtgagggcctgagaagggcacaacccagggccctgctgctgggaggacagatccccatgctgcaggttgcggtgacggccagacatgaagggagctgggaggggagggagggaggtaggcatggggtaggaggctgaaggcagcatagaatactgaacacaaa

SEQ ID NO: 59265 - DNA, 722 bp, Homo sapiens
aaattccactggtttctaaaaccttttaaaactacatttgacctttcagctcctgtaagagtttaaagcagatgggcctacaaatagggcaatcgtctactgagagggcagagcaagggaatttctacaaaaacttttgagtacttgtgggggaccaaactcccattaccagactctgccgacctctcaccccacacttaaaggcttccttagcaacacccctaaaccagccaataggattccagttaatgactgcgaccagcctgggagcggccaatctgtggtgggtgcagggtcctctcgtttgatggaaacccaycctccaatctggtctcagagttcagctttccatgaaaatagcactgagcaagcctcttattccactcagtttctttggctcaaagaaatgcaagtctaccttattgcaggggaactctctgctcaagcaggagagtttggtcatctctggatttgaggagctccccgggcttcatttcttccccagatctccccatagctaccctccctcagggcagcccagatataggaactagacctttcataaggactcttaaagtgtcctgtgcctggagtccgaggaatgttcttctgctcttctggtcctgccctaatccctttccagtttctccagctgctggagatgaagaagtaatgatttccccctccccctagaagctaggacctaaggggataatggatcc

SEQ ID NO: 59266 - DNA, 1259 bp, Homo sapiens
tgaaaatggttttaagtaccaataaagtggaaagatgtctttaaatcctgttgatcagcttttcaggtatatttcctcaattagaacaggaaaataatcttaattaattggaagggctcaatgtaggaaatgttttattaaccacaattagagcaaacacaaagggagaaaggaatttgagtttgtatattatgtgtgagaagaaaaagaaagaattagattcatataagagtttggggaaaaaagaaaactgcaggtgagtatttgttcaaactgcgtaaatrtcttcaaggttacaaaattaatgagggaagggaattgctcagtcttggatgatgagagcaagaagccacggctcaaagctatgggaggaaagctcagactagctgttaggaaacacagtgagttagaaagaacatttagtggtgaaacatatacacagaaaagtgactgtgaagcaacaccagcagaatcattacataatcagtgaggaaagattatgtaaaacagacttggcattagctggtcatcttgcataacaaggggcttctgatcagcttttgctggagtgagttttcaattccttttttgccttttgattcttaaggacatatgacttcctactaagctcatctttctgtgcatgatctcatttaattagaacaatttgtgaattagatctttctataatcctgtttcccagatgaagcaaatgaggctgagagatattaagtattccacccagctcacacacacacaataaaggcagaggcaggattcatttgggattctctacttcttgatgtttacatgactggcttcttatcatttaggtcttaaattaaaagcaatttccttggagatgctttccttgatggcccaatctcaagtacccacttactgtcccacatctctctctgatgacatcataaggaacttttaaaaattattattagtaaggcaaaatgtgcataacataaaattattgtaaagtggacacttcagtggaatttagtgcatttgtaacattgtgcaaccaccacctctatccagttccaaaatattttcatcaccaaaaaggaagtatcatatccattaagcagttgctcctcattttggctaccccaggccctggcaaccatcaatatgcattctgtctccacagattgatcttttctgaatatttcatataaattgattcatacaatatgtgacctgtttctgtcttacttcatttaactaagttttttcaagtttta

SEQ ID NO: 59267 - DNA, 765 bp, Homo sapiens
ggatcctctgttaccccacagtggttccaaaagaactgattactttttcattaatcctcaagctatatgtgataaataattgggaggatggaaagatgatggaaaagaggaaaaaccttgaaagatcaactgattttgttaataccacacaccaatatgcagacccagctctgatctcttttttttctgcattgtgatatttgtccaattatcttgcttctaaaattcaaacctattatagccatttcattttctgcattttttctcatttcagtgtaaaggccttgtgggagaaggttttactttagtctttaacttggcatatggaaaaatattaactgctatgtgtataataattctcctttttttccttaaaatgctatttcctttgtactactaatgtactttgattggttgactggatattgagtgttaaactatagaagtatttcagaccacttgagtgatagctttgcttcattctttcgtgtgtttctatatggttttataaactagataatgctacacaataagggtttactgtgagccctcagtaaacccttattttgtagcatagcaaaatgtgctccaacaatgggggaggtatctggctttatgcatcccttycgccaatcaccagccatgtaaatttatacagtcacataagatttctgagccttaaattcctcatagaaataaaaaatacctgccttgcctatctcacaaaagtttgtgtggatcaaattatttaatgtacatgaaaaa

SEQ ID NO: 59268 - DNA, 765 bp, Homo sapiens
ggatcctctgttaccccacagtggttccaaaagaactgattactttttcattaatcctcaagctatatgtgataaataattgggaggatggaaagatgatggaaaagaggaaaaaccttgaaagatcaactgattttgttaataccacacaccaatatgcagacccagctctgatctcttttttttctgcattgtgatatttgtccaattatcttgcttctaaaattcaaacctattatagccatttcattttctgcattttttctcatttcagtgtaaaggccttgtgggagaaggttttactttagtctttaacttggcatatggaaaaatattaactgctatgtgtataataattctcctttttttccttaaaatgctatttcctttgtactactaatgtactttgattggttgactggatattgagtgttaaactatagaagtatttcagaccacttgagtgatagctttgcttcattctttcgtgtgtttctatatggttttataaactagataatgctacacaataagggtttactgtgagccctcagtaaacccttattttgtagcatagcaaaatgtgctccaacaatgggggaggtatctggctttatgcatcccttccgccaatcaccagccatgtwaatttatacagtcacataagatttctgagccttaaattcctcatagaaataaaaaatacctgccttgcctatctcacaaaagtttgtgtggatcaaattatttaatgtacatgaaaaa

SEQ ID NO: 59269 - DNA, 762 bp, Homo sapiens
agctagagagcccggagggtaaattattaaaatgagctatggagaattggggagagcttgcactcaaatttagtttttgagaaggaaaagtacaaatcattctatacatggaccaactcaattttgccacctgttactttaaaattttaacctgttttactttgaaaacaatgctaaaacataacttgatggactcatagtttgattcctactaggtcgatattgtgtctcagaattaaattgtccattaatttttattgtattctgtagcatcttcctcctaatagtgatgcaaatgaattatgggtagatgaagtaattctaattttcctatatacttataattctcttgggcttccatgagcagaatatgtaagawaatacatttgagatactgttatcagaaaactggggataggagagtacacatgaaaaaatgacatgtacatagtattcaaggatgccttcattcattcattaaacagacatttattgggtgccaaatctgagacagaccccttgctggtttgcatttaaatatatcgtgggtatttaatgaggaaaaaggtatgaaattgccaaaacaacttagagtaagtaacatcaagctgccctcatggcctttctatacttccgcatcttggtggaggaagtattagtgataggggctgtgaagggctgtggtatgggcgtgcctgctccaagcccccagattatctggcagaaaagaacgaagagcaagaattaaaacccctccccaag

SEQ ID NO: 59270 - DNA, 762 bp, Homo sapiens
agctagagagcccggagggtaaattattaaaatgagctatggagaattggggagagcttgcactcaaatttagtttttgagaaggaaaagtacaaatcattctatacatggaccaactcaattttgccacctgttactttaaaattttaacctgttttactttgaaaacaatgctaaaacataacttgatggactcatagtttgattcctactaggtcgatattgtgtctcagaattaaattgtccattaatttttattgtattctgtagcatcttcctcctaatagtgatgcaaatgaattatgggtagatgaagtaattctaattttcctatatacttataattctcttgggcttccatgagcagaatatgtaagaaaatacatttgagatactgttatcagaaaaytggggataggagagtacacatgaaaaaatgacatgtacatagtattcaaggatgccttcattcattcattaaacagacatttattgggtgccaaatctgagacagaccccttgctggtttgcatttaaatatatcgtgggtatttaatgaggaaaaaggtatgaaattgccaaaacaacttagagtaagtaacatcaagctgccctcatggcctttctatacttccgcatcttggtggaggaagtattagtgataggggctgtgaagggctgtggtatgggcgtgcctgctccaagcccccagattatctggcagaaaagaacgaagagcaagaattaaaacccctccccaag

SEQ ID NO: 59271 - DNA, 762 bp, Homo sapiens
agctagagagcccggagggtaaattattaaaatgagctatggagaattggggagagcttgcactcaaatttagtttttgagaaggaaaagtacaaatcattctatacatggaccaactcaattttgccacctgttactttaaaattttaacctgttttactttgaaaacaatgctaaaacataacttgatggactcatagtttgattcctactaggtcgatattgtgtctcagaattaaattgtccattaatttttattgtattctgtagcatcttcctcctaatagtgatgcaaatgaattatgggtagatgaagtaattctaattttcctatatacttataattctcttgggcttccatgagcagaatatgtaagaaaatacatttgagatactgttatcagaaaactggggataggagagtacacatgaaaaaatgacatgtacatagtattcaaggatgccttcattcattcattaaacagacatttattgggtgccaaatctgagacagaccccttgctggtttgcatttaaatatatcgtgggtatttaatgaggaaaaaggtatgaaattgccaaaacaacttagagtaagtaacatcaagctgccctcatggcctttctatacttccgcatcttggtggaggaagtattagtgataggggctgtgaagggctgtggtatgggcrtgcctgctccaagcccccagattatctggcagaaaagaacgaagagcaagaattaaaacccctccccaag

SEQ ID NO: 59272 - DNA, 762 bp, Homo sapiens
agctagagagcccggagggtaaattattaaaatgagctatggagaattggggagagcttgcactcaaatttagtttttgagaaggaaaagtacaaatcattctatacatggaccaactcaattttgccacctgttactttaaaattttaacctgttttactttgaaaacaatgctaaaacataacttgatggactcatagtttgattcctactaggtcgatattgtgtctcagaattaaattgtccattaatttttattgtattctgtagcatcttcctcctaatagtgatgcaaatgaattatgggtagatgaagtaattctaattttcctatatacttataattctcttgggcttccatgagcagaatatgtaagaaaatacatttgagatactgttatcagaaaactggggataggagagtacacatgaaaaaatgacatgtacatagtattcaaggatgccttcattcattcattaaacagacatttattgggtgccaaatctgagacagaccccttgctggtttgcatttaaatatatcgtgggtatttaatgaggaaaaaggtatgaaattgccaaaacaacttagagtaagtaacatcaagctgccctcatggcctttctatacttccgcatcttggtggaggaagtattagtgataggggctgtgaagggctgtggtatgggcgtgcctgctccaagcccccagattatctggcagaaaagaacgaagagcaagaattaaaasccctccccaag

SEQ ID NO: 59273 - DNA, 1093 bp, Homo sapiens
ataaaagcaatagtaacagaagtcctccctggacaactctggaactctaaaccactccataagcaaataaaaggaaggaaatatatcaaactatatttaatcaagttttatcaaataatagctgtgtgcaagcagcaagggtacagacaaaagtactatagtgttagttcttatctttcaacatgcatactaaaaattgtcagaagtattcaaataagtatacacaaaatgctcagagggtggcaaggcggaagagaccccgtccatctggggaagtaagaaaggcttgaagatggcaattacattggaatgaatgcaacaacacagagtcaaaaaagcatctgccccagttcacaaaatctcatagtctggagtaaaagtgtgagggattgagtagtgggaagaggaaactggaagagtatgttggggacagactaaaaataccatatattgattccacgaataagayaattaatatcatcaattctgagacggactttagttattattattttttaacattttaacacctctgaaatgaagatgctgttgggttggtagcagttttgatgttgtcactacctatacatggacatcaaaacttgcaaagtaggtgtcagcaacttgaaataaaattactttttaaattttatatatatacatatataatttttcttttttttttttttgagacagagtctcactctgtctcccaggctggagtgcagtggcgccatcttggctcactgcaacttccccttcccagcttcaagcaattctcctgcctcagcctcccgagtagctgggactacaggtgcatgtcaccacgcctggctaattttttgtattttagtagagacaggatttcaccatgttgcccaggctggtctcaaactcctgaggtcaggcaacccacttgcctaaaatcactcttttaagaaatgcttcaactctaatactcctgatgaaatggagaatactgtgtggaaaaacacaaatctcaatgatttgcaggtagaaagagattcataaaggtcaaacttaaaatgtaaagttgtaataattactttaaccaatgtatttttcttatgtt

SEQ ID NO: 59274 - DNA, 738 bp, Homo sapiens
cattttatgagtgaaagcactttctctctgagagttctaattctctcctttgtcatagatattggaagttgattttcatagatttgcagtaggcagtgatttgtaggttgcgctatagaaaagccctttgggagttttctaataaaggtagtacagcaaatgttgaaaccatgccagaagatcaggcataacaatttactatcatccatgtgcccttagagaagacctaaagagattaggaagacatctggaaatggaggcccaaggatgctagatattacagcttctggacatctgaaaataagaatataaccatgttcatttttatattgtgctgataatgttttctgatttatatggatatctggtttatctgcctctggaaagagagcagctctctagcctgtggctccaaagcggacatgcaccaagtactaagtaatgaaggaagatcagtcaatttgtaacgtctctgaagtgctgcctcaaggccatttccgttttctgcctttaaagacataactaattggtgagatccaacaaataagagagtggttacrtgggcaccttaagaccggctaaattgggagaccctactcctctccttgaaggaaatctcatttaatttgtaaaataaaattctaaggccctccaagcatatgaatggactttcttctctgccagggcatttttaaaatttaacctgaaagactgtttcagtccatgacagggaagtgg

SEQ ID NO: 59275 - DNA, 852 bp, Homo sapiens
ggaacttgatatatgagctccagtaccacttggagcttgctcacatcttgttgcacaagattcaaaatatgcacatttcaagaacctgagatggaagtgagagtgatgtgatgtggaatgcagtattagacctcagaaatggtaatgtgccaccagagttcgttactcgatgaggcatcgtcagcagaagtccctgggtaaatgcagtgtttctcagacttctttcattattggtcctctgaagaggcttttcagacatttttccttatcgatctctttctgcccagaacttgacattttaataccacaaatatagtgtctatttgtttatgtattgtgaatctttgcagggccacaaactattataatgtctactccccctcttctactatyctagaacaagttttagccccttgtgggtaatactgttcctattgagattaaatggcatattgtgctgacagtcagaaccggaatctcattcctaccccttatttcatctgacattggaaccccttttcagcctttgtcagcctacccttggtcatctgtgaaagggaactcataatgcttttcttagaaacctcttctgtggggtaaatgagaaatcccatacagagtagatagcacctggtaggacttccacagatggtcattcagggcagtgaataaagtgaataaagaattggatatacagtttagtgaaatatgagaatggaaaattatgacatgtgattataaatgtgcatgtgtaattcatgaattaatctttgttataagtgaatatttagtagttcttttttgtatatccataaaaatttatatttacatgttcaaactgaccagaatgca

SEQ ID NO: 59276 - DNA, 1818 bp, Homo sapiens
gatctgtaatttctgcgtgcagagattccaaatagttattatcatatttctcccactgttcttagttgttatctgtaaaagggttagtccaaaaaaagttacttccccagtactggaatcagaaattagattgtaacatattgaatagaaataattttatgagcacttgttgatagttaagatatacatgtatatgtatatgcatatcttatatatcaatatgtactctgtgtgtgtgtgtgwgagagagagagagagagaagaaaaaatagcttcttttaatggaaggaatgaacaatttagaaaattgctactttgtaatctctctaatgtgaaaattacttcaggcacaggccatcaaagataaaaggctgttagagaacagaatatgtcctttaaccggaatctaattatgacaaaacaagtatacaaattttgactactcatcatttcagaaagtaaagaataaagaagatcatgttatttacaatgcattaagaatcagactgataacaggttgaatacaagaatacaatattttaatatctttaaaatcgaatagaaaacatttggacctagaattctatttctaggaacgttctcaaacaagcttaagagcaaagtataaaaacgatgttcagcatataataatatgaaaaaattttgtcctagacattttatatgaaaatgtatactttagagcatgcttcaggaaaaaaagaaagaaaaattaatcctgggaaatgggtgacattagatacaaggagcagtggcagttgagtatgtcccaaaggaagtaaaataaatgagaaagaaactttgatatattttgaataaagatacttaaaaacattttcttcaataaattgttatggcataaaatttcaaagtcatagtaataaaaatgttgattttttaaatgagttttcaccacatcctaaattatgagattaaattatagtcacattaaactttaaatattatgaacattgaaaatataaatatactaacactgaaacgaggagtacattaagcatgagaagggtagcaaaggaagattacctgggctaaattcctaattcttgataacagaatatggcttatatatgcgagaagttatgccttacagaaaggatacacaaaataataagaatagaaggtaattaaatactctcaaattggtaaatacaaatagatggctaagataagtattttatctaaagtcataagcatgaagattagaagaactgaaaacagtgtcttggcatagttatctcagtatgagatatgagcatggttgagagaaaggaagattctttcacttctgtttctttattcaaattatttttgttaataagagcatacactatttatattattagaaaagactgtttagaaagtgactgtattgattatggttatctaaaccctggaatactatgcggccattacgaagaataaagggtagctagatatacatcatgatctggcaagatagctgctgtatatttgctgagtaaaaaaaaagccaagctgcagaaaagaattccatattcccagtgtgtaaaatcaacacagatatgcaaatgtgtgtatttacatattttatataataaaaactttttggaaaaagaaagaaattaagctcaaagatgagaactctctgaaccaagtgtttctcagaaacctcagcaatgaccattaacagcactgctggcagattggttccaacctgaacccaacccaggtccagttgagatgctaacagcaggccccatgggaatctcttcctttttaatcatcagcatgaataatgca

SEQ ID NO: 59277 - DNA, 466 bp, Homo sapiens
aactatattatgtcttcctttccaattattctgcttctaaatgctttttctaatctaatttcattggtgttttaagtattttgaggctatattattacatgaatacatatatacaatttttatttttttttatcattaggaattgatcctaggccagccaactgaccaacagactggtagctgactagacacatgagcaagcccagtcacaactttttgaaattaataattaccccaaaacttagtgttttaaaacaacagccatttatttagctcagtattctgtgggtcataartttgggttgggttcagctgggtggttctcctgtcctctgctgggcttgcatcttttagcttcctaagagattagctaaagaaggaatgcttttgtttgcagaacttagagagacgataaaggggcaagtaatgtttctctcctctccagtctcctcagacagaaaagacc

SEQ ID NO: 59278 - DNA, 972 bp, Homo sapiens
gctgacatagcaaaataccacgggcttaaaccacagaaatttatttctgacagttctggaggctagaagttcaagatcgcagcacagagggcactcttcctggcttgcaaatgactaccttcccgttgggtcctcacatgcctttcctcagtgcatgctcataaagacagcaagagagaaaagacccaagctctctggtgcctttttttttttttttttttwttttcatttgagacgggcctcactataccaatattgccttggctagcctcaatgtcttaggcttaaatgatcttcctgcctcagtctcctgagtagctaggactataggcatgagccactgcacctgcctctggtgtctcttcttataagcacaccactcttattggactagggaccattcgtatgacctcatttaactttaattacctcctaaggccctaaatacaactatagccacattaggcgaccatatgaattctggggaaacacaaacattcagtccataactgatcacaagcagctggttttcccccagggacacaggatggagttgctctctggtaagttcctggttctgtaagtgtgactgctataatctgtgtgtttctccacacagtctggtgacatagcaggtgggatggaatcagctttatacaaaatgttcaaagaagcacattttaaattctatttttataacaatcattttaatatgatcacaaaaggatgactgtgttcatggtagcaaatctataagacacagaaatgcacatggaaaaaataaagatcacctataatcttttctcccaaaggtaaccgttttgatataatccaggctttttctaatgaatgaatatactatcttctttttcttccttaacacagtacaagcaactgattttttgacgggaattaaatggcagatgctccatcctgccacagagctgctcatcatatgaatgggtatatgca

SEQ ID NO: 59279 - DNA, 972 bp, Homo sapiens
gctgacatagcaaaataccacgggcttaaaccacagaaatttatttctgacagttctggaggctagaagttcaagatcgcagcacagagggcactcttcctggcttgcaaatgactaccttcccgttgggtcctcacatgcctttcctcagtgcatgctcataaagacagcaagagagaaaagacccaagctctctggtgcctttttttttttttttttttattttcatttgagacgggcctcactataccaatattgccttggctagcctcaatgtcttaggcttaaatgatcttcctgcctcagtctcctgagtagctaggactataggcatgagccactgcacctgcctctggtgtctcttcttataagcacaccactcttattggactagggaccattcgtatgacctcatttaactttaattacctcctaaggccctaaatacaactatagccacattaggcgaccatatgaattctggggaaacacaaacattcagtccataactgatcacaagcagctggttttcccccagggacacaggatggagttgctctctggtaagttcctggttctgtaagtgtgactgctataatctgtgtgtttctccacacagtctggtgacatagcaggtgggatggaatcagctttatacaaaatgttcaaagaagcacattttaaattctrtttttataacaatcattttaatatgatcacaaaaggatgactgtgttcatggtagcaaatctataagacacagaaatgcacatggaaaaaataaagatcacctataatcttttctcccaaaggtaaccgttttgatataatccaggctttttctaatgaatgaatatactatcttctttttcttccttaacacagtacaagcaactgattttttgacgggaattaaatggcagatgctccatcctgccacagagctgctcatcatatgaatgggtatatgca

SEQ ID NO: 59280 - DNA, 749 bp, Homo sapiens
aagaaatattgaactttatctggtaggtttgtgattgttaggggtacaggtgctttaattctaaaacgatttggtgtatactgtaggatagagcaaagtgaattttgctctttggaaactggctctcaagttctcatattttggcaactggaattctcactgtaggagaatggggatctgaacacacaatgggagaaagtaataaggaaccctgggtgttggatttgaattaaggcattgtgattaactcattttacacacacatacacacacacacacagacgttaaatcagtgacgccccaatagcaatgagcaaatgtgatgcgcagttcttgtgttctaatgtcatttcccatcaatgagccaagcctcattgaggacatggccggttccaaggaagggctggccaaacacaggataagccaggacacgctggtgtcccagaaagtaaagaagcacttgaggattgtgatgtcatgtcaagaaaacctcaggaagcatcttggaggagctcccactggaataatttgtgcatcaaaaagtaaaataatggaggtgaactaaacacattgaattttttttttaacacattgaatttttaagaaacaccatgcaccatagagacaagagagcaagagtaagacagagagagactgaagctcttctttactgaagaatgccagctaattcatggtggaattagcaaatcaccrttttgtagccttctatgtacctatatcacccatgg

SEQ ID NO: 59281 - DNA, 577 bp, Homo sapiens
attctttcaacttctttccttctgttttgcttagtgtgtgtgtctgtgtgtatatttgtgtgtgttgtgaatttttcctatttgagctgaacacacacttagtttacttttatttgttgttgctccactttatataccatgggwtttcgtctgtcagtgctttctgctaagcactaattagcagtatatattgtcctttgttttaatcccatcattcaaaaataacaatatataccttatggtttaaatataaatacatacaattatctttcttctaaaattttcaattaaattctttcatttttatgttacaaatatagtaaatactatccattttttctcctctgtataaatcctctattttattttatttattatttatttttgaggcagagtctcactctgttgcccaggctggagtgcagtggtgtgatctcggctcaccgcaacctctgcctcccaggttcaagcaattctcttgcctcagcctcccgagtagctgggactacagccgcgtgccatgacgcccagctaatttttttgtatttttagtagagacggagtttcactgtgttag

SEQ ID NO: 59282 - DNA, 577 bp, Homo sapiens
attctttcaacttctttccttctgttttgcttagtgtgtgtgtctgtgtgtatatttgtgtgtgttgtgaatttttcctatttgagctgaacacacacttagtttacttttatttgttgttgctccactttatataccatgggatttcgtctgtcagtgctttctgctaagcactaattagcagtatatattgtccttygttttaatcccatcattcaaaaataacaatatataccttatggtttaaatataaatacatacaattatctttcttctaaaattttcaattaaattctttcatttttatgttacaaatatagtaaatactatccattttttctcctctgtataaatcctctattttattttatttattatttatttttgaggcagagtctcactctgttgcccaggctggagtgcagtggtgtgatctcggctcaccgcaacctctgcctcccaggttcaagcaattctcttgcctcagcctcccgagtagctgggactacagccgcgtgccatgacgcccagctaatttttttgtatttttagtagagacggagtttcactgtgttag

SEQ ID NO: 59283 - DNA, 2212 bp, Homo sapiens
ttcatgagttttttcagagttattttaaattttcagtgacatgactgttttcaaattatctttttaccttttgtatatctaattggtcacattgtggtaagagaatgacttccagataacatcagtttcctgaaattttgttcagagttctttctacaaggtgtcatgtgagaaactccttttcaaaattaatgctggactgtgagctccgaaatccacatttgttcattcactgcagtgttccaagcagcctgggcggcgcctaggggtgcatgcccaatggtgtgatggcagccagtgtgtgttttccactagagagctctctaacagcaagggctgtgtctgccgcagtcttttcttcatcttggccatcagcagcttaacttcagtgattaattttcctcctggggtcatttgtttttctttccatgactttttattaactactgtgtagtctggacatccttctttatacactgtcttgatttaggttttcaatggagagaggccaggtagaaagggaaatagaaaaacagaactcactcctattcacaatgaaagtatttttataaaaacaaaaataaagccttaagcaatttttccacttgtctcatatgtgactatacaaccagattcctagaaaatgtccctgcttttctcattcttctccctgtggtgtggaaacaggatcccaggtctaaaggatgaaaactctcagggcgcaggttaaaactggatgaagggagcccagtggcatcagctggctgtgccctggtgggtcacacagctaaggtcagcaagaatagaatttaattacatattttacacaatgggatggaatgaaagactgttttgaggaaataatagtttatcaaagaagtggagaaatgcccatgggagaagcacgttcagagcaggcacggaatggatagatttcagaaggaatttagctgtcactggttcgaggccaggccactcccctctaagcaggctcttatagcaaggagctgctaggacctggatgtgtggtgaaaaaacaaagtggttgtcggtgcagaatttcacagttaacaaatcactttaatacaaacaatctcatgaactcctctcacrcctatgggaaaatgttaattgtgtttattttgtgaagttgcatattagcttagtttctctgagcccaatgtgagccccaaactgtataaaaacatgcattcagcccctctaccacctctatgcaactttacttgctaaaaatgtgtgacattccgaagttctaaaatggccagggtgaccagtcattcccaaacattgctagaaatcaacgtgaccaatgggggcaaatgcagcaattgatacaataacatcctcatttctccagatttggtgtgacagttcctttcacgccttcccccttgggttggttccctaataatgttcccctacagaaccttctcccaggtccacttgcctcagtaaggacacacatggactgtgcgttggagagttagccagtgacttactccctgtgtgaccttgggcaaggtgcttaaccacccttggacctcagtttactcatctgtgaaatggatgataataacagagtggtgaagagtgaatgagctgaagcagtagcccttagaagatgcactggcacataacggcatttccctttccacagcagccacttgccctctctagcctctgtttcctgtgaagtggggttagtaaaagctgtgccccgaagagctcttgtaaaagagggaggcttctgtgggaggcaggtcaatcgctcctcccagacctccacagcctgacccttggtacttacgtttcctacataacaaaggggataaggctgcagatggaattaaggctgttcgtcagccaccttaagatgagagattatcctagattatccagcaggcccaatgtaaacacaagggtccttattagtggaggcaggaggcaagagttggtgtcagagtgatgggatgtgagaaggactcaacctaccactgctggccttgaagatggaggaaggggccatgagccaagaattgcaggtggcctctggaggccagaaaatgcaaagaaatggactctgccctagagctttcagaaggaacattgccctcatggcagcttgatttttgttcagtgagactccttcagacttctggcctccagaactgtaagatgacacattagtgtt

SEQ ID NO: 59284 - DNA, 764 bp, Homo sapiens
tcgttaaattatattttctaccatttttaagaataaatgtgtggtatttgtacactgtagcatgttctcagcctacatatggaaatgtgctctcttctaaaacaaataaacatgtcttttagtgcagacattctcaactgaaagtaattgcactcctttaagcagaattttaaaacaagaagtagggccatggttgttaaaatgactgagtggcagtatctggggacaaagtctaaacatcctgcattggcacagaackgtcatgcacagcaagagtcatcctgccccaaacaccaataatgcctatgttgaaaaaccctgttcaggctaatactttaattactgaaacaattatcctctcagacattacaaatgatacaacagaaacacaaatgataataagcaattactataaacaattatatgtcaacaaactataacctagaaaaaaagaatagattctcagacacatatcactcactaagactgaatcatgaagaaacagaaaatttgaacagactaataaggactaaggagattcagtcagtaataaaaagtctcccatcacagaaaagccaaggacctgatgtcttcacagctgaatcctaccaaaatttaaagaactaataccattccttgcaaaaaagtcaatcaaaacaaaaacaaaaacaaaaacaacaaaaaaacacaaaactcttgcaaaaaaataaaacaaacctgcaaaaaaatcaaactcatgcaaaaaacaaaaaacaaaaaaaaaa

SEQ ID NO: 59285 - DNA, 2004 bp, Homo sapiens
taaatttttgcagctgaaaacagaactcataattaataatataccacaaaagcagaatgagtatatgtaatttgatttttgccttacactagtaaaattttaaaatgtcaaattgcttataagataatggcaaaagacaatgatgtcagttagatctgtttttgataatcttcccaaaccagtgattgccttcaagctcactgagatcctggcatgatagcacatgacaaactttgccattacctactcaaaagaagttggtgaatgaaatgccttttatgactacaaagattataaaactatatagagaggaacttgatagctataaaacagttcacatctttcattcatttcggaaacattaattgagtacwtgttacgtaccaggcattgttctgagtttgaggatatgtattaacgaatggagagagaggaagagacctgatgcaaattcctgtcctttggacctcatattctacacaaaagatccagagatgttcagcttgcctgatgctaaagagtaaaatgcacactatacctgtgagctgtcgccgcctactttttgtggcttcacagttcgtggagcagggcgtaaacttggaccaagcagtgaaggtgcagtcttctcgacatgggactgtgcattcttgcacaaggagaggcatgccgtttgtctgcttgaggcattccatcatttctgctgaccggttgtcatcagagatgcatgagacagctgaaaaaaagcatgaattcttttgttattattttgattaaatcagtcagctgctggttctttgacaagacagcagaatcccccaatgtttaaaaacttgggcttcacaaatggtgcaaacggtgttcaacatagctaaccttatttctctctggaaattaaatttttattgttgtcattggaggtatttgaggatttaattggtttcattattaatccaaaccctgcgtcgacagcaaccaaaataacttccagtaatttattgtacttcctgctcctcagcatctaatctctagagatgatataaaactaagaaagggaaactataagagtaagatgataacacaaaaaggacgaaactacttttaaaaaatcacttaggctcctcctagatgtcattttttttttttttttgcttgtttagatggcacttacagaagtagacctatacagtcagtatttttaaaggaatttctgctgtctgtaaataaacatttttctccttattaatttttagggaccagttaaaatttttattttttttcaagcacaagcatagtctattcagatcatttccattgcaaatatattttatgttttgaattttatttttccataagttattggggtacaggtggtatttggttacacaaattctttagcggagatgtgtgataacctggtacacccatcacctgagcagtgtacactgcaccatatttgttgtcttttatccctcacccccctcccactgttcccaccaagtccccaaagttcattgtatcattcttatgcctttgcatcctcatagcttagttcccacatatcagtgagagcatatgatgtttggttttccattcctgagttacttcactcagaataatggcctctaatctcatccaggtcactgcaaatgctgttaattcattcctttttatggttgagtaatattccatcatatatattatatatacactatatacgatcatatatatgatcatatatagtatgtgtgtgtatatatagtatctgtgtatatatatagtgtgtgtatataaatatatagtatgtgtgtatatatatattgtgtgtgtatatacatatatgtgtgtgtgtgtgtgtgtgtgtgtgtgtgtgtatatatatatatatatatatatatatatatatatatatatatatctcagagtttctttatccactcattgattgatgggcatttgggtgggttccacgattttcctattgtgacttgtgctgctataaacatg

SEQ ID NO: 59286 - DNA, 2004 bp, Homo sapiens
taaatttttgcagctgaaaacagaactcataattaataatataccacaaaagcagaatgagtatatgtaatttgatttttgccttacactagtaaaattttaaaatgtcaaattgcttataagataatggcaaaagacaatgatgtcagttagatctgtttttgataatcttcccaaaccagtgattgccttcaagctcactgagatcctggcatgatagcacatgacaaactttgccattacctactcaaaagaagttggtgaatgaaatgccttttatgactacaaagattataaaactatatagagaggaacttgatagctataaaacagttcacatctttcattcatttcggaaacattaattgagtacttgttacgtaccaggcattgttctgagtttgaggatatgtattaacgaatggagagagaggaagagacctgatgcaaattcctgtcctttggacctcatattctacacaaaagatccagagatgttcagcttgcctgatgctaaagagtaaratgcacactatacctgtgagctgtcgccgcctactttttgtggcttcacagttcgtggagcagggcgtaaacttggaccaagcagtgaaggtgcagtcttctcgacatgggactgtgcattcttgcacaaggagaggcatgccgtttgtctgcttgaggcattccatcatttctgctgaccggttgtcatcagagatgcatgagacagctgaaaaaaagcatgaattcttttgttattattttgattaaatcagtcagctgctggttctttgacaagacagcagaatcccccaatgtttaaaaacttgggcttcacaaatggtgcaaacggtgttcaacatagctaaccttatttctctctggaaattaaatttttattgttgtcattggaggtatttgaggatttaattggtttcattattaatccaaaccctgcgtcgacagcaaccaaaataacttccagtaatttattgtacttcctgctcctcagcatctaatctctagagatgatataaaactaagaaagggaaactataagagtaagatgataacacaaaaaggacgaaactacttttaaaaaatcacttaggctcctcctagatgtcattttttttttttttttgcttgtttagatggcacttacagaagtagacctatacagtcagtatttttaaaggaatttctgctgtctgtaaataaacatttttctccttattaatttttagggaccagttaaaatttttattttttttcaagcacaagcatagtctattcagatcatttccattgcaaatatattttatgttttgaattttatttttccataagttattggggtacaggtggtatttggttacacaaattctttagcggagatgtgtgataacctggtacacccatcacctgagcagtgtacactgcaccatatttgttgtcttttatccctcacccccctcccactgttcccaccaagtccccaaagttcattgtatcattcttatgcctttgcatcctcatagcttagttcccacatatcagtgagagcatatgatgtttggttttccattcctgagttacttcactcagaataatggcctctaatctcatccaggtcactgcaaatgctgttaattcattcctttttatggttgagtaatattccatcatatatattatatatacactatatacgatcatatatatgatcatatatagtatgtgtgtgtatatatagtatctgtgtatatatatagtgtgtgtatataaatatatagtatgtgtgtatatatatattgtgtgtgtatatacatatatgtgtgtgtgtgtgtgtgtgtgtgtgtgtgtgtatatatatatatatatatatatatatatatatatatatatatatctcagagtttctttatccactcattgattgatgggcatttgggtgggttccacgattttcctattgtgacttgtgctgctataaacatg

SEQ ID NO: 59287 - DNA, 1232 bp, Homo sapiens
atgtgcagaacatgcaggtttattacataggtatacacgtgccatggtggtttgctgcacccatcaacccatcatctacattaggtatttctcctaatgctatccctcccctagcccaccaccccctgacaggccctagtgtgatgttcccctccctgtgtccatgtgttctcattgctcaactcccacttatgaaggagaacatgtggtgtttggttttctgttcctgtgttagtttgctgagaatgatgttttccagcttgattcatgtccctgcaaaggacatgagctcatcctttttatggctgcatagtattccatggtgtatatgtgattcttcattgtcattagtttattttcattaaaaatacttggacaaatgtcccctaaaaatcagattgcaccactaatgtctaaacaccaagctaaaccttcctggattctttaaattaaataatgcaaaaaatatctatcaagcaatgactgtggtaggcataattttgagaagtagagatgcagtaattgccagtgttgataaagcctttgcctcatgcaacttactttcattttaaaaataagaataaattttcatatataaatctagatttagaaataataatagggaaagcttgatttgaaagccaaatttctattagtgaaaaaagacttttaaaggaaatacatcatgggataattattacacttaatacattataaattaaataaaagttacaaattacacttgacttcatattatcagtaggccccctcatccttttgcagtttcttcactggtatatgtatgctattgtttttctagaaaactctgttctattaattgcttcatatctgataatgcctagcttgtttcatctaggagccatggctctctttaggaattttttcttttccttctttccgtttttgtttgtttatttgtttaacaaaacatgatatatagttttcttagcaactgtgcctcaaaataataattcataataatgtaatattcataatatttctaarctatgcatgtatattcataatgtacatgagtagcttagtttaatggtgaatgttgtctgtttaatggtgaatgttgtcttcttgaggatatacccatgggggctttctagacctgctgcatgattataaaataggacctgaacttagatttagttctactttttctgtcttggatttatatttaattttgcttgggttatttttca

SEQ ID NO: 59288 - DNA, 1173 bp, Homo sapiens
ttgttctgtcacccaggctggagttcagtggtgagatctcagctcactgcaacctccacctcttgggttcaagcaattctcctacctcagcctcccaagtagttgggattacaggagcctgccaccatacctgggtaattttttgtatttgtagtagagatggggtttcaccatgtcagccaggctggtcttgaactcctgacctcacatgatctgcccacctcagcctcccaaagtgctgggattacaggcgtgagccaccgtgcctggcctgtttttgtttttttttttaatatccaagtgttttggtgatttttgatttttctaagagtgctgatatgttttcattttattcacttgtggccagagaataaatacatttgtttgaaaattattaatattttctgtatggcctaggatatgaacatatgtccatgcaaaaacaaacctgtagatatttgaaaagactgtgtgttgttgatttacaaactacaaagtgcaatatgtacattaaatctatttatttattatataatagtaggcaatgcctctgccactacccaacacattgggtaatttcctcctgatttaaaatagttgtttctttgttgtttctctttacactaccattccactacaagttcttgcccatttttctactggactgcctaccttgtactaattcattgtaggatctctcttttcagtggaatttttgcgtacctagaccactaagggtcaataaggggaagaggggaagaagtgggaagtcttgggaacaccaaatatcatccaaaccagatgctcagtgctgacagattggcctttgacatgtaaggctcagaaggtgagctaagggacaattcagcccagagccagtccccatggagcttgctggtactcacaacagaaattcctgttcttcctaatccatctgaggatatcttcacccacatctccactccttacagccccatcttttttggtttcaaattatggagaaactctcattacaaactcctctgattatttctacctggcatctgtttccattgctttttttctttgagacagtccatttttatttatttattttttgtattatgaagtgtaagatgcaaatagaaaagtacacacaccaggaaaaatgctggtraattatcacgaattatc

SEQ ID NO: 59289 - DNA, 1578 bp, Homo sapiens
ccaccacagccctcctcacagtgctcactgccaccagcagccgagcgtgacatgagatgctgaggttctgggcacactgtggggctcaggggccctttctgaacctgccaatgaggcaagatctgccccaccctcaccccagggccccagcctgcatttctgtctactcacacccgtggccacctggtctacccttcctcaagcctgcccaccctgttgatgccagaaatttcttaaaatttttgtcacagggatacactttgtcctaagtttaatcactgatacatattttctccatttttttcattttcctttatttcaaagatgatttgagatggaggtaggggattaaatttgaaagcatatgttgtgttaattattcttcatcctttaagtgactttacactgtcctgctttgatctattagggtgattttaatgtctaattatcagagggcacactttccaccttacatcattgtgcttgattgatgatccccttacccccaatgacagtgtcagtcaagaaaaactgacgagacaagtcccaatcatattaggaggtttgtttgccaaagttaaggacatgygcccatgacacagcctcagaaagtcctgatgatatgtgcccaaggtggtcggggcacagattggttttatacattttagggagacatgagacatcaatcagtatatgtaagaagtacactggttccatccagaaggcagggacaacttgaagcagggaggggtcttccaagccacagatagatgaagagacaaatggttgcattcttttgagtttctgataagcctttccaaagaaggccgtcagaatatgcatctatctcagtgagcagaggcaggtttgtcctgagcagttcccagcttgacttttcccctagcttagtaattttggggcaccaagattttcctttcacaacagggactcacataattagttaaataactctttaaaagccatgacccttgtggtctagtctcaaataagcatcttgattaggaaaacatcatccagcaaccaagagattatatcaaagtaatggcctttctttctttatccaattcccacctactctcaggcctctttctgtcaaagtctcccccaatactcctggtccttgccttagcccttgcccctcttctcttccctcccaccccttctacatcttttctcacaaaactgcatatcaagaaagaccaaaataacagacaggaagtatattagtccgttcttgcactgctacaaaggaatacctgaaacagggtaatttataaagaaaagaggtttaattggctcttggttccatgggctgtacaggaagcatggctggggaggcttcagggaacttacaatcatagccaaaggtgaaggagaagtaggtacatcttacatggcaggagcaggaggaagacatagaagggggaagtgctacacacttttaaacaaccagatctcatgagaactcagtagcattagaacagcaaggggaaaatctgtccccatgatccaatcacctcccctccaacactggagattacaattctttgtgaggtt

SEQ ID NO: 59290 - DNA, 1578 bp, Homo sapiens
ccaccacagccctcctcacagtgctcactgccaccagcagccgagcgtgacatgagatgctgaggttctgggcacactgtggggctcaggggccctttctgaacctgccaatgaggcaagatctgccccaccctcaccccagggccccagcctgcatttctgtctactcacacccgtggccacctggtctacccttcctcaagcctgcccaccctgttgatgccagaaatttcttaaaatttttgtcacagggatacactttgtcctaagtttaatcactgatacatattttctccatttttttcattttcctttatttcaaagatgatttgagatggaggtaggggattaaatttgaaagcatatgttgtgttaattattcttcatcctttaagtgactttacactgtcctgctttgatctattagggtgattttaatgtctaattatcagagggcacactttccaccttacatcattgtgcttgattgatgatccccttacccccaatgacagtgtcagtcaagaaaaactgacgagacaagtcccaatcatattaggaggtttgtttgccaaagttaaggacatgtgcccatgacacagcctcagaaagtcctgatgatatgtgcccaaggtggtcggggcacagattggttttatacattttagggagacatgagacatcaatcagtatatgtaagamgtacactggttccatccagaaggcagggacaacttgaagcagggaggggtcttccaagccacagatagatgaagagacaaatggttgcattcttttgagtttctgataagcctttccaaagaaggccgtcagaatatgcatctatctcagtgagcagaggcaggtttgtcctgagcagttcccagcttgacttttcccctagcttagtaattttggggcaccaagattttcctttcacaacagggactcacataattagttaaataactctttaaaagccatgacccttgtggtctagtctcaaataagcatcttgattaggaaaacatcatccagcaaccaagagattatatcaaagtaatggcctttctttctttatccaattcccacctactctcaggcctctttctgtcaaagtctcccccaatactcctggtccttgccttagcccttgcccctcttctcttccctcccaccccttctacatcttttctcacaaaactgcatatcaagaaagaccaaaataacagacaggaagtatattagtccgttcttgcactgctacaaaggaatacctgaaacagggtaatttataaagaaaagaggtttaattggctcttggttccatgggctgtacaggaagcatggctggggaggcttcagggaacttacaatcatagccaaaggtgaaggagaagtaggtacatcttacatggcaggagcaggaggaagacatagaagggggaagtgctacacacttttaaacaaccagatctcatgagaactcagtagcattagaacagcaaggggaaaatctgtccccatgatccaatcacctcccctccaacactggagattacaattctttgtgaggtt

SEQ ID NO: 59291 - DNA, 1246 bp, Homo sapiens
tacacctgataaaattgcatagaactaagcgcacgtgtgcacacaccaatgaatacatgaaatgaagataattcgaataagatcagtgctttgtattttttgtyaatgttcttgtgatgttggattataaattttgcaagatgttaccattgggggaaactgggtgaaggggacatgggatctctcatctctcttgtattatttattacaactgcatgtgaatctacggttatctaaaaacgaaaggtttaattgaaaaacaagggaaggagctaagccattagactcctgttactccatttgagatgaagtttgtttggccagagggcagcacccacccatcctgattctcaaggcgtccatgaaatcgctaaagaatcaggaggattgcttgagcccaggaggttgaggctgcagtgagctatgatcatgccactgcgctctagcttgggtgacagagcaaaattctgtctctctaaaaaaaaatacataactgtagtgcctggtgaaccccagcttaaggcacggggttctttatgtatggtgttggggcctaagagctggatgtcttggtttagagtccagctctgccacttattgctgtgtgaatgtagacgagtcactttacctccactccccatctgtgaagggatagcaatattacctacctcacaggctgctgtgaggggcgaatgatgtaacactcggaaagggcttagatggtgcccgctgtgtaatctgggcatgatacttgctaccatcctcttaactacccctccctttcaggtctccatttacaagtgacatgggccaaattagatggggcattctggcattcaatttttttcgttttttcaccaagggctgccatttaaaaactgccagggtcatgctccctacccttatttagttggagatagcaaagcaatctggagcagagatttttggtcttgagaagcccctctcagttatgtacatacgaggtcagggggcaaagggaactccgtctctagatcagagagcctggaacacacaggtggattttatcagagattttctgatggattgagggggtgctgacacctgctgatgggaaatgacagaagcctcttgtagtgggctgaatgatggcccccagaagatatgccccctggaaacacgaatgtgatctcatttggaatgatggtctttacagatgctgttatggggaggatcttgagatgagaccatcttggtttatctgggt

SEQ ID NO: 59292 - DNA, 856 bp, Homo sapiens
ttagatgtacaatatgcaataccatctgcaagtaattcccttctctgatatttatactgcttcttttgctttgctggagcatatacttccaaaacattattgagtaatattgttagagtagccagtttaaatagggatttggtagcttgtgactgaaaaatccttgaaaaataccagaataagattcttggcaaacgcatagttgctaaatccagatgaaacacctggtgtctcatctcattatattattttattagggatggagtatacatttttgtctattgttctggcttcttataaggttcagtagactttgtaacagtcatatctgtcattggcagatggttggtgaaagagtgaccgttcagccatctcacaggaaagtgaaataatgctctttctaaaaagcaggaagactacagttgtaggcctttcaaaattaggcatgactttcagctcacggcaagatcaggtgaagagatgcaagttgcaggactctaagaggttggacgtatcaaagcacttttctcctcattatcctccattaattacagtaccaagcaccacccatgtgttgcctgcaccctacaccctttggccgagtgtgaggctctgccacttcctgaacccacactgagtttattgtggcccaaggggtcacccagaggcctttagagatataaaaamgtatatatgattttatatcacctacgatagggagatatccataaaaaaaggaaacattaaactctacatggtttcagttattttgattataaatcttttatgagatatgaaataaatgtgtttctatatctattaaagaatatatatgtatgaaagtttttatacttgc

SEQ ID NO: 59293 - DNA, 798 bp, Homo sapiens
tcccctttaaatataatttccaacttgaagtcctttctttgttcctgcatctaagtgtaggttgttacaagaagccaggccacatcttgaatgctttgctgcttagaaatttcttctgccggataccctaggtcatcactctcaagttcaaacttccataggtccctaaggcatgaacacagtatagccaagttctttgttaaggcataacaagggtgacctttactccagtttccaataactttctcattttcacatgagacctcatcaacctggtgctcatagcccatatttttatcagcgttttggttacaatcatttaaccagtctctaagaaggtgcaaactttcccttcatcttcctgtcttcttctgagtcctgtaaactcttcaaacctctgcctgttaccaagttccaaagtcacttccatattttcagtatctttatagcaatgtcccactctcagtaycaattttctattggtactattttctgttggtaccaattttctattcttcattgtgtagccatgaagaaatgcttgagactgggtaactggtaaataaaagaggtttaattgatgcaagattttgcaggctgcacaagcacggtgctggcatctgttcatattgtggggaagcctcagggagcacttactcatggcagaaggtgaggcaggagcacatcacatgacaaaagcaggagaaagagagagtcgatgggggtggtctgcacacttaaacaaccatatcttgtgaatactcaccgactactgcaaggacagcaccaagctgtgag

SEQ ID NO: 59294 - DNA, 1803 bp, Homo sapiens
atcctgaattccttcctactggacctagtcatcaattctgctggaactcaccaaaaactaaaaaagcctggcagtgattccttttttttttcttaattaaaactatcttgatgttctcttgaatgatgatctgctatcttggttaaagtatttaattacagcattggatgtaattcccctggatagactcaatgagtttttgctactgragaccttcaggaaaaacccctatgtaggatctgagacactgcatgctgacacatgtgtgcatgcacacacacaaacacgcgtggacacacacaggcacagatgcacactccatcaagtgatgcttccttctcatcagacacttcagactatgactcctgttgtccagcaagatacaacaaactgtatgcttttccaagacacagcctgcccttctaaataaggaaagagaaatccagtgtccataggtctttcaatgacagttcacttttgtaggtatgttgtaaccaaggctctttgtcaaagggcactctttgatatctgaattcctctttgagaattttccttcctttattataattcataaagatatgcaaaaaatataactttccacttctataaaacctcttatacatacctatcctttaatacatacaaaaaaacatgtattttttagacatgtaaaaccaaaaatatataaaatgatatatggccaatatgtttcctattttatacatatcttaacatgataggtgatataaaatcacacatagctttccgtatctcggaagccctctgggtgaccctgtgagccacaaggaactcagtgtgggttcaggaagtggcaggatcccacaactgggtagagggtgaggctgcaggtaatacctgggtggtgcttggtgctgtaactgaaggagggtaaaggggagagaagcactttgaaaagtctagccttgtagaggcttgcatctcctcgcctgttcttgccaagagctgaaagccatgcctcacttgaaaggtctaaaactgtagtcttcctgttttttacattatttcattttcccatgagttggctaaaagtcaatcctttaccaaacagctgccgatgtgtgagacatacaactgtgttacaaagtctactgaaccttgtaagaagccagaacatagccaaaattgcatggtccattgctaaaaaagtaatagatgagggatcatcaaacaattcatgaaaattcatattatgaaaaacttaagcatggatttcaaatttctttgtgccaaacaaacttttactaacttgttaaaacatgtctgaataggatctagtttgaggcactaagaaggataggacatcagttggaaaaaagcccccatcaaaacaacatgaattctgcagcaattgaagcaatagcataaaatttatgctgagatatgagtggaagaatggtgaaatcactgatgctttaaaaaaaagttaatgggaaaaatggtcaaaagaaatttgcagtttacaaatgagtaattccttttaagaagggacaggacaaggttgcaaataaagcctacaccagcagaccatccataccaatttgcaaggaaacaattcatcttgctcatgctctaactgaagaagactgacaattaacagcagaaacaatagccaacacaatagatatctcagtcaggacagtttacacaattctgacaaaaatttcagttgaacaaattttctacttgttgggtgccaaaatcattgcagccagatcagctgcagacaagaacaaacccttcaatggaaattataaacaagtg

SEQ ID NO: 59295 - DNA, 662 bp, Homo sapiens
catccatgggttagcagagcaccatgttggtgtcagatacagatggatcaaatcccctagctgaccctcagttgccatatatgtaaaatagaaaacataattttgttccaaaaagggttttgttttgtatggtttgaatgaaataaagtatgacgaagtaaatggcattattgtttttattttatataaycaaatattggttatttggatagatttagaatttttttcttcttttatcagaatgcttatctctgattagacatatccttagttttaagtcctgatgtaaccatcatctttgcagtgttagtcctaaaaataaaaactcctgaaaatatgctgcttaagcatacagcagactagctctgagcaatattgtgcttttgactgcaagcagaaacaaatgtgaaatcataaattgcatggtcgatttcttccctgagcttccttgtagtgtttgctgtacaggtaaacacccaattggagagcattgaccacaaaaatgatacactctaaattatgagaaccatatccttatccatctattcaacagactgtttctttaaatgcagagaaaaacagggtttactgtgctgcagtattcataagaactgattcattctaccatagtgtgacttgagcagaacgataaacaagaacgt

SEQ ID NO: 59296 - DNA, 743 bp, Homo sapiens
gtggtggagcttacctccactcgagaaaggatacttgtccgtagatttaggagggctttttctgtccttgaacttcttccccctatactgtaagtaagagcgggttgccttccagaaacaaaacctgtgggaagaatggcttctggtcataggagggaacccccagtggagggggctggagcaccgagcacaggggaaacagggccgggccagtcctcagagaatgtgggtgtccaacagagaagaggaaagcatcctggccttggggttctacctgccagtggcctttgttctgaggcctcctctttgtccagacctggctccagcgcgggcctggcatgggcagtttgttggggcttctttctggaaccatcagtgaatggagcctgtaaagggcctactatcctgaggcctggggtgaggttaacccctggggtgcaccccagcatcagactctgacatccctatctaaccccacctggtatggccagagtgtcygaagggcttttgctcaggtcctaatcctagtttccaccctgccacttactgacagccttgaccacctcactctattcccagcgggcccttccctggaatagacctggtttctcttgtgaactcagatttatgtactctttatgacctttatgttctctagaagcctgtgcaatattccccatcatctcttccttcctggccccaagccccttgttatccctaccttcaaccagtccttggattgg

SEQ ID NO: 59297 - DNA, 590 bp, Homo sapiens
gatcctgtaatcccagctacttgggaggctgaggcaggagaatcacttgaacccgggaggcagaggttgcagtgagccatgatcatgccattgcactctagcctagctgacagagcaagactctgctcagaagaaaaaaaaaaaaagaaaagaaaaagagaagacttaataattactaaaaaagactatagatcactaaattcaaaatgagtcttgacatgatggttcatgcctgtgatcccagaactctacaaagcyaggatgagaggattgcttgaggccacaagttcaagaccagcctgggcaacataatgagacccagtattcacaaaaaataaaaataaaaaatccagacaggtgtcatgcacctatagtactagctgaggaacgaggattgcttgagcccaggagtttgaggctgtaatgaggcatttgatatgccactgcactccagcctaggtaacagagcaagaccctatcttataataataataataataaagtgaaagtggggacattactatcaattctacagaaataaaaaggattatagaagagtactctgaacaattgtacaccaacaaatttgg

SEQ ID NO: 59298 - DNA, 596 bp, Homo sapiens
  misc_feature (1)...(596): n = A,T,C or G
tnnnnnnnnnnnnnnnnnnnnnnnnnnnnnnnnnnnnnnnnnnnnnnnnnnnnnnnnnnnnnnnnnnnnnnnnnnnnnnnnnnnnnnnnnnnnnnnnnnnngaattccaacactttgggaggctgaggtaggaggactgcttgagcccaggagttctagaccagcctgggcaacacagggggacccttctatgtcccagggaggagacttggaaatatttggccaccagctttaatgaccactataccyacttttcctttcctgcctccatctgtttgtttgtttgtttgtttgcttgttttgaaacagagtcttgctctgttgcccaggctggagtgcagtggcatgatctcggctcactgaaacctatgcctcccaggttcaagtgattcttctgcctcagcctccccagtagctgggattacagggggacgctaccatgcccagctaatttttatattttgggagagacaagttttcaccatgttgagcaggctggtctcaaactcctgacctcaagtgatctgcccacctcagcctcccaaagtgctgggattacaggcatgagccactgtgccttgcctccatctgggttt

SEQ ID NO: 59299 - DNA, 596 bp, Homo sapiens
  misc_feature (1)...(596): n = A,T,C or G
tnnnnnnnnnnnnnnnnnnnnnnnnnnnnnnnnnnnnnnnnnnnnnnnnnnnnnnnnnnnnnnnnnnnnnnnnnnnnnnnnnnnnnnnnnnnnnnnnnnnngaattccaacactttgggaggctgaggtaggaggactgcttgagcccaggagttctagaccagcctgggcaacacagggggacccttctatgtcccagggaggagacttggaaatatttggccaccagctttaatgaccactatacccacttttcctttcctgcctccatctgtttgtttgtttgtttgtttgyttgttttgaaacagagtcttgctctgttgcccaggctggagtgcagtggcatgatctcggctcactgaaacctatgcctcccaggttcaagtgattcttctgcctcagcctccccagtagctgggattacagggggacgctaccatgcccagctaatttttatattttgggagagacaagttttcaccatgttgagcaggctggtctcaaactcctgacctcaagtgatctgcccacctcagcctcccaaagtgctgggattacaggcatgagccactgtgccttgcctccatctgggttt

SEQ ID NO: 59300 - DNA, 596 bp, Homo sapiens
  misc_feature (1)...(596): n = A,T,C or G
tnnnnnnnnnnnnnnnnnnnnnnnnnnnnnnnnnnnnnnnnnnnnnnnnnnnnnnnnnnnnnnnnnnnnnnnnnnnnnnnnnnnnnnnnnnnnnnnnnnnngaattccaacactttgggaggctgaggtaggaggactgcttgagcccaggagttctagaccagcctgggcaacacagggggacccttctatgtcccagggaggagacttggaaatatttggccaccagctttaatgaccactatacccacttttcctttcctgcctccatctgtttgtttgtttgtttgtttgcttgttttgaaacagagtcttgctctgttgcccaggctggagtgcagtggcatgatctcggctcactgaaacctatgcctcccaggttcaagtgattcttctgcctcagcctccccagtagctgggattacaggggsacgctaccatgcccagctaatttttatattttgggagagacaagttttcaccatgttgagcaggctggtctcaaactcctgacctcaagtgatctgcccacctcagcctcccaaagtgctgggattacaggcatgagccactgtgccttgcctccatctgggttt

SEQ ID NO: 59301 - DNA, 707 bp, Homo sapiens
gtgattcagcaggtctggagtagggtctgagaatctgcatttctaacaacttcctatcggatratgatgctgctggcctgggcaccacattttgagaagcactggtctaggagacccttggctaccttaaaaactgaatggagtggggatggaacagagtaggggaggcctatttcagcctttgattaccactggaggatctgttttggttgcactcttggctcagatctacttgatagtaatctgcaaaatgtagatataataaaactactttatacatagttgtgagggttaagtgaaatgaggcacggaagtggccacaatgttaacctgcaggagtcttcgtcgtcgtacttcaggaactcagactgaatcaggtttccctagaaacccaaagtgaacaggaacctttgaggagggtctgaaacctccataccaccaatgagtgttttcttacttcctctctcctctctctctttttttgttttaagacagagtctcactctgttacccaggctggagtacagtagcacaatctcggctcactgcaacctccattacccaggctcaagcgattctcctgcctcagcctcctgaatagctgggattacaggtgcacgccagcacacccagctaatttttgtatttttagtagagacgtggtttcactatgttggccaggctagtctcaaactccagacctcaaa

SEQ ID NO: 59302 - DNA, 707 bp, Homo sapiens
gtgattcagcaggtctggagtagggtctgagaatctgcatttctaacaacttcctatcggataatgatgctgctggcctgggcaccacattttgagaagcactggtctaggagacccttggctaccttaaaaactgaatggagtggggatggaacagagtaggggaggcctatttcagcctttgattaccactggaggatctgttttggttgcactcttggctcagatctacttgatagtaatctgcaaaatgtagatataataaaactactttatacatagttgtgagggttaagtgaaatgaggcacggaagtggccacaatgttaacctgcaggagtcttcrtcgtcgtacttcaggaactcagactgaatcaggtttccctagaaacccaaagtgaacaggaacctttgaggagggtctgaaacctccataccaccaatgagtgttttcttacttcctctctcctctctctctttttttgttttaagacagagtctcactctgttacccaggctggagtacagtagcacaatctcggctcactgcaacctccattacccaggctcaagcgattctcctgcctcagcctcctgaatagctgggattacaggtgcacgccagcacacccagctaatttttgtatttttagtagagacgtggtttcactatgttggccaggctagtctcaaactccagacctcaaa

SEQ ID NO: 59303 - DNA, 707 bp, Homo sapiens
gtgattcagcaggtctggagtagggtctgagaatctgcatttctaacaacttcctatcggataatgatgctgctggcctgggcaccacattttgagaagcactggtctaggagacccttggctaccttaaaaactgaatggagtggggatggaacagagtaggggaggcctatttcagcctttgattaccactggaggatctgttttggttgcactcttggctcagatctacttgatagtaatctgcaaaatgtagatataataaaactactttatacatagttgtgagggttaagtgaaatgaggcacggaagtggccacaatgttaacctgcaggagtcttcgtcgtcgtacttcaggaactcagactgaatcaggtttccctagaaacccaaagtgaacaggaacctttgaggagggtctgaaacctccataccaccaatgagtkttttcttacttcctctctcctctctctctttttttgttttaagacagagtctcactctgttacccaggctggagtacagtagcacaatctcggctcactgcaacctccattacccaggctcaagcgattctcctgcctcagcctcctgaatagctgggattacaggtgcacgccagcacacccagctaatttttgtatttttagtagagacgtggtttcactatgttggccaggctagtctcaaactccagacctcaaa

SEQ ID NO: 59304 - DNA, 707 bp, Homo sapiens
gtgattcagcaggtctggagtagggtctgagaatctgcatttctaacaacttcctatcggataatgatgctgctggcctgggcaccacattttgagaagcactggtctaggagacccttggctaccttaaaaactgaatggagtggggatggaacagagtaggggaggcctatttcagcctttgattaccactggaggatctgttttggttgcactcttggctcagatctacttgatagtaatctgcaaaatgtagatataataaaactactttatacatagttgtgagggttaagtgaaatgaggcacggaagtggccacaatgttaacctgcaggagtcttcgtcgtcgtacttcaggaactcagactgaatcaggtttccctagaaacccaaagtgaacaggaacctttgaggagggtctgaaacctccataccaccaatgagtgttttcttacttcctctctcctctctctctttttttkttttaagacagagtctcactctgttacccaggctggagtacagtagcacaatctcggctcactgcaacctccattacccaggctcaagcgattctcctgcctcagcctcctgaatagctgggattacaggtgcacgccagcacacccagctaatttttgtatttttagtagagacgtggtttcactatgttggccaggctagtctcaaactccagacctcaaa

SEQ ID NO: 59305 - DNA, 707 bp, Homo sapiens
gtgattcagcaggtctggagtagggtctgagaatctgcatttctaacaacttcctatcggataatgatgctgctggcctgggcaccacattttgagaagcactggtctaggagacccttggctaccttaaaaactgaatggagtggggatggaacagagtaggggaggcctatttcagcctttgattaccactggaggatctgttttggttgcactcttggctcagatctacttgatagtaatctgcaaaatgtagatataataaaactactttatacatagttgtgagggttaagtgaaatgaggcacggaagtggccacaatgttaacctgcaggagtcttcgtcgtcgtacttcaggaactcagactgaatcaggtttccctagaaacccaaagtgaacaggaacctttgaggagggtctgaaacctccataccaccaatgagtgttttcttacttcctctctcctctctctctttttttgttttaagacagagtctcactctgttacccaggctggagtacagtagcacaatctcggctcactgcaacctccattacccaggctcaagcgattctcctgcctcagcctcctgaatagctgggattacaggtgcacgccagcacacccagctaatttttgtatytttagtagagacgtggtttcactatgttggccaggctagtctcaaactccagacctcaaa

SEQ ID NO: 59306 - DNA, 1214 bp, Homo sapiens
tgggcagcgtgctctgtttgtttttgatggcaccatattggctaaaggctttctatccttttgtgccttcgccaggtttgttagaatggcttccagyggcaactaccaataactcctaggggaccacctcaagactgaaggtgaggcaaagactgtggactatgaagcacctctttgtagcccaagttgcaagaggagcctagcaaaggaaatcagatggcagcaacgcagaagaagcacatggacgaatcctcagaacccatagtagaagaaacatttgggttgggtggattaccctgactttcagatatgatcttccccttccagaggttgaacaggacctttctaaaaatttcccatctgcaacttcagttggcaaagtgcctttgtttcttccagggctgagtggccatttttacaccagtaaaattcagaaaaaacagatgtttatacaactgatttctttttcattcaagtgaaaattactttatgtaggtgaatcccagagtgaaagaaatacatattcttacaactcaaattcactgctaaaaaaaagaaagcacagaaggaagtcaataaaaaatgagcatcattaaacacataaaaagatgctcaatcggccaggtgcagtggctcgtgcctgtaatcccagcactttgggaggccgaggcaggcagatcacttgaggtcaggagtttgagaccagcctgaccaacatggtgaaaccctgtctctactaaaaatacaaaacttagccaggcatggtggtgcatgcctgtaatcccatctacttgggaggctgaagcaggagaatcacttgaacccgggaggcggaggttgcagtgagccaagatagcaccattgcactccagcctgggcaacaagagcaaaactccatctcaaaaaaaaaaaaaaaaaaaaaaaaaattgacactcaacctcactgatcatcagaaacactaacacatgagaagccactgcatttccttcaaattggcaaaattaaaaaatctgatgataataattgttggccaggatgtgatgaggaaggaattccaacccactgcttgttcaggagtgttgattgttataaatactttggagagtgatttgttaatatctagaaaagaggaagatgcacgtgcccataatccagcaaatataagcccatggaaactttactgcatgctcacatgtacaaggatattcaatgc

SEQ ID NO: 59307 - DNA, 2603 bp, Homo sapiens
ataaaagacaaaataaaaattaaaaaaattaaacagaatttagaacataatgttgaaatgagagaactttagatctcaaaaacaacagagaatcaacccaggagattgtgtgtgactaaagaagtctcagaaagagaatagaggaaaggaaggaatattataagaaaagtttcaagaataaaaggtcatgggcctccagactgataaaaatccatcttgtacccagaaaaaattgacttttcaagaactgaatcagaacctatcctgtgaaatgttaggacaagtagatcctaaaatcttccagagggaatccattcaaaggccttgaatggcattagacttctccatatcaatactggatggtgaaagaaaaagagcaataccttaaacttgctaaaagaaaatgatttttaactagaattcaatttccatctcaattaaaaaacccactgtaaagaaaaaattcaaatcttctcaggcatataataactctaaaattctacctcctgtgcacctaattttggcaagtatctcaggaagatacactttgctagaacaaggacatagttyaagaaagtggaagaaatcagatctgggaatcaggggatcacatgatacagaggcacagccagagggatcccagggagagcatgtccagtgtgacaaggagtggacagcttcagaagggacagcaccaggggaaaaaacaaaatgaatatctgattggcataaacatttggaaagtagtattaaaaatgtgtgtaacaggtgtgttgttacatttgccaaaaaagagcaaaagggaaaaaaaaccccaagcagatgaaaagtaaagaaggcaatggttaactactggaaaaacaaaaaacaatattcaagaaaggaaacgaaatcatggtatacttcttgactaatgggtgaaaaatgaagatgtacatagttattaaaatgcaaacattgattattgagttaacccaaagttgtgacatttggaagcacgggtaggcacagtggggtgtaagagacctaaatcctcacttaccgtaatgtttaaaaaattgccatgtcaaagaatagcagcatatcatattatttagaaatatggatgcaaatgccagaagaaaaattaaaggaagtgaaaaatgttttcctctaggaataggacaggggacgtaatagggaacagatattctgcattatctcaattaattctcacaactgtgactgaagctcttttgctctccttgttttacagatgagcaaactcacagagggatgcaacttgcctaggatcgtatagccagcagctcatgagtgtggaatggggattcaaataaggtctaggagactccaaaatccatgtgcttaaccatgaagttttactaccccttctctgcttcttcattaagtatttttagtgcctaattgcccatgctctctgccaggtgcagtaaaggaggattacacaggtgcaatatgagccatgattcttgttgaaatcagcacgtcaaaaataaggctaatgagcacgtgaaaagatgctcaacatcactaatcattagggaaatgcaaaactgcattaaaatatcacctcatatacattaggatggctactatgaaaaaaaccagaaaataacaaatattggcaaggatgtggaataactggaacactcatgcactgttggtgggaatgtaaaatggtgcagctgctgtggaaaacagtatgatggctctttaaaaaattttaaaaaaatagatttctcatataattctgcaattccattcctggatatataccccaaagaatggagaaaacaggatcctggagagatgtttgtatacccatgttcatagcagcattattcacaatagctaacatctggcagaacccaatgaatgaatggatgaacaaaatgtagtatatacacacaatgggatattagtcttaaaaaggaaggaaattctgacacatgccacaacatggaggtgccttgaggacattatgctaagtgaaataaagccagtcacaaaaggacaaatattatatgattccatttatataagctacttagagtggtcaaattcatagagacagaaagtagaatggtggttgccggggatgtaaaggtgggcatttctcaaaaaactgagaaatacagaaaaataaaaatcactcactgtttgccacacttctaccctggttctttttaaatctatttttcttactcaaagaaatacatgtttatagtttaaacattcaaatagtactacaggttcgtaataaacaagagcggtccaactcccctcctcctagccctgtgctccagtcctttcagatgttgtttctggtctttgtatttctcaataacatgcctaaatgtattttctggctccttgtattatttatttattatttgttgagtttattgctatgaaaaatagagattagatcacttacagggtcttcctgacaccgtgctcaccttccccacctatatgtacaattcaccttccctgtcctcatggaaataatattactcttttagttaagtcacaggtcagtatttatgttatgattatgtaaatattgtttatgtaatgtg

SEQ ID NO: 59308 - DNA, 905 bp, Homo sapiens
tgcatgccaagctactcaacatgaattctagaaaatagtagaccagaacaagggtcatttcgcagtatatttattataaggctattctgaccctagaccagccaacatcccctgaatttactccatacctacccccactgcagacaaacagttcccaaatatggcggggctgtccagttttttggcttcctgatctcctttctaggtcccataactcaccagcctatttcatgccatcgtgccttggcagagggcgctctcttggctaggatgtcccaccttcccctgtcaccactccttgccctctctttgtccaccccccacaaacataagctttttcatccttaaaatatatttgctatcaatgattctataattarttatttagtaaacctttccccacagataggagcatctccccatgaatgcaagataaagaagcatttcaaatatacatataaaaggattcaaaaaggatacaggtgctagctttaatgacatcattgtacctggaaaacctccaactctcttctccacctgtcacagtcaaatttttcttccttgctttgttaactcatatattcatcccgaaacttgttcacctattattcattagacatttcgctaagcatagaaaataaaatacaatgctgaacaagacatactcctcatcctcatgaagtgtgttgaattgttaagaagttgcagatcagattttcattttaaaaagattattttgacagactaagaaggaggcactagggagaaaaacctaccattagaaaaatccattaaaaggtggttacaataattcacatgagagttgatgatggcatacacggggaaaatagcagtgaagtggagaaaatttggatagatagcaacagcagcagtaactctttatg

SEQ ID NO: 59309 - DNA, 2147 bp, Homo sapiens
aaatcttgagaacacatccttaagtatatcttttctgagaagcagaggttaatatcaactgctgaaaatacatgcaggcataaggctaaatgtactaaccatgccaaaatatgatgtgattggcaggagagcaataatacacaaatatttcttgaaatacccatttcctttcaaatagaaggtttatttttctttcatgctttcctcaaacagaaaccctcaagccttgttatgttccaatgccacaagcaaaatgtacagttagaaaccaccggatctagcagggccagcctgccattgttattttgcagagggaagggtaatattctcaggaagctttgttccaacaatataataaaggctacacgttgtgagtattatctgtggcaggcagaatgactccccaaagaaatgcccatgccctattccgtggaacagaatatattacattgcacggaaggaggaagttgatagatgagaaaatattcacagactttaagatagggagatttccctggcttattgggatgggctcaatctcatcatataacccttaaaagcagaaaatttctcagcagaagagttaaggcagaaggagaaatcagagagattccaaacatgagaaggattccatctgctgctgttggtccgaagatggaggggccacctacataaggaaggcctgcaggagctgagaacagctcccagctgacagcccacaaaaaaaaataaaaagaggcctcaaccctataaccagaaagattgatttctgccaacaatctgaataaacctggaagtgaatcatctcccagagcctccacataaaagccctgccagataacaccttgagttcagccttttgagacatgaacaaaagacccggccaacactatctgcgcttctgacccacagaacaggaggataatacatttatgctgttataagcctctaggaatatgctaatttgttacagcaacaatagagaactacaatagaaaaagagtgaaaatacaatacagaatcctggaaaactaggcttggagagtgggatcctattagcagcagaagtggacactcctcaggaggctgaagtaggggaatcgcttgaacctgggaggtggaggttgcagtgagccgagatcgcgccactgccctccagcctggtgacagagcaagactctgtctcaaaaaaacaacacaaaacaaaaaaacaaagaagtggacactcctttagagggatctraataacttatgaagaagacaccagagacacaaaaatggtccagcagttttggaaatacttttggaaaatatgaagcttgttgctggtggtgagtgtgaatgtgtgtgtgtgtgtgtaaagaaaggcttcaaaactggaattaaaacatagaatatttgaaataacaatttctggttttgaataccttttctaaaggtaaagtcacatttttaaataagtctttataataagcatgtatttgaatgtgcaatttaatttaagtaaactaattacacatttataagttgaattcatttttaaaatggtttaatttttgcaacaatcaaagtgacaatgttctgaactttatgtaatcaacatttcaagatttagcaaacatttcttgaatgcatatgtgcatgtatttatgtgtgtgagtgtagagtgggatgtctaaatggtgtgagcaaatggtaccagggtatacagcaaagctgcttgaagccaccaaaaccatcgagtattttcattcctcgatgaaatactgtttaatctgtgctttgaacgtgagataatcctgaaggtagagggtggggagtgtactttgtaaaggctggggcacagaattctagggagtaacatctgtaaagtcatagaggtacatatgaggatggcttgttgaggtgatacggaaacactgtgaactttcttctggggtctcccctgtaagaggctgctccctctctggtaccctgcccagcaatttcattctagctatttcagcagctttgaactctgatctgattcctaagctcattaggcctatgatgttctctacttcctctatacctccctgggctacagttaggagactgtccctgagcagattgctggatgaaggtgaggcccaccatacgtttattta

SEQ ID NO: 59310 - DNA, 1996 bp, Homo sapiens
cctagggacacaagatcatttcttttctgagatgatcttctgtacagcctttctgatatctccacatttgcctactgttttctttcctatgcttttccgggaagtcttttttgtacaaaattaacatgggtctgtttacattcagaagattcttggggtggggcattacaattgcttggttaaccgatcagaccaattctttctttgtatgatataccttcctcatgcacagcttcttcatttctggtttagaatagtcattgtatcaacctgcttagcatgctgactttgcttaattagcattgaggggtgcaaaccacttaattctctcacactgcaactcacactcactgccttcagttaattccttaaagatgatgaagtggaaggcagggaatatagaactccctgcccccaccacaaatctaagcaaacaaggatgggaccaggaggaagaacccatttgtgtgggtcctccacagctgctggcttatgtattcttcagtgtgccgctgcaaggtataaatggtgcacatcattttgtagatgagaagcggcatacaggagaggcaggatttggatctaaacctgtaccatgaggtctctcaaacttggaatgggaggtcaggagccacgttkttttcttctctgtatcctgggtgcctgttatcttacggtaggtggtcagtaaacctgtaactaatgaatgaacatctgtattggtaaaaagacacaggttactattgctcttcaagtggggtggggatccgtagccagtaaaccccaacccaaggccacttactgtttatgagacttaacagacttgcgtgtggagagcacccttctgacctcattgtttacaaaggatgtcaaaagatgtggctagggttagagttatcttaggagcagagctctgggtaagagtcagatgatctttctgggctcccggcactaagttttatatttgagcactagtttctaaacctccacatgaaaccagctctcactgtgctgccaagcctgagacattagggactgaagttcccttgttccaagaggatgagctttgtcaaaggaggatgaatagactctgctcatgttttggctccagcagcctcctgcctatagaagcgttttccttcactggggctaggctgaacttcatttcagagaggcataaaaagtctgagatccccaggggatctggcacaggaaaatgaagtcattttacatttgtggcgtgattcaaattggaatcacacaagtcagaacgacaggatgctggagtactttgtttagctcttctgtgcttcaggagctaagctttcttcagcttcctggagagaggaagtgggtatgtatggaatacccatttgctttctatagtcttcaaggtccttttcccttacgtaaaacaccaagcctaaatcttacattcagctttttagaaggcagaacaagcagccattgagctcttgctgtgggactgaccccgccttctgcctgatgtcagtggggatactgcttaccttccttcctgcaaggaaatccacacactcttatttcatccggcctggggaggaggggaaagaggaagtcacctgtgaaattgtctttgcgctttggactcaagcccccaggtagggcagtaacaggtattctaatctctgcaggtctccttaccttcctgtttggtctcgggtggtttgtttttgacctacgtagcttatgggttttccctgcttgggctgctgccccctgggtccttcccctctctccctgcagccttatgcagcaacagctccctgtgctttcccttccctcctcctgctgctgcatctctgccttcgcccctagcaggtgctcattcgtcacatcacatatgctaccatattgaataagcacaacatcccagtgggggtgggctttgtagagaggagtctgaagtgcagagacaatgagtgaatcactcaggcttgcaaagctggtgaaacaa

SEQ ID NO: 59311 - DNA, 599 bp, Homo sapiens
cgtgatgtgcctttgatcacagtactatgagctttctgtgtgttccttaaactataaatgagaaagagattgtggttttgaatgatgttaatgttgtgattacaagtaataatagctccatagacagtcttgagatgacggtgtaagggaggtatgcttgagggtgcccccaatcaatccatattgtgttctgtttaaaaagaaatagtgtagtaccttattgatgtctttaattactcacaagttaaagcacatggaatgaaattcctttctttataaataagcatttaagaatttcaccagagaaaacagacatccatatttgcgaccatgttgaaaaattcttggtccctttatggctttatcgcagaggtgagagcattttggtctttgttgagtaactgaatagcattgtatcatttaggatggctttggctgcagatgatgggaaacggtggctccaattggctcaaacattaggaaatggcttaacatcacccctgagcctggtgtggccrgtggcagctcctctgccctgctctaagctctgtcctcccatctcgtccagtactttgccattatccttgagtgcctaagga

SEQ ID NO: 59312 - DNA, 651 bp, Homo sapiens
tccgtatgctgaacaccggtcccctgggycccctttttctttctctgtactttgtctctgtgtctctttcttttccaagtctctcgttccacctaacgagaaacacccacaggtgtggaggggcaacccaccccttctgcctaccctggactgctgtctctcagcccgctccgtggctgtcaccctgggaatgagtctgccacggtcccgggaatcctctccctgctctgggaccctgggttttctgcgtcctgtactctctgtcttttgttcattcatttgttttttgtttatgctcttttttgagtccagtctaaaacactgtgtttttagtccttgcacacctggaaatggctttattctacgcaacgtgatcattttgctggctgaagaaatcaaaagctgaagcgaggctccatggttttcgagaagctggtgctgctgaaatccacacgccactctctttcttttctttgcatgtgacctgcttttcctttctggaagtctttaagatcttttatttatttattttggttgtttaaaattttatacacagtggcgtgcatcctccctcatttactccgatgggtactcagtggggcttttcaggtgagaaaaaatgtcttgtattgtttctttgatcatctcctt

SEQ ID NO: 59313 - DNA, 651 bp, Homo sapiens
tccgtatgctgaacaccggtcccctgggtcccctttttctttctctgtactttgtctctgtgtctctttcttttccaagtctctcgttccacctaacgagaaacacccacaggtgtggaggggcaacccaccccttctgcctaccctggactgctgtctctcagcccgctccrtggctgtcaccctgggaatgagtctgccacggtcccgggaatcctctccctgctctgggaccctgggttttctgcgtcctgtactctctgtcttttgttcattcatttgttttttgtttatgctcttttttgagtccagtctaaaacactgtgtttttagtccttgcacacctggaaatggctttattctacgcaacgtgatcattttgctggctgaagaaatcaaaagctgaagcgaggctccatggttttcgagaagctggtgctgctgaaatccacacgccactctctttcttttctttgcatgtgacctgcttttcctttctggaagtctttaagatcttttatttatttattttggttgtttaaaattttatacacagtggcgtgcatcctccctcatttactccgatgggtactcagtggggcttttcaggtgagaaaaaatgtcttgtattgtttctttgatcatctcctt

SEQ ID NO: 59314 - DNA, 651 bp, Homo sapiens
tccgtatgctgaacaccggtcccctgggtcccctttttctttctctgtactttgtctctgtgtctctttcttttccaagtctctcgttccacctaacgagaaacacccacaggtgtggaggggcaacccaccccttctgcctaccctggactgctgtctctcagcccgctccgtggctgtcaccctgggaatgagtctgccacggtcccgggaatcctctccctgctctgggaccctgggttttctgcgtcctgtactctctgtcttttgttcattcatttgttttttgtttatgctcttttttgagtccagtctaaaacactgtgtttttagtccttgcacacctggaaatggctttattctacgcaacgtgatcattttgctggctgaagaaatcaaaagctgaagcgaggctccatggttttcgagaagctggtgctgctgamatccacacgccactctctttcttttctttgcatgtgacctgcttttcctttctggaagtctttaagatcttttatttatttattttggttgtttaaaattttatacacagtggcgtgcatcctccctcatttactccgatgggtactcagtggggcttttcaggtgagaaaaaatgtcttgtattgtttctttgatcatctcctt

SEQ ID NO: 59315 - DNA, 648 bp, Homo sapiens
agtgaggtggtttcactttgacttttattaagcgatctgtaaacatgagtttggctgatttagctgacctgcaggaaaacrttcctcaccacttccaaccctcccactccatcccagcaatatgctacaaaacgctcaaaaacaggtccacttaaacctcacaaaatcagatcagtgtcggggcctggaggggagtagggacaatgtgtgtgaaagtgaaaagccatagttggaaactcttctcaaaggactataattttagtattttcaagggcagactacgatccataaggactaatgtgagaatgtcctgaccgggtgcagtggctcatgcttgtaactccagtgatttgggaggccaaggtgggaagatggcttgagccaggagttcaaaaccagcctgggcaacatagcgagactccatctctacaagaaaaaattaaataaaaattttaaatattagctgggcatggtggtgcgcgcctgtagtcccagctacttgggaggctgaggcaggaggatcaattgagtccaggaatttgaggctgcagtgagtgatgaccatacaactgcattttagcctgggtggcagaacaagaccctcactctaaaaagatttttctttctttttttttttttgaaaaaaga

SEQ ID NO: 59316 - DNA, 648 bp, Homo sapiens
agtgaggtggtttcactttgacttttattaagcgatctgtaaacatgagtttggctgatttagctgacctgcaggaaaacgttcctcaccacttccaaccctcccactccmtcccagcaatatgctacaaaacgctcaaaaacaggtccacttaaacctcacaaaatcagatcagtgtcggggcctggaggggagtagggacaatgtgtgtgaaagtgaaaagccatagttggaaactcttctcaaaggactataattttagtattttcaagggcagactacgatccataaggactaatgtgagaatgtcctgaccgggtgcagtggctcatgcttgtaactccagtgatttgggaggccaaggtgggaagatggcttgagccaggagttcaaaaccagcctgggcaacatagcgagactccatctctacaagaaaaaattaaataaaaattttaaatattagctgggcatggtggtgcgcgcctgtagtcccagctacttgggaggctgaggcaggaggatcaattgagtccaggaatttgaggctgcagtgagtgatgaccatacaactgcattttagcctgggtggcagaacaagaccctcactctaaaaagatttttctttctttttttttttttgaaaaaaga

SEQ ID NO: 59317 - DNA, 648 bp, Homo sapiens
agtgaggtggtttcactttgacttttattaagcgatctgtaaacatgagtttggctgatttagctgacctgcaggaaaacgttcctcaccacttccaaccctcccactccatcccagcaatatgctacaaaacgctcaaaaacaggtccacttaaacctcacaaaatcagatcagtgtcggggcctggaggggagtagggacaatgtgtgtgaaagtgaaaagccatagttggaaactcttctcaaaggactataattttagtattttcaagggcagactacgatccataaggactaatgtgagaaygtcctgaccgggtgcagtggctcatgcttgtaactccagtgatttgggaggccaaggtgggaagatggcttgagccaggagttcaaaaccagcctgggcaacatagcgagactccatctctacaagaaaaaattaaataaaaattttaaatattagctgggcatggtggtgcgcgcctgtagtcccagctacttgggaggctgaggcaggaggatcaattgagtccaggaatttgaggctgcagtgagtgatgaccatacaactgcattttagcctgggtggcagaacaagaccctcactctaaaaagatttttctttctttttttttttttgaaaaaaga

SEQ ID NO: 59318 - DNA, 648 bp, Homo sapiens
agtgaggtggtttcactttgacttttattaagcgatctgtaaacatgagtttggctgatttagctgacctgcaggaaaacgttcctcaccacttccaaccctcccactccatcccagcaatatgctacaaaacgctcaaaaacaggtccacttaaacctcacaaaatcagatcagtgtcggggcctggaggggagtagggacaatgtgtgtgaaagtgaaaagccatagttggaaactcttctcaaaggactataattttagtattttcaagggcagactacgatccataaggactaatgtgagaatgtcctgaccgggtgcagtggctcatgcttgtaacyccagtgatttgggaggccaaggtgggaagatggcttgagccaggagttcaaaaccagcctgggcaacatagcgagactccatctctacaagaaaaaattaaataaaaattttaaatattagctgggcatggtggtgcgcgcctgtagtcccagctacttgggaggctgaggcaggaggatcaattgagtccaggaatttgaggctgcagtgagtgatgaccatacaactgcattttagcctgggtggcagaacaagaccctcactctaaaaagatttttctttctttttttttttttgaaaaaaga

SEQ ID NO: 59319 - DNA, 914 bp, Homo sapiens
ccccatgcatgcccagatgcagacacacccgtcacctctacctagatgtggacacaccccccaatgcgtgcccagatgtggacacccccccatgtgtgcccagatgcagacacaccccccatgcctgcccagatgcagacacacccatgtcacctctgcccagatgcagacacaccccgtcacctctgcccagatgtggacacccccccatgcgtgcccagatgcagacacacccctgtcacctctgcccagatgtggacacacccctccccatgcgtgcccagatgcagacacacccatgtcacctctgcccagatgtggacacagccctgttacctctgtccagatgtggacacgccccccatagctgctcagatgcagacacaacctcctcgcttctgcccagatatggagtcatgggtatcctgtccccccaatgggtctcttgtgtgcccaccttctcttgacctcttctcaccagcacaaggtgttgcaggaagtcagggactgcgaacagagggacctgctgaagccgtgacagaagaacataaattgtgaagatttcatgacatttatcacttccccaatcaatgctcttataatttcctatgcctgtctttactttaatctcttaatcccgtcatcttcgtaagctgaggatgtatgttgcctcaggaccctgtgatgattgcattaactgcacacattgttcgtaaagcatgtgtgtttgaacaatatgaaatctgggcaccttaagaacaggataacagcaattttcagggaacaagggacaatcgtaaagtctggctgcctgggagccgggtggaacagagccatatttctcttattaccaaaacggataagataaatatcgytgaattctttccccagtaaggaatattaataattaacag

SEQ ID NO: 59320 - DNA, 1127 bp, Homo sapiens
  misc_feature (1)...(1127): n = A,T,C or G
ggaggctttctttggcacccaaaatatgatcagtttcaagaaatgtctcaggggcaatagaagatacaatctgtttgaatatggaattaaatggaatctttgtttggatatggaattaaatatttatatattaatatgtaacaataattacatattattcccttcctctatatcactatttatattcatggattttatttgtcataggtgttatattccctctgattatgtttttgtttctctttggatttgcaggtacttgtatgtgtgtgtgtgtatatatttaattaatgtatttatttatttgagagacagggtctctctctgccactcaagctagagtgcagcagtgcgatcatggctcactgcagcctcaaactcctaggctcaggtgatcctcttgccttaacttccctagttgctgagactacaagctcaagccactgcacctgcccactttatatattttgatacttatactgtgtaaactgctagaacaagtagacccttgcctccctgacccaaataaatataayagtttacgctttccgtttcctattttagatcgaattaaacaaatctttgaattctttccatccagataagtgggatacagtttctgccttctgctagaaccctggctcaattgtcaatgagagctgatcttgtagggagagtgggtgtggagaaaagagagacagcctcacaggaggctgggctgaagccgtgtggccatcttcaatgccatcaccttggtcattgtcattccaacctacggggaaagggacaagcacagagggcaggcaggaaggtttatgggccaggcctggggtggcactcacctctgctcacattccattgaaatcccaagcaaatgcagggtgtatctgaacggctatatacttacctataattttgggtcatgcaaggggagaataggttttggtggacagctagcagtttctgccagaatgctgttttgtgttgtatagagatgtaggccatttacattcttgttacagannnnnnnnnnnnnnnnnnnnnnnnnnnnnnnnnnnnnnnnnnnnnnnnnnnnnnnnnnnnnnnnnnnnnnnnnnnnnnnnnnnnnnnnnnnnnnnnnnnntttg

SEQ ID NO: 59321 - DNA, 1197 bp, Homo sapiens
tgggggaaaggtgggccaggatagctcccttgagagcgccctctgctcttattaagttggtgcaaaactaaaaaactgcaattacttttgcaccaacctaatagttctgagaagagatggtaaacacagccccttgctttctgcaacctgctgcctctgttctcttctctcccttttactgggacctgttttcctttgtgcttctgccctggtcaatttggattctacccccagcaatttcttctcggggcagggctttgtcttggaagcgagttgcattttgtgaatttcaagagtccatggcccagatggctccggcaccgtctgccttactgctttctccttgcaggcgcctgcaagtggaaggaaggctgtgagtctccctgctttgactcttgttctctgactggactatgggctttccagggagtacctgctgtgatttgggggtctctccagatctcaggaccatcagaatccccgtctgcattgacttctctcctcttcctctcctgcggttgctgataccatgcaaggcttgtggctgtcagtgactttgtacccccctgcttgtgtgctgtggacaccttgccatctagtcccgttgtggctatagttatccagaggtttttggtttttctatcctagatgctctgtcaattgttggggaatttggggaggtggaaaaaactatggcatcactgtcccatcttcccaaaattgctttcaaacccacttaccaaaaagtagcagaaacattcattataaaagccacagtgtggatggcarcccccagtgttcttcaggggaaatgagaagcttcaaagagcagagcatgacatgtctcaaagccttggccccctgtcttgagactgcagagactctgtggatagagctctaagcagggctgccctgtcctgttgctgggttgtgcactcctcaagtgcccctggctgagagggtaagtggggctgaatcccagcccatgctgtttgctgagtcctgcgtctggtcctgggatgtacccctcccaccttgataatgtacgcaggacctagcagctttcctgaccataggggagggggtggctgtgtggttttgaggccttttttctgcggggggcggaggggggtccctgcagggaggcctgcaaagcctgagttctctccctgagatggggagagtgaccaccaagtt

SEQ ID NO: 59322 - DNA, 1924 bp, Homo sapiens
gtgctgggattacaggagtgagctatcacaccaaggggtgaggtggactgaggccaggcaaaggtgagctgtgggccctcggtcctgggcacggatctcatcactaggaattcctcctccccattcccccaccaamggggccacagccccgggaaaggggtggctcttctgggtccccagactgctcccagcttttcctctgtggaggcaggtatgtgagaaaggatgcagccaggcaggtgcaacacacctgggcagcccgtggctgtggccatggccatggccggtctgcatgtggaggaaaagatggtgaggtgagaccctgagaaacaactctctgatctcatccacctctcccctcctaggcgggacgagatggatgcaccctctgccgcagccacctcttctgcaggtgcccggcttctccagacttgctattttggaggggcaggtcagtgggaacgaccgactgccttgcatctcagccactcatgggcctcagagtgtgggcaggggcagctgcagccctctcgagcctctcactccctgcttggcctctgtaagcctgtccgggagcagctcacagagcccctgtggtggagatgagtcacttgttctaaaaataaaagaagtgaagtcatgaaatagtgtatttcctttttaagcccgatgtgcctgcagggggatccccagcagtgtgctggcggcagggaccctgacaaggtctggagcctcagagcgcacctgcccccacttacaagccccggcctcggggattgggtggagtgtcccctgcctccaacggctcccagatgagtgagtaaaagatggcacgtagaccaggagcgggggctgacacctgcaatcccagcactttgggaggctgaggtgggaggatcacttgaggccaggagtttggggccaccctgggcaacatggtgaaaccctgtctctactaagaatacaaaaaaattaaccagcgtggtggcacatgcctgtggtcccagctactggggaagctgaggtgggaggattgcttgagcctgggaggtcaaggctgtagtgagctgagattgcaccactgcactccaccttgggtgacagagtgagaccctgtctcgacaaacaaacaaacagacaaacagaccgatggcatgtaaatagcacccacattgggcagacagtcttaggctgtaagagagggcagagtgccctggaacacacacaagggaaggagcgctgctctctcttggggtctgtgggaggctttctggagcaggtgtccctagaggtaggactggggggactctgctaggctggtaggaagggaacagcattccaggcagaaggaacggtgtgagcaaaggcctggaggctacagagctcccggcaagctcaggatatgatcctctgtaggtctccccagaccacctggggagctggtgacacgtgcagattcccaggcccgaagaccagctggactccaagagcagggcccaggaatatgactaataattcccctgcctgattcccataccctgcaaaatttgagaccctctggttcagatgctagtgcatagaggaggggatgaagagacgtacgatggcaaggcaggttgggtccaaattgtgagggttttgagggttgtttaggagtttggattttggtgtacaggcaggagggggctatcaagggtgtttaagtaagggagtgctgctcctggacctgctcctgagaatggctcctgggagtgatgtaggtgactgattgatggggtgggacgaagctgggcagaggcttgggtagctgggactgtaacagttatgtgagaggaagcgggaatctgagagagttgccggggcaaaatgtaggcccccagcccctggttcaggggacagcccagggatagtcaccagggatcca

SEQ ID NO: 59323 - DNA, 633 bp, Homo sapiens
ctgcctccctttccttggatgtgtgttccttcatcagccaggcctgccctggcccagsctaaatctccactggagctcaccactgcctgatgcaccagacacttggtctgcttctcctggccactctgactagaagagcccaccaaggcaggcacttgggtctgtcttgttcacagccatatccccagcccctggcacccagcagcattcaataaatggtaattgaatggataaatgaatgaatgaggaggtacctgttcattcatttaatgctaatactaatactgattaacaataataatagcaggagccggctcttcacagatgctgggattcaaaggtaaaccagacatagttcgcattttcaatagtcaacaaatgtgtaattagccaataaataagttaataagtgatcaataaatgcatgatcatagactgtggtggggctcccaaggggcaggggcaggtgcttggatgggcaccaaggagctcctcccccagggagtgggtctgagacctgaaaggcgtgtgagaatgagaaaagcgtgtcggcagaacaaatgtgtacaagtctcctgcagctgctgtaacaaaccatcccaaactgggtggctcagaacaacacagacttat

SEQ ID NO: 59324 - DNA, 633 bp, Homo sapiens
ctgcctccctttccttggatgtgtgttccttcatcagccaggcctgccctggcccaggctaaatctccactggagctcaccactgcctgatgcaccagacacttggtctgcttctcctggccactctgactagaagagcccaccaaggcaggcacttgggtctgtcttgttcacagccatatccccagcccctggcacccagcagcattcaataaatggtaattgartggataaatgaatgaatgaggaggtacctgttcattcatttaatgctaatactaatactgattaacaataataatagcaggagccggctcttcacagatgctgggattcaaaggtaaaccagacatagttcgcattttcaatagtcaacaaatgtgtaattagccaataaataagttaataagtgatcaataaatgcatgatcatagactgtggtggggctcccaaggggcaggggcaggtgcttggatgggcaccaaggagctcctcccccagggagtgggtctgagacctgaaaggcgtgtgagaatgagaaaagcgtgtcggcagaacaaatgtgtacaagtctcctgcagctgctgtaacaaaccatcccaaactgggtggctcagaacaacacagacttat

SEQ ID NO: 59325 - DNA, 847 bp, Homo sapiens
ggatcctgttggatgtaaacaagggacctgaggcaaacgctcccatctcttctcctggcagctaagagatggttcctctgctagtccagaaaagtgaccacccagaggcagccctgctgtggggcctctgtgccttccaccaggggctgccgagttgctgcagccaagccctgcggtcctgccagccagtgggaagacgtggcccctgggcttttaagaatgccgtgtagatatttctagtggctacatccatcctgaggctcatctgagtccccgtgtctctgtgtccctrtgacactcacttcgcatgtgttgctaagctctgctcccttgttcttgtgggcaggccagggtctccctcctttagaggcccctgtgtgcatctttcctcaattccacagggatattctggaggagcccggggaggatgagctcacagagaggctgagccagcacccgcacctgtggctgtgcaggtgacgtccgggctgccgtcccagcaggggcggcaggagagagaggctggcctacacaggtgcccgtcatggaagaggcggccatgctgtggccagccaggcaggaagagacctttcctctgacggaccactaagctggggacaggaaccaagtcctttgcgtgtggcccaacaaccatctacagaacagctgctggtgcttcagggaggcgccgtgccctccgctttcttttatagctgcttcagtgagaattccctcgtcgactccacagggacctttcagacaaaaatgcaagaagcagcggcctcccctgtcccctgcagcttccgtggtgcctttgctgccggcagcccttggggaccacaggcct

SEQ ID NO: 59326 - DNA, 847 bp, Homo sapiens
ggatcctgttggatgtaaacaagggacctgaggcaaacgctcccatctcttctcctggcagctaagagatggttcctctgctagtccagaaaagtgaccacccagaggcagccctgctgtggggcctctgtgccttccaccaggggctgccgagttgctgcagccaagccctgcggtcctgccagccagtgggaagacgtggcccctgggcttttaagaatgccgtgtagatatttctagtggctacatccatcctgaggctcatctgagtccccgtgtctctgtgtccctgtgacactcacttcgcatgtgttgctaagctctgctcccttgttcttgtgggcaggccagggtctccctcctttagaggcccctgtgtgcatctttcctcaattccacagggatattctggaggagcccggggaggatgagctcacagagaggctgagccagcacccgcacctgtggctgtgcaggtgacgtccgggctgccgtcccagcaggggcggcaggagagagaggctggcctacacaggtgcccrtcatggaagaggcggccatgctgtggccagccaggcaggaagagacctttcctctgacggaccactaagctggggacaggaaccaagtcctttgcgtgtggcccaacaaccatctacagaacagctgctggtgcttcagggaggcgccgtgccctccgctttcttttatagctgcttcagtgagaattccctcgtcgactccacagggacctttcagacaaaaatgcaagaagcagcggcctcccctgtcccctgcagcttccgtggtgcctttgctgccggcagcccttggggaccacaggcct

SEQ ID NO: 59327 - DNA, 800 bp, Homo sapiens
cgggaccaggaagggatgggccctgccagggttgcccctgcactgtgcattctcgcctgggaggcacaagttctttcatctgcttttccttcagaggtgctgagcccacgccatagcccctgtgggatggtgggggagggggcgacccgaacaacagtgcagtcggtatcgagattggggagaggagcgagtccaaggagaaggtcatgagtttctttttactcgtgttgaataataacaatamcaataacaataacaatatggaaaccaccgcaaacttggagaaaagttgtaagcacagtaaagagaagcttccttctgagtcacttgagtggttgccgttctggccctgcaccctctgtgctttggacggcgtccaacccgcattcatgtcaggagtgagtcgcacgtggctttgtggtcatggcgacttaatccgcctggacggtggctccgtctccctgggcttagacgaccttggcacttctggagataagcccatggctcccaggttgtgttcatgtgacgtttccttgtggtaggttctgggtctgcgtttcgtctaggagtgtcacaggatggacactgcctcctggcaggggctgcccaatgcagttagcctcctgctggtgttctctcttgttgcttggtgaaggtggccctggtcagcttctccactgcccagtgaacgacccctttgtaatgaatgagtggggaggtagtgtgaagcgatgccaatatcccatccctgtcaaactgcctttactttttccttccttccttgctcccacctgtgtgga

SEQ ID NO: 59328 - DNA, 800 bp, Homo sapiens
cgggaccaggaagggatgggccctgccagggttgcccctgcactgtgcattctcgcctgggaggcacaagttctttcatctgcttttccttcagaggtgctgagcccacgccatagcccctgtgggatggtgggggagggggcgacccgaacaacagtgcagtcggtatcgagattggggagaggagcgagtccaaggagaaggtcatgagtttctttttactcgtgttgaataataacaataacaatamcaataacaatatggaaaccaccgcaaacttggagaaaagttgtaagcacagtaaagagaagcttccttctgagtcacttgagtggttgccgttctggccctgcaccctctgtgctttggacggcgtccaacccgcattcatgtcaggagtgagtcgcacgtggctttgtggtcatggcgacttaatccgcctggacggtggctccgtctccctgggcttagacgaccttggcacttctggagataagcccatggctcccaggttgtgttcatgtgacgtttccttgtggtaggttctgggtctgcgtttcgtctaggagtgtcacaggatggacactgcctcctggcaggggctgcccaatgcagttagcctcctgctggtgttctctcttgttgcttggtgaaggtggccctggtcagcttctccactgcccagtgaacgacccctttgtaatgaatgagtggggaggtagtgtgaagcgatgccaatatcccatccctgtcaaactgcctttactttttccttccttccttgctcccacctgtgtgga

SEQ ID NO: 59329 - DNA, 800 bp, Homo sapiens
cgggaccaggaagggatgggccctgccagggttgcccctgcactgtgcattctcgcctgggaggcacaagttctttcatctgcttttccttcagaggtgctgagcccacgccatagcccctgtgggatggtgggggagggggcgacccgaacaacagtgcagtcggtatcgagattggggagaggagcgagtccaaggagaaggtcatgagtttctttttactcgtgttgaataataacaataacaataacaatamcaatatggaaaccaccgcaaacttggagaaaagttgtaagcacagtaaagagaagcttccttctgagtcacttgagtggttgccgttctggccctgcaccctctgtgctttggacggcgtccaacccgcattcatgtcaggagtgagtcgcacgtggctttgtggtcatggcgacttaatccgcctggacggtggctccgtctccctgggcttagacgaccttggcacttctggagataagcccatggctcccaggttgtgttcatgtgacgtttccttgtggtaggttctgggtctgcgtttcgtctaggagtgtcacaggatggacactgcctcctggcaggggctgcccaatgcagttagcctcctgctggtgttctctcttgttgcttggtgaaggtggccctggtcagcttctccactgcccagtgaacgacccctttgtaatgaatgagtggggaggtagtgtgaagcgatgccaatatcccatccctgtcaaactgcctttactttttccttccttccttgctcccacctgtgtgga

SEQ ID NO: 59330 - DNA, 800 bp, Homo sapiens
cgggaccaggaagggatgggccctgccagggttgcccctgcactgtgcattctcgcctgggaggcacaagttctttcatctgcttttccttcagaggtgctgagcccacgccatagcccctgtgggatggtgggggagggggcgacccgaacaacagtgcagtcggtatcgagattggggagaggagcgagtccaaggagaaggtcatgagtttctttttactcgtgttgaataataacaataacaataacaataacaatatggaaaccaccgcaaacttggagaaaagttgtaagcacagtaaagagaagcttccttctgagtcacttgagtggttgccgttctggccctgcaccctctgtgctttggacggcgtccaacccgcattcatgtcaggagtgagtcgcacgtggctttgtggtcatggcgacttaatccgcctggacggtggctccgtctccctgggcttagacgaccttggcacttctggagataagcccatggctcccaggttgtgttcatgtgacgtttccttgtggtaggttctgggtctgcgtttygtctaggagtgtcacaggatggacactgcctcctggcaggggctgcccaatgcagttagcctcctgctggtgttctctcttgttgcttggtgaaggtggccctggtcagcttctccactgcccagtgaacgacccctttgtaatgaatgagtggggaggtagtgtgaagcgatgccaatatcccatccctgtcaaactgcctttactttttccttccttccttgctcccacctgtgtgga

SEQ ID NO: 59331 - DNA, 648 bp, Homo sapiens
catgggctgtaccaagtggcttgcttctaaccgatggaacacagcaaagctgattaggctgcacagcactgtgacttgcatcttgctagcagactctctcccttgctggcttcaatgaagccagctgccgtgttgtgagctgacatattagagaggcccctgtggcaagccattgaaggcagcttttggccaacagccagcaataaacagaggctcccagcctggcagccggcaaagaaacgagcccggtcaacaaccacatgaacttgaaagcagattcttcccggagggaggcttcagataagacatctgcagggaccactcctgatgtcacatgttctttaaaggcctggggaagcagagctgagctgcctcctgayacgtgtggcccaacacagaaagtggggctttaccaacctcacggtgtcatcccaccaggacccagccaattgcatatgtaaaggcaggtatttgcaacaagcctctttgcctctttcaggtattagtttctccactggtcaggaatctttgttgcaaatgacaaaaaccccattgaaacacacacacacacacacacacacacacacacagaatgcactggctcctattactaaaaagtccaggcaaagatgggcttcaagaacagct

SEQ ID NO: 59332 - DNA, 594 bp, Homo sapiens
ccttgcttccccttcaccttctgccatgattgtaagtttcttgaggcctccccagccacgcggaactttgagtcattaaacctctttcctttataaagtacccagtctcaggtatctttttatagcagtrtgaaaatggactaatgcagtgatatataagtatactgtatatattattatatacatatatacaataattttactaaacaaaaccaggtacatatataaagatgtaagatattttattttatttatttatttgagacagggtcttgctctgtggtctaggctatagtgcagtggcatgatctgggcgccctgcagcctagacctctggggcttaagcaattctccacctcagcctctgtctcgaggagctgggaccacaagcttccacgcctggaaaatttttgtatttttggtagtgatagggttttgccacgttgcgcaggctggtctcgaactcctgagttccagcaatccgtccgcctcggcctcccaaagtgctgagatttacaggcatgagttgccatgcccagcctaaagatgtaatttaaatatggaggtggatattcatttatgtactatataaaa

SEQ ID NO: 59333 - DNA, 541 bp, Homo sapiens
ttctccttaatctcaaggaatgagaaaaggatggagatgttgcccagtttaactctaactttaatgaaactgtaatttgtttcccataattagataatctagatactgttatagtctattaataataataaatgctattatcgtaacttaygcagcttcctaagaattttataaagataataaaaaaggattgtctttaaaagtctattaaacctagttagatatgtcaatacaactaaaaggacaaacatgtttcatttaacttaacctgacttcttacatccaatcaaaagctactgagtattcactaatagcaagcaggcaatacatagggaagtaaatactttaatttttgtcccatgaaacagcttgagaacattataggcagtacacatatttttagaactttttactacagaaaatttcaaatatacacaaaagtatagagaaacagttccccatgtaccaatcatccagcttcaactatcagttcatgaccaatattgtttcttatatttactacccatttcccccttcttcc

SEQ ID NO: 59334 - DNA, 892 bp, Homo sapiens
tacacatattggaataggacattatcaatgtcattgtccaaaccattaatttaaaaaaaagttgaacaggacagaaaaatcaaagtacctcaaccatatgtatctcaaccaatgtatctcaaccataaagaygatatgtctttctttaaattgaaaaagtagagacaaccatctgagataataatggtagagaaatatctttcaaatggcagaatgagataaccagagaacagaaagaaacaggacaagtaaaacagaagtgctatttcatttatgcaactagtgttttttgagaaccactggtgccaggtattgtgctagatgctgacgacactgagacaaacgaaaggcaagcccctgctcttgtggagatttatagtcaggagtggaattggggaaatgacattaaacagacaatttatacattggtgcaatggtaagtgatgtacctaatgtggtaagtgataccaggaagagttacacagctgttaagcaagtgtagcgtgagtagatatgaacatactaatcattctagttagtttcaaccttgtaactattaggtctttatcttttactttgtgtgtttgttggtttgttgtaaggatgtttgaagtggaagcaaacaaaaacgatttgagagttgagatgtaactactatttagcaaaataagaatggtcatggcttgcctcaattttcccctcttcctgaataaccagacagtaccaatcaagtatttcctttacgtgggatgaacatgatgaggaaaaagtcttagttcagattctgttgtgaccaacggaaataaacactgttactacaagccagacactagcacataaaatagctttgtcatgcggccataggaatttactttttctatgcagacaaagc

SEQ ID NO: 59335 - DNA, 741 bp, Homo sapiens
aagacttccagacttaaaacttggacagtcctgggcaaaccaagatgatcgaccaccttagcactatcctgttttttattttttttccctctggaaaaaattgcattcctacccaaatctcaggcagagacagacaagtttctatatcacaccccttaccacagtagcatctgcaagtctaatgtacatcataactttagaaataatttatagaaatggtgactcacagtgtctgttatttggcaaatccatgtgttcgtctcaagtcatttaggacttctcaagtcttcctttccacwgaggctacgacccttggagacacccagctttaatccagaggcttggttcccactgtccttacccttggtttaaagactctatctcctatcctggcacatagtattaaaatggtccccacctcaccacactctggccttcctgacccattcgcttatgtgtttctgattcttgttttagttcttcctttatttcagacagcttgggtgttcctcttcttgcttgtgagttcattctgcatttaaacatttcattttattacattttgaagcattttctaagtctttgtagatagagaagtgtcacattatcttcatctaccatctttcccaaacctgaactcctcccacaacaagttttgaccagcctgcctggccctgcagcaacacagcctataaagtctgtaaagtacagcaagttctgaatgatttgagttgatggaac

SEQ ID NO: 59336 - DNA, 507 bp, Homo sapiens
atgaacagcagcaggctgttgcattgtaacttgaagcacagttttgttttttgtttttgttttkttttttttttaccatgtctttaaaggggtttattaacattggtaatggctgcattaattcaggtggcaacttttatttatttttatttatttatttatttatttatttatttatttatttattttttattgatcattcttgggtgtttctcgcagagggggatttggcagggtcataggacaatagtggagggaaggtcagcagataaacaagtgaacaaaggtctctggttttcctaggcagaggaccctgcggccttccgcagtgtttgtgtccctgggtacttgagattagggagtggtgatgactcttaacgagcatgctgacttcaagcatctgtttaacaaagcacatcttgcaccgcctttaatccatgtaaccctgagtggacacagcacatgtttcagagagcacagggttgggggtaaggtcacagatcaaca

SEQ ID NO: 59337 - DNA, 507 bp, Homo sapiens
atgaacagcagcaggctgttgcattgtaacttgaagcacagttttgttttttgtttttgttttgttttttttttaccatgtctttaaaggggtttattaacattggtaatggctgcattaattcaggtggcaacttttatttatttttatttatttatttatttatttatttatttatttatttattttttattgatcattcttgggtgtttctcgcagagggggatttggcagggtcataggacaatagtggagggaaggtcagcagataaacaagtgaacaaaggtctctggttttcctaggcagaggaccctgcggccttccgcagtgtttgtgtccctgggtacttgagattagggagtggtgatgactcttaacgagcatgctgacttcaagcatctgtttaacaaagcacatcttgcascgcctttaatccatgtaaccctgagtggacacagcacatgtttcagagagcacagggttgggggtaaggtcacagatcaaca

SEQ ID NO: 59338 - DNA, 512 bp, Homo sapiens
ggtatggtgccccacgcctgtagtcctagctcctcgagaagctgaggcagaaggatagcttgagcccagaagtttaaggctgcagtgagatatgatcacactcctgcactctagcctggacaacagagtgagacaccatctcaaaaaaaaacaaaagtaatttaaaaagatccttcttcaagaaagaatgtcctagttaaatttttcaacattcccagaaatattaaattggcagagacctaaaaatctattggaatgctgattaacctctattatccactgcaacatttaytaagtacaagcagtccttgatttccagcaattttatttctgctgattcatttaaatcacctagccaattacacctacttactgtggacagacgacacactaatgaatttatattacttggtttgtttcctgatgatgggcatagagtatccccaactcccaaagtcagtctatccctgtagccctttttgagaacatctttggctctagatcagatccat

SEQ ID NO: 59339 - DNA, 599 bp, Homo sapiens
gtgaatgctggtctcgaactcctggcttcaagcaatcctcttgccttggcttcctgaagtgctgggattaccggcatgagcaaccatgcctggcccagtgtttctctattgatagccaataatttggagggagatattttggagggaggatgggtcttctattcctcctgtctccttttargagaacttccatttgtgcataagattatctgattgggactagagataacttttcctggtcactgcctgaatgtggatatagaagtagaaaaaacttttcctctgaactcttgggttccttacttggaatatgcaaattaaactgacaaaagcagattaacagtagaaaaggcctacaaattttattttatgtgcaaggggattcacagcaaagaagtgaaaacccaaacaggtgattagacctgggggcttatataccattttaacaaagggcaataaactgtggacaagtgactagacaaagaaaaagggcatttgggttatagagaggtaaactgtgggaaagtgactaggaaatgtgtggtagataagggttgtttagtaaggtttgttatgcagattcaagttgtccctggtga

SEQ ID NO: 59340 - DNA, 780 bp, Homo sapiens
tccccgtatggggggtgagaaatgtctccagctttcttgggctggcccaaggttcgaggtctttcaggatgtctgaaacttgaggttacgctttatgcaacctattatcaaatagagggtctggtcgggtgtggtggctcatgcctgtaatcccagcactctgggaggccgaggcgggcagatcacctgaggtcaggagttctagaccagcctggccaacatggcgtaaccctgtctctagtaaaaataccaaaaaaaaaaaawagaaaaaaaaatagcggggtgtagtggtgcgcacctgtagtcccagctactcgggaggctgaggcaggagaatcacttgaacctgggaggcggaggttgcagtgagccaagatcatgccactgcactccagcctggatgacagagcgagactgtctcaaaaaaaaaaaacaaaaaaaacaaaaaaaaaaaaaacagagggttctactctgggtgtgggcactgctgagtgccaggaaacactgctaagtgccaggaaagaaatgtacaagcctgggctgaccactgggcttggggtctgtgttttcattaatgttcacgcctcagagcattcttcacccttcttcttttggctgcccctgccctcctcccatcctacccagggtttaccaataagtacaagttctctaaagggcaagaaccttcaaggacttgcttctggattcctgtgcctgctgcgtggtgaggctcagtgaatgtctgctaaatgagtgattgattgaataaattaatgttgg

SEQ ID NO: 59341 - DNA, 644 bp, Homo sapiens
aagccaggccaatcagaatgcaaaccttgaacttttctgctgtgcactagggttaccaagctgttagaacatgtcttagttgggtgcagtggctcacacctgtaatcccaatactttaggaggccatggcagaaggatcacttgaggtcaggagttcaagatcagcctgggcactatastaagacctcaaccctacagaaaagaaaaaaaaggcgagagagaacatgtcttggacatttggtggcaatagtctctgccacatggggagagagcctgtcctagggacagacagatatagtgtattctactgtaattttttgagcccttggagccagttattcctgaggtaaatcccaaaattaccccccggaattattagttatttaagccccaaattcctttctaagcaaccctgcgctctccaagggttttctgtctcagtgaatgtcactgctctccatacaactggcaaactagaccccgaggagttatcctgaacacttgcttctttctcacccccatctccagtccatcaacaagtctcttttttttgagatggagtctcactctgtcacccaggctggagtgcaatggcaaaatcttggctcactgcaacctctgcctcctgggctcaagtgattctc

SEQ ID NO: 59342 - DNA, 644 bp, Homo sapiens
aagccaggccaatcagaatgcaaaccttgaacttttctgctgtgcactagggttaccaagctgttagaacatgtcttagttgggtgcagtggctcacacctgtaatcccaatactttaggaggccatggcagaaggatcacttgaggtcaggagttcaagatcagcctgggcactatagtaagacctcaaccctacagaaaaraaaaaaaaggcgagagagaacatgtcttggacatttggtggcaatagtctctgccacatggggagagagcctgtcctagggacagacagatatagtgtattctactgtaattttttgagcccttggagccagttattcctgaggtaaatcccaaaattaccccccggaattattagttatttaagccccaaattcctttctaagcaaccctgcgctctccaagggttttctgtctcagtgaatgtcactgctctccatacaactggcaaactagaccccgaggagttatcctgaacacttgcttctttctcacccccatctccagtccatcaacaagtctcttttttttgagatggagtctcactctgtcacccaggctggagtgcaatggcaaaatcttggctcactgcaacctctgcctcctgggctcaagtgattctc

SEQ ID NO: 59343 - DNA, 854 bp, Homo sapiens
gggcggatcacctgaggtcaggattttgagaccagcctggccaacatggtgaaaccccgtctctactaaaaatacaaaaaaaaaaaaaaaaaaaaaaatagccaggcctggtagcgggcacctgtaatcccagctactcaggaggctgaggcaggagaatcgcttgaacccaggaggtggcggttgcagtgagccgagatagagacactgcactctagcctgggcgacagaatgagactctgtctccaaaaaaaaaaaaaaaaaaaaaaagagaatcctacaaatcattaagaaatagacaaatcataagcgagagaaagcaaatgatacaaataggcatttcacagaataagaacaagtgaccraaaaatacaaaaaattctaaatcatgaataatcaaagaaatgaaaatttaaaaaattaggagatactattggtttttccaattggcaacaatgaaaataaataagatcgagcaatggcgataagggaaactactctgttcgtacacaatttatgggtgtgtaatttgacagatggtttcaaatgctcggccttggaaactaaaataaggaaatgctcctccaaggacatacagtagcatggtttaaaatagctgaagattggaaataaccttaatatctgttaatattgaatggttaagtaaatcaaagtacatttgtcttattggataccacatagccataaagaatgaaatttatctatattgaagctgtcctcacagggttaacaagaattctggacagaaatatagttataattaagcattaatgaggctgcaagttggcccacatccttgtaaaatcatgtagcactagatactgatgatttgg

SEQ ID NO: 59344 - DNA, 854 bp, Homo sapiens
gggcggatcacctgaggtcaggattttgagaccagcctggccaacatggtgaaaccccgtctctactaaaaatacaaaaaaaaaaaaaaaaaaaaaaatagccaggcctggtagcgggcacctgtaatcccagctactcaggaggctgaggcaggagaatcgcttgaacccaggaggtggcggttgcagtgagccgagatagagacactgcactctagcctgggcgacagaatgagactctgtctccaaaaaaaaaaaaaaaaaaaaaaagagaatcctacaaatcattaagaaatagacaaatcataagcgagagaaagcaaatgatacaaataggcatttcacagaataagaacaagtgaccaaaaaatacaaaaaattctaaatcatgaataatcaaagaaatgaaaatttaaaaaattaggagatactattggtttttccaattggcaacaatgaaaataaataagatcgagcaatggcgataagggaaactactctgttcgtacacaatttatgggtgtgtaatttgacagatggtttcaaatgctcggccttggaaactaaaataaggaaatgctcctccaaggacatacagtagcatggtttaaaatagctgaagattggaaataaccttaatatctgttaatattgaatggttaagtaaatcaaagtacatttgtcttattggataccacatagccataaagaatgaaatttatctatattgaagctgtcctcacagggttaacaagaattctggacagaaatatagttataattaagcattaatgaggctgcaagttggcccacwtccttgtaaaatcatgtagcactagatactgatgatttgg

SEQ ID NO: 59345 - DNA, 615 bp, Homo sapiens
cttacatattttaaagrtgagaatgtttttataactcaattcccatgattagaaaacatctacttaaataaatcacatagtaaatgttagtgcctttcttcattttgagttagcgaaaatcccagaaattttcctgtgtgtaccaaattaagacatgtttctatgtgtgccttcaaactcatacactattacaattttatttttgcttatctggtttttgttttgttttgtttcttttctttttgcgaaaagtctaagtaactggagttacctaacttttattttcccttttcatttcagaaagtagcaaatatctggcatatgattgttattgttcatgttgtagaaagagtgtattgtccttgatcatataatcctgtattttttttccaaaagggctctaattttaaatgttgaaagcaataagcctctttatttacttatttatttacaaagtaaacccaaggaatttgtcttatttttaagaataaaaaataatttcatttgtaaaattttccccaaagtgtttcttacatagaattctatcatgttccagtgtaaaccacacttgaatcaatttccataagaaagcattatatgagtttacaagtatca

SEQ ID NO: 59346 - DNA, 615 bp, Homo sapiens
cttacatattttaaaggtgagaatgtttttataactcaattcccatgattagaaaacatctacttaaataaatcacatagtaaatgttagtgcctttcttcattttgagttagcgaaaatcccagaaattttcctgtgtgtaccaaattaagacatgtttctatgtgtgccttcaaactcatacactattacaattttatttttgcttatctggtttttgttttgttttgtttcttttctttttgcgaaaagtctaagtaactggagttacctaacttttattttcccttttcatttcagaaagtagcaaatatctggcatatgattgttattgttcatgttgtagaaagagtgtattgtccttgatcatataatcctgtattttttttccaaaagggctstaattttaaatgttgaaagcaataagcctctttatttacttatttatttacaaagtaaacccaaggaatttgtcttatttttaagaataaaaaataatttcatttgtaaaattttccccaaagtgtttcttacatagaattctatcatgttccagtgtaaaccacacttgaatcaatttccataagaaagcattatatgagtttacaagtatca

SEQ ID NO: 59347 - DNA, 824 bp, Homo sapiens
agaagtaaagtatctcataacaagaagcttatctgccattctgcaagaataatttcatgaagccttgaaaactgtatacgctaatgagtggataatgcaataaccttgaggccttctgcactcagattgccctatcataaaaatgtgagcaaacttgagtaacataaaaacaaatattcacaaatttattttaatggagcccacacaaaaatgtgtaagrcagaaacaaggttaaagtatataaaatgataatgctattaaatttaataatcaatgagaaaagtggtagagaatcatatttgctctttgacatgtcttgattactattgtggaagagtccaagactaggaatccactgtaaacccaggatacagaggtggctatggaaggttgcctgctccaactgattaatgtgcctctggtatatgaggcaaatgctgctccttgaattggcacacaactcctctacctaacttcacaggaaggttcaatcagtctcattgttctactctagctgtataggatataatctcaaacgataagaaattgcagctatccttgtactaagcaaatcaagacctgtctttttaatctgcaggtgaaatttgatacgtcctttgaaaactaagtatgttattggtaattgattacggatttgaagcttttattcctagatttcttaaagggccagatatgtatctagctattggaattgacacttgtttacactgaatttctgagtcataagcaacaaaggataaatagaggaaagagtaatagtttgaaaaatgagaaaataacaaagaaagtttatggtagaattt

SEQ ID NO: 59348 - DNA, 735 bp, Homo sapiens
actttgcttttaaagagtgaggttttttttaatcatttactcatttatcatctgtttttatatatatttttgtttctgtttttgacacagtcactctgtggcccagactggagtgcagtggcatgttcatggctcactgcaacctctacctcctgggttcaagtgattctcctgcctcagcctcccaagtagctgggattgcaggggtgcacaaccaagcctggctagtttttggatttttagtacaaatgaggtttcatcgtgttggccaggctggtctcaaactyctgacctcaagtgatccacccacttcagcctcccaaagtgctgggattacaagcatgagccactgtgcccagccatatttttacaatttttaatacagaaggtatgaatacactgaagttattttggctacctagtgtctatcttttcttcttctatcaatactccagcttttgtttgcatatccacttacccttctcaatattttcttcttatcactatcccatcagtacttcccatccttcagtccagagttcagggcacaagacagtataaaccaaattgatgcaaagaggcttgtgttgggagagtctggaagttttaatcagtttctgaaagcgctaccaggaaagggcctcttcttgttggttatggacaaggagctaagtaccctggaagctgcttgcagttgcttaacacccttggagggaacaatccttgagactgatg

SEQ ID NO: 59349 - DNA, 749 bp, Homo sapiens
ttcatgggattagagttcttcctagatttggaaagacattttcaatctttactactgcttttccctgcctggttgaaaaaaaatccatggccaattaggtgaatattaattgttctgaattatttgaaccatatatttaatgtttcctttccaaccataggaagctgacatactttgtgaaatcataattgtaaatttccatgattgcatttgtcttccccacaattagtactaataagtaaaattttatgatacattcaggtgtaataaaaataatatttattagaacctactatgcaccaaatactatagactgagttttgcatatctcatttaccttcacatcaattttatgaggaaaattatacctctattttataggtgataaaatctagtcttacagcatgattgtaaarcctcttgcttttcctacaatgttacttgctttaaaatgtaggttaataaattcatatatatatatatataaatattttgtagtaaggcactttgcatttgatgaaatatttatttattgattgatttttatccataaatctttagtgattgcagtctttaaagtatctatcataaactaaatattccaatatgccaataagaaatgacatgattaagaaaaggtcgcttaatttatagtgcattacggttatctataccttcatctgtctattctaggtcctaaatggtgagtcttaaattcttcccttggaaagcatgagcatcttaaaagg

SEQ ID NO: 59350 - DNA, 749 bp, Homo sapiens
ttcatgggattagagttcttcctagatttggaaagacattttcaatctttactactgcttttccctgcctggttgaaaaaaaatccatggccaattaggtgaatattaattgttctgaattatttgaaccatatatttaatgtttcctttccaaccataggaagctgacatactttgtgaaatcataattgtaaatttccatgattgcatttgtcttccccacaattagtactaataagtaaaattttatgatacattcaggtgtaataaaaataatatttattagaacctactatgcaccaaatactatagactgagttttgcatatctcatttaccttcacatcaattttatgaggaaaattatacctctattttataggtgataaaatctagtcttacagcatgattgtaaagcctcttgcttttcctacaatgttacttgctttaaaakgtaggttaataaattcatatatatatatatataaatattttgtagtaaggcactttgcatttgatgaaatatttatttattgattgatttttatccataaatctttagtgattgcagtctttaaagtatctatcataaactaaatattccaatatgccaataagaaatgacatgattaagaaaaggtcgcttaatttatagtgcattacggttatctataccttcatctgtctattctaggtcctaaatggtgagtcttaaattcttcccttggaaagcatgagcatcttaaaagg

SEQ ID NO: 59351 - DNA, 749 bp, Homo sapiens
ttcatgggattagagttcttcctagatttggaaagacattttcaatctttactactgcttttccctgcctggttgaaaaaaaatccatggccaattaggtgaatattaattgttctgaattatttgaaccatatatttaatgtttcctttccaaccataggaagctgacatactttgtgaaatcataattgtaaatttccatgattgcatttgtcttccccacaattagtactaataagtaaaattttatgatacattcaggtgtaataaaaataatatttattagaacctactatgcaccaaatactatagactgagttttgcatatctcatttaccttcacatcaattttatgaggaaaattatacctctattttataggtgataaaatctagtcttacagcatgattgtaaagcctcttgcttttcctacaatgttacttgctttaaaatgtaggttaataaattcatatatatatatatataaatattttgtagtaaggcactttgcatttgatgaaatatttatttattgattgatttttatccataaatctttagtgattgcagtctttaaagtatctatcataaactaaatattccaatatgccaataagaaatgrcatgattaagaaaaggtcgcttaatttatagtgcattacggttatctataccttcatctgtctattctaggtcctaaatggtgagtcttaaattcttcccttggaaagcatgagcatcttaaaagg

SEQ ID NO: 59352 - DNA, 898 bp, Homo sapiens
atgctgtaaactcaaattcccggctgtgattgatttctctgcctcagcctcctgagtagctgggactacaggtgcatgccacaacacttggctaaatttattttttatagagataaggtctcgctacattgcccaggcactggtcttaaacccccagcctcaagtgatcttcccactttggtctgctaaagtgctaagattacagctgtgagccccagagcctggctcctccagtctaatttccgactgccaggaagcagtctcatattccatttccagtgagaagacagttactgctctgaccaaaacacggcttcttttgtttgtttcacatgcctaaaaaaaatggccatacgtaaattccacatggttcattaattattctccaattcatgtttctcacatgttttgctacattaagtttcctaaggaagttccagtcatcatttttctgctccagatcttcccgagtattcactgccttctacaatatgactgcagttttagtctaatttctattgttttcccacagacaggtatcatatatagtattttatcatcaaagtagatcattttcaccaccacctcatgtttatctcaggctttgctcttgttgtgactttgcttatattttccctagatctctagawgtgctaattctactcattaattcttcaaggagctcttttcatgaagcatctccttatctgtatctaactgattatctcttcttttgaaatttattttatttacacttactacttctacagaaccaaagtttctcataaataatcaagaaaagtatactccatgaagaaaaatacataaaggcttatttttaagataaaaggtattttggttttaatattatctacagacccgatactccataagatgc

SEQ ID NO: 59353 - DNA, 780 bp, Homo sapiens
atgcattcctttctaaaaagctgcaattaattacaaactagttttgatgccgtttattctttccttaaatatggagtgaattcgcctcataaactaatgaaccaaagtggagccaaatagagaccagctggctggataactcagtaattttatccacatgattgactttatgattctttcactgaagtaactagtttttatttttgcaatcagcaccaatgacaatttgggaggggtggggaattattaaaatctggagaaagaagaggcactgattatttgatgtggaacagcacattcctccacacacttctccagtatcataggtgctggattccaggtctctctggcttccaaagtaacacacttagttgccacagagacataataagcaaccaatgcccaaataatcattacagatactccattaacagcatctaactgtgtggcttttaaccatacaaattgttttttgacagcttgtaaccttttcaaatactttcctttggacattacactacactcagatctaattttaacttttgctttgtctataatttatgagtttctttggagctgcataatgtatttgaggagaaaggatacattcaaataaaagctaaaaacaaaatcaattactgttttaatccatgaaacctttkctcactgggagatcactacaataggatgaaacaaaaagaagggagggaaggacctaaatgatctagaattcccttagaagctgttttaaaacaagcaggtttaacctatttaaatagg

SEQ ID NO: 59354 - DNA, 872 bp, Homo sapiens
gatccaaattggaatgcgctaaaaatgtaaaatacacacaggggtttcaagacttaatctaaaaaacagagaatgtaaaatagcccactaataattttaatggtgattacaagttgaaataaataagttaaatgacatatcttattaaatctaatttatctgttgtttgggttttttttttttacttttaattgaggctactagacaatttaaaattacatgtgtggcttgcattgtatttctgttgaacaacaaatgctgctctaatgagtttacatggcaataagaataaattcaaagttttcttacaatgtcaacgaggtcttgtgtggcccctgcccacctctttaatcacatctcctgtcactctcctttcgctcttcatagcagtccctcaaagacactaaactaatttttgccttagaatctttctttgcaccaactctgccttctctctgggaacagctgccctacatcctctttctcacccttcagtacagcttaaacstcagcctcctcagagaggccttccctaatccacccccagtcactttcttgaattcaacctaaggttcttctctccataactattatcagtatctggaattttcttctgtattaatttacatttctcttgaccgtctccattccctccatattccccaccccaacacacaaagagcgggaaccttgtcagtgttgttcactgccccatctctaacacttcaaacaatgcctagtgctcaataaatatttcagtgactggccctttgttttacagatgtgaaaaactaagacacagagcagttaaaagatctaatgacagaactcagaatggaacacaggtctcctacttctagactcatgttttt

SEQ ID NO: 59355 - DNA, 825 bp, Homo sapiens
aaaagtaggtcgaacctttgttattcctattttacagatgaggaaaatgagatacagataaataacttgcccactgtcacacagctattgtgtggcaaagccaggttcaaacccaggccatctgtgtccagagctcttaagaagaatgtcagagcaatatggcagaatggccaaaggaatagctgctactaggctacatggagtctttaacaaagtcagaaaagaagccacctctgggtgaggtcagcaaaagtgttggtgattggatggcctgctatctttgtatgtgtttcaaaaggtgacccttcctctgggcagacacagcctccatctttggcttggggaacaacaaggctagacttcagccctcatttgtccccatcttatagactgttgaatatctgattttcaattaaattrctgaactagattaaaccttcatgtccccataccatcagtacagtcagttctataccacaaagggttgtttcaaagttgaatttttgtgaatctgagcatgagtgtgtgtgtgtgcatattgtgcacatgcacaaaagcaaaaaagaagagttagagttccacattaggactgatgccagaacaagatcaaagaacagccacaaagtcttggagttgagaacatgaatccctgatgaaatctttcaggaattaacaaaaatcttcattaaagatgaaaggtcatccaaggtcctcagaaattctgctggggattcaaattcacgtagatcttaggaggcagggagatctcagctgtaatctcagtcacattactaataattttaattggggtgggggaagggatcc

SEQ ID NO: 59356 - DNA, 1906 bp, Homo sapiens
atgataaaatgctcttgtataataggtcttctttaccattgtatcaaaaaatcctactgttcctccacaaagaattcattctggttgagataatgtcaatatcttaggcacacatagaagcgctgtttattctattaaattggaaaggctattggtcatgcaaacctagtcaaatctcaacttatatccaattttgccaacccactggggttacctgaatcacagtcagtcagaacaaatacaggtttttagacagcaaaactactccccaaccaatactatataattgagtctttttccactgaggttgactaggttatgatattaactgagaagtttctatctctctctctatcatatatctacccatctgtctatctaactatctctatctgtcccccccmcccccccttcctccttcctaccaccaattgcatcactctgaccccctcttctgcttctcttctccacccatataagacccttttgattacactgggcctagggcctaactggataatcttgctacgttaaggtcagctgattaataaccttaattccatttgcacttattttttttcaccatataaggtaatatattcacaggttgtggggactacagacatggacatctttgggggccataattctgcctgccacacctcctgaggcctagtcgtgtgttctgatatattatctatttgttcttcaaaagaggacataaacatattgcttacctcacaccccctaaaaggacgacacgctgcttcacctcagacttgattccctatgtaaggggacacaattacttcatttggaaactgattttttatttccgagtacttcagaatcataaagcagctttgaagaagaaagaaaatctgataatttagtagcagagttaggtatattttcataaaaataacatagacctgaagaacatttccaaatatatgagactcaaaagagcaacttaatttgttgcagccttccctggttcctaagcaaatgcatccatgttgatgttgtgagtacaagggaagttatggttatgttttctgggtcctatcatatgactatggtgtatatacacaccgcaagcatgtgcagacccaggttggaagacgcatttagcacctaccttcttttaagggcataggcgaactttatgaatattaatttcagtcaggatcactatttgcagaagtttttctcttaccaagtagaggctgtcactcagtaagtgcattattactcaaatgagcaggccaagtaaagtgcatttgagtttctatgagaatacatcaccaaacaaagcaggggctgtacaagcagaaggtgtgtgcagcaaaggcctattaaggggatacaattttcccatgaactctttgcccattatataataatcacagctgtatgctgttggaaaaaagattcagcttctccatataataaaattatacctaggcatgcagaaaatctcctaaaatcacatagaggaaaaaaatataactttcattaaacattaatgccaacactcaagcattaaccacaacaatttgttacactaaaaataaggaagtcaaaatgctgaaagtggaaaatatagtcctgagtctttggccacattatccagccgcttcatttttgttgccattaaaaagttaggattcccaaagctttatcaatttctaaattttacacaaacctcaaaccaccttaatattctaaatttatttctgcagtcttttacattttagaaaactttttctaatcgcaaagttcaagaaccactttcctgactcactcacctgctatcacctatatagttagtatgggatgactcccctttttcatacacctacttgaaggcacacacacacacacacacacacacacacacaca

SEQ ID NO: 59357 - DNA, 863 bp, Homo sapiens
taacttcatcagtgaggcatccttgtagactctgagaaagctgatatagagacgctttttccaaattataaaagagacaaacactttaagtaagtcacagtagcatctactgctgcatcatcaacttctaaattcaggcttaatcatgtgactttaatataaacatgaacagtttcttaattacgattttcacaaatctgagttaagtactgaatctttttaacactccaaagaggtagcatatgctaattttttaaagatgcaaccttctattttcttcgtaacaattacttatagctgaaacatcttaatggtatacattttttaaaaataatagtctcgtatttgattaatttaacatctacttatttaggctatttttcaaaatgttactgctactaaaccacagccctggctaatgatcgtattccacttcaaaaacggagtaagaagaaaagccatattttcatgctttgttctatttttcacacaaataactatcatttatggacaaaaatatgcaacacgtaaartgatgtcataaaaatttgaaataaatccaccaaaattggaaagcaaagatcaccgaaattatgaaacattgtgggtatatttgataaaaagaagatactatttttgattaaaaaaagagaatatcttaaaaagaagattttggttgctgtgggtatgtattttcaattgtgaggcctctaatccacctctcccccaaaataagaaaacagactgccttacaactgcttgtcatagcagtttaattttgaaaaatgcctcatctgtccctgcttgcaatatattgtcttacgactacgtttaccttttttattttttgggggggggttatt

SEQ ID NO: 59358 - DNA, 1364 bp, Homo sapiens
aactatgtgcataagatgtcaacattattcaaggcagtgtggtaatgagctccttaaagttttttttttgagacggagtgtcgctctgtcgcccaggctggagtgcagtggcgcgatcttggcttactgcaarctctgcctcctggattcacgccattctcctgcttcagcctcctgagtagctgggactacaggcgcccaccaccacgccctgctaattttttgtattttacggggtttcatcgtgttaggcaggatggtctcgatctcctgacctcgtgatctgcccaccttggcctcccaaagtgctgggattacaggcgtgagccaccgcacctggcccaccatgcccagcctaaagttttcatatgtatgtatacatttcctgtctagacagttaagtgagttatctctgccagttcatcagcaagaaacaatatagaaaataatttccctttcctactatttgcattgaaaactaaaagtgtaaaaagaaaaaagaaatactagtcactcaagcttttcacacttctatagttttttcataactgaaacccaatccataactttatagttcactatttggtttagacctatttcaatctattagaattcttctatggtgtactaagatagtcaaagatattcactactcttaatagcaacatttatgaaagactaaagagataaaagtgttatgagtggtcatatgctacaaagtagtcaaagcatatcatttatcaaaccatttctttgtctccacagtaggtgtctacaaaacaaactaggaacaatcctcttgttggctagttaactaattaatattaattaatattaacaaggaaagtttcagtaaaatatatgccatcttatatgatttagtcaggtgaacagatctgaaggatatacagagattttctgcatcaggaaggaggatatgttcaacctacaaacatttggcctcagatcttttatgggagaaaaacaaagccaaaaagcccccaaaatgatcatgaatattctcaaataaaattccaaaatggcagagccaattttcacaagttcctttgcttgctaaaaaagcacaaagtacaagcagacaagcaaatgtttcagaatttgtgttttccataaatacagaaatcttgtaattatctcaagaaccatacattatttatttagttccatgccttaatgaaggaagactcaatgtttatcatattaaaatgggaagttgaggggtaaggtggggaggagaaaaagcatggttcttttcctaatgaatctggccttatgtttcttcaattttttatcagcaattttatgctctgcaggtagtaaacataaatggtgacagccaaaca

SEQ ID NO: 59359 - DNA, 1364 bp, Homo sapiens
aactatgtgcataagatgtcaacattattcaaggcagtgtggtaatgagctccttaaagttttttttttgagacggagtgtcgctctgtcgcccaggctggagtgcagtggcgcgatcttggcttactgcaaactctgcctcctggattcacgccattctcctgcttcagcctcctgagtagctgggactacaggcgcccaccaccacrccctgctaattttttgtattttacggggtttcatcgtgttaggcaggatggtctcgatctcctgacctcgtgatctgcccaccttggcctcccaaagtgctgggattacaggcgtgagccaccgcacctggcccaccatgcccagcctaaagttttcatatgtatgtatacatttcctgtctagacagttaagtgagttatctctgccagttcatcagcaagaaacaatatagaaaataatttccctttcctactatttgcattgaaaactaaaagtgtaaaaagaaaaaagaaatactagtcactcaagcttttcacacttctatagttttttcataactgaaacccaatccataactttatagttcactatttggtttagacctatttcaatctattagaattcttctatggtgtactaagatagtcaaagatattcactactcttaatagcaacatttatgaaagactaaagagataaaagtgttatgagtggtcatatgctacaaagtagtcaaagcatatcatttatcaaaccatttctttgtctccacagtaggtgtctacaaaacaaactaggaacaatcctcttgttggctagttaactaattaatattaattaatattaacaaggaaagtttcagtaaaatatatgccatcttatatgatttagtcaggtgaacagatctgaaggatatacagagattttctgcatcaggaaggaggatatgttcaacctacaaacatttggcctcagatcttttatgggagaaaaacaaagccaaaaagcccccaaaatgatcatgaatattctcaaataaaattccaaaatggcagagccaattttcacaagttcctttgcttgctaaaaaagcacaaagtacaagcagacaagcaaatgtttcagaatttgtgttttccataaatacagaaatcttgtaattatctcaagaaccatacattatttatttagttccatgccttaatgaaggaagactcaatgtttatcatattaaaatgggaagttgaggggtaaggtggggaggagaaaaagcatggttcttttcctaatgaatctggccttatgtttcttcaattttttatcagcaattttatgctctgcaggtagtaaacataaatggtgacagccaaaca

SEQ ID NO: 59360 - DNA, 1364 bp, Homo sapiens
aactatgtgcataagatgtcaacattattcaaggcagtgtggtaatgagctccttaaagttttttttttgagacggagtgtcgctctgtcgcccaggctggagtgcagtggcgcgatcttggcttactgcaaactctgcctcctggattcacgccattctcctgcttcagcctcctgagtagctgggactacaggcgcccaccaccacgccctgctaattttttgtattttacggggtttcatcgtgttaggcaggatggtctcgatctcctgacctcgtgatctgcccaccttggcctcccaaagtgctgggattacaggcgtgagccaccgcrcctggcccaccatgcccagcctaaagttttcatatgtatgtatacatttcctgtctagacagttaagtgagttatctctgccagttcatcagcaagaaacaatatagaaaataatttccctttcctactatttgcattgaaaactaaaagtgtaaaaagaaaaaagaaatactagtcactcaagcttttcacacttctatagttttttcataactgaaacccaatccataactttatagttcactatttggtttagacctatttcaatctattagaattcttctatggtgtactaagatagtcaaagatattcactactcttaatagcaacatttatgaaagactaaagagataaaagtgttatgagtggtcatatgctacaaagtagtcaaagcatatcatttatcaaaccatttctttgtctccacagtaggtgtctacaaaacaaactaggaacaatcctcttgttggctagttaactaattaatattaattaatattaacaaggaaagtttcagtaaaatatatgccatcttatatgatttagtcaggtgaacagatctgaaggatatacagagattttctgcatcaggaaggaggatatgttcaacctacaaacatttggcctcagatcttttatgggagaaaaacaaagccaaaaagcccccaaaatgatcatgaatattctcaaataaaattccaaaatggcagagccaattttcacaagttcctttgcttgctaaaaaagcacaaagtacaagcagacaagcaaatgtttcagaatttgtgttttccataaatacagaaatcttgtaattatctcaagaaccatacattatttatttagttccatgccttaatgaaggaagactcaatgtttatcatattaaaatgggaagttgaggggtaaggtggggaggagaaaaagcatggttcttttcctaatgaatctggccttatgtttcttcaattttttatcagcaattttatgctctgcaggtagtaaacataaatggtgacagccaaaca

SEQ ID NO: 59361 - DNA, 567 bp, Homo sapiens
gatacgtaaaatacatctgcaagtaattcttttttttttttttttcttgagatggagtttcgctcttgttgcccaggctggagtgcagtggtgcaatctcggctcactgcaacctctgccttccggtttcaagcaattctcctgcctcagcctcccaagtagctggcattacaggtgcctgccaccatgcccggctaatttttgtatttttagtagagactgggtttcaccatgttggccagggtggtctcgaactcctgaccttgtgatccgcccaccttggcctcccaaagtgctggaattaaaggtgtgagccaccatgcccggcccatttgcaagtagttctatgaaaaatggttaaaatagaaaatgtgcttaataatattarctacttttcagtaagcactttcaatataccagactccttattcatcttatatctaattcttccaacagtgttttaaaattaatgaaagaaacagaggcccagagaaggtcaggaacatgccataaagcctgaagccagtaaacaagggagctgaggtttgaaatagattctatgttaga

SEQ ID NO: 59362 - DNA, 504 bp, Homo sapiens
tagccaggatggtctcaatctactgacctcgtgatccgcccgcgttggcctcccaaagtcctgggattacaggcgtgagccaccgcacccggcagagatgtcagacttttcttctgccagcccgtccacaaactttaggagggcatctcttggcctaccttccttcagcttcaagaaagggaagcatttgagtgtttccttctttcctccatgaaagaggaggagataatccctaaaacactctactctcccagtcccccggggcttcttatctttctcactggtaaagatcatcagttcagtttggcttctttcacctgggaataaaccagaagtctcttaccaagaacagggcctctgttaaaactgagcactacaaacttcagtaattttattctcaatcaggtgttatctcttataaccccacactrtttgtcacctggagctggaaaaggtctcccataatacttcacactgtcctgttagtcatccaaaatgatgtca

SEQ ID NO: 59363 - DNA, 1393 bp, Homo sapiens
gattgcatccgtggtgatgtgaatgaaccagattgcttaagggactttttgtttttttttttttttttagacagactcgctctgtcacccaggctggagtgtggtgatgcaatcttgcctcactgcaacctccgcctcctggcttcaagtgattctcctgcctcagcctctcaagtagttgggattacaggcatgtgccaccacgcctggctgatttttgtatttttagtagagacagggttttgccatattggccagcctggtcttgaactcctgacctcaagtcatccacmtgcctcggcctcccaaagtgctgggataacaggcatgagccaccatgtccagccttagattgctttaggaaccaattcttagaaggcagagttgatagaagattatggtgaagggcacagcgactatacaactcaacccatatccatgtacctagaagaagtgagaccacccaatgctaatttagagacgggattgtcaacaacttcctcatagaattgacgtgaattataatcatgtatttaaaccacagctaggtgcctggcacttggcacgtacttcctaaatattacttctgctaccatggacttattttggaactctggattatcatcccttctggccgaaaataacgaattattatttcttttttgcttcaggagctgtaggggaggaagggatgagggaaatgggttgtgctcattagtgggcttctaaatgcttcttgcccagtggtgtgaatgtcccaggactccagctgacagatcactagagtggtttccagccattcttagcagttgaaaaccttcttcaaagtcttacatggaacctcagaacagaacaaaatcagaactgttctgggcagcctttaacacctcaaagtggcctctaagggtttcatcaaccaatttgaaaaacagtccctagaaggaacctggttcttctgccttcaaagcctctgacaatgagtaatggattcagtatcagggggaaaaagctctgacaaaagaaagggaagagttggctcttctccttataaatctatggagtgtttatctttaatatggtctaacgacaataacgactttcttttattgagtgtttaccatgagccacaaactgtactagaactatagatattttatatcatttaatcttcacaataatcttgtgagacattattattctcattcttgaaaggcaaacaccgaggcttcaagagggtccataaattagccagtagtacacattgaatgagagtcaaactactatacttcgctgatgctataattaactctattgatttatatgaggagctgagaaataagaatctcagaaattaaactcaagatcactttttatgcagccacttgaatctttc

SEQ ID NO: 59364 - DNA, 298 bp, Homo sapiens
ccacttcttggttrcactgcccagcctctctgagcagccactgggaagccagggctcagggagcagcacagcccctgaatctagaagtgctgaaagagccagcacctctgtaagtctggtctgctggggtctaggtactggctctgcaggagatcccacaatggtgagaatgatgaggtccagccctcaaccttgaagaggctggctggggccatcaccaaggttaggatatgcggtgacagtcagggcagtagcagacagagctctccattcaagaagcaaccgaggccaagggggc

SEQ ID NO: 59365 - DNA, 298 bp, Homo sapiens
ccacttcttggttacactgcccagcctctctgagcagccactgggaagccagggctcagggagcagcacagcccctgaatctagaagtgctgaaagagccagcacctctgtaagtctggtctgctggggtctaggtactggctctgcaggagatcccacaatggtgagaatgatgaggtccagccctcaaccttgaagaggctggctggggccatcaccaaggttaggatatgyggtgacagtcagggcagtagcagacagagctctccattcaagaagcaaccgaggccaagggggc

SEQ ID NO: 59366 - DNA, 717 bp, Homo sapiens
acacctgtaatcccagcactttgggaggccaaggcggttggatcacctgaggtaggagttcaagaccagcctggccaacatggcaaaacctcatctctactaaaaatacaaaaattagctgcgcatggtggcgggtgcctgtaatcacagctacttgggaggctgaggcaggagaattggttgaactcgggaggtggaggttgcagtgagccgagattgcaccactgcactccagcctgggcaacagagcaagactccacctcaaataaataaataaataaataaataaataagaatggaaaaaattatagtatactgattttttctttatgtggtagaagctatgatttagcattcgctgagctcggaagtttttgtaattaagattagaaattttaacttgaaattagagtttactggtagaacaaattcaggtgaataataggaatagtgatcttaccaaactcagaatcttaactaagaatatcagtgattgtttttatagcttgtgagcrtttatttaaagaaaggaataatgaactatgatgagtttttaataaaactgcatattttaaaccagtcttattataacttcatagtattcataaaataaccagatgtataccttacattaaaacaggttctaaacaaagcttaagcagaaaatcttttgcttactactaagtgtttaaataagtaattttgacacttacacaa

SEQ ID NO: 59367 - DNA, 816 bp, Homo sapiens
gagatactccaaaagaagggaaggatgaatattggcaaggtactaaaaaagaggaatgcaaatgagtgtgtgtgtttgtgtgtgtgtgtgtgtgtgtgtgtgtatgtgtgtgtgtgtgttgatttgctktggcatttgatggtggtgtgaccctgtaattcagggcttctgagaggagccaagctcagagatgaggataaataaacaaggaatggcaaaaggcatgggcccagtaggcatggcatccccattagcaaccaaggtcttctttgagtgcatcaggtttaacccatccaaaaacttcatttgttgattcactgatttatctacttactcactcacatagtcatcattgctagccactgtaatatatgctgcatctgtggatgaagcaaagtggcattgccccaccttactctggaagtgacaagagaccacaagaactggaggtcccaatttgcatgatgatcacattcctcccaaagtccaattgtagtgctagatgctaaaacaataataatcagaggtataccttgttaactatatcataattacttataataaggagaaggattagaacatcgtctgtcatattctctactactgacttaatctatgtaaacgacaaagagtaaatagatctgcacataccttgcatgtggcaatagtggcgctgcagctttagtctacctctatattttaaatattagatatcactcttgtatgaggccttaatatatttgtgtttcggtgcctctttaaaggttgtgtgtttctctagaatatggctgtatcttaaaatattttctcagtatc

SEQ ID NO: 59368 - DNA, 1111 bp, Homo sapiens
gccctggcatttgataatgccatgtgctttatgtgatggctttatgttactattataattatactaacaactaccaactattaagcatttctcatatactattaatattattttaacataacccccaaaataacatagggagataggtcatcttatcctcattttatagatgcacaagtagacttttagaagcaaagtaacttaccttaatttataccatgaccaaggaactgatttgtaatcagagctcaggttctgagtccaaagagtcactgctttcatactaattttatgcaagcctgcattcgttgatgaaaatgatcagagaactatacttatttaggtaattatacagctcagaaattaattattgctgatgggttttctggaaatttaatatgtttaatgatgaagtaaaaacaatatagttttcaaaataattcacttacacctctgaaagttctatttaacgtttcttttaccttttgagacttcatcatattttattggggtaaatgtgtcaaattctgaaataaataaaatatttttgacctcctttgaaatttggaagacaactagatataatttaggcatactccacccttaccccaagctcagagcccagtgtggctaccgcagttctatccaaaggacagattggtgacctacctaacacagaagataacgttcattaagtccttaataaattattgctgaataaaaaatatggcgttatattcctaaattttgtctcttatagagagcaagagatgttcttcattttcatttatttawtttttttgagacagagtctcagactgtcacccaggctggaatgcagtgccgcgatctcggctcactgcaaccttcacctcccaggttcaagcgattcttctgcctcagcctctgggatagctgggattacaggcatgcgccaacacacccttcttatttttgtatttttagtagagatggggtttcaccatgttggtcaggctggtctcaaactcctgacctcagatgatccaccgccttggcctcccaaagtgctgggattacaggtgtgagccactgcacctggccaagaggtgttctttaaaaagctagctca

SEQ ID NO: 59369 - DNA, 643 bp, Homo sapiens
agccctgcaaacataccttctattgtgagaatcattatgcttttagtgtttgctttaaggaatatgctctggtatcactataattggtaaatkatgtttaatcaattttcatacagttgagctctgcaggtaataacccaaagaaagacggtctccagggatgataaaaattatctcttaactcatgaatattccatttgctcattttctacagatagattacttcatttgaaagtaatagaaaaacacagaacggcatgcatgctgcaaacagtgcttagtgtaaatgtttcataatgaaaccagcgtcttggcataactgtttatatgcaatgcactgagcctttccagctcacacttgagggaggttatatacacatctatttatcctcttatatagaatagaagtatagcatatattctaagtttggaaatgttggagccatctactctaattttgataaatatatcttatcttcacagcaaaaaaagtctgaatataatcagccattattttccctttaacaaaagggatttttctgctgagttaaatctgatcctatagactgagtttcctataggtgataaaactaaataaaatagttttaaacatagttataatactaaggaaagtctattttat

SEQ ID NO: 59370 - DNA, 1847 bp, Homo sapiens
gccacacaagcatcccaccaggtagattttctggccatctcaaagcacacaatgttcatgtctcctccaatcacttttccctcacctcctatttcatgtacagcagagcttgctttctcatcgtcttgcacccttcattcatatttgttattacccacatgtctttaccctaataggcagggctytcaaaatgagttttgaaggaattaatgtaagcttattaaaagcaggaatgtatgtttatcatctgatcagtacatgataagtatttatatcaatgaatgagtgaatggatatttattaggtatttgaaacttaccattcactgcactagtattaggaggtggaaatataaaagtaaacaagacatgatccagtttctgcagaaactcacgatctaacagtattttagcatttctctaacacttactgtattctattttacattggaattatttatgcacacatcttatcttttcttgggatttatagaacttaactgtgtatacttcttgctacctggtgctggttcaattactgttaaatgcttaataacatttagctttgtaaagtcttgtcttctttagtacaactaagccttataaagtaaaaaagaaaaaagagatgcatttattagaagacttcacaatggtacaaacattagtggaaataaataccaatttacaagctaactgtaatttataattttgatgagtgtcattgtgatgtatcaggatcctgatttattacttatcatatctgaatacatgtaatgatgaactgtgttttaaatagtgtctcactataattatgcattcttaacatgtacctttctggtttcatttgcttatatatagctttaccaggcagaaacatcactgtttaattggatgctgtgcagctatttatgcaggaactgtataacacacttgagggagtctgagttgttttcaccttcaccatcctttgaattggctaggaaaaaagggcattactaagtcaggtcactaacatcatataaatacagttcatttagttcttgtttgatttgttttaaattcaggatcaggacctcacatttagccttaaaaatagtaacatttgatttagctctttatttcagcctactgagatttttaaaaattatttctgtcttcttatatatttgctttttctcccacagtcacgtcttatataaatgtatctgaaatctgtctacttatctccatttgttttgtaccatatcaccatcctctttctcctggactgctgcaggaaagagccttccagacgccctctctgcttcctctcttgttcaagcctcagcctcttctctatgctggcatctttcaatcattttcaattcatcaatcactttcaattgaactcattactgtggcttccagaatcctgtactcccttcctatgcttgagccttcactctcctgccttctctccatctccaaactccagccacattgatctttactcagttctttgaacatgacaaatttccttaccctaaaattctgcttggaacaatgttcccatgactgactcctcatatttcaggtttcagcttaaataccatttctttagtatagccatccctggtcacctccatctaaagtacgtaggcccaaagtcctcatctcttagagaaatacatgaaagttttgacagaaaaaaaatgatagatatattgaagctgctttcaaataacccagaaaaatagagcgatagatgaaatgagactgaaaaaatattgaagcttggggcttactattctactgtttacattcatatataattaaagttttccacaatacattttaaaaatatagatg

SEQ ID NO: 59371 - DNA, 1847 bp, Homo sapiens
gccacacaagcatcccaccaggtagattttctggccatctcaaagcacacaatgttcatgtctcctccaatcacttttccctcacctcctatttcatgtacagcagagcttgctttctcatcgtcttgcacccttcattcatatttgttattacccacatgtctttaccctaataggcagggctctcaaaatgagttttgaaggaattaatgtaagcttattaaaagcaggaatgtatgtttatcatctgatcagtacatgataagtatttatatcaatgaatgagtgaatggayatttattaggtatttgaaacttaccattcactgcactagtattaggaggtggaaatataaaagtaaacaagacatgatccagtttctgcagaaactcacgatctaacagtattttagcatttctctaacacttactgtattctattttacattggaattatttatgcacacatcttatcttttcttgggatttatagaacttaactgtgtatacttcttgctacctggtgctggttcaattactgttaaatgcttaataacatttagctttgtaaagtcttgtcttctttagtacaactaagccttataaagtaaaaaagaaaaaagagatgcatttattagaagacttcacaatggtacaaacattagtggaaataaataccaatttacaagctaactgtaatttataattttgatgagtgtcattgtgatgtatcaggatcctgatttattacttatcatatctgaatacatgtaatgatgaactgtgttttaaatagtgtctcactataattatgcattcttaacatgtacctttctggtttcatttgcttatatatagctttaccaggcagaaacatcactgtttaattggatgctgtgcagctatttatgcaggaactgtataacacacttgagggagtctgagttgttttcaccttcaccatcctttgaattggctaggaaaaaagggcattactaagtcaggtcactaacatcatataaatacagttcatttagttcttgtttgatttgttttaaattcaggatcaggacctcacatttagccttaaaaatagtaacatttgatttagctctttatttcagcctactgagatttttaaaaattatttctgtcttcttatatatttgctttttctcccacagtcacgtcttatataaatgtatctgaaatctgtctacttatctccatttgttttgtaccatatcaccatcctctttctcctggactgctgcaggaaagagccttccagacgccctctctgcttcctctcttgttcaagcctcagcctcttctctatgctggcatctttcaatcattttcaattcatcaatcactttcaattgaactcattactgtggcttccagaatcctgtactcccttcctatgcttgagccttcactctcctgccttctctccatctccaaactccagccacattgatctttactcagttctttgaacatgacaaatttccttaccctaaaattctgcttggaacaatgttcccatgactgactcctcatatttcaggtttcagcttaaataccatttctttagtatagccatccctggtcacctccatctaaagtacgtaggcccaaagtcctcatctcttagagaaatacatgaaagttttgacagaaaaaaaatgatagatatattgaagctgctttcaaataacccagaaaaatagagcgatagatgaaatgagactgaaaaaatattgaagcttggggcttactattctactgtttacattcatatataattaaagttttccacaatacattttaaaaatatagatg

SEQ ID NO: 59372 - DNA, 951 bp, Homo sapiens
cattaatcctaaaagtgtgtatgtgtattttgaattagtcttttcgttttctactaagacagcatttagaatagccatttttatttcttgtatacctaagactgactcctccttttccttcaagattttatttagtccctctgatttattgcctttccctcttttcctgtggtgttacccatttataatgccttctctttgatcactttgaaatccaccatatgttttcctgtttgccatctcccgacttccccatggcattaactgcagtgagtggtggactccttgtcgggacccatgaaggatctttgttycttcagctggacagcaacaactcctccagcctgggtctccaggatcctctccagaactgctttcagtatctctttctctcccagttatcaaatgacagacaaagtaatcattttacatttactccatacatggatatatctcttacagtgaatttcagcaccattttaggaaacactgtccttgtacagccaccctgtagtgggaattttatcagaaattattgtatttctcatgtaataaaattgatgatatttgacgtgttcaaagttagttctttgattattcagagttagtggagcaaaagtctattgccttcatttatttaacaaacatttatcaaaagcctactaagagacatacagagatttgtgaatgaataccccagggaggctaattatttgttaacgtttcttattagggccaaggtttctaattatttgtatagctttttcattatgttcaaaaataagagatttattacccacactaaacattatataacattataacttaatcataattgccttattattgcaatattctgagccagataacttccgaggaggtatattagagggttttaaatttcaatgttaacataaatcactggttcttggtaaacagcagttatgccat

SEQ ID NO: 59373 - DNA, 1000 bp, Homo sapiens
taatcggcactctgttaggcaattcacacatattctcttatacaatcctcaaataagaaaaatattactttcaatttaaagactcaaaggttacataatgyggacaagatagcatagctaacaatgaaaccaagttttcaaatcccaatctctatgacgctaagaaaatttgcacaaaatatgaaccagacaaaattatgagtgaaaaataccaataggtatgtttaagggaaaaatagacattttacatttgtccagtcgcagttcaatttgatacataagtgtgtgtgtaggtatgtgggtgtgtgaatgagtgtgggagaattggagaattggggagatgtatgtatatagatgtgtgtatctctatgttttttatatatatgtgcatatatagatcttatatttttataacctatttataatacatagatacaattatagattttaatattatagatttgtgttagagaaaatttcttttctttcttttttttttttttgagatggagtgtcgctctgtcgcccaggctggactgcagtggcgccttctcggctcactgcaagctctgcctcctgggttcatgccattctcctgcctcagcctcccgagtagctgggactacaggcacctgcctccatgcctggttaattttttgtatttttagtagagatggggtttcaccatgttcgccaggatggtctcgatcttggtctcgatctcctgaccttgtgatccgcccacctcggcctcccaaagtgctgggattacaagcatgagccaccgcgcctggccgagaaaatttcattgtaagtattctaaattcctcagacaactctggacaaatgctttactttttaatttttaaatttttatttctttttaattggaagttctgggatacatgtgcaagatgtgcaggtttgttacacaggtgaacacatgccatggtgatttgttgcccctatcaacccatcacctagatggtaagcccagcaa

SEQ ID NO: 59374 - DNA, 1000 bp, Homo sapiens
taatcggcactctgttaggcaattcacacatattctcttatacaatcctcaaataagaaaaatattactttcaatttaaagactcaaaggttacataatgtggacaagatagcatagctaacaatgaaaccaagttttcaaatcccaatctctatgacgctaagaaaatttgcacaaaatatgaaccagacaaaattatgagtgaaaaataccaataggtatgtttaagggaaaaatagacattttacatttgtccagtcgcagttcaatttgatacataagtgtgtgtgtaggtatgtgggtgtgtgaatgagtgtgggagaattggagaattggggagatgtatgtatatagatgtgtgtatctctatgttttttatatatatgtgcatatatagatcttatatttttataacctatttataatacatagatacaattatagattttaatattatagatttgtgttagagaaaatttcttttctttcttttttttttttttgagatggagtgtcgctctgtcgcccaggctggactgcagtggcgccttctcggctcactgcaagctctgcctcctgggttcatgccattctcctgcctcagcctcccgagtagctgggactacaggcacctgcctccatgcctggttaattttttgtatttttagtagagatggggtttcaccatgttcgccaggatggtctcgatcttggtctcgatctcctgaccttgtgatccgcccacctcggcctcccaaagtgctgggattacaagcatgagccaccgcgcctggccgagaaaatttcattgtaagtattctaaattcctcagacaactctggacaaatgctttactttttaatttttaaatttttatttcwttttaattggaagttctgggatacatgtgcaagatgtgcaggtttgttacacaggtgaacacatgccatggtgatttgttgcccctatcaacccatcacctagatggtaagcccagcaa

SEQ ID NO: 59375 - DNA, 837 bp, Homo sapiens
attcatttaatagtatttaatttcaactatttttccacacatggggccaagagctgttaagacatgatgtttgagatctgagatgtaaaaaactgcattggtgttaattaagctagagctgtggtcckagctgctcagtgcattggtcccaggagaatggggcggggcgggacggggcggggaggggggtggggtgggcggggtaagaaaggattaaggaagtgacctaagataagaggggagggacttcccaaatatacttcttctagggagacaaatatagctctggctaacccatagcctattaactcatcacttgggttaacaggagaaagaataaaaaacagtaagtgtggggttagatgtatactagaaggaatacagggaaaatccaaggtgggaacagggagagtaggcagaacactttgctacactgaaaaacaaagtcaaacaggttaaaacaagatatggcacttgacgtgactggtcttcaaagatgatgccactcagtattagttactatactattgatggatatgcaaactggtacatttattttgacatagtggtttcacaatcaggaatttattgtctagaattacttgcatgatatacagagagaagaacagatgagaccacctgttattcgtttcacctggacttaaataatagagttaagacacttcgagatgaggagtttcttctggagattgaagattgtgctggaagttgtcactgtagctgggttagtattgttagctctttttaagggtctgtaaaaattctacaagattcccagcgatctttttaagattctataaaaattcccagtctttt
